United States Patent Application Publication US 2006/0134663 A1 - sequence listing, part 137

SEQ ID NO: 459775 - DNA, 438 bp, Homo Sapiens
  misc_feature (375)..(375): n is a, c, g, or t
  misc_feature (390)..(390): n is a, c, g, or t
  misc_feature (427)..(427): n is a, c, g, or t
gtacattttaaaataacaaacacccacatttgtgtttgaacccagataatactaatttttctccactgagagacccaaggtgccttccctgagctgcacagatacctccttgggaggtacgttaggggcccagcagatcccatctcagaatctcaccctaccttggtgtgtccagactgtcggggagaatatggagtgagaggtgaggcccagccagatctgaagcctcacccccacccatcatctatcctcctgggatctttcccctgcttctggtttaattagttgttggattgatctgctgaacccagaggggttcttaggagcagttgctttatttcatcttcagctagcagaagttttgaagggatattngggtcggggtgaagntctgagctaccacagtacaaaaagtcggtttcccttncccttaagaag

SEQ ID NO: 459776 - DNA, 255 bp, Homo Sapiens
  misc_feature (20)..(20): n is a, c, g, or t
  misc_feature (54)..(54): n is a, c, g, or t
  misc_feature (183)..(183): n is a, c, g, or t
caaggagactgaccaaaatnatattaaaaggtttaaataaaacaagtggatccntgttataacatgaggaagagagctgccccactagatgtctgacattagataactcagagtcccgcctctccaacaagtctcccttactagagaaacggacagattctgttttgtgggatgggataaggngacaatctgaagtagagtttgacacaatattattctgcccatatgaaattctggtagccagggtgccaggtg

SEQ ID NO: 459777 - DNA, 540 bp, Homo Sapiens
  misc_feature (426)..(426): n is a, c, g, or t
  misc_feature (458)..(458): n is a, c, g, or t
  misc_feature (507)..(507): n is a, c, g, or t
  misc_feature (512)..(512): n is a, c, g, or t
  misc_feature (519)..(519): n is a, c, g, or t
tttttttgtgtgattcagtggtttttagtaggttcacagacatgcaaccatcaccccaattttaggacattttcatcctttataaagaaactcgcagcctttggttatcactcccttatcctcccgaaacccagccctagacaaccagcaatctcctttctgcctctacagatctcctgctctggacatctggtgtgaatggaatcacaccgtgtgtgggtcctttgtgtctggtttctttcacttactatgttctcaagtttcctccgcatcgtggtgcatatcatacttcactcctctgtacggcccaaggttacgctgttgtaaggatggggccacgttttgtttatccattcaacccttgatgggcgtttgggtttgttttccactttttgggctattacggaactgtgccgcgatgagggnttcaaagttcaaaatttttggggtggatcaanacatttgcaggttctttgggggggtacacataggaaagtggggaaaagnacagnggtcctnggggaccagacagccgggggg

SEQ ID NO: 459778 - DNA, 463 bp, Homo Sapiens
agcatcctattaatttaatagctttggttttgaatttacaatgctgataactgcatttattgaacattcactaaatccaagatacaacactaaacagttctcatgtttcacaagttttgttttcattcagtttttacaagaatcctataaatcctcattaatctcattttacagatgagacaaaaagcaagctctgaaagtttcagcaaattgcgcaagtcctgtcacatctagaaggtgggattttacctaggacagagtgactctacatcttcaccacattatagtgaaaagggaaaagccagaggcatttggccctatcatttttatctctaaaaaactgctggttcctgctctgaaacagttcctccacgtgaaataaataagcagctaggttttctttttatcagcttcagctcatttggtccaggtgtgagggtattaagggataagtctaaataca

SEQ ID NO: 459779 - DNA, 412 bp, Homo Sapiens
tctctttgatttttttcgtttgtttaatgatccgaatgcttgagcaagaaaccctggcctcgcctgcctcagccttttctctttgatccctgagttgctgagattaaagatgaggtcccaaatgagagctaccaagatgtagtcgagcggctccagcccctgggttcccacagagagggtctggggagatccaggggaggggctggcttggggcctggactcaggatccaggggagggccagtgcggggcctggactcagtgaggcctccgtctcgtactgtgtcgggctcagggcagtgagccttctcctgctgggggcttcatgcagagagttgtgccagggggacccagggggctctttgagggctggcagccagtcctggggcagcctcatctgcagctgaccctgct

SEQ ID NO: 459780 - DNA, 501 bp, Homo Sapiens
  misc_feature (355)..(355): n is a, c, g, or t
  misc_feature (490)..(490): n is a, c, g, or t
tttttgttccttcttaaattctgattttttcttctgactttgtgagatgtgtccatagtcttccaacaaattcttgggttttatctagactagtcagaattgctttccactgccccaaaccaaaagaatttaatgaatgctcttacaattgagatgacttgaagttaaagaaaggtaccttccttggaggttgcatgacaggattagtcttctctgtttcttggtgcaagtttgaaccagtgattatgtaccattgcatcagagcatctgtttccctgtcagatccccactagacagtaagctccatgaatcctatgcacctaggccttgaacttagtagatgtaccaatattgntgaatgaaacaatgaagtagacatagacaccttgtcatatataccatggtacatttggcaaaatcggctaagctcactttgtaatgctacagtataactactaatactcttttcttttttatctattttagggcnttccatttata

SEQ ID NO: 459781 - DNA, 287 bp, Homo Sapiens
cccctaatctgtggttagaactctcagaaacttttagaagatccctcctatgttttggaggtttgcagatttgaaccccagttcctcccacagtgcttctccaacccctggaatgaggtaaacctccaggcagcctgttgacccaacccatgcatgcgggtctttgggactcctagatgtggaccctggagtgaatagggatcagggtgggaaatgagttcctttgatcaagatccttgtaccagtgaactgaccccactccccgtctggattcctgtggtgattac

SEQ ID NO: 459782 - DNA, 590 bp, Homo Sapiens
  misc_feature (31)..(31): n is a, c, g, or t
  misc_feature (38)..(38): n is a, c, g, or t
  misc_feature (89)..(89): n is a, c, g, or t
  misc_feature (132)..(132): n is a, c, g, or t
accccacttttaggtaaccccctgcttccanaacctgnctggtgccagaaagccacaggtgagccccccagtggcccctgtattacccnccccaggagagacaacctctccccctcccatgaaactcatttnctgggaccccacaccctaaactttaacacacatcagaaaagttgagactcccttaaaaatgcggttttgcaagctcacagggttcttggttcataagtgatactatggaacaatctggttgggaagggtggcacacaatagaaaaagttaatgattatctggtgtagtttgctttagtctgtgagttcaaaagtctcctcatttacaataaccttaaaggataacaaaataaagtcctagaagaaatgtaaatttaattatttccattttctcaaaatattaattgctgatacaattaaatggattggcctaaactgctccaaagcttttcctatctgctaattaaatttgccctcgctgccataatacaaattctgggaaaccttctggcttctgggcacactatgtaggatgagagaatcaaatccattcagtcctaatctactgccccacttaat

SEQ ID NO: 459783 - DNA, 469 bp, Homo Sapiens
  misc_feature (451)..(451): n is a, c, g, or t
ttcgtgtttttccccctgtaaattattttgcttttgaccaggttgtgctagaaagtagggctgcttctgtgagttctcagcctaggctgtggccactaagacgtgggtggggggatagacaggagtgagagggagagtgggtgacactttccgtgacacttaatgtaggaagacatgggcttctctctcttggcctcaagccacttttctggtccaaagaatattgggaaaactggattactttcagtatatttcttgagaccgggtcatctctgaaatgcatttggggtagtttcctgggggtccaagggccaattcctatacccagtcctggcagtgtctgtgagctgtgggaatgagagagaaaaccatgggcttgcttcagggaagggaagttggagaatcttttcaggcacacgtagatcccaaatctgtgggcacctgctaaagnttagggttttggagagga

SEQ ID NO: 459784 - DNA, 464 bp, Homo Sapiens
  misc_feature (141)..(141): n is a, c, g, or t
  misc_feature (152)..(152): n is a, c, g, or t
ctcagagctgttttgctttatttgcagacactgttgcttttcatctttcccatgtacaaagctgaacaattaataaaaaggcacctggagacagcaaagacgcattcatttcatgtgacatagtttaaaaaaagataaaangattttaaaantactctggttaacaatgcacgcttcctacgtaacaagcaattctggagacgccgtcccgtgtcctcgtgtcccgcggagttgaccgtgtgctgtgttcggggaaggagagggccagcgtggtggcttccagccctaagaggcttccctctccctcgctgtcaggtgagaaggaagggggaaagacaggcagaaaagcctgaggaccgcaccactgcagtgacacagacagtgacggctgagccacaccttagcatccctgcctggccgtcaggaacctgaaagccgactccttgactagacactgccaagtg

SEQ ID NO: 459785 - DNA, 417 bp, Homo Sapiens
  misc_feature (112)..(137): n is a, c, g, or t
  misc_feature (311)..(311): n is a, c, g, or t
ctttatttgcagacactgttgcttttcatctttcccatgtacaaagctgaacaattaataaaaaggcacctggagacagcaaagacgcattcatttcatgtgacatagtttnnnnnnnnnnnnnnnnnnnnnnnnnntactctggttaacaatgcacgcttcctacgtaacaagcaattctggagacgccgtcccgtgtcctcgtgtcccgcggagttgaccgtgtgctgtgttcggggaaggagagggccagcgtggtggcttccagccctaagaggcttccctctccctcgctgttcaggtgagaaggnaagggggaaagacaggcagaaaagcctgagggaccgcaccatttgcagttgacacagacagtgacggctgagccacaccttaggcatccctgcctgggccgtcagg

SEQ ID NO: 459786 - DNA, 435 bp, Homo Sapiens
  misc_feature (156)..(156): n is a, c, g, or t
caacaaaaagggcttggcaagtcaacctccgccttttttggaaccccaaactgttgtgcctgccccaagttttccgaagcccaacatctttgtcccccactccctctttcctgttcaactttccccacactgttaagccctgaaggtcttttggtnatatgatacagcaggaggaatggatggaccagcatgatcactgaaacgccgctgcttctgatttgctgagatacttctctggaccttcaggtgagcaggggactgaagagtgctgttgtttaagtcactactgggccgggacctctgacacaagtttccactggataacgattcaccaccttcaaattcaggtggttttctacctagaagaatataagtagccataacttcatcatacttctgatttattaaggcatcatttatttcatctcgtgcagt

SEQ ID NO: 459787 - DNA, 488 bp, Homo Sapiens
gcaggtgcagcggaagccagggtgggcggcgctgcagacgcccccgtgtaggcagggccgcgagaggcaggggtctgcctcatgttggcagtgggctcctgtgtagccgggacggcacaggcagctgaacgagttcacgccgtccacacaggtcccgccattgaagcaggagctggggctgcagtcgggcaggtcctgttcgcagtggaagcctccgtagcccggcgggcaggtgcaggtgaaggaggccacgtggtcggtacaggtgcccgggccgcaggggttgctcaggcactcatccacatcgcgggcgcatcgtgggccggcgaaaccagggaggcaggagcaggaaaaggagcccacgccgtcttggcacgagccaccgttcaggcatgggtcttgccagccctgggggcaggagcagacaggcagctggccaggggcagactcgcagcggcccccattctcacaggggttcgcctcgtgcc

SEQ ID NO: 459788 - DNA, 461 bp, Homo Sapiens
  misc_feature (18)..(18): n is a, c, g, or t
aggggttgcaaccggctnaacttaaatgtactggttccctgccccaggtggggggtttcccgtgaaactgtaaatgccagggcccggccatcgtctccctcaaaaaacgaatgaccctggttgattccgctgctcaacccagggaccctgggaggtaaagcgtcttctggggtccaatgttccagtaacgtccaaggttctggccattgatgaatacaacccccttctcccagccctccagcttcagaaaggtgtcacaaggggtggagctgatggacaagctacccaagaagaaagcaggtaatgtgggtgtttctgggagggaactccatttgtccaggccgaacctctgaaagaagctcttcttcatatccaggctatagattctgaagtttttcaggggtgaatcattcagatagagatttccaattaagcctttgcgctggtcatcaatattctcc

SEQ ID NO: 459789 - DNA, 617 bp, Homo Sapiens
  misc_feature (542)..(542): n is a, c, g, or t
ttgttataacagtgtaattttagagcttccacaggtttctgttaatgatgtagtaatctgaagggaacctttagcaaagaaggtaacacatctgcttgacaagcaattcacaaaggatctgacagagggagctcaataccttcaaaataactccttcccacagtcagagaagtgttgaaatatttctcttgctattaaatttctaagttgcttccttacagtgtctatgaaagtggtttttcacgcacctgaaggatataacatattcctattattaacagtgccttactccagcagtcattttcattgggagttaggtagaaggaaatgatgaggcatagtagagtctatgattggcaatgtctcccatcccttgttttgacatgcctttatgtgaggtgtcctttcttacctccaacattttattttttgtttatagtgttgttattgcaggtgcttaagtcctgatctttttatttgcttaaaaggcaatcctcatggcttccaagtatttccttctctggaccagaaagcacccgganccaatgagaggagaattgttaccttttacctttctagagtcctttcatgtcacataactttggttcttacttaaa

SEQ ID NO: 459790 - DNA, 307 bp, Homo Sapiens
  misc_feature (203)..(218): n is a, c, g, or t
  misc_feature (251)..(251): n is a, c, g, or t
  misc_feature (295)..(295): n is a, c, g, or t
gattatggagctagatttttaaaaacactgtaaaatactaaatgattccttctgttgtaagttgatatatatttgtaacctttgtgaaattgtattcatatgaaaatgtcagctcaaattcttgggagaacattaaattatgtaatatttaattaaaattttgaattcatgccttctccctcccaaccccacccagttaaacnnnnnnnnnnnnnnnngtaatggatatgggacaagtttcatcatgggtnaaatatatggagcacattgattttcttgctataatctgaatatnagatgaagtcct

SEQ ID NO: 459791 - DNA, 402 bp, Homo Sapiens
gttccaagacacaaataggttggaaagaaagtacagatcatcctcatccttggatggattccagccctaccaatttgaaagtgacgttgtcccatctggagtatctttcttgctatccagttcctacatcccatcctccttgcatttttttatatccaaaaatgctatttaaaagaagaaatgtaaggaaatagggaaagatgggagaaaatgcctaactccttattttttatctttattttatgacccagtaaatataccacctttgcaaatgatattttcccagtattagatgacaccctacaaaacctgacagtggctatcatctcttagctgcaaagttaacattttcactttccctactgaaggaacatatagattggagcatgccttgtatttctc

SEQ ID NO: 459792 - DNA, 464 bp, Homo Sapiens
atgcatctactgaactttatttttagagtcacttttaccaaggctctattaagtacttttttaaaattctaaatctttctcccctggctttcacagaaaggattcacagtggagaggtgaaagcattacacagcaaaaaaatcagcaagctatgttaaagccaaaagctaaattttcccccaccacacacatgaaatttccagatatagaattttaaaactgattaatttaacatttggaatataataaagattaaatgttttaagttttgtaaatacttcaattaacttcatcataacagtaactgacaaatgggagggcaatattcaagggataaaatatttggcaagggaaacaaacaccatttcagtggcctaatgacagaaaaggaacactgtggtctagatggatttgttttgatcaaagacaatagggacatacatatacatcccaatttcccctga

SEQ ID NO: 459793 - DNA, 608 bp, Homo Sapiens
  misc_feature (510)..(510): n is a, c, g, or t
  misc_feature (552)..(552): n is a, c, g, or t
  misc_feature (592)..(592): n is a, c, g, or t
ccttccatgagagggaaaaatagtccctttgtatgtcttaattatgtagaaaatagtcatgtctttttaaataaaatgaaataatttatcttgctttctggaaaaaatatgaaacaggtaattctgtatgtttcaatatatctcatcaattgcatatatttaatttattgctaattagtacttggtccctcagtattccccattgtcattgacatatacaacatattagcttgaacattgagctatgaggtcaggagcttttgtgggccaggtagtttgttcttagtctctagctccagcccactgcctttcacgttcacactgagagtggggagatcatcactaccccaaaaggaaggttcaaataaataaggttaaacaaaggagagccactgtctcgtcatcactatggaccttgggatgccacatctgcacaaacaaaggcaatttaaaatttttaaatgtggactgttttccctggaaggtaaaactgggctagggcaaattccngtaaattcttattggacttacttaggctacagttggtgtccncttatatttgtggaaatctggaacacaggtaaatgtgganttcaggatcgttggtt

SEQ ID NO: 459794 - DNA, 432 bp, Homo Sapiens
  misc_feature (17)..(17): n is a, c, g, or t
  misc_feature (23)..(23): n is a, c, g, or t
  misc_feature (120)..(120): n is a, c, g, or t
ggaatagtgggtgacanaaatancctaaagtgtattatggggtaataaaattcctgtaaatcccctttttaataatccactgcaaaatgaagtaaagtttatttagccataaaagcagtnggaaataaatgttatgtttaaggaatgagaagacacctcaaagtaggtagcccttttgaatgaaaatgaatgaataaactaattccttaataagggaaattataaatgttctttgatttgcaagtaacttctagaaaattgtccaaccctttgttcacagtataattaaaaataagaaattataaatattctttgatttgcaagtaacttctagaaaattgtccaaccctttgttcacagtataattaaaaataagaaagtattaggttctttttctgactttcctccaaactgaaagttaaatgtctctaa

SEQ ID NO: 459795 - DNA, 483 bp, Homo Sapiens
gaacacccaggttatgaaaaaagactactgtaacacgtccacccaggttccaaaaagataactgtcctgccttccagggaatagtccaagacatccaaggtaaggaaacaggactattgaacaggactattgtaacagtatgaacaagataaggcctgaagatattcctactttaagttagtatggaagccttgtcctttgcctctttctgatgctctcaaactgcatcttttatttcatgttgcccagtaaaagtatacaaattcccgcactagcagaagagaattctgtatcagtgtaactgccagttcagttaatcaaatgtcatttgttcaattgttaatgtcactttaaattaaaagtggtttattacttgtttaatgacataactacacagttaaaaaaaatttttttacagtaatgatagcctccaaggcagaaacacttttcagtgttaagtttttgtttacttgttcacaagcc

SEQ ID NO: 459796 - DNA, 488 bp, Homo Sapiens
  misc_feature (472)..(472): n is a, c, g, or t
ccacaaagtaaaaatgttttaatggtgtaaaataaggatagcctctgggaggcattgtttgcataattttctgttatcaaaaggagcaattgtatcagttattgcttgcataaaagacgaatgaagttctagcagatcataaaaagaccctctctatcaacatactatgagtctgagctggttgagaacccaatctaactaactttgcaataaactaacacatgatttttgggtgggatgcagttcccattccaaatacatttatctttctttgtatttatgagtgtgatagtaatcgatagatctttttcaacaaaaagccacctggatatctacattttcataattcctaagcaagaatcttaggggaacacctctggttaaaatatatggaaaattgggtcctggggggatctgtcataggcttaactccttatcttaaccctatttcccttatctcttttgaaaaggngcagagcgtggtaatt

SEQ ID NO: 459797 - DNA, 539 bp, Homo Sapiens
gaggttgataatagtatctttattttagctagtaggaaattgaggctcagagagaccatgttcaaacagataggagagaagtaggactcacatccatctctatttgatttaaaactcatgcaactaagtagacaatatttcttatgcaatgatatatccatttaccctacaatcctgttatttctattatggatatgcatggcccatgaaaaaaatttctttcttattataatttgcttcattgaaatgtatggtactgaacatcacattcaatttgggcatgtcaggtcaaggaaataataatataacctctgatcctttctccatacagtaggaagtatagtctattatctttctggaccgctgtattaactaatactgaaaactaagacttttactgcttccactacacttatattgtccaaggaaattgatacttgccaaaatgtagttttgagagcaccaaaattttctagctactcatataatatgagctcatatttaattttccatgactctgccaatagttctttcatttc

SEQ ID NO: 459798 - DNA, 452 bp, Homo Sapiens
gatgatttggatattattattacaaaggaatttaaatatacaagtttggctatgaaagacccagctaagccacttaggcaaaagtctatctttgatgtcatagtttccaagaagtatcataagagtcaaacagttaaacatttctctgtgcttttttttctattttctagaaatgttgtagagagaagctcatcaacttacttatacaaatcagatatactgaggaggggagataaactgacatttccatattttataatataatgtggaaagattcagaaatgactgagaagatacagtgatatgatatttaaagcaaatattggcatatcttatacaagaaaggcatcttacaataatatttctgttggtacattacaatttttcagctagtaattctaaaatgccagaggtcctatgatgcaatatcaaaaaaaccagggaactgacat

SEQ ID NO: 459799 - DNA, 394 bp, Homo Sapiens
  misc_feature (374)..(374): n is a, c, g, or t
cgaaatgactggcatttgcagtgctattcatttgtaaaattccttctaggatcagatgtgctagcataacacatgaattgataagtagttatgtgtacatgctgcaagagttgttctgttttctagtaaaagactcttttctcatccttagatctgttcgcagttgagtaccaggctggagaaacagcaagcagccagcaaggaggagctggaagtggtaaaggtaaggagtgaaatcgtgctgtgataaaatttatttcaaagtcacacaggcttgtaagtacctgaaagaaccccaaacaccaccattttgtatttaaagggtttattaatagggaattatgggagactagggatacctctcttcttgaccngggtgttgattgtcttccct

SEQ ID NO: 459800 - DNA, 169 bp, Homo Sapiens
  misc_feature (151)..(151): n is a, c, g, or t
aaagcattttaggaagtcctctaattatatagtaaaaattgtcagcaatggcctgctagttttctatttgacctaatcacaaccatcctcgttaggtcctgaggtctgctctgctgcttggccaaaaccaaatggtgccaggtcacaaagnacttgcacatgtgaatcc

SEQ ID NO: 459801 - DNA, 297 bp, Homo Sapiens
  misc_feature (58)..(58): n is a, c, g, or t
  misc_feature (69)..(69): n is a, c, g, or t
  misc_feature (111)..(111): n is a, c, g, or t
  misc_feature (224)..(224): n is a, c, g, or t
caaaacattgcagatagcgtgaaattaaagattacagagatataacttaatgcaaganctctgactggntcctagactgcaggaaaaagtctgctataaagaacatttggntcacttgtagtagctgggaaataaaacaaaacattatttgtaaaaggggggaaatctgaacatggggtcttgcagtatttatgacagtttttgcggggcagagatttctaggnttgacagctgttttagtactttcaaggtgatgctctgtccgccgggttgcatgtttccgtccgagttaagaga

SEQ ID NO: 459802 - DNA, 450 bp, Homo Sapiens
  misc_feature (25)..(25): n is a, c, g, or t
  misc_feature (70)..(70): n is a, c, g, or t
caatttactgacaactaaaataccncccaaaggcaatcaagttcaagctcttttcatgacaagtcttttnctctcgtacccattagataaatttagaatctgaattctggtttgactaatataattagttatgtgacgttaggcaagtgattcagcctttcttggcttcaacttcctcatttgtaagacgaggataaaatcagattacaacaacatattaaagtgttcgtgaacacggcatagtctgacaccactgtaaacagtcatcgcataagcaatcctcctttgcttttcttacctactaaaagaactgcaccataaaaatgaccaacagtgaaacaagtacataggaagcagaggtccaagtaacaggcaacttaaaaacgaaacaatactcttagcagcaatgcacatgtcttcatgaaaggttttagaatgaatatggttttc

SEQ ID NO: 459803 - DNA, 531 bp, Homo Sapiens
  misc_feature (47)..(47): n is a, c, g, or t
  misc_feature (54)..(54): n is a, c, g, or t
  misc_feature (65)..(65): n is a, c, g, or t
  misc_feature (74)..(74): n is a, c, g, or t
  misc_feature (138)..(138): n is a, c, g, or t
  misc_feature (396)..(396): n is a, c, g, or t
  misc_feature (401)..(401): n is a, c, g, or t
tgacctggggaccacaccccctcctcctgtccatgccctccggtggncctgccntcctgccctangggggccangatctcccctccacctataaggaaaggcctatttatgggtaaataagcctccagcctacctganaagatccctgccctagtccttaagcatcctgggggtagtaacctaacacaggtgtgaaagggaaccctttccagcagaaaacaatgagcactgaggaactgaagttcacacttgacattaaaggctagattagttcacccaacccagaataaaaagattacttttactgggtgatgactgagaagctgaaaagagtggcaggtaaaaggccacagaaacagaagacaaagctaattgttacggtggagagtttgaacntcttncccttgggcaggtcaagataacatcaataacagcaatagcaataaacaaaccccaaaccataactttacaatgaacattttctttctatgtgacattgtgctggtcagtttacagatattatttctgttt

SEQ ID NO: 459804 - DNA, 440 bp, Homo Sapiens
  misc_feature (351)..(351): n is a, c, g, or t
  misc_feature (357)..(357): n is a, c, g, or t
  misc_feature (424)..(424): n is a, c, g, or t
tgatgattcaagctcattacatttttcattagattctcctaagaagcacgcaacccagatcccttgcatgcacagttcacaataaggttcgtgctcctttgagaatctaatgcctccactgatctgacagaagatggattgcttgcctgccactcacctcttgctgtgcagcctagttcctaaacccagggattggggtcccctgtcctagatgacatcttcttccaatataaggccattttgtctacacttgaaaacctgttgtctagttgtagccatctttcatcaatgatctttagctccatattctaggataacttgtgcagctttcttacatcaggcacttgctgntttcancttggcacttctatgttagggggatggggttctttcctttaaatctcatggaactgccgggggacangggggttacagggggt

SEQ ID NO: 459805 - DNA, 486 bp, Homo Sapiens
ctgtccataaatcttccaccatgtggcagcactggagttctgaacctgtgctggttcaggggcttcccaatttaagaataattcgtttctcaagtaacctacgttaaatttaatttgtctaagatttttcttctccattaaatacataatacagtataccaaacaaaacagaaaaattttttaagtgagctgaagttctagaagggaatagaaaaacattttaagttaagccaaatattgaataaaagttcataatgaaacataaaaatcattgagataaaataatggaaaatattttactggagcacccaaaactctgggtctaaaatatttttcttgcctatctatactgactgccttagggacctcatggctttagataccataaatatgctaatgacctcctcattcacatctctaggccatctttccaaaacaccagattggtgtatccaatagccaactacatgtctccattgcatgtca

SEQ ID NO: 459806 - DNA, 417 bp, Homo Sapiens
  misc_feature (327)..(327): n is a, c, g, or t
  misc_feature (335)..(335): n is a, c, g, or t
atccctggatggcccacaccctggatgggaatctccttgaaggaaaaatggcttctggcacctagggttccccactgacgatccgcctcttcctcaaccacttgccgagcccagccccaggtggcagttgcagttgaaggggttggacaggaggtttatggtggacagggagacaagcgtggtgaaggccccaggggtgatggtggtgatccgattgtcatagagggacagcagtctcaccgaactcaggccggcaaaggtgtcattactcacacagccgatcaagttactcctcagcattaaggttttgaggccactgaggccacnggaacacngcgcccgtgcactggtctccagctggttccctgtcagcatcagctccctgcacgctggctgctccattgaaagctccctctc

SEQ ID NO: 459807 - DNA, 558 bp, Homo Sapiens
  misc_feature (463)..(463): n is a, c, g, or t
  misc_feature (501)..(501): n is a, c, g, or t
actttttgaaatcacttctgatgcccaggcccaggatggcattataaggctaagaaaacctctggactttgagactaaaaaatcctatacgctaaaggtagaggcagccaatgtccatattgacccacgcttcagtggcagggggccctttaaagacacggcgacagtcaaaatcgtggttgaagatgctgatgagcctccggtcttctcttcaccgacttacctacttgaagttcatgaaaatgctgctctaaactccgtgattgggcaagtgactgctcgtgaccctgatatcacttccagtcctataaggttttccatcgaccggcacactgacctgggagaggcagttcaacattaatgcagacgatggggaagataacgctgggcaacaccactttgacagaggaattaagtgtatgggcacaacattaacaatcattggttacttgaaattaggggnaccacagttcaggttttcacggagttacctgtttgctnatttaaagtgctgggatgtccaatggacaacggcccctggaatttgggattccggat

SEQ ID NO: 459808 - DNA, 430 bp, Homo Sapiens
ttttttttctgttttcattgacccatctatgcaatatgaggcacaaaaaatgttctactaatacacacatgtaaaacgtgttgttcatcttatgtttatctaaatatatttacatatttacagatttcaatattcacttcctacaactttctataaaccactggccttcttgggtttcactattatttggtattcatatgtttgctgtgaaacaaatgtctcctctccacgaggttttaccttgcttcttgtcatttgaaagtaaaaattcagcccccgtcactctaaggacatctcctgctatcatccatatcccaaggatattttaagacagtgatttgggctctggggtttgtgggcacaggcagggttgtttccactttaggggagcccaatttgggtcataaggtaggggaggaggaaataacat

SEQ ID NO: 459809 - DNA, 432 bp, Homo Sapiens
  misc_feature (47)..(47): n is a, c, g, or t
  misc_feature (65)..(65): n is a, c, g, or t
  misc_feature (114)..(123): n is a, c, g, or t
cccatctccttcaagaggtcccctatatttcatgttttacaaaattngcctgctgcaagataaanacagactaacaaacaatggtaaaatttatcttgcattttaatagacttnnnnnnnnnnctgggggtggggagtaagaaaacagagtttaagaacaaaaagcagtattttctgaaacatcggctctatgaagggaacccattctgttcagaaccagtaccccttctccctattgtgctctgtgactgtggaggtagaaaagatgttatcagcgtggctctcaggcccttgggaaggaagatcttcccaccaaggctctgctgctgctgagtgctctgcctccccactcagccaggccctgtggtttatcgagcttacctccactcttctgccctgggaagccccatcactgaattggctggactgaat

SEQ ID NO: 459810 - DNA, 552 bp, Homo Sapiens
  misc_feature (366)..(366): n is a, c, g, or t
  misc_feature (374)..(374): n is a, c, g, or t
  misc_feature (392)..(392): n is a, c, g, or t
  misc_feature (446)..(446): n is a, c, g, or t
  misc_feature (457)..(457): n is a, c, g, or t
  misc_feature (478)..(478): n is a, c, g, or t
  misc_feature (498)..(498): n is a, c, g, or t
  misc_feature (503)..(512): n is a, c, g, or t
aaggacttaacactttatttgccaaataaaggagtctggaatcatgttttaaaagtacacagtcacctattcactttccaaaggaaatgaaaatataacatgcatccactcaaatgatctgagagatggggacatcctatagtatcattaggagaacatagtggctattttcactactaatagcattcccttcctctgctaattcccatgagtcttaaggagaaaagcagaccgagcagtcatatcagaatgaaaggccaacttgttcaacactaccaaaacaggaaaattcctaggtatattaaaaattggaaattaaatgcattcaaagtcctttaagtctcctaggttctatggctagtgggnggggcttnattcccttgcctttgggnggagggtagggttacttggattccattaaaaaaatcaggctgatcccccggggnggattttcttncacatacattttcttccctgnggggcttattttattaggtnccctnnnnnnnnnnctctttcctccatggttttcccccattctttccggggctt

SEQ ID NO: 459811 - DNA, 200 bp, Homo Sapiens
cgttagaatttttttattaagtacatcaaaatttcaccttacatttgaaattgcatagaaatttaaagtgctaaagcaatcattgttttttcaaaaaaatgaatttgaagccaaagagtggagagtgtggggatccactgggtaggacatttgagatgtatgcaatgtaggaatcttatttgaatcctgacttgaattgg

SEQ ID NO: 459812 - DNA, 367 bp, Homo Sapiens
  misc_feature (52)..(52): n is a, c, g, or t
agagcttgcagctgcctaaggtgacagtgctgcagcctagaccagaattgtnctttggggcagtaggtttccccaaatggtttttccttggcaataggactgtcccttagatgtctcttcccatttgtagatcactgccctatctcctccatatcccctcacctaaaatagaatgggtgaaactatgatgctatgcaggatactgtcatttacattaacattaaaccgtacctgtacttgatgcaaaggacatgtgctccacaatccaggcatagccactttcaggggattttccaaatcttaattaggattgaaatgcaaaatatccctctgttctagctattgtttaaccctgggtggcatgtgg

SEQ ID NO: 459813 - DNA, 437 bp, Homo Sapiens
  misc_feature (108)..(108): n is a, c, g, or t
gtggttggtggtgactgttttatttttttaaataaaaataaagatgagagaaattatttggacaagatgttggcaaatcacttttacaggtgcttgtaacctccaggngacctcagcttgactgtagaagatgcctgctgtagggcagttcacgttctggagtcgttcagcaccacctgcgaactctttgaccggaggaaggctgcctatacttcctgcttgctgggtctggaacagtcctggtttatgctgtttgtgctggcataaatagaatagcacggccttttattctcacaagtgactcagtttgacaataacttaggtcaccccttgctttggggcaggattagggtgagctttactgaatcaaaggatttcaaccaatatcatctaccctgaaaagtcttttgaagctttgggggggccataataatcca

SEQ ID NO: 459814 - DNA, 583 bp, Homo Sapiens
  misc_feature (517)..(532): n is a, c, g, or t
aagatgtggagaatgtccggttgtcattcttgccactgtattccatttgctaccgagatataacattaaggtggacacattttctaactgtattaattaaaagtcaatggatacagagagtggattttctccccaagtcccatccctgctgaagaccgcttggatgaactccccaacccactgtgcccctcccgcaacactaccagtagactttagaaccatagttaactaagtcttttacctctgagataccttaattctgggaaaattggtgacaattttcaacttctaaataggtaactcgactgcaaaataatcaaaactgataacaatgaaactgcggctcttaaacaaagccatgcatgccgtgcatttgtattgaaatgtctccatggatatgaagccaaatattcaatgtaacatacttaatatccaaaggtggaaacaaaagaatgtagagatccagtgttaagagttccatttgcttcaattaattatttaccttcctgtgggatannnnnnnnnnnnnnnnttaatagaaccatagatagactagtagaatttagattataaatgtgtgagt

SEQ ID NO: 459815 - DNA, 439 bp, Homo Sapiens
  misc_feature (314)..(314): n is a, c, g, or t
  misc_feature (336)..(336): n is a, c, g, or t
  misc_feature (401)..(401): n is a, c, g, or t
  misc_feature (410)..(410): n is a, c, g, or t
  misc_feature (425)..(425): n is a, c, g, or t
aacagatagtaacattttttattaaatattacagtggatcaaaaagtacaaaatatctcttgcctgctatgtgattgggaaactattggcacgtaatacagtatcaaaagcagtaataagtacaatttggaaaacatacaaaattgagtgtttatagttggctcagcattcttctggtagtgtttaaactaatgcaaaggttactcaataacctctccattggggaaactatataatatcactgggccatgttgctatatacaaataatcaccttacagagcatagaggttacatagctggaatcaccaaaagnatacaatatttacaacacaggnaagtttaaaaaagtataaacagccaagaggttatgctgctattcctccagacatattttcaaccntgaggaggncaggcccggatatcnaatttcaccaacag

SEQ ID NO: 459816 - DNA, 378 bp, Homo Sapiens
  misc_feature (226)..(251): n is a, c, g, or t
  misc_feature (298)..(298): n is a, c, g, or t
  misc_feature (311)..(311): n is a, c, g, or t
  misc_feature (328)..(328): n is a, c, g, or t
ttttttctttatccctttatttccttcttgaaatcgctgaggcagttgagaggagtggagggagggtgggcagggctggaggatgggagggagcacgtctgatagaaaacgtcaccgagacacaccccagggccagaggcgaacgcatctgaggggtggctgggcaggagcaccagggctatgtacacggtcagggtcttccctggggaggaggcagagggctgcnnnnnnnnnnnnnnnnnnnnnnnnnnctgcaaaagtttggaagaaaggggagtagctccggtggggcgatggnggccccagagttngagtttggggcgatggnggcttcagagaggtcggagcttcgggttaggggggccccagagaggtcct

SEQ ID NO: 459817 - DNA, 860 bp, Homo Sapiens
  misc_feature (27)..(27): n is a, c, g, or t
  misc_feature (36)..(36): n is a, c, g, or t
  misc_feature (52)..(52): n is a, c, g, or t
  misc_feature (271)..(271): n is a, c, g, or t
gggacctaaagcccgctccctgaggtnaagggggcngcctgccccaagttanaagggaaggaaaagacccctgtgaggtatcctgctgtatgtgacctcaagaaatgaacaaatcatgttcctggatctttgaaaggcactcccagactgaaagaaagggcacaggatttcattcaccctgttctccccatactgcaaaacttcgagtcattgcccttgaagagctttaacaatctgagccttaagtggctgctgggctgtcccggttttncaaggccaatgccttcgagtaattttaagaggtatggaaccaaatctgctttcagggcttgtgctactaattcactctgctccttctgaaacattcgattaattgcttcacaggctaagacccaacagtatctgctcgcttttttcattcccattccatcagtgggccaatggtctctaaagatgccatggctcgaacacacagctcattttcagacaaggcatggataacccgaatggcactcttaggaatggcattgttcctatgattcattgcctggataactttgggaagatggcccaatggcgggacctgatctgccagctgaggttgtgcgctgaagagacacactgttgccattgtcaaggtttccagagtttctccctgcaggtgtaaaacaaaaataaatcaactataaaatactcatacagtcctaaatatccaaggtaatgtatttggtgttcaaaactagggattcaaaagttctaagtgctgatacttgaaaacagattcactaatcctaagagaacaacgaacttcccattttctttcataaaaggcatgaatctaaaggactttaagaatatgc

SEQ ID NO: 459818 - DNA, 536 bp, Homo Sapiens
  misc_feature (13)..(13): n is a, c, g, or t
  misc_feature (459)..(459): n is a, c, g, or t
catattatctgtnatcttttttaaagggtcaaatgaaatattcagaaggctttactttatagatgggttcctgttgaaatggatcttatatctctaaccattgtacaggagaaattcattattgcctgatggcaaactcatgtctctggaccaagtgggccaagccctccccctgaggatgggtgtagtggttccatttaactgatggaatctcttgtatgcatgactaatgtgaacatttctcttctttctagaatctcttcattctaactctactttttttcctgaagttcaacataaaacctttaccacgaactcttgagcacttggtagattataagtgatgcttgcgtccttgtcctctagtgaacctttaccacaaactctccgagcacttagtgggattatagctgatgtttgtgtccttgtcctctagtgtgttcctcaagtgtttgcttncagtgtgcatcacacttttatccatcaggaaaggcaaccaaaaatcttttaactctggttttgaacataggaggaag

SEQ ID NO: 459819 - DNA, 448 bp, Homo Sapiens
  misc_feature (350)..(350): n is a, c, g, or t
actctttttaattcacgtcattttgttatattttatgcagtttttctctgcgtatgtttagcttatgcattattattttaagcatacttaagatttttctgatgagataaggtaaaagttaaatgcaaaaatcaatgattatcaaattaatgatttcacttaactttgtagaattaagcgctttatattttcttacagtttgcatttcaaactgataaggtaatgtaaatcattgtttctcttgtaaaattggtcaaaatagtcaaatagcttcaaagttcaaaagtgtataaatccgacaatgaatattttatggggactgcctatggtttaatattaggaccataagntaaatgaatattttttcaacactctctaatttaaactgtgtgcactcatcagtaagaaaattatgaaactccaatatttggtttcacaagtggtatac

SEQ ID NO: 459820 - DNA, 397 bp, Homo Sapiens
gagttaaagcctacgacccaatttttacccttccaatttggtaaagtccacggatttcctgtaggcatggattttactgccctacagaagtttaatttgctgtctgttacactcccaactgtgatttcaccaattttgtttcatggtgagttctggaattcattacataattcttaaatgggaaccaaccaggcaaagtttgagaaccactgtattaacgtgatgggtaagcacaagaacagttaagcgcacagtgtttccattataaaaccttaatttcaaggtttttctctttccttctttctaaaacttatacactttgggaaaagaaacttaatgtaagagctccagacatgaaaataactgtaatgatatagaaaacaaattatctcatttt

SEQ ID NO: 459821 - DNA, 426 bp, Homo Sapiens
  misc_feature (323)..(323): n is a, c, g, or t
  misc_feature (343)..(343): n is a, c, g, or t
  misc_feature (371)..(371): n is a, c, g, or t
  misc_feature (376)..(376): n is a, c, g, or t
  misc_feature (382)..(382): n is a, c, g, or t
gtgcacaccaccttgaccagtcacagtcctttttatataaaatttgggttttattttcgcagtattagcacccttacataggtcttgttatctgtgatttcatcaaatattatatttttctgaggccagggtttcagatatgctgattagtctttcaatcaagattaagaacaaatgcttcaattttcaattttgtttatattcttataggtcctctgagggttaaaactaatttattaaatgtgttattcattccaaaaacttttaaaaatccattttatttaattaatttatttgaggacatagtctcactctgtcgcccnggggttgaggtgcaagggcncaatcgtggggctcaatgcaacctccgnctccngggggntcaaggcaattctggcctcaggctcccaagtaggtggggggcct

SEQ ID NO: 459822 - DNA, 444 bp, Homo Sapiens
  misc_feature (38)..(38): n is a, c, g, or t
gggcccagagcagtaccccttaaaaaagagtccaaacncagttatatgttccataactttgtaggactacaagaatagataagtggatacaaagcaatagtgattttccccagtttgttttatgcaaaccaagaagcaggagatagaaaacctaagagcaactatgtaaaatttaaccaccttccttccctgttccaagggggtggtcctaacaatgacttgtactcatagcatttcctaacttacaaaggtcttttatgctcactatttattagttggcccctatacttacttaagaataagggataacctctattttatacctgagtaaaaaggttccatgaggtgaaaggttttacctcattaccatgactaatgaatggcaggacaaaatgtattctgattaatttcgaggtgctctcatatttgataatggttaatctg

SEQ ID NO: 459823 - DNA, 511 bp, Homo Sapiens
  misc_feature (14)..(14): n is a, c, g, or t
  misc_feature (30)..(30): n is a, c, g, or t
  misc_feature (76)..(76): n is a, c, g, or t
  misc_feature (94)..(94): n is a, c, g, or t
ttcccctggctccnggaaaacccaacttancctataagccttagcctatcctatatcctccagaagtccactcccnaaaaaccccagagagaangggtagaacctaaaaaagttacatgttgaagaaagggcctgcgccctgaaatccagattccagtcctttgtggattaatcccaacacctttacattctgaataacaatcattaacgtcattaagctgccttgtttccttaattgcattcttgtataggaaactcaaggcgagacgaaccaactctgagaagcccacaatcaaagttgattgcatccaaccttactgttgcacctctattaacctacaagctgtttgggcagggcttctaaaaacaatttcaggataaaaactgtctccttcagattttgctgcacttgcatttattatgaattttctggaaattatgaagcagaacagctaatgatcccatcatagacagccattatctcaaactgtgaatactggttgtcattttc

SEQ ID NO: 459824 - DNA, 540 bp, Homo Sapiens
ttttttttcccaggtaacatctttacctaccacaaccatttctctgttctctatttccttttacatttctattctgtaatgctttagaatttgcactttccaaagagagaaactatttctctggagttcagctgaacagaattcttcctgtgaacaggctatacagaaaaatatgagatttttctataagattttttttgttgctattttacaaacaagaaattaaatcacatttctgaccacaactactggaaaatcttttgtttgaagacctttttgaaacagcatattctcctattctttgcattgctgttcaaaggtacttgtaacatttggggaaaaacatattatatagggccaattttttcttatttaggttatattgcctgttgtctatttaaaaatatagaccaaaattatttatattatgctatttgcttattacttttccaggtaatgaaattatttgattttaagcagcatgtattctttttggtgctttaaaaatataattgcttactataatgaaatcagaaaaga

SEQ ID NO: 459825 - DNA, 549 bp, Homo Sapiens
  misc_feature (16)..(16): n is a, c, g, or t
  misc_feature (28)..(28): n is a, c, g, or t
  misc_feature (43)..(43): n is a, c, g, or t
  misc_feature (49)..(49): n is a, c, g, or t
  misc_feature (58)..(58): n is a, c, g, or t
  misc_feature (65)..(65): n is a, c, g, or t
  misc_feature (104)..(104): n is a, c, g, or t
cccaaaatggccgtangggggtgaaggnccggcgggtaaaatncggggncccccacgngttttangtggcaattaggacaattaccaggaggataaagccatancctttaacccccttccccctcattatggataaattttccatagaaaaaaggcaaatctcccattttttcctctgattaaagtacagtgtagtatcagattcagcgctgatcaaaagaaagactgatttgaaaagttggctttcttctataagccttgctgttccttctcaaccaagaacacttcaaaagagctaatgaagtaatagctgctttgattcaaatcaagaagttaaataaaaatgtcctacagactgtgaggagggtgaggtatttaaaagccaataatacattatagaatatactgatatcaaagagcaactttcagaattatgattgttaacacctatgcagtcagtcctttgatgaaggcaggtgaactgacatgcttggtaagagattatcttttctccctagaaacctacttgtttcagatactggtttgaac

SEQ ID NO: 459826 - DNA, 561 bp, Homo Sapiens
  misc_feature (363)..(363): n is a, c, g, or t
  misc_feature (406)..(406): n is a, c, g, or t
  misc_feature (442)..(442): n is a, c, g, or t
  misc_feature (450)..(450): n is a, c, g, or t
  misc_feature (516)..(516): n is a, c, g, or t
  misc_feature (524)..(524): n is a, c, g, or t
  misc_feature (530)..(530): n is a, c, g, or t
  misc_feature (548)..(548): n is a, c, g, or t
taatcttttattggcaaaagttaattctcagtactgcctatagagatacagtgtattttatgtacatacacaattaggtctaattcttgataattcaggttaaatttagtttggcattttccctaccacttactaaaaggtttacattaaatgactgatttaaatatataggtgcaatgttctatgtttattttaattgttatgacatttaagtagctaatataattgaccggtgctaaagtctcctgtttatccataaaatggggtacattatgggcagtgtaatacaagctttcttttcattgcctaggtactttaccagcagaccacagttttgccctgggtaggacccaaccctcaggnacaaaatcatcattccttgtatttatatttgtatctgaggatngtaaacaggtgggctgggccgggggccaacatgggncacccttnaactttatttttttaatgggggaaaacttcttccaaaggtggcttgcctttgtatagggactaggntatcagtntaggtntggcttcctgggggcctntggttcaggccgg

SEQ ID NO: 459827 - DNA, 454 bp, Homo Sapiens
  misc_feature (31)..(31): n is a, c, g, or t
  misc_feature (42)..(42): n is a, c, g, or t
  misc_feature (77)..(77): n is a, c, g, or t
  misc_feature (98)..(98): n is a, c, g, or t
attccagcacctccctaccacattaaagaantgggctttctncctttccaccttacaagactacaaaaaaaaggttntggttggggggtacattaaanatggtacccagtcatttcctgagtaagattttcattattcaaaagttaaaactgttttacaaaaactgttatcatatttttaaaatgtttaaaaacttaaacttgtaaagcacccagtccctgatgtttgtcatgggaaatattacttttttatgctttatttctataaacactaaaatcctagctggctgtactaaagtgggaacaaaatcccaagccctgccattaaggctgaatcaaagcattaaagtgtctgaaatatatgtgggatgtaaaaccttgcattttccatgtgcataatgattgagcttcttagggggaaaatctgacccatagatttcatccatttgtttagg

SEQ ID NO: 459828 - DNA, 319 bp, Homo Sapiens
agtccccacagtaggtcacctgtaagctgggaaagagagaagctggtagtggctcagtctgagtgcaaaagcctcaaaaccaaggaagctgacagtgcagcctttagtctgtggctgaaggctggagagcccctggcaaaccactggtgcaagtcccagagtccagaggccaaagaacttggagtctgatgtctaagaacaagaggagaagaaagaaatatccagcacaggaaaaagaaaggagccagaagacccagtaaacaaggttatcttaccttctgcctactttgttctagccacgctgacagctgattggatg

SEQ ID NO: 459829 - DNA, 450 bp, Homo Sapiens
  misc_feature (14)..(14): n is a, c, g, or t
  misc_feature (28)..(28): n is a, c, g, or t
  misc_feature (36)..(36): n is a, c, g, or t
  misc_feature (60)..(60): n is a, c, g, or t
  misc_feature (88)..(88): n is a, c, g, or t
gggggaaacccccnggattttgtgcccntacaatcnattttgactcctagaccgtgggcnccttaatcatttgggaagtactggcccncccagaagtcatccttacatcccacctcctcacaatggataattgaggatgacaagtggttataagcactttctttgttgaaatttaagcttaaaaattgatttggagttagacatcaatccatgaccctgggggaaaatacctacaaagagagacaatgggaagactgagaacccattaatgaaaagcaagcagtccacactatatggcttgtagtgtaacatttggacaaacacgtattctgtggtgagcttaggcaagatgctgcccacactgggaaggcagccaagaattactgccacctccacccaagaggatcaccctactaaaggccacagagaggaccagcccccgtcagagac

SEQ ID NO: 459830 - DNA, 491 bp, Homo Sapiens
  misc_feature (15)..(15): n is a, c, g, or t
  misc_feature (40)..(40): n is a, c, g, or t
  misc_feature (52)..(82): n is a, c, g, or t
  misc_feature (155)..(155): n is a, c, g, or t
  misc_feature (188)..(188): n is a, c, g, or t
catttaccctccccncttgagcaaccgtcagtaattggancttgcatcctcnnnnnnnnnnnnnnnnnnnnnnnnnnnnnnnaactgggtttcctatgcccagcactccctgaaacccccttactgtaaggatattttctcttactccttggggncccaggctctgagtctcttctctttgggagtantccatcaaaatgactttttttaaaaacagattttcccccaaccagaagaatctgcacaaacttggcagcgtttttacttgtttaatgagtttaagacattacatggtgaaagagaagcattttggactcctgcatttttatttaccattcccagactgacgagaaaaagaaaattcctcacataacagcccttctctaaagaaaaaggaaaaagtggctgtaagattagaacattgctacaaagggaatgctggatgttttatcaaaatgcaatgaccaggaatgatggttgattaaaaaaaa

SEQ ID NO: 459831 - DNA, 479 bp, Homo Sapiens
  misc_feature (439)..(439): n is a, c, g, or t
  misc_feature (446)..(446): n is a, c, g, or t
  misc_feature (451)..(451): n is a, c, g, or t
acctgcaggctcccgagtggggcctcctggtctctagagggttgctgcctttcaagcggtgcctaagaagttattttcttgtttaacatatatatttattaatttatttgtcgtgttggaaaatgtgtctctgctttccttttctctgcttgcctagccccaggtcttttctttgggaccctgggggcgggcatggaagtggaagtaggggcaagctcttgcccactccctggccatctcaacgcctctcctcaatgctgggccctcttatctcatcctttcctctagcttttctatttttcattgtgttgagtgaagtttgggagatttttcatacttttcttactatagtctcttgtttgtcttattagggataatacataaatgataatgtggggttaatcctcctctccatgcacagtgggaaagtcccgaactnccggggntttcnggggggacaaattttgggggggacaaca

SEQ ID NO: 459832 - DNA, 494 bp, Homo Sapiens
  misc_feature (11)..(11): n is a, c, g, or t
  misc_feature (34)..(34): n is a, c, g, or t
  misc_feature (39)..(39): n is a, c, g, or t
  misc_feature (404)..(404): n is a, c, g, or t
ggctgctgggnaaccttccctttcttgccaaagnaactnaatggctctttgaaatgtcttccttggaacttggctttcttccccaggtttgggtaaaagaaaggggcgaactcccgaatcccaaaattttgtccttcaaggctcacccactaaggtggccatcaacatccacaagccccgccttctggatagcaagaaatggctgcaaagtcattcctgtcaatgagggtgtacttcctgcgcaaagtggactccacttcctgttcctgttggctcagaaccacccggaactggttgaacacctccttgatctgtctaaggctgattatgtcgatctcgtccagtgtcccctccaggtacctccgcacctgggagttgatctcagcaattctgatttcatccantggggtcactaggtcacaaaggtgcggttggtcaggctgtcatggatagccagctcctgcttgagtagtgctagttccttctcccaggtt

SEQ ID NO: 459833 - DNA, 523 bp, Homo Sapiens
  misc_feature (20)..(20): n is a, c, g, or t
  misc_feature (61)..(61): n is a, c, g, or t
  misc_feature (320)..(363): n is a, c, g, or t
ccaaaagaactggggggttncaaatcctcctgctttgcctcccctaaaaaacccccactangagcaggggttaaataaccctcctagcacttatataagggcatggcttgtcctcctttgtcccctaggctacaatattttactcccaaaagacactcatggggctaggcacagtggttcaataccctataatccccagtactctgggagcccaaggcaagaggattaccttgaaccccaggggttcaagacccagcgtgggcaacatagtgtgaccccgtttctacaaaaaataattagcccaggtgtcccaactactnnnnnnnnnnnnnnnnnnnnnnnnnnnnnnnnnnnnnnnnnnnngttataatgctgtcaactagatacataaagcagtttgcttaatttatagggtggcaatagtctggaaacataagtcatgtatatatttctaatagtgcaaactttgatgaccacttctgggatatgctaaaggtgcaggtttagtcagtggaaatcagag

SEQ ID NO: 459834 - DNA, 418 bp, Homo Sapiens
  misc_feature (367)..(367): n is a, c, g, or t
cctttcatttgcgtcactgatgtctgttcccagccactccccacaatagatctgacctcatttgttcatattccctgcctggctctgaggtctgctctgtcccctgccgggcaaacatcaataggaggaggtggaataaaggctggccttggcatcccaccagcctggcattagctggcattaaggctgggaaaaacagtcctgtgcgaaaccagatggtccctggtgaaggaagctgctcctccgtggggggcctttccagtccatttgtgtgccaaagatggaagctgatggggacccttttgaagtaggatgtaggcacacaaggtatgggcttgggctcagaacttttccctacttccatctncccccagtaaccttgccctagcaagagcttggccactagggaaaattgggg

SEQ ID NO: 459835 - DNA, 428 bp, Homo Sapiens
atagagaagaaatgaagaatggaggaacaataacacagggtgtggtgggttgggggttccatgtgaaattccttaccctgtttttcctttaaatttaacatattcccaatttccccactctttgtgacttcccagaaacagaatgttatctgagccaattatctacgtgcattttctcttcatctctctcctgagccaaattctgatttaatttccacccatggtgatatgcagccatgtacgtaggccagttgggcccatcacatttgaatgaatgtgattagacagatgtgagatggctcaatcccagatgcttcctctaagcgctattgtggatgtggagagaaacattattggttgtacttttaatattcagcaaattgtctcaaaatggccctaggcacacataaggttcagtagctggctgg

SEQ ID NO: 459836 - DNA, 428 bp, Homo Sapiens
gtaggtaaatggggggaattttatttggggaactggttacagagagctgaaattcaggcaagatgatacaacacagacgttaataaccactgaaagccctagcaccacagggacaatgggaaaagatggttctagctgagcccaggagccgaagacaatgggaaggacttagatccctgcaggacggagcatccccagaactggaatccaactgaaaagtgtctaggtaggactaggcccatagagggaagaaccgtctgatgcgagatggaaacggagaagacagagccagtgccagcagcactgtctagagaatgggctcagcaatcccctgaattccctcatccttctccccaccagtcacccacctttgggccaaacctttcccttattattcagttgaggcagaagaggtttgagaattttag

SEQ ID NO: 459837 - DNA, 564 bp, Homo Sapiens
  misc_feature (28)..(28): n is a, c, g, or t
  misc_feature (48)..(48): n is a, c, g, or t
  misc_feature (66)..(66): n is a, c, g, or t
accccctccctcatcattgtcacttcgnatattgataacactcacagnagggctggaattatctgnaatgatgatgggctgatgctgatcttggacagggacccaaggaattataagaagatgtggtgcggaggggactgctccccaaccagagaatagacttgggaaggcagaacatctagagaggacttggaagagactggagctgactgctttattcttcttcgaagggagggaactggattgttgttgtctgacaacatgggcaacaccaacattcagaggctgagcagtggccaatgtcacatggttagtcagcaaggatggctgctgcatgatagtgctgtactggttgccatgagagtgggcattcctccagtcagctagctgctgtccactccccatggcctctggaatcattgctgtgggctggacagaattgtgtagagctaccccaggcaactgttgccaagttgaaggcaggagaatttgctgagtccctccaggccacgccagtacagcggcagtctgttcaaccagcgccggccggcccgctgcgcagct

SEQ ID NO: 459838 - DNA, 260 bp, Homo Sapiens
aacttggatttgctttataagcatgaattctgaaatgtccatgaatacaacaattcatccgtcttctcttccttttaatatttttacattcagaagcacaacttctgttttgaatacatttactttgatagttacatatttacttgaattttaaataagtgtatttacattttaaataggtgtatttaaaattggaaaatatgtttttatcagtgcatttcttaaatatgatgattattaaaccaatattcttttggggg

SEQ ID NO: 459839 - DNA, 421 bp, Homo Sapiens
  misc_feature (181)..(181): n is a, c, g, or t
  misc_feature (278)..(278): n is a, c, g, or t
  misc_feature (302)..(302): n is a, c, g, or t
  misc_feature (310)..(310): n is a, c, g, or t
  misc_feature (377)..(377): n is a, c, g, or t
  misc_feature (389)..(389): n is a, c, g, or t
  misc_feature (395)..(395): n is a, c, g, or t
tttttttgttaaaagcatctttttatttgctgtaagaatataatctgcatttctatacaatccattatgcaaaaaacatggtaggcattttataagcagtgcaaaatctcaacatctgtacatttgctccattaaaatattagcaaaggttgaaaaaaactcacatcttaggagaaaagantacagatttgttccccagggacatggcttccaacatcaagaagcacagccaagaaaacacagcctcattaaattctcaatacctaagatggaaggtnttgacagataggtagggaacattntttgaggnggctactactcccatgggcctcctcagtgtgtagccaaatgactttgtacagcaagcgcttaaagcntctgtgtttaancggttnggggtttcccctgttgggtttaccct

SEQ ID NO: 459840 - DNA, 480 bp, Homo Sapiens
  misc_feature (31)..(31): n is a, c, g, or t
ttaattggctgcaacctctccctcaaccctnaaaagctcaagacctgcctaaaaatgggtttcaccctggctgttggttcctgtggggaaaagttccctgaacaagctggttccctaacatggtgcaagtgaaaggaactctgtccctggaagtcccccaatgccgcctctcagtcctgcctgtcaccaaccaccctggggggcttgggcaagctactcaacctctggggctcaatttccctaactgtaaaatgggattgtaatcccttccctgcctgacgcaggaattgttatgaggcccagatgagatgaaagtcagcggtcagggctctgtaagttgaaaatggctggatgtgtgtggcgctgccactgcagggatggcccaaggtcacacagaaagtttgctgcaggaggagccctccccaccagtcttcatcgcttgccctgcttctcacttaggcagatgtcaaccagaatgag

SEQ ID NO: 459841 - DNA, 460 bp, Homo Sapiens
  misc_feature (33)..(33): n is a, c, g, or t
  misc_feature (140)..(298): n is a, c, g, or t
ggcccattgtccttttgaagaaagtctttggtncaaaacccttttaaaaaattgggttggtctttcctgttaatgaagttgaagttcctttgtatttcttaatacaagtcctttaatcagatctatgaattataaaatgnnnnnnnnnnnnnnnnnnnnnnnnnnnnnnnnnnnnnnnnnnnnnnnnnnnnnnnnnnnnnnnnnnnnnnnnnnnnnnnnnnnnnnnnnnnnnnnnnnnnnnnnnnnnnnnnnnnnnnnnnnnnnnnnnnnnnnnnnnnnnnnnnnnnnnnnnnnnnnngatctctttcagttttcaaacttccatggtactttatagttgaacccaagagcttggacttggttcctctgccctgcccctgatttgttaaactttatattcaaacttatgtgccctccatcccctgcaggtgctgggctgtctgggaaacactcctttccc

SEQ ID NO: 459842 - DNA, 491 bp, Homo Sapiens
  misc_feature (470)..(470): n is a, c, g, or t
taaaaataagttttattgacataatttacgtaccattcaattcacccatttaaagtgtacaattcagtggtttttagttattcacagaatcgttcaactgttgctacaatcggtttcagagcatcttcgttaccccagaaggagattccatgttccccatttcccctctcccccagacctaaacagctactaatgtactttccgtttctatgggtttgcctattggggacatttcatataagtgaaatcatacagtatgtggccttttgtgtctggcttctctcaccaagcatgttttcagagttcatgctgtaggggtgtcagtgcttccttcctttttataggccgaatcgtcttccattgtctgggggcagcctacgggttttgtttatccactttgttgatgggacatttggggttgttttccacttttgggccattatggattcaagccgccgtgaacattgtgnacaaatttccgtgtagacagg

SEQ ID NO: 459843 - DNA, 625 bp, Homo Sapiens
  misc_feature (585)..(585): n is a, c, g, or t
  misc_feature (604)..(604): n is a, c, g, or t
gctttacataaacttataaggattttttatttaaaggatttaaaaatataacacagtcaatataaacatgtactgggaattataaaccattctttcttctaagcactggatgagatactaaaaacatacagtatcttaccaatagccattaaaataggctaaaatgaaaaagaaaccgttgtaacaaggttactaatcccccaactttcaatgctgagttccttcatcatccatgtgcaatccagagatgacatctaggcagggtgggtaaaattattctgggaaaatggccaactgttacttgggacaaaataaggttaattctatatgggttgttccatttaaagttttatgtggggctatgggttccactggagctaaaaatttggcttttaactgtttccaaatcagaactagcagaggagagaagtaaataaagccaatggcactcccttcagaggctcaaaatggttagattttgatggcagatttaaccctagcgagttttcagtcagtccattttagatgatcccgtagggtcataccaatacactggaaccggtgggttaactccccttccttccnccaagttttaggataaagngactcatcccggtattggggg

SEQ ID NO: 459844 - DNA, 479 bp, Homo Sapiens
  misc_feature (441)..(441): n is a, c, g, or t
  misc_feature (463)..(463): n is a, c, g, or t
gaaatgactctcagttttatctatagctccaattaggacaaaattactttacaaaaagcattaaaaataaaagtaactgtatggtacttcaggaatttgaccagttccttacaacttattcttggcaatattttgtcagtaatatactttcatacagatgctagagaaccatggtgtctgctatttacatgttatttgttcccagtgagctttatcaacatcaaccctgtttatataatatgttattttgctcttcttgatctgtgccttttgttttagctttatacaaaatgctaggtttgttatattctttatgtatcataatatataattcaacttttcctgatgaatgtatgctgaataattaaactaaaccatgtgcttaggaaaagacaaagacaggttgtatatgcagttatgtgtaaatatttggacaagganaaaaaaggggaaggatcttccngcccacagggtagggg

SEQ ID NO: 459845 - DNA, 417 bp, Homo Sapiens
  misc_feature (312)..(312): n is a, c, g, or t
  misc_feature (349)..(349): n is a, c, g, or t
  misc_feature (378)..(378): n is a, c, g, or t
  misc_feature (401)..(401): n is a, c, g, or t
ttttctcttttaaaaacttttattacgcattgctaaataacattgcatgatgtattgcacacatcatgtggtaaacagcactccacagtaatccatacaatagctcgtacaatgaccatcaaaatagtttgaaaaccgttatagttttcatccgagtgagtgtctttatattcttccatgcaatctgatttcataattaagattactcttccattctacaacaaccaaccgaaaataattttttataaaagcccaaccacaacaaaaggtcattgggacattacgaaaagtcggaaattagactccaaattntcacaaggtgtccgttttttgatagacttgtccctantttttgtgtgatctgacacttggggttgnttttaccgccagcaggcatgtgnacactggtacttactg

SEQ ID NO: 459846 - DNA, 539 bp, Homo Sapiens
  misc_feature (466)..(466): n is a, c, g, or t
ggaagactagtttcttccataaccctgaattggagaccttaatgctaagtgtagattattgaggtttgttagtgaggaaaagaataagagttcagaagcctttgttatcagatagcgaaatcagggcctagtgaggagcacaggtcgactacataatggagtccattggcgaaccctattgcaatttggtccaactatatcttctggtgaaggaaattaatgatgtaagaaaatgcaagaggctcaacttctcttccaaaaatcttctggcttctgaactcttcctctgcctctctttaaataaataacacagaatttcaagtggtaggagacttattaagccagtcaccaagcttggtctgtcagcctgtcttctaacacctcaaagatcttgtgccctgtgctgtccctcccttgtaattatgaaaagttctttggtttctggggtgaattctacccatgtatnaatgaggaattctctcataaccttttttgtcttgtctgtcatctctgttcatcccttcctataacctctaggt

SEQ ID NO: 459847 - DNA, 547 bp, Homo Sapiens
  misc_feature (273)..(273): n is a, c, g, or t
  misc_feature (292)..(293): n is a, c, g, or t
  misc_feature (332)..(332): n is a, c, g, or t
  misc_feature (360)..(360): n is a, c, g, or t
  misc_feature (432)..(432): n is a, c, g, or t
  misc_feature (459)..(459): n is a, c, g, or t
  misc_feature (470)..(470): n is a, c, g, or t
  misc_feature (530)..(530): n is a, c, g, or t
actttctagttatttaatgatactaagaaatggtgctgtttcactggatttcattgatgagatttaagacgtatgaaagagaaagtctctttagacagggacatgaaaggtagccatcaataaaagttactaaaagtaaactcagaaagaaagaagtgataaaccatccaatcccctaatgaaccttagctcctggcagagagacagctcacaccttctggggtgcaggtgcccatccctgtgctcagaaaaaagcgttaagtaaggcaaaangtgattcctcctattttanntgagttggggtacagaggggagctgcctgtagtcttganttctttttttccagtattaaagcctttntgcgggtttgaggataggacatgcagttggggctggggccatgcttgctgtggaatgtcagggtgttgaggnttaggcaccacaccattccccggggtntgaggttttgncatggcggtctttgttcccatcattgtctaggaatgtgaggatagggtaggcttgggggnacggccattttgggggg

SEQ ID NO: 459848 - DNA, 574 bp, Homo Sapiens
  misc_feature (500)..(500): n is a, c, g, or t
  misc_feature (505)..(505): n is a, c, g, or t
  misc_feature (511)..(511): n is a, c, g, or t
  misc_feature (532)..(532): n is a, c, g, or t
gagtattaaaataacttttaatatttgtctactcagtacatcattgtttagtctgcatttctttgatttatattgataaaatatatatttattaaccatttgtttttctcctttgctatgatcttgttatgtcatggttcatttcctaacaaaggtagaataggaggtgtcagagttttctctctaaggatgcatcccatctttgtgcacttgatacacctggtcaggcagactcacatggagactgtgctggctggaaggccctggccaccctggggctgcaggtggtccacatggagctcagagacttgaccagggattgacagacaactggaggctcgagctctgggggccatgattctggcccacacttcctcctccaccggctaatcttctgtgattgggggttttatgagagctagaaggacagagtgacaaagttggccttgagggttttgaggtgggactggggaagaggagagtagtgaagggaccccggntcatntcagantttactcactctgcacatccntttttccctcctcggcagagggttttaaaccgtgtctgccat

SEQ ID NO: 459849 - DNA, 419 bp, Homo Sapiens
ggcctaacctaaaggtaattttatacaatattttttaaattttgtgaatgaaacaaagtttgtatacattgaagcatcagaaaccaagatgtcaccttctcagccacccatgtggacaatgtatgattgtgtggcattagcatcattcctgactctcaatttatatgctaccaataagcaaccttattcttacacttattcacacataaggacttaacattaaaaaatatgacataccattaatacgtgagaaaataatgtgtttggggtaactaagagcacaggagcatcaccagaatacctgaatcaactgttaaacaacaacaacgtcaggctttcagtctccatcttacaatgctatgttcttcactggaaaaattactggaacactgtatttattttggggggggtggaaagga

SEQ ID NO: 459850 - DNA, 325 bp, Homo Sapiens
  misc_feature (266)..(266): n is a, c, g, or t
gcttattctctgctctctgacgtgaagatattgttggaattgtcagaaagtcctgcagatatccctgtgggtaaaacaaataagaaaaagggaaagcattactagcaaagaaagtcaagctgttggaaaaactgacagtgatgtctgaaatgtcttacagaagagtatgttgttggaatgaccactgtatatatgacctgaaaaatacagtaggataaattattaaagttctaggttgaaagtgatgggcagaagttagtaaaaantagaaaaggcactgcatgaaggctgaaaatgaccttgattaggatcttgaaaggggtag

SEQ ID NO: 459851 - DNA, 534 bp, Homo Sapiens
  misc_feature (381)..(381): n is a, c, g, or t
ttttctttgttggtaagatgcccacagttctctggtgtgtggtcttcctggttataagcattcacaaatcagactatacattcatccctggtggtctcaggctgattgggctaggatggatgttatataaggataccaaaggaagaagtggacattgcccttaacatttttgtgacaaattaatagatgtttgcatgtcctgtcacatctccaactgcctaagacaactccatttagaggtcctactgatgttgcagtcccaacttgtccagaactttgctcctctccaaacatgtttctcctctaatacctatttcaatgaacgcatcacatctacctaggacacttacatcttcttttcccttcttcactggccacagncacaaaccctcatcatttctcacttgggttgctgtaacagctctttcactggcttctctatttctaggctcaaccatccttaattcacctgtcccaggctagcagagtataatctttctgaaacccaaatttgatcaggtcacttgcttgttt

SEQ ID NO: 459852 - DNA, 427 bp, Homo Sapiens
atgtacgctggacaaataaatagggcaagagcacgagctcaccgatttaaaaattcccacacagcattgcaaaggttttctggagcctcgtcatcaaagttgaccccaggaagaagtagaggcttccatgtgggacactgttatttctaatctactttgaaaccgcagggcaggcagggagggaggaaggagaaagaagcagcaggccaggtctgcaggcaggaagaggagagccggcgggcagccgccgcctcgctgaggtctgaagccaggaggctgggagaatgcgcagataaagacgagccagacctccagaccgcaaccctcctctccctagagagggaacaggccgctttctgcttatgctgaactcggggctctggagacaggaagcgtggaggagacagcagaggtgaggctgggagat

SEQ ID NO: 459853 - DNA, 530 bp, Homo Sapiens
  misc_feature (507)..(507): n is a, c, g, or t
aaagctaaactttttattctttaaaaatgttcgcatattcccacgcttatctcaactaactgtaaacctttttattttctcccagataggaaccttgaaatgatccctgttcccctgcacactcccagccacaccccctttacaccgcaggggcccctagcccctctctccctcgctctccgtcttcctcttatccatcatcacttcctcaataaatacattttgggtacttcctgcatataaaacatcctgccagctctgggcattctgcggtaaacaagggtcatgtcctatgcagcttcattagctgattgaccactgaccactcctgggaggcgcctgcagggtgctcaggaaagtgcctgggtggaagctgtgctcgtgtgttccagaagcaaggctgtccggcctgagaggggcgggagggcacatgagatgaggtgggtggggcaggggtgcagctggactgagggtttcatttcatcctgaaggtgggggaggaggctnggagacaggtgggcagaggggag

SEQ ID NO: 459854 - DNA, 601 bp, Homo Sapiens
  misc_feature (26)..(26): n is a, c, g, or t
  misc_feature (46)..(46): n is a, c, g, or t
aaagttatggaccattcctccccccngaacaccttaaagaaaatgncccccacagtggtgggtcccatctcctctccccccaattccctgagtgagctcaaacactggggttttctttcacaataaaatactgctgaattaacagtaagatagaagactgtcaaacaagccagtgtgaaacacatcaagcacctccatttcatagtgtgaatatctgaggaggtagctcccatctttgaagtaatcattctagaactgataatctagccttaaaaacagtgcgttcatttctgcttgtgtgaagcatgggccacatgggactctactgacagggagtcatttgggtcatcagttcactataaatgacagggacatttgggtcaccagttcactataaagaggagaaacttagctccactgccatgaaacaccctgtcccacatttcaaacaggagattatctatagtgttcaccaggaaaaacaagcattgatgcgaaggcatggagatgtggagaagagaaatactgtattttaaaactgtgagttcaagggttagctgcaatgcttcttttagggaagaacttaaagctgtgggtttag

SEQ ID NO: 459855 - DNA, 635 bp, Homo Sapiens
  misc_feature (16)..(16): n is a, c, g, or t
  misc_feature (30)..(30): n is a, c, g, or t
  misc_feature (37)..(37): n is a, c, g, or t
  misc_feature (43)..(43): n is a, c, g, or t
  misc_feature (51)..(51): n is a, c, g, or t
  misc_feature (64)..(64): n is a, c, g, or t
  misc_feature (91)..(91): n is a, c, g, or t
  misc_feature (143)..(193): n is a, c, g, or t
  misc_feature (601)..(601): n is a, c, g, or t
  misc_feature (604)..(604): n is a, c, g, or t
agcccctaccctcccngccccacaacaacnctagctnggtcangatatganggacccctatggngctcactaaatacaaccattggaacanggtattatacaacagtcttttctttcttagcccaatgcctctcatgtatttnnnnnnnnnnnnnnnnnnnnnnnnnnnnnnnnnnnnnnnnnnnnnnnnnnncagtaattgccatggacctgtaacagatcctagaataacacagacaggcaagaatctgtcaatatagcaatattccacatatgaaattcatggttcaggaagagataaataaataaatatgaaggggcttctcaaagacgtttcctttgtcttcccccatttcttactgaattttgctcatgtaaaaagttttgattatatgatagaagagtcagccctgttgggaccaatattaaccatttataccattaagccctctatataacgagggaattgggagagacggaacatatcacagggttgcttgttattttcttaaagacacctaccttttaaaataatttcaatatttaaactccatctggcactttaatctcttaaaaattattaagttaggcatgaagaacnaanccatctgggcggcagtttggattttaagtac

SEQ ID NO: 459856 - DNA, 511 bp, Homo Sapiens
  misc_feature (15)..(15): n is a, c, g, or t
  misc_feature (21)..(21): n is a, c, g, or t
  misc_feature (54)..(54): n is a, c, g, or t
  misc_feature (82)..(82): n is a, c, g, or t
  misc_feature (285)..(336): n is a, c, g, or t
ttaacataccctcgngttacnaaagggccatcggggtgctgccccctcattaantggtaaaccctactggtaaatagccaangggaagatctgaaacaaccttgcctcctgaagaggctgccccagcaaggcctacaacccccttagcccctaccttccctgccccacacaacctagcctcggtcatgatatgatggacctctatgagctcactaaatacaaccattgaacaaggtattatacaacagtcttttctttcttagcccaatgcctctcatgtatttnnnnnnnnnnnnnnnnnnnnnnnnnnnnnnnnnnnnnnnnnnnnnnnnnnnnagtaattgccatggacctgtaacagatcctagaataacacagacaggcaagaatctgtcaatatagcaatattccacatatgaaattcatggttcaggaagagataaataaataaatatgaaggggcttctcaaagacgtttcctttgtcttcccccatttcttactgaattttg

SEQ ID NO: 459857 - DNA, 316 bp, Homo Sapiens
gaaaggcagttttgtcctctccttgttagctcacttggctgcgttgggtctcaaataataacgctttcatatccgtgcaaatgccctcatcccaggcagtttagcctacttttcatcatcaaccagtgggagtcttgtgggccaatcctgtctgaattcaaagcagaagggtgaagtctcccttcccctaacagcctctcgcagctctcaacttcatcagtaacagcttgaaggagtgtagctggacagatagaaaacggaagcaatgattcctaggtgggagactcatagaccagaagggacaggctaggaaaga

SEQ ID NO: 459858 - DNA, 460 bp, Homo Sapiens
  misc_feature (425)..(425): n is a, c, g, or t
  misc_feature (430)..(430): n is a, c, g, or t
aaattctggacaactttttaatgctgttttacctcagtgagaaagcaatgaacaaaagcatattaacatattatcatttaattaaaatgtattcaaaccaactttcaacttgtactaccagtatgtcttaattttataaatcaatcattgaaaacaatgaatgtaataagggaagcactaaaattcaggtttcaagcacagccaaggcactttcctcattcccaagcttgacagttctagggtaaaggagtgaacataaaatctttggtatcaactcaaatggttctgcaagatttgtggggttcacttggcaaatattttcttctccttttgctcttcatcatttttcttgtaataacctttatattaatatcccgttaaggtaaccaatggaacataggtataggcatacttttaaaacaggnctacnggtgggttttccatccccattttggggggg

SEQ ID NO: 459859 - DNA, 300 bp, Homo Sapiens
  misc_feature (61)..(61): n is a, c, g, or t
  misc_feature (209)..(209): n is a, c, g, or t
gtgttccaataaaactttattttaaaaaaacagttgggaggccatatttggcaattgcacnatgtttgttgactcctggtgtaaaaatatgaacgagactaatggttggcactaattatggagaggctcactatagatggtggagatggaaagcgggggcaagctgagctaatcctaaaagaagagaaaatctgtaatataaagttcantaaacattatagattctcatttatgcatttaccaaaaatgcacattcatgtgtatgtataataaaggagttaatcattgttgatacaacct

SEQ ID NO: 459860 - DNA, 487 bp, Homo Sapiens
  misc_feature (13)..(13): n is a, c, g, or t
  misc_feature (52)..(52): n is a, c, g, or t
aaggttccctctnaattgggggttaaatctctgctcccccaacaggtccatnccgttggaaggtaaggaggaataagatttggaggctgggataatggtgaacatgctgcgatgaacttggccttccagagttctgcatggacttggagttgcagatgccttccagaaacagcaccacggtcaacttgagaaagaagatggcgagaaggggagctggggtctctagtttgatgaatctacttttttggcgctggttactaagcttcagtggtcatgggatgaccaacactgtcactttcggaaaacaccaagaggggaagatggtggccacagtcttgctctggaatacccacactcctacaagtggggaaacttcctgggttgtgcctatggttcacacggaaatggggtcgctctgctcaaacgccactctccaatgacctgccccatgcccacctttccaaaggatctggaaacacttcttgcc

SEQ ID NO: 459861 - DNA, 280 bp, Homo Sapiens
  misc_feature (24)..(24): n is a, c, g, or t
  misc_feature (68)..(68): n is a, c, g, or t
ctcccagacaattttattgatatnaataatataaacttcagggaaattgatatatgagagaaatggantaaattcaatatggtctgtccctttttctattgtgtcgtagttgaggttttgaggagtatttgcttctggccaaggctggtgttgagattcctgagcagccctccaccatctgttgtgtgtcagcctgtgccaggtgggggatgggacagtgaggaaccggctgctactctgggagttgtccctggaggtggatacacgtgcatgcatttca

SEQ ID NO: 459862 - DNA, 477 bp, Homo Sapiens
gggagcatctgaagggataatgatttttaagtggtaccctgttcatgccaggaccagcatttgtacatgggaaaataatcttaagatgagtgaaaagcaaatgctagaccacacctttaataggcccaagtgccaacaaaaatacgtgtgagtgggattcccacggagaaatgtttctgaatgaaaatgaaacccttgataatgaatcctgaggccagaatgccaaagtcacagtattctgtcatttacagcccctaaaaaatcccaggtgtttgtgatgacaagccactattataagtactctgtattagtgactacttggcaagtaaaattttctcaaatgttatttttcatagatctccaagcaacaatcacttgcagtgtatctggacaaaatgctatacatgattttcttaaaagtattttggatccactcccggaaaggaatccggattaaggtggcataccccaattcct

SEQ ID NO: 459863 - DNA, 449 bp, Homo Sapiens
aaaggggcactgaagtaatgcccaacaagaggtttggctcccaatggctgccttttgacaaaatagctcccaggattcccttgacagttttatttcatctggaccagtactgttgcaagtgaccctggaaggaagaaagagacaatcctgaattgggacaggataggagtggaggttcttcagtcctttagaacataaatactccaagtcaaattcatgttggaggtggaggtaggacaggcagtatgcctcttccagggtggccaaggacttttcatggaaatctactgagaactgaaaactttgtatctttagcatcctttggcatagaatattggtcagagtcctgattactaccaccaccatcccccaccccttatctaatatacattaggtggggcagggctttagttgagtagagggcacaggatttaagtctacactagctg

SEQ ID NO: 459864 - DNA, 435 bp, Homo Sapiens
ctgggaagaactttgtatgatttaacatgatgaggacagcaaataccccaatagctgtttttggcacacagtttgattctcatcagtatttttcctgcctttcttacgtcatggagaagtgttggactccccttgctacctcccactgccatggaggaagcaaaggatgctggtgtagaatttgcagttcatgttttcagcttgtgctaatgaatggaggatctgagcatacatgctggacaggtacttcacattattctaggtagattacaaacatctgtgcttctcttggatgtaaactcatctcgagtctccttttcttgccttcttccttttctccctactatagctgacttctctttgcagagtcatacaaatgtaactgagttttggccctgttgagtcaaactcctgttgagttttgctggttaccat

SEQ ID NO: 459865 - DNA, 487 bp, Homo Sapiens
cagagagcccaatccagggactccggccatgtatggagggtgtaagaaacactcattacctagctaatacatatccaggcccctaacgactttaatatgtacctccatgtaattgcaatttgataggtaaagaaactgagattcaggagggttaataacttgttcaggcgacacacagtttttatgggacagtgaattcagcataagtaagttggttctactattacacacttcctccccaggaattcacaatttaatgaggaagacaaatagcaaaattatgcttcctaatatctgaacattagattcatcatttgtgatagtaggataaatctttcccatgggtttgtattaaagattaaacaaaaaatgtgtatgaagaggatgatttatacttgttatttgtgtatgcataatcaggcataggattttaaaacgacacatctaatgtacaaattcctgatataattgagattcttcattgttc

SEQ ID NO: 459866 - DNA, 450 bp, Homo Sapiens
  misc_feature (42)..(50): n is a, c, g, or t
ggcatttcagctcaactattacgtgctttgagtttgatgtannnnnnnnnagtagtgttttattgttgtaaacctttgagacaggtctttatttttaagccatttttgaatggactactttggcagttttgtaagtaggtgaatcttcctgctttcaatgtggaatttttgaaattgcattagaaaaaacatgaaataagatacacttaatttgcctttgaagatagaatacaaattttgagaacatgtaattaacatctaattggtacacattaacatgagcattatagactttagttactgaagtttaatagcattatatgtattgcagataggaaatttcataaggcattttcacagtgactaaacgggacttatttttagaggttcttagcttctgcataaattgggaggcctgtatggactaaggccaaccttttgcccaagtgc

SEQ ID NO: 459867 - DNA, 464 bp, Homo Sapiens
actctttgtgacttgccttttccactgtgttgacgttggtgtaaagccgtggtgggtaaaactggtaatgtcggcacacatgcagcaacatcagactgcactaatagtcactgtgttcctcagagccaggcactgtcactcactgtaaaaaagcaaagccaatttcacttgagaattttcctaacaaggcaggaaacattattgactttattgaatttcagctacaggacacatcttttgagtgttcagtgctatgaagtgggaatccctccttcattatacgggtgtacattgacagtcttcaggaagagcacttgtgagattgtttggtttgagcttacctacatgtttttttctttcttcatgaaacatcatttttacttgaaagaatagctgacaaactggtttttcagactcggatatttggcagacatttttttcagaatgaagtaagactgacactt

SEQ ID NO: 459868 - DNA, 553 bp, Homo Sapiens
  misc_feature (162)..(162): n is a, c, g, or t
  misc_feature (410)..(451): n is a, c, g, or t
  misc_feature (511)..(511): n is a, c, g, or t
  misc_feature (533)..(533): n is a, c, g, or t
gtatttgcgcagaccattttaagattttcagtctcaacaaaacactattaaaacaaagaatctagtaaaatattgtgcatgtactgctaaacaattctagcaattttattaagcaatacctttattatttttgaatattcttaacagactggaacgaaacanttttttttcaaaacaaaatatgcatactgtacgcatgtcgcagggttaagtatgatgcagaggttaaagtctgtttgaacaaaaacaaatgcccggggaaatttcatagctataaagttaataactaaattttgttcactaagaggaccttttctatgggatttccttgatctctcagtcacactggcaaacttatctgaggtggcacttcccaagtgtagttagagaatagggaaggaatgtaaaannnnnnnnnnnnnnnnnnnnnnnnnnnnnnnnnnnnnnnnnnaaaaacagcccttattaactcttccttccactggattctactgtaaactcataaaagccntttataggaaaggcaaattccnggtaacactcggcgggggaa

SEQ ID NO: 459869 - DNA, 510 bp, Homo Sapiens
  misc_feature (24)..(24): n is a, c, g, or t
  misc_feature (41)..(41): n is a, c, g, or t
  misc_feature (83)..(83): n is a, c, g, or t
  misc_feature (221)..(221): n is a, c, g, or t
  misc_feature (230)..(230): n is a, c, g, or t
  misc_feature (243)..(243): n is a, c, g, or t
  misc_feature (369)..(369): n is a, c, g, or t
  misc_feature (485)..(485): n is a, c, g, or t
  misc_feature (489)..(489): n is a, c, g, or t
aaaagtcgctaattaaaaaatgtnaaattgaacttgcgtgnaatgaaacatccttttcccttggaaaaatgaatgtgctggcnactccgcatgagggggtctttcaggaaacggctgcatgtcatcagcctcccctgtttgctgccaggcggccccgaagagctgagatgagaggacagcagtcaggcgcgcgcaccccgggcaatgagaagcgctagctntggcgtttnccctggccgcccncctgtctcggccccctagtgttctctccttggttctcctcttagaaaccttctcatcatgggatgtcaccagagaggcgcccagggaaaacatgctggggcttcctcatggtgcagtcttgtggcntctgcctgcagccagccccgaagacagcagtgggcccacatcttaggcggggtctctggcccttgtgctacgtgtctggcactccctggtggaggctgccactaccctgcacactnacanccctccagtagccactcttgg

SEQ ID NO: 459870 - DNA, 526 bp, Homo Sapiens
  misc_feature (52)..(52): n is a, c, g, or t
  misc_feature (58)..(58): n is a, c, g, or t
  misc_feature (67)..(67): n is a, c, g, or t
ggtatggatggccaattttaaatacccccaggcctcctgaaattaagaaatnccccanatattaaancccacactttaatggaaccacaagtccacgtgacctaataagtaattgccaaatgtgaatgggtgactgtcattaaatagtattttgcattttaactatttttgcccttcattttgttgccagatagtaaccatagagatgactttgatcaaagcgaaaggtgagatttaaactagtacagtaggggaagcgctgcactctagtggagagagctttggagcttgaggcaggagccccggatctagtgctgctcatttccttttgtggctaagcaagtcattttaagctgtttagtcctcagtctttttaatctctaaaatgaaatgattgaattaaataatgcctagccgtctttctagttctaagattctttcatcttttaggatttattagccttcaactttggagaatttattagatttgttcattgtttttttcctctgatgaacatttagccag

SEQ ID NO: 459871 - DNA, 282 bp, Homo Sapiens
  misc_feature (49)..(49): n is a, c, g, or t
agatacagggatctcaaactcttgagcttaagagatcttcctgcttcanctttctgagtagctggtagtgcacaacactgtacctggcttaatgtcttttcatttcttttggtcaccttcagcctcttatggttaatgtcaaagagcaagtgaaatgtaaaacagtttacattgttaacagcttaaacaaaagagacccctttaaggaataggtcactttaaaagttggactatgtagggggagtattggactggctttaaatttcaactatttgtggtgac

SEQ ID NO: 459872 - DNA, 486 bp, Homo Sapiens
  misc_feature (34)..(34): n is a, c, g, or t
  misc_feature (51)..(51): n is a, c, g, or t
atttggtagtaatctctagtaattactgtaagtnctaaccagttcattttncaaatcacttttccttttgggcgttcactttattttgtacgttttaattgagtttttttgtaaaatggcctaacaatgttttacattccatggccttagccagggcttgagcatgagaatccgcaagccactgggcccagttttgttttcagcatctggatagttgctgcttaattcatatgaatcctcatgtgtttccattactgtcagcatcaactaagacatttttgagccctgagtatctttgtggtattataataggggaaaataaaatactgaattaatcaaaagataaggcccgtgggagtttgtgacccagaagagatataggcacagacagagtgggagcaattctggatggataggttgtaggatggtcaagagagccgtggtggtttgtccagccatggccaggacgtttgtggagtgtgtagg

SEQ ID NO: 459873 - DNA, 476 bp, Homo Sapiens
  misc_feature (247)..(247): n is a, c, g, or t
  misc_feature (281)..(281): n is a, c, g, or t
  misc_feature (303)..(303): n is a, c, g, or t
  misc_feature (356)..(356): n is a, c, g, or t
  misc_feature (363)..(363): n is a, c, g, or t
  misc_feature (409)..(409): n is a, c, g, or t
  misc_feature (432)..(432): n is a, c, g, or t
  misc_feature (439)..(439): n is a, c, g, or t
  misc_feature (453)..(453): n is a, c, g, or t
gctttgaagaaaatagtcatttattgtcaaagcatccaacatactcggataaactataaagtttaataaatatttccagggataaaagaaacacataactattcagactccatttcactggcacaaaattacactttgtattaaaagaaaatacatatgtacataattgatgacattcttcattgaagtccattatcatttcattatacatgcacttccccctggggaactcaaattgaatggtganccctttttattcattttgtttatttttgtagggnccacaaactgtcatcaaggaantgcaggaaaggcatctcaccctcctcctttactttatatctaaactaaatttngcccttncatataatttttacatctaaatcgtaagggctgaataattaagtgngacggatggcaaatgcatcaatntggtgcnatacatggcatttnaaaaaatgtccttcctttgggga

SEQ ID NO: 459874 - DNA, 285 bp, Homo Sapiens
gtgatttttcagattctttaattctgatgctagggactaatttcagaggattgggtaaaatactcaggtttcacaatctctctaaatattcattttacaatgtaagctttaattacttatttgaacaaattgtattattattttatattttaatttataagccaagtttacctgacattttcagatataatatatgctttcaagtctgtttatcttttattattacaattcaaaggtagaagctttatttttttatatccctgggaaattattataggtctataa

SEQ ID NO: 459875 - DNA, 386 bp, Homo Sapiens
  misc_feature (16)..(16): n is a, c, g, or t
ggtcagaccttcaccnttccccagagtagcccaccctccctggggcccaactgaagtggaagggtggggcactgtgtctcctagaggccctgctttctccctatggtaaggccttaaactacattgaacacaagttccacactagcaaggctgtactcatgcccacagagcatgccttgactcatggccaaagcactacttctttcccatctggctctcttactttttttgtccataatttaataaaaattggaggtaaaaaatatttccacaggacacataccagactcactgaagggtacttgacagacatatggtaaatgaataagacaaaagctctgatggcttctcacagccctgtggatcaaactcagattcttttctag

SEQ ID NO: 459876 - DNA, 357 bp, Homo Sapiens
gcatttcaatttacgaataataatggttattggggaactgtttattatagataattttaaggtgtatagctattttaaagggggtccatttacatcaaacagccgatcagaggactctatctaaattgtgatcgtggcagatagagatggagtcatgtactctatctggctctacacatcaatcacatcttgattcaaacctcacaaggcaatattctgaattgttaactaggtatttcaaaacaggaattaaattcaataggctcttctcagtgaacaggttttaatgttgttttgatgtaattttaaaagacttttagcaaacatgcatttctttatatgatatatttcttttac

SEQ ID NO: 459877 - DNA, 557 bp, Homo Sapiens
  misc_feature (395)..(395): n is a, c, g, or t
  misc_feature (424)..(424): n is a, c, g, or t
  misc_feature (442)..(442): n is a, c, g, or t
  misc_feature (461)..(461): n is a, c, g, or t
  misc_feature (507)..(507): n is a, c, g, or t
  misc_feature (517)..(517): n is a, c, g, or t
  misc_feature (535)..(535): n is a, c, g, or t
gtcaacattttagattcggtaaccttttttttcttccaattataatctctgctagccacttccgccagcagttggtggaagacttactaggtgcagggactttccaagttcatcacaacaacctgcttgttttcatgagacaataatccgaaaagttcgctttgatatattcctggagggccaagccatctatttacaaaaggtgaacagcaaaatcaagcactgcttttatgggcaggaacacaagagaaagcaaactgcccaagaaggtcatcatgtcagaaactcaatctcaacaaaataatttccatcaggggaacttcaggggtttcttgggggggcttatgaggtctcaccggtcaacccggggggggcctcactacaaggaggccttngacaagggcacttgttttttgtgggggantgggggagtttcacactngatggaggccaaacctttngaattttttgcacaggttttgttcaggaaggccccgaggttccccngggggttaangggttaatttttattccnttccccataattattacttctt

SEQ ID NO: 459878 - DNA, 392 bp, Homo Sapiens
ggcaaatcagattttctgtggggaccctcaaatgcaactgaagaaatagattgttgcattcattcctccccaccccccatttgtaggcagtaaacaaagtatgactgacagattgaacacctgcaaaactgctagcgtaatctcagcacatacgcagctaggaagtttgtcataaaatcaacttagaaatgagatgaggctgttcagtttgtcttaaaaaaatcaggattaggtaaaagctgtcctaccaaagagtctagcaaaacaatatagtatttttttgcagaggcatgaaaaattaagacgctttagagtacttgaaagttgtgtagtcattttatttgcaaaatgaggtgactgtggcaaattatagaacacagagtattattact

SEQ ID NO: 459879 - DNA, 540 bp, Homo Sapiens
gacctttctaaaatatgtctggttctattagtctttggtttaaaatcttaccatggatttatcttcaggataaaataaaattctttaacacagaaaaaaagacccttccatgctgtgagccttcaggattcagtggttaaccagtatcatctttctaacttcctgacctgcaagtctccctctgaccacactgagctttcacccttccctagctgactgaggtgttcttgcacctccaagaatctgcacacaatcttttcttcttccttcatatccttctggatctggctaactctgactatccttcaagacatggttgggtatcgctttgtctggagaataacctgtatgcccccaaagatggggataaacaccctttctagatgatctggtagtttctgagtctgcttctaacaaggttaactccaaattcctcagcccaaggattgaaggggaactccttttcactccttttaccctggactctcacccgtgcagctctctggcagccggaagtccaagatgcccatggactcttag

SEQ ID NO: 459880 - DNA, 400 bp, Homo Sapiens
  misc_feature (28)..(28): n is a, c, g, or t
cctagaaaagggtgtttaatcccccccncctttggggggccataacaggttattcctcccagacaaagcgaatacccccaacccatgtcttgaaggatagtccagagttagcccagatcccagaaggatatgaaggaagaagaaaagattgtgtgcagattcttggaggtgcaagaacacctcagtcagctagggaagggtgaaagctcagtgtggtcagagggagacttgcaggtcaggaagttagaaagatgatactggttaaccactgaatcctgaaggctcacagcatggaagggtctttttttctgtgttaaagaattttattttatcctgaagataaatccatggtaagattttaaaccaaagactaatagaaccagacatattttagaaaggt

SEQ ID NO: 459881 - DNA, 476 bp, Homo Sapiens
  misc_feature (441)..(441): n is a, c, g, or t
  misc_feature (453)..(453): n is a, c, g, or t
tgttttcctacaggaatgattacttttcagatccatttatgttttcatgctcaatacttactccccttccctgcaacacccaaagagtttacttttgcaagtcatttggtcttcagtctactactgaggaatagagaggcactaactgctttacccaggatcagaactcatgttcttaccttctattaatagagtacttgagcccgatggactaactggtctcacattttctctatcttggttttacttccataaacatcaatatctttacccacatgatttttccatcctcccatttttttccatatgtattagggttcaggaactatgatgctaatgatcacatttcttcctagttcctaatttcattagtgccattttcctgatatctacaggaaacaattattcaatacatgtaggctggcttgaggccttattttnggaggctaggcntgtctttttccaggtgctgtcag

SEQ ID NO: 459882 - DNA, 266 bp, Homo Sapiens
  misc_feature (128)..(129): n is a, c, g, or t
  misc_feature (138)..(138): n is a, c, g, or t
  misc_feature (201)..(201): n is a, c, g, or t
  misc_feature (212)..(212): n is a, c, g, or t
  misc_feature (218)..(218): n is a, c, g, or t
tttttttgatatttacaaatattctaacagcttttattacaatggtgcaaggaagtatttcatccaacactcaccgacaacaaaccatcatcttctataaaacagctccagaaagttcaaacaaaaannactaaaagntacatgtatctgtagtaattctcatacattactgtttagtgttcaaacttcatgtcactccantaaagtataancatttnctagcaaacatgtgggcaaaaaagtttgcctgttttatttgtttgcct

SEQ ID NO: 459883 - DNA, 444 bp, Homo Sapiens
  misc_feature (125)..(144): n is a, c, g, or t
  misc_feature (242)..(252): n is a, c, g, or t
  misc_feature (345)..(345): n is a, c, g, or t
ccaggcgccttgctgcagacagagtaagacaaaaacaccaggaagcaggattccgtgcccatctctgcagtttgggttcacaaaagggggtgccgtcatccctgggtggaggagggagtgttggnnnnnnnnnnnnnnnnnnnnaacatgtatgaaactgacatcttctcaaatcttgttccacccccctctggaagcccccatcacccacccctgctatggacaccacacctatgccaggnnnnnnnnnnnaccccagtctcattctggggtctgcccatgctgtgggaaagaatagggaggcctcccaaatatatgcaaattgtccccattccgtgggggcanctgaacaatgacccgggtggagatggggcatggaggagtaggaagacccagccctattttgaatggggagaggaggatctgggagtccttcatgcccag

SEQ ID NO: 459884 - DNA, 580 bp, Homo Sapiens
  misc_feature (36)..(36): n is a, c, g, or t
cctggaaggattttaccacggggccacccctccccngccccctcctggtctttccccagccacccgtgtgaccccagctggtgactaagagttggactaatttaactctgcaataagggctggcacaacccaaacacaggatgtaataatggatggagcaacaaaagaacatttaaatatgtggctattaaataagacactgtatcctagaatcactttgcagtactggaactttctttgcaaatgtatagtgtattcaagcatgtaaaaatgcctttctagtcaaataaatactttaaaacaaacctcttctattctgagaatcagtgaggtagtaaaacatttcctctggtcccaatacaacttttcaaaaacatgtccctatgatataagcttgttgagagtcaaacttttattcattggcttttcctgaatctaggaatttggcaaagtttcctctcaaagaaagctgtccagagttcccctcaagtggcttgtttttgttcacatgtctaggaaccgtgccctttctcacaccagcttgttttgggcagaaagatcttcagttccccaggttccc

SEQ ID NO: 459885 - DNA, 418 bp, Homo Sapiens
  misc_feature (357)..(367): n is a, c, g, or t
  misc_feature (393)..(393): n is a, c, g, or t
  misc_feature (406)..(406): n is a, c, g, or t
ttttcagtataatggcatttattatttattgagcacttattacataacagatggggctctagatgtttcacatgtactttgtactagtttgtttaatcctacatctactctatgagatacatattaacttccattttacagatgaggaaattgaggcacagaggttaaggaacttgcctagggtcacagggtagtgctagccagggatttgagcccaatctgggcatgtgctcataattactagactatatactgcctgccctggtgtgagaagagaagtaaggcataaagtagaaggaacaaaaagaagagaagtcataaaagaggctgtttgaaggaaatctagaagcattcacnnnnnnnnnnngttcatttttacttttatttagcccnttaagtcccttgnactcatagtaag

SEQ ID NO: 459886 - DNA, 518 bp, Homo Sapiens
  misc_feature (34)..(34): n is a, c, g, or t
  misc_feature (44)..(44): n is a, c, g, or t
  misc_feature (99)..(99): n is a, c, g, or t
  misc_feature (106)..(106): n is a, c, g, or t
  misc_feature (167)..(167): n is a, c, g, or t
cgggtttgctttttgaactctgaactttcaacgnaagctcatanggtgcccttcccaacaagcaaaggaatccctcaagctcctctgggtccctttctnccccgtncccccgtggtccaggccaaccttgccgtcccaggcagtttccttaagcagcttccctgggnccccggctgtatgaattccctccagtgggctctgaagcccttgatctttcttttctcagcatttatcatggagggtggaagtgaaccatctgccaacagtcctctgctcaggcacaccacggggccaggctgggcgtgtgatggtcacgggcctgtgtagtgtccctgaataggtagcaaataaaagagtgttcattcaaggtgtgctgaatgaacgaatacatgaaaaaacgcttgggggtggggagtgaatggatttcaaattctcaggctgcactttccaaatccgacacagtcacattcagccgcttgtcaagactgtttgacagccacccctttcccgattcccgg

SEQ ID NO: 459887 - DNA, 421 bp, Homo Sapiens
  misc_feature (329)..(329): n is a, c, g, or t
ttttttttgttggttaattttttcctttaatcagaaaattaacaatatattcttgatataatgcaacatttgtttttggtaccatttgaccatactgtacaagatatgagaagatttatttcaatagaaaatataagtactgaaattgaattaggctacttttaataaagaatgatttatgggaatacagaactaggaaaagcatcacaaatcctactccatcaatatcaaaacagttacttgttcaagatatcaatataaaagggagtaaatattaacaaatataaatttaagtatgcttggggtacatttatacttccatttttttngaggacaaattatacttccacatttttaaaggacattaaggtggaataattaattcatagtctttggggaattttccctttatgggaggcct

SEQ ID NO: 459888 - DNA, 438 bp, Homo Sapiens
gacatacaatgtgcaagtatgagacattttattttctaattgaaactgtattaagacatttacttggaatcacattattcccttaattttttcacagagaatattccatttactgtttagtttgtggtcttgtggacatgttctaagtaatatatttgttagcatggtagtttcagttgggcaaaacttactgccaataagacttgaatttaatttgtcacgtatttccaatggcaaccaatgatcaggtgcttcaatattacaaatttcaattcttccattctttatgtctatgaatactttaatttccaagtgtgactgttcatataacacatgaaaggaagtatttatactaaactttgggagttttgccatatatccactcccaagtttgcagttctttggctttgctatttattccaggaaacagtgtctcat

SEQ ID NO: 459889 - DNA, 336 bp, Homo Sapiens
  misc_feature (131)..(142): n is a, c, g, or t
taaaaatagagatgaagatacctcattttacttctctgagttctacttcctacaagttctgttttgtgaatctgacaattcgtggaaacagattatctgaacaaatgtataatacaacctttcaaagtttnnnnnnnnnnnncagctgtcttacatttcttggaagacataatgcccagtttctggctcatggtagtccacaacgttcactgaagaaatgcattggactcactttacttaaacctttgctctacctcaccaataattataagccaattatatcccctcacttctattttcagatttggttgtgggctgttcaccatttgattgatt

SEQ ID NO: 459890 - DNA, 268 bp, Homo Sapiens
tggtaatgatccttttataaaattaaattagtgctaagagactttcagcaatgttatatattgcctgtccattaaagattgttgccaaatggaatgagttgtccccagtaaggattcactatcaatgcagaagaaatgcacggataatctactttgcataaagaatggggctaggttgcatctgcatggtatcccaaataaataaaatgtgccactacccttgcaccaaaattattttatgatgggtaaagttagacccttgaggagg

SEQ ID NO: 459891 - DNA, 281 bp, Homo Sapiens
  misc_feature (13)..(13): n is a, c, g, or t
tggaaggtactgnccaaaaaaggttttctgcttttacgccagcactttcctggtgttttggctaggagaacagaccttttttggagcttttcagtcaataacagatagtacatccaagatggagccttcttcagctccctgtgaagagtatgcagggaataatcaggaaccagagactcccaccttgtcactcctcaagtcctgacctccctgtaagtctgccttctccttccacatgtcagggtacatgggaagacactatgatgatcagaggcagagac

SEQ ID NO: 459892 - DNA, 452 bp, Homo Sapiens
  misc_feature (44)..(44): n is a, c, g, or t
  misc_feature (77)..(77): n is a, c, g, or t
  misc_feature (196)..(328): n is a, c, g, or t
acccctaaggctgactgttactgaacaaaaccttgggtccaccnattgcaaccagaaccaaaaccaaggctgacctnagggttgcggcgagagaaattgaggcaccgattgcagggcagctcatgatttagaccctggcctcaatggcttacaggtaggagtttttaaagggagggaggcagaggtcacaggcaannnnnnnnnnnnnnnnnnnnnnnnnnnnnnnnnnnnnnnnnnnnnnnnnnnnnnnnnnnnnnnnnnnnnnnnnnnnnnnnnnnnnnnnnnnnnnnnnnnnnnnnnnnnnnnnnnnnnnnnnnnnnnnnnnnnnccttgtctaaaaattttgtagccagcagaaaagaatgctaggtttagctggtggacgtgacctcctcttgggcctcgggaagaaatttagaaccaagaacagtggtcagagtccagtcctcagc

SEQ ID NO: 459893 - DNA, 537 bp, Homo Sapiens
cactctttgtataagaactccctgacactttcaactgcagcatcttggctttgaaatcccattcattgggtgaaaaaacccctggactaaaaactgtctttccctaaagcaggagatggaatggaagatatgacgctccccccagaagcccacacttcaatgacaatgggcaggtcgctaagcagatagcaaaactggctgcaagggaatgcactgagggaagctggaacatcctaaagaattaatattaaattgctttctcatgaaaaccagtgcagtaaagaaaccaagtgggcttggttcagaggcggctccatctctacctcaggtctcaccagtgactattattctaataataagtgaaagaaaccacagccgtaaccccaatgctgctaccctcacccacctctgtgggcaagggaagccctgctcagtggagaaatgtgatggaggcagggggagccatgcagtgtgtgagtatgcgatgacccctctgcagaagagagaggtcagttcagaatatctgaaccctcgcgg

SEQ ID NO: 459894 - DNA, 943 bp, Homo Sapiens
  misc_feature (17)..(17): n is a, c, g, or t
  misc_feature (31)..(31): n is a, c, g, or t
  misc_feature (37)..(37): n is a, c, g, or t
  misc_feature (58)..(58): n is a, c, g, or t
  misc_feature (78)..(78): n is a, c, g, or t
  misc_feature (98)..(98): n is a, c, g, or t
  misc_feature (327)..(354): n is a, c, g, or t
  misc_feature (761)..(761): n is a, c, g, or t
  misc_feature (802)..(802): n is a, c, g, or t
  misc_feature (846)..(846): n is a, c, g, or t
aaacggggtaaggaccnccagaaaaaacccnccatcnaccatgccccccagtagcctnaatggaccatccacctagcntgaagccaccagggtgtacntgggcggggatccttacagcctctgttgcccccacctcaagaccctaagaacaattattaagtttagcccaaatccttgccatagacgtggttagaatttattgcacattggaacaaaaatatatattttttgttgttttggaaaagaccattagcaataaaaaattttttgtctgtctgtctggtttggggatgtacattggctgacagcatctaagttctaagaagnnnnnnnnnnnnnnnnnnnnnnnnnnnncatgacaatgcataagccagaagccatttcctatttaataagttaataatttgtatttacaaaaaggcatgccaataaaataaaattatatattacagtatttataattctcttaaaaagaataaccacacatgtcagcttctgttttgtgctgtttacaatgtagcctgtacatgttactatacattcatcctagcagttagcagggtcactgaaaggataggccttcccagtctgggtattgggtgtagtacaaaaattctacggatgctgctgcaggaagcgggcttaagagagctgggacagtttctagtgggtccaacaaggataggaaagctctgcttgccgacttactgtgggtttgttctatggcaaaactagtctgggtgggactgtggaaattaccnttcaaagtggcttctactggcaaggcagatccggtgttgtnccgattatggggttggttcttcttccccctctagtgtatggttncaggaagatttatttgggtttggttcacatgctaaagtctcttttcactctttgtatagagacttcccgacacattcaactgcagcatcttgggctt

SEQ ID NO: 459895 - DNA, 406 bp, Homo Sapiens
atcatcaggctacaaattttctgaaattgtatgctctgcttcttctcgaatgctttgctgcttagaaatttcttgtgtcagataccttaaatcatctctgtgaagttcaaagttccacagatctgtagggaactctagaaaaaaattcttattttccctctttcccgcctatctgatgcccgtttctaatacaggtgcacaatgcctgcagtgtctttgcatagtaagagtgactttactccatttcccaacaaattcctcatctccctctgagaccacctccgcctgggaccttgttgtccatatcactattaacattttgggtcaaagccattcaacaagtctcgagggaagttccaaactttcccacattttcctatcctcttctggggccttccaaactgtt

SEQ ID NO: 459896 - DNA, 491 bp, Homo Sapiens
  misc_feature (436)..(436): n is a, c, g, or t
tatcaactggattgtgaactcctcaagatgggcatcatagatctctcatgtttatatttttttaactttcttgattttagtaaatgctacagaatatccaatgtcccttgataatggtggcagaaagctgattctggattcagatgacctaggatcagatcacagttccccacctgggtgtcaacttagacaagttcttcaaacccttcaagctatcgatataacattttctcatatacaaaatgtggaaaatagtagtacttacatcatagaattgtcttgagtgaataaaacagataatgtatatagaacatttaatactatacttaatacagagtaaatgtttaatataataatagagattattagaggtgttgaataaaataaataatggaaatatcaatgtcatcaaatctgctaatttattcatcactgnctatttgctagggctgccattacaaagtaccacagtctgggtggcttcagcaaca

SEQ ID NO: 459897 - DNA, 290 bp, Homo Sapiens
gatttgctgtgcagctggtgaacagatgctgcagagagtttgaactgtgagtggagctgcccacaggatgtgaggcatgtgaggcatgctcttgcgttttctgttgtgaagaatgtgagcataattatttccatggccactggctcaaatagcatttgcaaatttacctcgacttcctctactttggccttagcaagaaatagactatgatgtaactcacacttgtatcacagggatgcagtcttggttgggctcacaccagaacttcccaagaagacagactgaagaga

SEQ ID NO: 459898 - DNA, 439 bp, Homo Sapiens
  misc_feature (423)..(423): n is a, c, g, or t
ggcttctcttccctttttcccccctttatgcttaactatttaaggctactgcagaaagacttaaaaatgaaagaaggtaggaacataaaatggtaaaatggtgcaacttctttgtgaaacagttcggcatttcctcaaacacttaaacacggaattaatatgaccctgcaatcccactcctaggtatatccccaagagaactggaaacctacgccctcacaaaaacctacacacatgttcacagcagcattattcaagcagccaaaaagaggaaacaacgtgcccatctactgatgaataagcttacataaaatgtgctatatccataccatcgcacataaaaaggaagaaggttctgacatgctacaatgtggatgaaccttgaaaacattatgcaaactaaagaatccagtttcaaagatnacatactatataattc

SEQ ID NO: 459899 - DNA, 489 bp, Homo Sapiens
  misc_feature (431)..(432): n is a, c, g, or t
  misc_feature (461)..(461): n is a, c, g, or t
ggtttgatgatttaatctgacaactacacagcatacaaattaaacagcctttacctcatatccccagcagtaaactaacaagaaatggaacaaggaaaaagacctaataacatattttgagctaacccaattgagaaagtgtactaacgttttgtcaggtccattttctactgcaactcagtcaacactgagaggtgttttctttcaggttcaatttggccttttgctcctcagggaatttgaaaggtcactggcaaggctggttaaaagcagaccagtgtcagcgaactctgccatgactcctagagaccacaggaaggcttgggtaaggtctctcactcactcaaccaaactttcctcctgctctcaacaatacctatagggatttatggatggacgaccatgtttgtatgtggggagcaggttacagnnttgttaggtgacaggtgggcagggttggntttgacggggcaggtcataggtttgccg

SEQ ID NO: 459900 - DNA, 378 bp, Homo Sapiens
  misc_feature (16)..(16): n is a, c, g, or t
  misc_feature (35)..(35): n is a, c, g, or t
  misc_feature (340)..(340): n is a, c, g, or t
  misc_feature (350)..(350): n is a, c, g, or t
  misc_feature (362)..(362): n is a, c, g, or t
gggaagactacaaaanccctgaagtattactaccnagatcttcttctcaagacagaaatgtatgaccatatcttcatcttctctatctttctggcatccaacggctgcacgtaagaatccaaatcatcctctcggtgttgcaatacctccccaccttgtgaaacttttctgtaagtggctcggctttttggaattttgccccagactctctgcttcctagcattgggtgcgctcatctattctcatttgtgtttctgctatcttggttgatggaaaacttcccatgcctgtgcaaattggcttccacggtttttctctgagtgatggtgctggacacagnatctctctgnaatcgggtcatnaatccagcacctccac

SEQ ID NO: 459901 - DNA, 474 bp, Homo Sapiens
  misc_feature (346)..(346): n is a, c, g, or t
  misc_feature (412)..(412): n is a, c, g, or t
  misc_feature (419)..(419): n is a, c, g, or t
gcatgataaatcaatgagaaaaatactcttattaccgcaattttacagctgtagaaggtagggaacagacggtttaaactatttgcccacggcacattgtggagatgctcagggtggaaaaaactgtatctttctgactgtgaagcacctactttaaaccacatcaccggagtgcctaaaagggcaacaactgtagaacaggaaacctgcaaaattatgtagacactagaaaggtagctagtactcaaaacagatggaagcagtggtgctaaactcaaggcagctatttctctttcaagaagcatttaaggtttaggaacacctttaactggaaagcacacagganatacttaggacaggtctccccttaatgctaggtctttcagtagcccaaatcatataaaataaattnccatttnggtatccacaggcagggcccattttcttgggcattcctgccccttcatgcaggca

SEQ ID NO: 459902 - DNA, 322 bp, Homo Sapiens
  misc_feature (81)..(81): n is a, c, g, or t
  misc_feature (296)..(296): n is a, c, g, or t
  misc_feature (309)..(309): n is a, c, g, or t
cttcttcaaccctagactccaagtcatgtagaatctctcctaattcctgcttttaagcagcaagtcttgccctcatctctnctgcttcagcaaagagctcagtctctgcttgtagttgttctgcaaggatattcttctcttctaaaagctgctggtgcttccgctccatctcctccagctctccttccaccttcgtctgcttctccttcaccttcaacagctcttcatctttggcctgaagttcttcctcctggggagtcacttgtagaagcggcttcacctttgtgaagactcgncaccactgccagngccgtaatttcag

SEQ ID NO: 459903 - DNA, 420 bp, Homo Sapiens
  misc_feature (33)..(33): n is a, c, g, or t
ggctcatggtaactgtaacttttgggagtactncgccctcacaggccgcaaacccctccagttccacagccttggggggctcctcaaaccaggttctggctctgagcacttccaccaggctgggtccggtgagctcagcagcggtagagtgggtggagccgggcaggctggcaaggaacaggcgggtcctggcggctgagtcgcgttggctgtggaggaggtctttcaccagccagcagcagaacagaggtgtggggccctggagctccacccgcctcacctcaaactgtatactcagccgtaagccatctcgatggtagcagctcccggagtaggcaccctcctggatctcccgctgcaggccagcagccccgcgcatcacgatcacgggcgtgtaggtgacctggacgttcagccttg

SEQ ID NO: 459904 - DNA, 238 bp, Homo Sapiens
ctggataatagattcatacaattccatgtcaaagcaaagaaaaaaaagtgccacattttagactgtgaagtcttattataagtaagctcagtatttccattagttactcattaggctatttaataaaggattcttaacctggagtaagggtctgtggttaggattcaaaggagttgtcagtgaacttggaagggaaaaaacttcatctttattttctctaacctctaactgaaatagc

SEQ ID NO: 459905 - DNA, 599 bp, Homo Sapiens
  misc_feature (54)..(54): n is a, c, g, or t
  misc_feature (96)..(96): n is a, c, g, or t
  misc_feature (155)..(155): n is a, c, g, or t
  misc_feature (257)..(382): n is a, c, g, or t
agaaaatggaaggaaatccaaaaggccatatatgaccgggggcagaaaagcccngctgacccaatgcccttccctaaatatttaggccctcacacnggcatcaaaaatacgggtaattgttttagaatttttaaaaaggtgacccatcattttangccatagctaaatttctagtctgtatttatggattctagtacctgacatttttagagatataatacagataggtatgtatgtatgtatggatagattcaatnnnnnnnnnnnnnnnnnnnnnnnnnnnnnnnnnnnnnnnnnnnnnnnnnnnnnnnnnnnnnnnnnnnnnnnnnnnnnnnnnnnnnnnnnnnnnnnnnnnnnnnnnnnnnnnnnnnnnnnnnnnnnngctgtcttgaaccaggaggaccctgttaaggcccttccggagactggtcaattcttcttgagcagcaaattggagatttttttgaccaagagtctaccaaccaaaaggactgaacggaaagagaggagtggtactccaaagaaaatgggaggtgtcaaaagaagtgaaacatattctaggaaatataaacagcagatgtctactacttctaaacttc

SEQ ID NO: 459906 - DNA, 455 bp, Homo Sapiens
tgcccacccatataccatagtggtcaccaaaaaagaaacctcttcaacttgaaaagggaagtgaacatgagccatgagagagatttaaaagacccctgtgcttgcagttaatgccacgttgattgattatctgtgcttcaaaggtcacagaaatcttaaaggatttttagcaccatgtagatattgtcttttgtcctgctttataaaaagcgttgctataatgtattagtgggttctcgtgtctccaaattaccaccgtggctaggctgctggaaaaaagcactgttctgttcactccaatctcctggtagactctgttggtctatagacttctgtgaagccagtgggtttctactaataaccaggtccagcttattcccggattctgctatgaggggcacaacaaggcagcagtcaaagtctctggttcggacatgattcacctgtaagagcct

SEQ ID NO: 459907 - DNA, 287 bp, Homo Sapiens
aaaaaaatattatttcaatcacatttcagaaccccccgggcaagaaagtataaagcaggatcatgttaagaaaaaaggaaaaaagatcatgagtcacttaaatatgtatttttatttgtaacaaacaagtattaaactgtaaagtatttttgtacaaatttaatactttaatagcatggtatttatcgtctatgtatggttttggggaattcaaaattgttcaaatatttgtatggaaaaaaataaaaccctctaccaaatggaataaacagtgattttaaaaagcc

SEQ ID NO: 459908 - DNA, 541 bp, Homo Sapiens
cagtggtcatggcaggtggacatccaacacctgagggagagtgatgccagacggataggatataaacatctcctacatacatatgccatacataaagcatatacttatatgcatacacagtttacatttcccagccagtgttcagaaaaactagaagagagaagtgatgttccattttgtcttggaaaagtatatattttacatatacatgcatgcatatgtctacatacatatgcatgtaatgcctacctgcatattaccaaactgatacacacatgtatatatggaggtgtgtgtgtatatacatgtacattcactttatcacatactccatcagcttgacttctgagatggtaattcaagtttcatctttgttctgggcttcgtttctgtctctactgtattttttgtctcaaccgtcaagtcacattttatcaacacgttagactgggacaaaccaacatgggatggaaactccaatctcatggaggctaaaatcacagcgcaggttgggattgaagagttgctgatttcctttccc

SEQ ID NO: 459909 - DNA, 355 bp, Homo Sapiens
gttgttgttgttgaatacacactgtatttaactttttttaatcccagagaagtgaaatgcaacatctgtttgagtttatgtaacatctgaagactgacaactcagaatttcctaattaaagtcatttttaaggcactctgcagagccagctttcatttcttccttcattgggtttttctccaaactgtagcagaatacctggtttctctttcttcaaagtgatacacacatgctcatgccttaacctgctcttctgtcctccaggacaacgaaacacagcacaattccaaggaggaaatggtaaaggaaggaaatacatggtgtaggggagcagggtaaggagacagcagagagg

SEQ ID NO: 459910 - DNA, 335 bp, Homo Sapiens
  misc_feature (101)..(101): n is a, c, g, or t
tttttttatttgacaatgagatgctttattaaacttgatacatttactatataagatttctgtgaaaaaatggggtatgaaattattttggttctgaatcntttgcattataaaatctaacccaaaactatgtcatttcactgtattctgtgactattagcagatggatgaccaaaggcaactacttcctttcctggcaaaacaagacaagtttcagctgacttccccatggtgttacaagttctcctagtgaagtaaaaagtcccaacccctctttctatgcatgtcatctccagggaaggtgagctttagggaagcacctgcgccagccttat

SEQ ID NO: 459911 - DNA, 514 bp, Homo Sapiens
  misc_feature (426)..(426): n is a, c, g, or t
  misc_feature (437)..(437): n is a, c, g, or t
  misc_feature (486)..(486): n is a, c, g, or t
tttcttaataagtcaccttttttaatgtaggacatctttctttgacaggctactgtatctataatcaccgttaatctagctcactgcaatgtcattcacacatcagttttacatgaatatgcaaagaacacaataatcaactgtcaaacctaaacgattaattacttatcacagaatctgttgaatatttttgttttctaactgagcaagggaaatcctgtcagcttttaaaagtaagggctagattcttagtcataattactcatcatctgtcaagttgacacctcatatgcatgaaataagccttacacatttgatttaataacaaaaataggtaattttattcccctattgtaaggtacttcataggtaacaatttatttatttcacaactctggctatgggcggattggattgttttatctntctatactttngggggtttttaccctttgggggatgtggaacttcatctggactttaaangagggggcactttaatttaatggctttt

SEQ ID NO: 459912 - DNA, 551 bp, Homo Sapiens
  misc_feature (39)..(39): n is a, c, g, or t
  misc_feature (53)..(53): n is a, c, g, or t
  misc_feature (75)..(75): n is a, c, g, or t
  misc_feature (396)..(396): n is a, c, g, or t
  misc_feature (455)..(455): n is a, c, g, or t
  misc_feature (458)..(458): n is a, c, g, or t
  misc_feature (505)..(505): n is a, c, g, or t
gcccccataggatgtctgaaagacccctggagacccctnggactcaatgggtncccagtctccttctgggccccnggcactccatcatatgggatgccctttaaagtgggtactaccccctctgaattttagtttccctctctcccctactctcccacttgaagactaaacttccctgggacttcccccccatcccagaacagttgtgggatcacggagagtaaagaagtgagatttttctctgaggtaacatagagcagaagggatgccacagatagagacattatccactcactactaatgcatccatgtctccatccactcgtctatctgtttaacaaatatttactaagtggcttcaatgtagaattcatctctggttcactgccaaatccnccagcacctagcacgggtcttcgcatgttggaggtgctcaataactattgagtgagtgngtnaatgaatgaatgaatgctgagctctatttcagttgctgcatgggttncaaagctttaggagccatggcctcaagctccaactgcttcagtagg

SEQ ID NO: 459913 - DNA, 531 bp, Homo Sapiens
  misc_feature (476)..(476): n is a, c, g, or t
  misc_feature (498)..(498): n is a, c, g, or t
  misc_feature (505)..(505): n is a, c, g, or t
atacgaatctgaaatgagtttatttttttcaattaaagagataatattactaatcacaaaaccagaacctacccatgcccactgcctgcctctctgcccctcactctacaatgttctgttcttcccccacttcactacccatcctctaaaagtctctgattcatggttgttgattttgtccatactgaaagggagaaaattcttgtccaattagggttacattcaaatgatcagggagctagattagggataaggcaggacaacagagagaaactcatcagggtccccagtaagtgacaagcttctgaggttcagacccccttcccttcaaatcaccaaacaccagcagcttttcctgggctgttcagttgagcaggctaagcttgaggtgagaggagagggatactgtttttaaaaggaggaaagtgctctggtctccgccttgggaatcaacagggtgggtcatttgtgtgggntttctgggactttctctagggntaccctnatccttggcataaggttttttctagg

SEQ ID NO: 459914 - DNA, 448 bp, Homo Sapiens
  misc_feature (12)..(12): n is a, c, g, or t
  misc_feature (22)..(22): n is a, c, g, or t
  misc_feature (89)..(89): n is a, c, g, or t
  misc_feature (420)..(420): n is a, c, g, or t
tttcagagatgnccctaagtanatatacctgtgtccaatgtattgataggccccagtagtgctaaaatgtcaggtccttatgaaaatgntcctacacagatgaatacaatttcaatcaaaatcacagctatattttttgtaaagattgacaaactgattctagaacgtaatggaaaagcaagggattacagaagccaaaattattctgaaaaaggacaaacatggaagactcatgacctgatttcaagacttaatgtgaagcttcagtaaccaagactgtggtactgacaaaggacagacacacagatcaatggaacaagatagtccagagattagatttctgcaaatatgatttgttaatttttttgacattcaaaggaaattgagtggagaaaggatagtctaacagatggtgctggnacaattgaacctccatattcaaaaaaaa

SEQ ID NO: 459915 - DNA, 405 bp, Homo Sapiens
  misc_feature (243)..(244): n is a, c, g, or t
  misc_feature (252)..(252): n is a, c, g, or t
  misc_feature (332)..(332): n is a, c, g, or t
  misc_feature (388)..(388): n is a, c, g, or t
gcaatccaatagtattttattctcctaggagagctgccagatttcaaattttgattaaataatactgtctttctgtgatccaattattttttttccatatcattttgcatataagccatgcctctggtcctcaaacagctgccttctagcatcaatcaatttggaatcttagaggtatacctttaagcaattagacttacatatacatacacacataagtatatttagtttatttacctgggnnttgtgccnacatttccaagctgtttcccagttcaaaatgtcaaattcaaacaacattctcctcacccctcaatgggtctttacgacanttaaaaacaaaatgaatcaatctgggcattgttctcccaatctcatcaggactaanggggaggtcaggcacaa

SEQ ID NO: 459916 - DNA, 485 bp, Homo Sapiens
  misc_feature (35)..(35): n is a, c, g, or t
  misc_feature (86)..(86): n is a, c, g, or t
acctgttccataacccatcccacatccccttccangagactaaacctcctggccatgtttggccttcacccaacaatgccccgtcnagagcctaaaatgtgtgggtgtcttgccctagcatgggagcatcacatacatatatgtatttgagattgtgaaccgaaaccaagaggcaaatgaagaacttacggtctctgggaagctgcacaaaggcaggtattttccttcacttaccacagagagcaagaagatgctctttctcaaactaaaactaaaaaaggttatgcttttataaggctttatgtgagctagaggcagctagacatgtgcgctattcatcagtgataatattctgaagacccaaagactgtcctccttgggcattggcttaatctatgccctctgtcctcaaaatgcaaataatcactttttaaggcatacctttgggaaaagtctagaggcagaaggcagctactggactgttg

SEQ ID NO: 459917 - DNA, 402 bp, Homo Sapiens
  misc_feature (284)..(284): n is a, c, g, or t
ggggctttcttttttaggaataaatagtttatttacaaatcattctgatttcttattgaagttagtggaaaattgaacacttattcatgctacaaaattaccagtgatagttactaccattatatgtcctagtctccaaatacctagtacttacctgtaatcaagaaatgatttgaagagctaagtatgttatagttcccaggatgctgcttatggttttctggctgctctttaactttaatgaatattcaatggcttattattattccaaatgaggggggacnaccttggatttctttattgtaatgttctcaaggtcaatctacattataaatgagtaggcaggctgggatacttggggaaaatttggaaggatgccacatgtccccattaccacattgc

SEQ ID NO: 459918 - DNA, 566 bp, Homo Sapiens
  misc_feature (470)..(470): n is a, c, g, or t
  misc_feature (521)..(521): n is a, c, g, or t
  misc_feature (528)..(528): n is a, c, g, or t
  misc_feature (538)..(538): n is a, c, g, or t
ttacagagttttacaattttattatgtatgtaatatgcatgtaattcagtacacaaaaatgctatcatcttgataaaattggaaagcattaatatttcatattattgctttttcttaacaaagaccctctccccagtcatcaaacatcctgaagttccaactgtccccagttgaattcactagctgctgagtaccttttgaatactttttctgtgttcatggaatttctgaccttatgaatccgcagacccttaacaacgagcctgaaatctccagctcttttgcagctagggtacaggtatgtgacctttccctcatcagacacacccatggggcaactgtgatttgaaaacacataaagtgaagaagcatgtgggcaaaggggcagcaaggatgggcagcaggaaacaccctgcttttaggaatctcaggaggaggattctaggtttcccaattcccaatgttaggcngttaaatctataggtatctctgcccggggatgaccacactggaaggggctnactgggngtaggttccncaggtgaaacttgggggtgttgctttct

SEQ ID NO: 459919 - DNA, 522 bp, Homo Sapiens
  misc_feature (165)..(220): n is a, c, g, or t
  misc_feature (483)..(483): n is a, c, g, or t
  misc_feature (499)..(499): n is a, c, g, or t
  misc_feature (504)..(504): n is a, c, g, or t
caactggaaaggtcaggaattttaatgttacgttgtggtctttgaaaactgttaggcctagcaatagataaatctcaaaattaattttaaaatctgtattgacaagaataggtaaaattatgaccaggaatcattgttacccttagttccaagaggtggtttttnnnnnnnnnnnnnnnnnnnnnnnnnnnnnnnnnnnnnnnnnnnnnnnnnnnnnnnncgtgtaagaatggtttgcagattgattggttaaaagtgtttttagcacatccccaaccctgaaaacttcgcattaagagccaagcacaatgttggtagctccaagatattctgactgtgttctcagaatgaggggattacccatcactgggtattccttcccaagttggaaactttaggattttcactgggtaatacaccttgcccaagttttatggggaatcttgattatactgtggaaaatgcctatctggttagttgtcntgctgccccggtcttntccantacccgtaactaacccgt

SEQ ID NO: 459920 - DNA, 260 bp, Homo Sapiens
atgatgggttgatttacgggcagcacccaccgcccagccccgccgcccgcccacctctacctcccagtagtgccggccggagcggaagccctgggcccccagtacgcagcagtcggccgagaagcgcttgggatggtcagcaacctcctgccgccgctctgccaggcggaccccccggcggtcaggggacagcatcagggccgggtgagccgtgtcagggtccagcgtcaggtccactctcgcagcctgacagaacatcc

SEQ ID NO: 459921 - DNA, 466 bp, Homo Sapiens
  misc_feature (20)..(20): n is a, c, g, or t
taaatccaaccccaaaaggnttccaaccctttggaaacccttgagacttgatttgtggacccagccctaaacatgcgccccccagaacacatggtaaatgttttggggtatactttaaaagaacatgtattcctgatgtttttgaatgtaatatcttatgtcttattcatatttatagtaccaatacacagcacatagtagaaacttaacatatattgagttaaataattcaaaggttttatccgattggtggcaattcaagaccaaataagagaggatgatgatgacatcactatttctgttaagacagggcctcatacaacatacaggaatgtccagttgtcaagtcatgcagtttctcccctattctaaccaatgttaatgccaatactttgtgatgaaaattatcccagtatttttcctcctatgtttccaccagttttcccttcattgattgttaagattt

SEQ ID NO: 459922 - DNA, 454 bp, Homo Sapiens
ataatcaacctataaggatttatcaataaataaacccttatttattataaggaattggcttacacaataatggaggccgagaaggcccaagtctgctgtccgaagtctgagaaccaggagcactgatggtgtcagtcccagttcaagggcaggagaagatgggtgtcccagcgccacagtcaggcagaaaattcaagcttcctccacctattttatttgggtccttagaagactggatcaagcccatccacactggggactgcaatctgctttattcagtccatcaattcaaatgcgaatttcctccagaaaaagcttcatggaacacaaccagaaataatgttcgatcatatatggggggcatcctgtgggcccagcgaagttggacatgcataaaattaaccattcacacctccatgggagggccaggaaattttatgtatttctgagggac

SEQ ID NO: 459923 - DNA, 363 bp, Homo Sapiens
gtgtgtgggtgtggggtgcccctgccctggactgctgtgtaaggctgcaccgggcagatgcacagcttccctcttggcctgggctggacagaacaagaccctcggggactggaaatgtgagcagctttggactctgagagtccaaatgagctactcagcagtctgggtaggtgaaggtttgggcggggttccacaactgtgtactttgaggcaatagctctgcaagaggttagccagacctcagccaagagggtttcgggtttcaacacatctggggaaccgagggttaaacaaaataagtctcccatctgcaggatttatcagatcctttaatatgctaatgtgaaatgaggcttctccttg

SEQ ID NO: 459924 - DNA, 811 bp, Homo Sapiens
aggcaaaaagaaattttattctttcacagaagtctgaggcaggcaggtccagagttcatgcaggagctcaataacatcagagattgggctctttttgttcttcttagcatatcgatgttttacgtgatgctgggcacctcggggacctaagatggctgttgtagctccatgcatcatgattaaaccagagacaggaagtgtacgatggaagaggccagaggtgatggcctcctcctctccttttgtcttattcctggagtgactccctcctcttatcagcagggatacaagcagtgcctggcagccttccctctctcctgtatgagccaaaagcaagactcatggcacccctccctgcaggaaaggggtggaatggagcccctggcaaagggggctggacttgcagtgacagtgctgctctgaacaggactaggcttctgttggagaggtggtcagcggctgctaggcaggtcacaagctgcctcacccatggctctccagctctgcacctaccctctccttctaataaatctgtttcaataaccaccacgaggtttaaagaggagcagtaacttgcccacggttgcgccaggcacccctagaagagcaagaactccttacaaagttattaaaacaggcaaatcccatataggtgacatttctacccaacaatgctgacatctcttttagttttgagccttagtaatccaattttctgcctcaggaagaggcagcagcttctgggaaaaatctgctcctgctaaggtggcccattcattgttttacctgaatagagtggtggatggtgaag

SEQ ID NO: 459925 - DNA, 430 bp, Homo Sapiens
  misc_feature (48)..(68): n is a, c, g, or t
  misc_feature (358)..(358): n is a, c, g, or t
  misc_feature (363)..(363): n is a, c, g, or t
tttaagccttatgggccacatgctgtgtctgtttcatattctgctccnnnnnnnnnnnnnnnnnnnnnaagaaaagacacccttttaaacatataaaaaccattctgagcaacaggctggtgctaaaaacaggtcatggtaaccattggctctagggttgtagtttactgttgatatagattgtacactgataagccaaaatacaaacctaatgaaactgacatacttaaggagctttactctttgttagcaatcattgttaatatttattgaatgggtgactacgtgggggaatgctgttccaagtgtgataggatatattaacttacttaatcctcacacccactctaatttcctncggtnctattgtcagactccattttacagacagggagaggcagggcatagtggagggtaggtgacttttccg

SEQ ID NO: 459926 - DNA, 404 bp, Homo Sapiens
  misc_feature (363)..(363): n is a, c, g, or t
tttttgaggttgttctctaaatgtttattataacttctaatgtgatggagtcagtgtgttcccattagtccttctcctcctcatttagtagctcagaggagtcccagagcaaacttcctcaaatcaggtcggttcatactgcactgccttcagcctgatgtgagtcttactgtgctgggtttatgtccaagggccagtaaatattcccttccttccagggctcaccactgtttcaaatcctctggcaagcccagtggaagaacttctctgtatgggaaattcagcaagtaaacttggaagtatttgttcattggagtttgaatctgagccaaacagttcactcaaaaccaaccttccactcancaaaccagtgttatgaaagtttgcatgcatttgggcaggaa

SEQ ID NO: 459927 - DNA, 460 bp, Homo Sapiens
  misc_feature (434)..(434): n is a, c, g, or t
  misc_feature (450)..(450): n is a, c, g, or t
ccagtttgtgatgttttctctaaaaacttgaagttcctcaggcctgtaacttctcctggaaaagatgattattcaaaataatgttttggggtaaccagtggagttgggtagaatgaccaaataattattttccaaactgggatactttttagagtgaaaggggctattattaggtgggacaaaaggaataaatgaagactgcccagaaaaaactgagactatggacattcaaatcatgggagaaaataattttgtagattatgttccattgctaatgaatttgacttaggaaaagaattgccttatttttaagagattgtttcagtggttcacataaaggctcgctcactggtttctcttgagttccttacacacttatataagttgttctttccagttttatggattcaactactgtttttccttcagctggnctttattttttaaacncccttaaggc

SEQ ID NO: 459928 - DNA, 253 bp, Homo Sapiens
  misc_feature (199)..(199): n is a, c, g, or t
  misc_feature (234)..(234): n is a, c, g, or t
ttttttcacatctcaaaaaaagtttattatgtttgatccaacagattctcaatattagcaaatcattccacttacccccaagcgccagatcttgactgtacagtctaaaaacatttgtcaaagtgagaaaaatgttacagaacatctcataaaagaattaagatacaaatagtatatacagatagtagattgtaacaangtggaacgtacttgcaagacatcacctagctaaantacttgattccctatgagg

SEQ ID NO: 459929 - DNA, 499 bp, Homo Sapiens
  misc_feature (23)..(23): n is a, c, g, or t
  misc_feature (129)..(137): n is a, c, g, or t
acccaattcctaagtaggatagnaagaagaagaagggggctttttcctacccacagttccaagtcctaagaaaggagacagatgctccctccatagaatgtaaacaatgtcatggaggcataatacacnnnnnnnnnttgtttgtttttgctattcctatctggaggcaggaacatcacaggagactaggagacttttcccttgccacctccactcccagaatccaaagctcctccctgctccacatctcactccccatctagcaaggacacccagtggaatgaagcagagtatggctgacaacccactgccagaaatagcatcagatgaggcagaatccatattacgtttttgagaatttttgggtgggtcctaagtgtgagtagagctctgggacaaataaaataaactagagaagctacttccaaaggattggatttgaccctggagtaaataaatgtataaatattgtttgagagtttgtcatcctttatctcct

SEQ ID NO: 459930 - DNA, 472 bp, Homo Sapiens
  misc_feature (362)..(362): n is a, c, g, or t
ttttcagttcaaatgcttggaactctaatgtaaatacacatttattgacacagaaagatatccataacatattgttaaaattttaaacaccctgctacaaacagtttatataatatctcaattttgttaaaatacaagcatatttacatatatgtataaactctaaacagtgtctaaagggatataaatcaaaatgttattagtgggtaattttgcttttctgttgtatatagttctctatttttgtatttttatattgaccattaatattttatattcagaaaataaatgatacagttctttgtatctgtgggttataaagggtaggaggttaataggtctgggtttaaaatgttaaggantaaactttaaaatcaaaatcactaaggtatataatcttgcacatgaaatcagacagacccaagttcaaaatcaattattccattaattacctcagtggctttgggctttc

SEQ ID NO: 459931 - DNA, 448 bp, Homo Sapiens
  misc_feature (18)..(18): n is a, c, g, or t
  misc_feature (29)..(29): n is a, c, g, or t
  misc_feature (36)..(36): n is a, c, g, or t
  misc_feature (45)..(45): n is a, c, g, or t
accctagaataggggaanaaaggattttnacctttnaaacctttnaaatgagataaaaacagatgtaagagatccacatggcatcattaaaccctgcaatggtttagactctactgatagaaaaagaagtatgaagttgaaaacttttgctagtagagaaaccaacaataacatataaattgtttgctgcaaattatattcattcattcacaccttggtagcattctttggttaaggttccttgaaaatttttctgaataaaaattatgaatggaaatgagaggagaaagagggatgttcaatgaaggatgtttacctgcttccttgccttttcattgtgctaacataacatgcatactacaattactaatagaagaataatagacttacctggggtgctgacatgcatatttagattccagaaaataaaatttcttaagaaaaaagc

SEQ ID NO: 459932 - DNA, 429 bp, Homo Sapiens
  misc_feature (26)..(26): n is a, c, g, or t
  misc_feature (38)..(38): n is a, c, g, or t
  misc_feature (43)..(43): n is a, c, g, or t
aaattggaatcaaaaagcttccatgnctgcaaagtccnaatanccgcaaacttcccatcctcactgcatgtgccgcaagtgggactccccggggctgaagaccacctcgttcacctgggggaagccgtagctaggctgggggtgttggcccctgggcagggtaaagggacgcaggcatttcctatttccacccccagggccgggctgtccaaaccagagcaatgtccttctgccccggccaactccacatggcggaaaggagcaatgccggcccccgtgtgtgtccctgcactagatctgggtgagtccaaaccaaagcaagcccactagccagtcaaacccggcgggataccgaggagaaagctgttctgacagcacctcaaagacaggagcgtggccgtgcatccctagcaggctacagactgaggc

SEQ ID NO: 459933 - DNA, 549 bp, Homo Sapiens
  misc_feature (84)..(84): n is a, c, g, or t
cttgttgtagtccaacggggttggaaagatcattccctgaaaaaggcccttcttgggaaaaataattagcctttgtccttgttnccaaagggcagtggaggttgggttacctgcccacaggagggccagcctccttcaacaaggcctccttggtttctcagaaatgacttaattcattgattcatctttcaaaagaggtcactatggctgcacttctcaaactagtgacaagtgtcccagttggtactttaagctgccaggaacattgaagacaaaatactaaataatttgcccttattcgaacgggcgcctctcctcttaggtttatagtaatgccacctgaggcgcggctccatagcgatcatcacaggtgtggcgggagggagggcggcagtgaccacgagacggggcgcagagggcgagcgcacggctggcagtgacaggtcgcgacccacgccttgcggagagcagaaaggcccagacgccagggaacaggactagccccagtaccgccttcgctcctgccctgcgcccacaaacccatcgacg

SEQ ID NO: 459934 - DNA, 271 bp, Homo Sapiens
  misc_feature (49)..(49): n is a, c, g, or t
  misc_feature (253)..(253): n is a, c, g, or t
gtcccaccccagtttgtatttccgttggttgttggcacttttttctcantcccccatctcattaccttgtctgttttctggcattcactataatcagccttgcactagagctgtttgtggacttggcttcaccccctcctcctcagccctcccccacccattaaattgtgagctcttagaagacaggggtggcctttcatgtctgatcccctaccaaatctagcacagtgccttgcatcaagtagatttcaanaaatatatgttaaatggc

SEQ ID NO: 459935 - DNA, 446 bp, Homo Sapiens
cccgctcccaattccctgccttttacagggcttactgggggaaatttattaacatttaggaactaccctactgcttcaacttcctatattatatagtcagtcccctggagactattctttatctcagctactctatactactgccatttacatggaaggctgctggaattatgcaaccttcttgagaatcgaaaaggcgctaaggacaatagggcaatatataaccagcccaattagagaaaatagcaagtcaatttctatcagagttgttgattaccaattcataataatgcaatggatggctaagatcagggcagaggcaagatacagacaataaggggagtgtattggctgcagagaattttaaaacaataccaaggaactcaccatgttcccagcctgtagccacccccaccacctactttccctgacttggtacattactg

SEQ ID NO: 459936 - DNA, 543 bp, Homo Sapiens
  misc_feature (45)..(45): n is a, c, g, or t
  misc_feature (56)..(56): n is a, c, g, or t
  misc_feature (77)..(77): n is a, c, g, or t
  misc_feature (114)..(114): n is a, c, g, or t
ttgagtagttccctttcccacaaataaccctagtcaacagctgangacccacctcnggaccacgacatttgggccanggtcttttgaatcccacccttctttccctgctggccnttctctaccccagcttggggcagagcccggaagaagagaaagaagaacaacttgactgcatgtggattttctggcaaaagtttagtgaaggacaaagttcaacctaatttctaaaataaatttttcaagtgttattggtacaaactcagtctgttccccattaccacagaaaccaagaattaactataattttgcttctatttgattccctgtaaggacaaaaccacacttttaatgccaacacatgcacagtctaacattacagtaaacgtttttctgacgcatttacagattgacaaaaagagagagagagaaagaaataaactaaaacatttggctagggcttagttacttcattgaaaatcagtaatatttcagaaagtagtacaatgtagaaattactaaatccattctttaaagagccctcag

SEQ ID NO: 459937 - DNA, 496 bp, Homo Sapiens
  misc_feature (31)..(31): n is a, c, g, or t
  misc_feature (45)..(45): n is a, c, g, or t
  misc_feature (48)..(56): n is a, c, g, or t
  misc_feature (67)..(67): n is a, c, g, or t
  misc_feature (92)..(92): n is a, c, g, or t
  misc_feature (153)..(153): n is a, c, g, or t
  misc_feature (167)..(219): n is a, c, g, or t
  misc_feature (407)..(407): n is a, c, g, or t
ttgatcccatgcttccacaaaagctgacccntctatttggagaanagnnnnnnnnncacaaaggaanagaaggacagggaatgccatgctanagttaaagagtctacatgcaagagagtttggggaggaaaggcttcagatgggccagaccanccagggggcccccnnnnnnnnnnnnnnnnnnnnnnnnnnnnnnnnnnnnnnnnnnnnnnnnnnnnncaagagtagatcctgggcccagaggcagggctacggggggacagaagatgatccatcttcctagagcagcaaatggagaggagaggctggcatgggatgtggggcagattagggcagtttctgaaaggcagagaggggcagtgagtgcatgagagtaagccagccttctgccaggtgcgtactgcatnacaggcaggtgctcaaagaaagcattatttccgaaaggatcttcaatctgaaactcttcccattgggccaggatggctttgcattctga

SEQ ID NO: 459938 - DNA, 328 bp, Homo Sapiens
aatctgtggaagaaagtttgaagtatttatgtaaccagattttaattcaaaaataactgtaaaaatcaggaaaatgtgtattttgtgcatatttatgctgattcgtatactgctcaattccattgtgttggggagaatatgaaatgaatgtacaacaggaaatgaattgcattctgtagcagtgataaaacaagctctgggcattacgtttttaagtgaagttttccttaagttttaaaaaaattttattccaacagcaaaacccacacgtaaacattgcaagctactactgcactccagcctgggtgacagggcaagaccctatctc

SEQ ID NO: 459939 - DNA, 443 bp, Homo Sapiens
  misc_feature (15)..(15): n is a, c, g, or t
  misc_feature (115)..(115): n is a, c, g, or t
cgggggaaggggccnggtaaaagggggccctttaaccctttaaatttgtaatggtgtattcctttacctgaaaattccagaatgagtgttgcaaaatgtaaggatttgatcaganctgagtggtagcacagaagtgtttttcaagttataaaaaattttgaaatgtatagtgtcaggagcaaccaatacacaaacataaaaaagcaagctcaaatggataaaaaggtagatgcaccataaatctggcagtctctaagtcacacatttactttgcctatgtaggtaaaatggtttctattgatttgtaccaacttgtatttacatggaagaccaacaaaggctgacctaaaagaaactgtcaaataggttagaaattgaaattaggcatacaactcataaaattagtgccgtgtaacttcttaagtacttctggcatcaaagtg

SEQ ID NO: 459940 - DNA, 489 bp, Homo Sapiens
  misc_feature (24)..(24): n is a, c, g, or t
  misc_feature (30)..(30): n is a, c, g, or t
cccccacatggtctcccggaaaangggaangggccgccacccctttttgggcccctaaatggaaaatgtatgaaagacagatgttccactgtcctgttgcggctcctcaagatcccttcaccttaaattatcctgcctaacacataattccatgaggtgaagtaacagacgatccttataagcagggagaaacagaaatggaccttggataaggaagcaactggtcaaaatagctggataatttaaaatattatcttatatttttgaataaacataacaaaggcagtgaatacgatttgctttcagtaaaacagatacattacaaaaatagatatttgcatacagaaaaaagtttactaacatatttatacagaaaattgatgtcctaaagtcttttaaaaaattaaaagcagcgtacaaactaattttccttcactgaaagccattttttcctcttgataaatattttgttacatgtttttggttttg

SEQ ID NO: 459941 - DNA, 520 bp, Homo Sapiens
  misc_feature (15)..(15): n is a, c, g, or t
  misc_feature (88)..(88): n is a, c, g, or t
  misc_feature (500)..(500): n is a, c, g, or t
tgctttccaaaagtnattttgaaccaaggctgatgatcattggtttgttttgcacaagagcgcgtactttgctagcagagtgagagtnagagtttgggcaggaggcagccaggcatgaagatgtaggaggcgtcctgccctcggccacgtgcggggatcagagttgggtgaaccctgcttaggagtcgttagaacacaatcctgagacagtttctcctccgaggtggttctgctgggtttctccatctcaactgctgttgtcctggggttacagttacaggcgcttgtgtgaattgcggtgttttaaagccttcagagcagaaggatgtgaacttgtccttctccttgtgcccctctctctgtcatcccacttgttaaattgtttctgggctgggaggataagtgaggaggccacagggaacttttgcatgttgtctcttaggcatttttgagtttaggaggagcaactgaaagaccgagctgaaactaacactgaaccncatcaacaattcacacactg

SEQ ID NO: 459942 - DNA, 364 bp, Homo Sapiens
taagggacaggggctgttgacatcaactcaatcactagaataaaccagaaatacagtactaattaactgggttttctgcttattctttttatggctaccaaaactatcagcaaagttgacagcatcctcaagtaaaacttcttaggagtgcagaattatcgttgttaagtatttttgcaactacaggctatgtgatcaaccaggccagccagcttctcaaaggagcaactatctgtggaactcacaggttctaaaacaaaagaaccccgcatgaaggtagctgtagctgttcacaagaaaccaatgctttatcttatgatttacattttttgggccgggcgcaggtgtcacgcctatatatatg

SEQ ID NO: 459943 - DNA, 493 bp, Homo Sapiens
  misc_feature (385)..(385): n is a, c, g, or t
  misc_feature (436)..(436): n is a, c, g, or t
  misc_feature (446)..(446): n is a, c, g, or t
  misc_feature (473)..(473): n is a, c, g, or t
cttgtttaatttcattctttgatagttgtaatagtaattgacaccgaggaaaaaacaatctactctaaatattctacacagtaaggattaaatttcattttctatggttttactatttagtgggcattgtgatacattctaatctacacattgcccctctacccatgccttgtcttttgtcctcagaatatcttattaatcagaactttcataaacatacacaattctttgactgtttcaagagtcaggctatattttcagctcttgtcttgtttctgtgaatatggtggcagaaatcatggatttgagggtcaactggactggtgtcaagcagtcccctaccgtttattagctgaatgagcttaggaaatcatttgtttaaccnttaaggccccaattgtctccatctggtaaaatgaagggggatattatcccnctcagggggnttccattggttaggatccaattaaatnatttgaaatttaagggtgta

SEQ ID NO: 459944 - DNA, 387 bp, Homo Sapiens
ttgtaagctggaactaacaaagaacattttgtaaaggtaagtggaaaggggcagcaaagatcctaatagatttaaataacttatttctctgcaagttggagcagaaaggtactgacctccctggtgatagcaatggaaaattatggctccttgggcagcaaaaagggtgtagaccttcctggtgactgtggacctgcttgccatgtcagaaaaggacatccaggatctgaagtttggggtagaatgggatgtggatatggtgtttgcctctttcatccatgtggcatctaatgtccatgaaattagaaaggcaattattgcaaactggagcaaggtgcccacttgcccaccagagttaggctcttaccttcccagaggaactgagac

SEQ ID NO: 459945 - DNA, 369 bp, Homo Sapiens
  misc_feature (26)..(26): n is a, c, g, or t
  misc_feature (167)..(176): n is a, c, g, or t
gataagtgattagtaagcacattttntctcctttcaggaaaccactattttccttttctacatgctgttttgtaagtagtacttttatgaaggttgtcttcaaatgttcgcatcttccatttctactgcccttgggttatccatcctgtcattttgtgccaatcacnnnnnnnnnnaacttttaagttcagggatgaaagtgtagatttgttacataggtaaacttgtgtcatggggttgttgtacagattatttcatcacccagggtgttaagcctagtatgcactagttgtttttcctgatcctctccctgctcccaccctccaccctctggataggccccagtgtgtgttgttcccctctgtgtgg

SEQ ID NO: 459946 - DNA, 442 bp, Homo Sapiens
ttttttttacagagtgaatacagctttattggatgatttagaaaccacctggaatcattcttataattcaaaacaccaactatcattatgataacagtacataagttccagtattttccactttgagagaaccctggtttccttggctgctttctaaagaggagaaaaagaacacctaacagggagatagatcaacaatgagcacatttgagggcataggcaaaaagtagggagatcagttgttatgttatttaggtaagaactgatacagtaacagtcaggagacaaatagaaactgcagtgggacttgggagacactgcctaagtgggaagggtgaaagggaagtaggagccatgccaaaccaagcttaggttggaccatatttgatggacaaagtcgtaaatgggtgtttagggagttttgttagggaggttaaaaggg

SEQ ID NO: 459947 - DNA, 575 bp, Homo Sapiens
ggtcccagcaccccctgcccaccgggaggtacatgaagtaattgttgtgcaggctgagtttaagagagcgagaccccagcgaacacgtcccacaggcagggacctcagcaggttgttgttgagaatgaggatcctcagtttgggcatggcattgaaagtgcccgggaggatgagctggatagcgttgtactccacgttcaggtactctaggttttgcagccccgcgaatttctcccgggacagcgtgtccaggtaattgctatccatgtatagccacctgaggtccaaaaggttcttgaaagtgttgttctctacagtagcgatgttattgttgcccagatccaacagaatgaggttcttgtaatccacaaagtgcgattttcggatgctgtggatcttgtcatctcgtaggaaaagctcctgcacgttagagagcttgggcttcaaatcagccaagctgctcacgctcctgttgttgcagttcatctttaaacccgaccctgggatgtggtcgcagctgcagcccccagggcagggtaaactgatagctaaggtttgatcctggagctacccgt

SEQ ID NO: 459948 - DNA, 500 bp, Homo Sapiens
  misc_feature (457)..(457): n is a, c, g, or t
tttttgcaagtaatttctactgaaatatttatttctgagaaacaactcaaataatttaatttcaattaagaaattaaatcaactcaaaataggaataagacaaactcattatgcttgcttcagcatttcttctacgtggccaaaaatgctggggtcttcaattgtagaagttatcttgtatggcttgccattgacaatggcagataaagctgatcgggggatcttgccagatctggttttgggtagctgtttgacaaacactgcatttcgaaaagcagccacagggccaatgttctgtctaacgtgtttcacaatttcttccaaaacttgctcctctgttgcatttatatcttttctcaatacacagagtgctaagggggacatggaccttttaggggatctttccttgcccaaccaacaggcacaggtctgccacgggtaccctgggggaaagggnttggactcttcaatggggcgcctggcaggaaattctgtggacc

SEQ ID NO: 459949 - DNA, 431 bp, Homo Sapiens
  misc_feature (419)..(419): n is a, c, g, or t
tttttttcccttccctaagtgaaagggacttgttttcaggagaagtgtcctttaaacatccagctaaaactggaagtaattttttgcatgaatggctttttacagctaggtctacagcagaacaaaacttgtattaaactaagtgctactttacatatcttatttcaagggaaatgaaggatttattgtcgtgtaaatgatatacactgatttgtttcctactggacattacatgtccctttatctctaggctgatgttgtgcagcaaactttcaatatctgggaaaatcagctggtacctacttcagtgcattattagggatattacgttccctgagagggaattttgccaatgaagtttagggtactgttgtaactgatttctatcccccctccctaagcttctgtactaaggtatntggtaaaggcta

SEQ ID NO: 459950 - DNA, 442 bp, Homo Sapiens
  misc_feature (16)..(16): n is a, c, g, or t
  misc_feature (64)..(64): n is a, c, g, or t
tctgcgtttcaacctnaattgcctttgtctcctaagtgtgggaagaccattgtaatatttaccnacttcaaggcaggggccgggaaattttcattctttggagctcaaccctgagtctgaggtcaatcgcttcgcctccccatccccagtagttgttagagaatccattcaccttgaaaaactgctctctgcttagggcagtaacacccccaaaatatccactgtaacgtaacctgtacccagtgctgttcctgccaaccaccagatgcttgggatgctcctcacacttgtaaaggttaaagtcattctcgggtaccaggtcacatcgtggaatataaagcagtcccaattttcttccttgagggcttctagatagcccacattcaagagtttggctcgattaaactttttaccttcagccctggtggatgacgtagatgcc

SEQ ID NO: 459951 - DNA, 385 bp, Homo Sapiens
  misc_feature (104)..(104): n is a, c, g, or t
  misc_feature (160)..(160): n is a, c, g, or t
  misc_feature (164)..(164): n is a, c, g, or t
  misc_feature (344)..(344): n is a, c, g, or t
tacaggtgtaagccactgcaccttgcctaattaaatttttaaatacctgttttcagatatgaccttatattccagaactctcaattctgtggtggccatagacnttggctcaatttgatgttaaacttgcgccatttggggtttgtctgtgtgcttggcnatcntttatggactgtggcattgggaatctgcattataaagcaattatttctcatagtaaaagggaaaatgatagcttgggattaatgtgcaagttgggtcttctgatgaagatatgttcttatttataatttaaagctgatagaactgaactaagtccagggctcagtattagcgttcaactnaataaaggggtcttgggctttcagcactagggggaccaatg

SEQ ID NO: 459952 - DNA, 505 bp, Homo Sapiens
  misc_feature (417)..(417): n is a, c, g, or t
  misc_feature (453)..(453): n is a, c, g, or t
  misc_feature (460)..(460): n is a, c, g, or t
ttttttttattcaacagtttattttctcaagactacataaagaaatgaatgaccctttgttaaagtatcacttgaggtgacatttatgatcatattatcaccaattttataacaaagatttatgcattgaggttttataggttaataaccaaaaactgttctggacttggtatcctcattttagaagaggaattccagggacagtggatgaacaggaaggtgggaaggatcatcacacacttttagccttgagttgggcttgagtgggcactgactcaccgaggaaaggccgggtctgtgggatgggagtggggcactgcagaggggtgggtctctttgcaatggtatggggccttgagaccccaaagatccactgatgttgcctccttcttctgatggccctcctttgaatccctnccctgattctgcagttgccccaggagatgaggggcnttgctgnccagttaggccctttgtttaaacccatacgtttaggggtttggtt

SEQ ID NO: 459953 - DNA, 545 bp, Homo Sapiens
  misc_feature (24)..(24): n is a, c, g, or t
  misc_feature (30)..(30): n is a, c, g, or t
  misc_feature (132)..(132): n is a, c, g, or t
  misc_feature (228)..(292): n is a, c, g, or t
aggctgggccccaggtggctcccnacctgntagtccccagcacttttgggaggcaaaaaggcgggggggatcacttgaaggcccaggactttgaagacccaagccagggcaaccataaataaagacttttcnctactttaaattttttaaaaaaattagttgggcatagtggcacttgcctgtagtctcagctacttaggaggctgaggtggcagaatagcttatgcnnnnnnnnnnnnnnnnnnnnnnnnnnnnnnnnnnnnnnnnnnnnnnnnnnnnnnnnnnnnnnnnnataccctgtctttaaaaataaaagctattacttggcaaattctgaggtaagtgtatgatcttagggaactttgatacaaatgggaattcactcactggaatcgtggctcccaaaaagatgctttaattgtgtggtgcttttatagtttagctccaaaacaaactatagacattcactccagtaactcctagattaaatatacagtagctatgagggtctgccctcttatttcattaaatgctatttggttact

SEQ ID NO: 459954 - DNA, 394 bp, Homo Sapiens
  misc_feature (36)..(36): n is a, c, g, or t
cccttgaacccggatgtaaataaaaactgaataaanaaccgtgcagtgccccggcatcttggaggcaggtgaatctggcttttctgttaccctgggattttcttttcctatatatctgtagtgcactgataattgatattgttagtgagaactttaaggcacgacaagatctggaagagcttgtgaaccatcaaagtcagattgcttatgttgagtagtgatttaacattgaacatttctgtactactctgactctttgaaaattggacatttcagaatgatacaatataggggagctctttacaagtagcatatcatttttcctgactttcctggctgactgcttaccttcatttctttttcttctaggtagcatgatgttatggaaaaaaaa

SEQ ID NO: 459955 - DNA, 343 bp, Homo Sapiens
ccctacccactgaaaatgtacagaaatatgatttgatcacagaaagggccaataaaaatggcatcacacccaagaaactcactagatttcctaagtcatccctgcaggaggcagggaaacgctgctgctaacaccgaggatggatgccaagggtgagccatggaaacatgtcatgggtgaacggttccgaatgtgtcaaagaaaccctttaacccctgtctagatatgtcgagaacaatttatttacaacgctttagatcaattaaaagatataatcttgtctcagtttcagcttgctccgtgcagtttgatttttaaggcgatattccagtttgtgattgct

SEQ ID NO: 459956 - DNA, 432 bp, Homo Sapiens
ttttttttatccattctttcaatatccaccttcaatttgggatgtttaattattcaatttagtttatttacagatgaagtaggatttgcatctgttatttgctatttgttttctatgtgccttatttttaaaaatttctttattcatccattcctgtcttttgtgattgttaaatagattattttctaacatagttttaaaattccctttttctctttctatattttttgttaagctatcaaataattttataattattgcttatacaattgtatttaaaagagatagaacaagaaatgagtaacaaacagaaagatattgacctaaggacaatgtaggtaacatttcccgggtgttctttatttcttagtttgtatttgaggaaaccatatactgtccctggcatttcagtttgaaagattcactttaata

SEQ ID NO: 459957 - DNA, 465 bp, Homo Sapiens
  misc_feature (76)..(76): n is a, c, g, or t
  misc_feature (390)..(390): n is a, c, g, or t
  misc_feature (440)..(440): n is a, c, g, or t
gcttggcaggacagcccttttgggggcaccttcacccttggtgacctgtggtgaggtcaaattccctaataaaaancccccttccatatattcatctatccctgttagttgtgtccctttagagaacactgcctaatacagtgaagatgaaggaaaaactctgggtaatgcttcttcttcatggcaaggaatgtcaaaaatggtcaataaaccaccagatactagggaagaggcatgggtaagatcactctcaccgcattcagagcgaatcaaccctgctgatgccttgatctcagattttgagcctccaaacctgtgagacaatatattcctattgtttaagccacccactcaattagcaatactttgttcaggctgctctaacaaacntaagacaagctttaatggagtctacaagtttgttgagacatgtttaagtnccatgcactaggacactgatattct

SEQ ID NO: 459958 - DNA, 388 bp, Homo Sapiens
  misc_feature (242)..(242): n is a, c, g, or t
  misc_feature (293)..(293): n is a, c, g, or t
  misc_feature (351)..(351): n is a, c, g, or t
caccacacgcggcccaaagggattttttattattactgtaactatcaggattatttgtagtcatacaagttagtagcagatgtggaattaaagcccagactcagggacatgaatcccagtgcccttttttgctgtatcataataagtggaacattagcatctgccagctctctagaaataaaggcaagtagtacaattacacaatgaggatagtaagtttgatcaaacgtcgtcttcaggtntactctttctggggcctgggcattgggtgttcagtcttttatccccgagtncaggtcatttctctcccggggagtttgatccactgtgtgttctgcggcaacgcggggnaagctgttagaaaggggcagggaaggcttcttccctg

SEQ ID NO: 459959 - DNA, 425 bp, Homo Sapiens
  misc_feature (22)..(22): n is a, c, g, or t
  misc_feature (44)..(44): n is a, c, g, or t
  misc_feature (98)..(98): n is a, c, g, or t
  misc_feature (115)..(115): n is a, c, g, or t
gttgggaagaaaagatgccctnattttgaaaccctaaagggggnaataagaaaagccctttgtaatatattgcccatattatcactaaaccccctganagttgtgacacagaagnaagtcacctgtcaccttaagcttgagggtctctttaattttctcctggaattcgccccaggctgtctttaatttgaggcctttattggaattctgaaacctctctgcctccctggctctcagatctattctgagagctgttacagaatgtatacaataaccaacagagggattcggagagggctggagctctgtttatttaacactctagagggatttttgtgcttattcggtcctggctgcccggctttcaatattgctttgacaaccattctgcccttctcattaattttaaacagttaaaacacaag

SEQ ID NO: 459960 - DNA, 411 bp, Homo Sapiens
cgcccctggaggtggcaagggcttgggcaagactgcccgcacacagcgccacatgcaagcagcgtcccaggcccggacaagccccacattgcaggaagccagcgaacacctcattttccacccagaagccccgaccacaagggtggtataaaacccgaggcaaaaacaccccaaagaaaacaaaaacgcccagagaagccacatgagaaggccgctgctgatgacagacgtgcaggaaaggaaagggcgtgctgccacccgaggaagttgagacccccatgccatcactgccccacagcagccgctgcagtgcacacgctggccccaccgcctgagctcctgctctgggactcacagtgctgcctggggatgtgggaggcctgccctttcctggaaatgcatttacaggca

SEQ ID NO: 459961 - DNA, 408 bp, Homo Sapiens
gagttaattttatggaaatggcgtgtgctttgagaagcccagttttattctgtcttatgaaactaatttccactttgaaaattgttcttctgttgtttatggtataaatgaatggaatataatgatatccctccttcctaggaagcaaagcatttccttaaaatgtttgctaggttaagctgtgctgttctactgatggttgttttaaattaataatgagaactataatttaaataatatttctttgttagacattataatgttaaactgaaagactaaattctgcaagtactatataatatttttggcttataatgctacatttttattaatgtaccttccgttttgaggatttatatctgtatttctctttgcattatacaaatataccagtattttcattcaaaa

SEQ ID NO: 459962 - DNA, 458 bp, Homo Sapiens
  misc_feature (358)..(358): n is a, c, g, or t
  misc_feature (425)..(425): n is a, c, g, or t
caaatatgaaagctctgctgtattttaaatgtttatgttttaagaatgaacacttttcaaatataaaactatataataattataatccagttttaagataatatcaagagtctagatgtgaggctttttgtgaaagagaagcctaaattcagcatctccccttccaccctcacccccaggtcccagcctcccactcagcagagtgcccaagggacataccttacatttagcatgtagaattccagattacaatcgccataatataaggaaggtgagctcctcaacaataactttgcaataattaaaactaccctaagtaactttgggcttatatgggcaaaggtaactttgggcagtnaattggactggaaatggaaccttttcttaaactttacggggtacttaaaggaaaggcaaactttttnattttcctctggttattttccaaccgggggtcc

SEQ ID NO: 459963 - DNA, 531 bp, Homo Sapiens
  misc_feature (509)..(509): n is a, c, g, or t
ttttttcaattgaatttttaaatttttatttgaaaaatacaatacacagcagagaattatttcctcccctactgttctttcacaaaggaaactgtatggtaaatgtaactgagatatttggctaggatagatcctgagaaaagagaggcccagttagaagtggaaaatacaaagtctgtcaaagaagattcacctctcttttaacataaaagagccttttaagttatcacaggaatcagataaaacatgtgcagaatttctgccatgcaaacagagactaccgaaattttcaagttgactaaattatactgacctggggccccaagtaaggtagggattaaaaagggaggatgtttttatcaggaaaggatatgtgtttggcctgcttttactaggactacatatggtacatatttacatggggaatattttctggaaatatggatttttccttattctcaggtaacaggcatcctggaataggggggctattttctgggcttttgccntatttcacatgtatcttgccca

SEQ ID NO: 459964 - DNA, 161 bp, Homo Sapiens
  misc_feature (70)..(70): n is a, c, g, or t
cccatcttaatttaaatgttgacatcttacttccttttatcacatttttactacccagcttttgatatangttaataaaaatgattaaattaaaaaccgtagcaaaataattaagcctttctgcatatactcaaagtatgtaaagtcctattaaatcttta

SEQ ID NO: 459965 - DNA, 423 bp, Homo Sapiens
  misc_feature (396)..(396): n is a, c, g, or t
gacatttttaacaacaaaaaagaaagtctgggattacaggcatgggccactgcgtccagcctaaattcttaataagttacttaaaaatagttatttgaaatataaagtcttaagaagtctactcttatccccatgtaaatactttatttcaatctgagctgatatgagcttgaggataggataacatccaaaagaataggagtcaactatggtcaagagttttgataaggaaaaatataatgagtcagtattttagcttaattgtttcataagagaaactaaaatgatattaaatatttttaactgtctttcatatactaagtaggatttcattttaaacacttaaacctttctgtttgtttttaagtcgggggaggaaatgggaaattgtggggnctatggatatcgtgggtcttgttcccc

SEQ ID NO: 459966 - DNA, 429 bp, Homo Sapiens
  misc_feature (85)..(85): n is a, c, g, or t
  misc_feature (329)..(369): n is a, c, g, or t
ccctgcttttgagccataatatttaatgttgttctgcacatctctatacagttaactttttggctttcattctgtatagataagnaaatgttatattataaacagcctactcagtgcaaatatttatctgtttatcaaatccacaatatgctgtataataccggttttactatataatctattttagacatagctgtttagaactagagtgtgctatttttgtgtttttctgatgtgtggtgctagacaagttacttttgtgaacaacaaaaattatcccttttattcctagacaataccacctttgggtcttgttaatttcactgagnnnnnnnnnnnnnnnnnnnnnnnnnnnnnnnnnnnnnnnnnctccctatgcccaactggcagctgtatcagagtgctggatttgggacatgcttttctctt

SEQ ID NO: 459967 - DNA, 416 bp, Homo Sapiens
  misc_feature (317)..(317): n is a, c, g, or t
  misc_feature (389)..(389): n is a, c, g, or t
  misc_feature (406)..(406): n is a, c, g, or t
gggggggaaagtttttcttcacaaagggaagtcaaataatgagtgtacagggaacaagagaaatggagagtcatcatttttacaaccaccatagtaacaacctgattctggaaagatgcacctgtggatgctaacctcattaggtgaaaggctattagaaaacaagatattcagaatcttagttattgattgcaaaagagaaaaagatatctttacaatggggaaatctggcaaatacacctttaccaaataatcaagtttaatatcatcaacaaactaacatcataagcctcctgggtattatatactatgaaggncacaacaacgcccatggaaggatgcctaatacatttagcccaaaatctacttcaggggggaaactttcaggncacgtccaaattgaggnggtactcttg

SEQ ID NO: 459968 - DNA, 401 bp, Homo Sapiens
  misc_feature (368)..(368): n is a, c, g, or t
ttttttttgagtacagaggactttattgatggtacacgacaagatagagctctttgtggggtctgcatggaaactgtgaagaggggagattcccagtgtggtgggggactgagcatggcagggactgccagaagctgaaggtctctttcttcctcttgtgctctcactggggctggttgtcgagcagtcttactccttggaggccatatgggccaccaccctgttgctgtagccaaattcactgttgtacgaggaaatgagcttgacaaagtggtcactgagggcaatggcagccccagcatcgaaagtgggaagagtgagtgttcactgtttaaagttcagagggaaacaacctgggtgtttcagtnttaggcccaaggatggccctttgaggggcccct

SEQ ID NO: 459969 - DNA, 420 bp, Homo Sapiens
  misc_feature (271)..(271): n is a, c, g, or t
  misc_feature (308)..(308): n is a, c, g, or t
  misc_feature (339)..(339): n is a, c, g, or t
  misc_feature (364)..(364): n is a, c, g, or t
  misc_feature (389)..(389): n is a, c, g, or t
aatcaaaaccatctttattatttaaagagcatcccgtgctgaggggcacctagacaggagtcccagacagcagaacaatatttacatgggggtcaggagggtgaggttgggtggtctcggggctgagtgggcccgccactgtggaagagaggaccctggagggagggtgtccttggccctgtggaccgggcccaagaagaaaaacgtcccatcctaggcccagcgtggatcccaccaccgggatcacctcgggccctgggaggcttgcgangaagaagccacccggtcagagctgggtcaccatgccngctggctttcggagtgagtctttatggcctnggaagatccacttcccggaagtcanttgactttttggttttagacgcctnggctttctttgggccaggggcacaaccagtt

SEQ ID NO: 459970 - DNA, 383 bp, Homo Sapiens
  misc_feature (37)..(37): n is a, c, g, or t
  misc_feature (203)..(203): n is a, c, g, or t
  misc_feature (335)..(335): n is a, c, g, or t
aagatggctctggtgattcatttgaaataagtctccnagtggctgggccagataagagtgtgcgtgcatcggatgctaaaactcaccagatatctcaatcggggcccagggaagtgtcatgtgggctgtagcctcccagtcttcaggcataggccttcgcgcaggtatctgaatggagccttgaggtctgagcaatcacttcntccagagggggcagggtccagctaggaagatctctgcggccaactgtgcctcagacactccaccagcgcttactcagggtcttacagccgaactgtcctgtctttttctttccttgttttgattcccaccangctattggacttttctctgggaattcaggggtggttatttgacgttgc

SEQ ID NO: 459971 - DNA, 280 bp, Homo Sapiens
gttggttaaataagtaaatttattgcatgtttccttattcaagcaccactcagcaatgtaataaatgacaaatgaattcagtaagctttacagagtttgcagaaattcttgccattgggccttttctcgtgctgacccttgctaacaccaagtgtttaacaataaaatggaaaacatctttagggggtttagttaacgaaacccaagtaaacacctttttagtgattaaccttaatacaagaaaatctcaactactcatgaagtgtacagaaaacatgta

SEQ ID NO: 459972 - DNA, 576 bp, Homo Sapiens
  misc_feature (505)..(505): n is a, c, g, or t
  misc_feature (529)..(529): n is a, c, g, or t
  misc_feature (535)..(535): n is a, c, g, or t
  misc_feature (540)..(540): n is a, c, g, or t
  misc_feature (557)..(557): n is a, c, g, or t
gaggggtgtggggccctgcggggattttcccttctggccttctgggagctggtggggagatcactgtctgtgtgcagggctcagagctgctttctgatgacgaggtgcccctcgggatagggggacagttcttaaaacaccaggcagaggctcagccagaggatctgtccctggaggaagaggctcgattctccagccagcagcccccagcccagctgagccacaggccacagaggggcccgctgttgtggccagagagaggccctccagctccccggcatcaggagatggcgtcactcggcccttcctttcggcctggtcccaggtgcccgtgaacttggaggacgtggctgtatacctttctggggaggagccaagatgcatggacccagctcagcgggacggcccgcttggaagaatgaaggacctggggttccagtttggaggacggcggttgattggcaagggaggatgccccttttaaaatttgaattgtaacccaatnttttttggaaaatttccaagggcnttggcnaaccnttttcaagttaaaaagncaaacccatttaaggtttt

SEQ ID NO: 459973 - DNA, 521 bp, Homo Sapiens
  misc_feature (330)..(330): n is a, c, g, or t
  misc_feature (339)..(339): n is a, c, g, or t
  misc_feature (342)..(342): n is a, c, g, or t
  misc_feature (358)..(358): n is a, c, g, or t
  misc_feature (362)..(362): n is a, c, g, or t
  misc_feature (424)..(424): n is a, c, g, or t
  misc_feature (432)..(432): n is a, c, g, or t
  misc_feature (463)..(463): n is a, c, g, or t
  misc_feature (485)..(485): n is a, c, g, or t
aaggcaccagtatctgcttgcaaccggcggccagcaccgtgtcctgtagcatgcggtccgagatgccgctgcagagtgtgtggccggggggcaggctggccaagtgcagattgaagaggcgcttgagttcgctcagcgtgagcacaaactgtctctgaaaggtggcctccacgaaggccttcagttcccgagccgcaggggtgctggcgcagccctggggcgggtgcccgttgaagctgtctgtgcccgcagcccgcccgagaggcagcccgttggccagcttgctgtggaggccgctgggggaagtgtccatgggctcctcctccgccncctgctccncgncctcctcgccctcctngctnacgggctcctccttgaaccgcacaccggcgggaccgcaggcacccgcagctgctccttccgncgctgcantcccgctccagcaacgcgtggttctgctggnccttggttttggctacttgganccgctggtccccacagaccagcccggcaggccctga

SEQ ID NO: 459974 - DNA, 485 bp, Homo Sapiens
  misc_feature (30)..(30): n is a, c, g, or t
  misc_feature (48)..(48): n is a, c, g, or t
acccaggggtccaccttgtaagcccatttnagcccttttggagtgganccttttttaaaaactggagtttccaaatttccttgcccctggtcctgaagaacccaggtgaactggctgcaggtccagcttcaagttggagatctctgatgatggaagatgcctactcacgcagggctaccttttgtactcagggaaagatgtggagacagagaaacacagtaggtttgtgctggtgctgagtgctgagtccaggagggatcactaggtggtccagggtgtgaggaggttgctctgaatcctgacagctacaccagatatgttgacctaaagaaagaaacttgtctgtgagaggtaacagccttttctggtttaacaaacattttcttctgattggtttaacatttgtgattaattagcctttagatgggtggtagaataaaatattatttcaaagttcaaacttcctatcaagattgtctcctcac

SEQ ID NO: 459975 - DNA, 486 bp, Homo Sapiens
  misc_feature (446)..(446): n is a, c, g, or t
aacataagtcgagaaatttatttgggccaaatttggggactgcaaccaaggagacacagattcaagttgccatgaatatatgctttgattagcagtagttacaagttggctttcaatactcatgtctctctggatctgatacattttgcatacctcacatagctcagacatctctgagctacttttcttctcatttcccctttttgattgagatcttcctcttctgaaagcattgataatcaacattttaaacgtagcttttccccatattgctaggaaggctcattcccgggtaatctctctctacattggagggaaagaggagaggcactacagcttaagaatttagtgaagtcttaggctaaattaactgggcaacacaaaggggcagagggaattggggtctcagggtttcatccacttacaaaggaagtatgggcgtgttnaataattttctatgcatctagctatcctgaggttaggttc

SEQ ID NO: 459976 - DNA, 440 bp, Homo Sapiens
  misc_feature (409)..(409): n is a, c, g, or t
  misc_feature (414)..(414): n is a, c, g, or t
  misc_feature (423)..(423): n is a, c, g, or t
ctcttgcctgattgctctggctaggacttcccgcttctctctttaaggacttttgtgattctctggggcctacctaggtattccaggatactcttcccatctcagaaccttgatgtaaccatatctgcatggacccacctagatattccaggacgctctccccatctgagagccttgatgcagtcatgtctgcacggtccccttcgtcgtggcaggtcacagtttcccagggtgtcgcattggtcttccggtctccttaggcaccttttggctgtgacagtctctcatctctccttcattttgatgacagtgacacttttgagaagcactggtcaggtatttttgtaggatggaccctctaatggggaatgggtctggggcttttctcatggaatagaatgggggtganggggntttggggangagggaccgcagagaga

SEQ ID NO: 459977 - DNA, 412 bp, Homo Sapiens
ttttttttctttagttgacaaggtgagatgttttcccacagggctgtttgacatcacacagctttgaacctgtgatcataagctctgaggccaggagggatttgattctgcaatctcagtcatccctccttatccatggttttgatttctgccatttcttaccctcagtacagtacaataagatattttgagggagagaccatgttcacataacttttattatagtatttgttataattaccctattcttagttattgttaattgtgggctatgcctaatttataaattaactttatcataggatgtgtgtgtatagggaaggaaggcataggtatatgctatacagggttcagtactatccccagcttcagggcatccactggggggtcttggggattatacccccggggg

SEQ ID NO: 459978 - DNA, 369 bp, Homo Sapiens
  misc_feature (27)..(27): n is a, c, g, or t
  misc_feature (69)..(69): n is a, c, g, or t
  misc_feature (246)..(246): n is a, c, g, or t
  misc_feature (249)..(249): n is a, c, g, or t
ccggggcaaggtgtgggtgccctgtcnagtgtagcgggctgccatgctggaaggtgtagggggcttggnagagaggggccacaaacacctgctgctgcggggggctgggttgctgcttctctcctgtgaggttggagccgccgatgactgctggttctggctaagattgagtggttgtgctgcactggtccccccgcgttgagctcgataccctgtgggggtgatacagcatccagatgactgccnacncactgaagcgactggcttagtcttattgctcaggagacctgaggcctgggttgctacagtgcagtcaccaagctgagttttcagtggaggcacaatgatagtgcgggtgccagtgccatc

SEQ ID NO: 459979 - DNA, 842 bp, Homo Sapiens
  misc_feature (750)..(750): n is a, c, g, or t
  misc_feature (783)..(783): n is a, c, g, or t
  misc_feature (796)..(796): n is a, c, g, or t
  misc_feature (824)..(824): n is a, c, g, or t
tttgctgcatctaggtcggtgtttgatcatctgaaaaaacatttcagtgggaagaaatgcataaaatgcctataagaagtagaaagtcattgaactgacagtgtttgatgcaactaaaagaggattgtaagacatagctttctgcaaacttgtctttaatgcacaaagctgtagtggtgaattaactatctccttattgattctctcctgtacccagatgcaaaaagtgctaagtttctcttgtcctcgtaataccatttgggattttatttctggaatttaaataggtaaaatatttatggatgctgatctttaacccacctaaaattttatagtgaacctgctttatattgttgttctgaagcttacaattgacctatacattgcattcagcaagctcctgaatttagaactgccgtcagtgtagtgtatgctgtgttccatgttgcctttttagatggctttctaccccctgaacaataaataggatgaggttttactgtaattgggtaaagtttactcttggacattatttcgatgctaaagtaaggattctgtggatgttacttaaagagaaaagcataagagcatgaagcatatctgggaatatcttttgcctttaagacgattcattcttgtctaggaggggaaaatctgggctgatttggggaataaaaatattaatccggaattattccaacaccatggaaggattaaatctttattttggggaaatcttactggaccttnaatacccccaagcttgccctggaatactttggntggggattggggnttatatccaaaaagggttaggtattttngttgtaggtaggggtact

SEQ ID NO: 459980 - DNA, 477 bp, Homo Sapiens
  misc_feature (16)..(16): n is a, c, g, or t
  misc_feature (35)..(35): n is a, c, g, or t
ggaagctgccctccanggtaaatggacagaacagnaagaaaacaaaagtcccctccgtccatatccgggataaattttgcccagcactcccttcccaagatagtaacgaactttgcaacccaagagtgttatcatttcctttaacagtttccttcaattagttccgtctatttttgaatggtattgatgctaagaacacagaaagacaaatattagcatgtttgggaggtgatggcactgcatccgtcagtaatttttagacaacttaatttataaataaagcctggctgcggaccccgtttatttccttagtcccagaaatatttataagatcctgactccagttctttgatagagagagatctgaagctcttaaaaatattaccaagttcattgttccttactcaaggctttcgatgcttctaatgtgtgtagacacttaaacacttttacaaatagcacacatgaatgacttaa

SEQ ID NO: 459981 - DNA, 388 bp, Homo Sapiens
  misc_feature (75)..(75): n is a, c, g, or t
ggtttggccaaccccgggatgtgtccccccttccgggtgtgcctcaagaaagtcaacaaggggatgacctgtaantccagcactttccttgcctgtgtttgcccgcttcctcaaggtatctccctctgttggttggtgatgctgctatataatttaattcgtctgggtgacaagcatactctttcatggccaaaagcttgaatcagccgggcagtgtcaatagtggaaacagagctactcctttcgtgcagagccacctctctatctgtttgggtcaatatatctgattcgacagtagaagtggtgccggaaaggatgttggtggtagtatctgtgagcagctcactctcctctgagggccgacaatccgaagaagtgttgcttatat

SEQ ID NO: 459982 - DNA, 360 bp, Homo Sapiens
  misc_feature (298)..(298): n is a, c, g, or t
  misc_feature (333)..(333): n is a, c, g, or t
agttttggaaaaatcctaattcccaaataatagatgggtcaaagaataaacgataatggaggttaagacaatacttacaattaaaccaaaatgaaaatattatacattgaaacacaggatgcagctaaaggagtattacgagggaaagtcatagccccatgtgtttatatttttacaaaatggaagttaattagcaaggggcccacagtatggatgagacatggataaaggcaggctgccattcctaatggtctctcttcccacatgggttcttttgtgtacagtgagtgaggagctngtgcctgaaggctttctcacactgattacattgantagggtctcccggcactgtgtgttctc

SEQ ID NO: 459983 - DNA, 398 bp, Homo Sapiens
  misc_feature (219)..(219): n is a, c, g, or t
  misc_feature (292)..(292): n is a, c, g, or t
  misc_feature (309)..(309): n is a, c, g, or t
  misc_feature (328)..(328): n is a, c, g, or t
  misc_feature (334)..(334): n is a, c, g, or t
cagtatctatatttaatttcattgcttcaaaacatatatatgtatgtatatacataaatttaaaaactgacagaatgacaaagatttttcagcaatacataatcatggtgggagagtttaacatacctctctcaataaatgctagatcacagatcaacatttataaatgtgtagatggtttttaaacacatttgcttgatctagcagacatttgtagantacaatacattgatttcaaccatccatgaagcatttataaaaactgacatatactaagtgcatcagttagggnttatattcagggtgaantaaacctcccacccaaaanccaaanaccaaaccaaaagggaaactggtaccccgttagggaggtgcatatttttccaggtttggggggc

SEQ ID NO: 459984 - DNA, 413 bp, Homo Sapiens
  misc_feature (32)..(32): n is a, c, g, or t
aataatacccagaaagactaaagggtcttttnacccttcgtgtggctattactcaaatttccttaaaatcgtctgaggaaaagttaatgattttaggaggagtagtattttttcattgtagataaataatatttatttcataataataaatgattctgatggcactatttccacccacagaagtcattctggttctgtctccatgtctatatacacaatgatcgcccttctgggaggaggaaaagttccttatggagagctcagccccagcccttgaaccttaagggtgtgtatattctgaggtcttcgagcatctccccaataatgtggagatctagcagaaacccatttacctgctgtaatgctatctggctccacaaagcaacatttcattgctttgcaataaaaaatta

SEQ ID NO: 459985 - DNA, 484 bp, Homo Sapiens
  misc_feature (399)..(399): n is a, c, g, or t
  misc_feature (406)..(406): n is a, c, g, or t
  misc_feature (455)..(455): n is a, c, g, or t
aaacattgttaaaaaatttatttgcaattttttttgttcatttgttaagtaacatcattccttaaatataaaagcaatcttacaggattatgcaatagtgtctcacacagaaatgactccaaagctctcctggaaaggttgccccttctggatttcatgacctttcttaagggtaagaagacactgccaaagaggcctctgaccacaggatcatttgatcattactaactgtgcaggaatatttacaacagtaagactgtgaagttgtggcgtctagaggggaaggggcagaagtgtgcagaggtgtggggaatgggtgacaatgggaggcactgcccatcttcccatgactctctgaaacaggcatgatgcagattgggtttagggggcatgaaggtngggtctnagcagggagggcatgagggagagggaggggattggcagaattttatctnggagcctttcacatgggaagggaagtttt

SEQ ID NO: 459986 - DNA, 396 bp, Homo Sapiens
gaaagcccccggtgaaaagctgtcaatattggtaacattgggttgccattccaacagaaaaacatggactaaatacgcaactccttaacatatactcacaaaaatccttttcacccaaaaatgtacattgttccttgatttttcctataatggactaagctataccagtatgcagtagctccagagacagggcagaggaataaacgaacagtacataaaatccagagaagaaaagagcatcagcaaagaaaatacagttctctcaacagtctttggcttggaccattaaaaggctctagaagtggctgtttagctctagtgcccagcctaccagcttatacatctctaggagtgtatctaatctaaattcctaactcattaggaagaaaaaaatac

SEQ ID NO: 459987 - DNA, 392 bp, Homo Sapiens
  misc_feature (35)..(35): n is a, c, g, or t
  misc_feature (74)..(74): n is a, c, g, or t
  misc_feature (87)..(87): n is a, c, g, or t
  misc_feature (361)..(361): n is a, c, g, or t
  misc_feature (380)..(380): n is a, c, g, or t
gaagaatgagtcccaggagtcctagaactcctganctcgtgatctgcccacctcggtctcccaaagggctgggnttacaggcgtgancaccacacctggtgaattagtcctaggattctatacatctttccctctctgttcttcaatttgttacttattcaaagtaaagcttaattcaagctgtgctcaaatgggatgccaaccaatgggtggggattatactgagccctaattaagccaagcttattatttgattctatggcataataccgatatatttatctttgcttctgtctctctactgtaaacattcattttattttataaaggacagtttttttcaggaaatcccggctttcancccctttattggaaatttnccctggaattta

SEQ ID NO: 459988 - DNA, 374 bp, Homo Sapiens
cccttggtgtttaagtcttctttgctgatggaaacagaagtctcagtgctttttccaccaagatatctgtccccacatttcacagtgttgatgttacccaagctcttgacctggatacactttgcatgccttttatagggtcagggaaattattgctctcactgcaatgggaaaggttggaggaacagactttagagtctccgtggcaagtccctgctgtcttaacctgaaaaaagcaaggcacaaatcctttatggtgccagcccaggatccctttcttctgataacatcttcctgatttgcaattgctttctggaagacttctttattggatttggtcatgattgaactgtctgttggtcaatgtgcttcgc

SEQ ID NO: 459989 - DNA, 399 bp, Homo Sapiens
  misc_feature (349)..(349): n is a, c, g, or t
cttgtaaataatttaaacagtatttatttttgtaaggcataactagaaactaaaatatattctaaaaaattcattattctgaacaaagtgatcaaattagaatacatatttttcaacagtggtagagcttttaatatatgtttattgaaagttatctataatacttgcaccagtgttgaaaaaagttaacatgtaggcaagagcaatatgtttgtctcaaggatttttccatggtttcctcagtgatgggtgtcctgggaattattcaggtgggtgaccatcactgggtctaagtttgtgtgcaggggttttcagacgtgttttttgtggaaacttgggtaggaccccntgggctaattaaagagggccagtgttgtccaggggtccctctggcccctc

SEQ ID NO: 459990 - DNA, 456 bp, Homo Sapiens
  misc_feature (384)..(384): n is a, c, g, or t
  misc_feature (418)..(418): n is a, c, g, or t
cttgaataaacagagtacccttggttttcctactttatagatgggttttacttaccagcagaccattttgtactttatttgaagtctattcccaggactgcataaatttctccccacataagaagacccacaagtccacttatctgtggaggtgagtggaccatgtaccatcctagagcttcttccatgttacacaaggacacaagatttggatcactggtattcacaaagagcccttgttaatagtatgatcccaacccattctcactggttgcagaggaatgtccctttatgttatccttatgttgcagaactcggaaacaatagccacttcatgaaagcaaatgctcgcgtgcagctaacagtgcattgggatttccactncacattcatcaggacatttgttttctaggacttntatcagtggggccttaaaggaaactttggattttcacc

SEQ ID NO: 459991 - DNA, 493 bp, Homo Sapiens
  misc_feature (422)..(422): n is a, c, g, or t
ttttttttgcattagaagttaaataattatgtgtttgctttaactagatttggggtattattctggcattaacacagaataagacttctcaaaatttgaaacaaagtttcataacttgaaatcctgaaattagaataactttgctattaggaaatatgaattaatttggttcatctgagaccatcaatctgattattccaccagcctgataaagatcgtagtgttataaagctgcaaagttataattgctctttactgtgatttaagattgcactattcacttttgccccctataggttgaatgagatttcaaaacatacaccggttgtatggaagatatctaccaccttacaaaacatttaataattactcaataaatgtttgctgattagttattcaaattgctatgataaaatgaatgntttctcttaaaattaattccatttcataaaacagtaatttaagaagaaaagacactgaggttaaagaatcc

SEQ ID NO: 459992 - DNA, 407 bp, Homo Sapiens
  misc_feature (379)..(379): n is a, c, g, or t
  misc_feature (387)..(387): n is a, c, g, or t
catcatcctatgtgatttacttttatggtgtttagtaagaaatattgctttattttcttgtaaaaaatttccagtggtaaaaataaatcaacatagtagaataaacgtcaatagtttgaaaatgaaatctaaacccataaacaaattattgacaaatgccttttatctcaattatacacctattggaaaatttctttataagacacagccatttccaatatatttgtgaaaagagttgtttaaaacctatttatcactttgaataagttccacgttttttgacacataccaataacataggaataatatattttttcttgtttatgttataggcttttcactggggtaccctggtaagggcctgggggcacagtgtggntgggcctntgtgggtgggtgttagtggg

SEQ ID NO: 459993 - DNA, 529 bp, Homo Sapiens
aagcatttgaagtgggcaagtttatttcaaaagcaacaataccttaataatatgtaacactgcttttcaatttagtttaggtttgtttacacagtgaattaatgtgaaaccatcaaattgtgctgcttcaaacattttcatatttataaatataattcaagaaatttttaagaacagattttcaacacttttataattttatttacataagcatgtaaacatatagtacaaatttctaatttctctatatctccttgtctttccaccttattcctaccctaagcccaacttttgctactaggggatacatatgtaggcagaaaacatttttcttttcctcctaggaattataccatttacacagaggaaaatgaaagacagtagaataattttctatacatccttaaccaaatcatctatccttgctttaatatccaagttaaaaatgaaaaatttagtgctttgtgttggtatagccaacattttggcttgcaaaaacatatagctttacctcttatcttttcaagcc

SEQ ID NO: 459994 - DNA, 427 bp, Homo Sapiens
  misc_feature (371)..(371): n is a, c, g, or t
  misc_feature (403)..(403): n is a, c, g, or t
agctttttaaaacatgtcttgtttctttctcatgtggtaaatttatcatgacaacctctaggctgtagaaggcgtaatataaaatacaaactagttttggttcttataaaaggctgatttcagttaagactggtcatttttttaaaaagctgaattacactgtagtataaaagcaaacagtcaactaagcaaccaaacaaaacagctctcttctttaataatattcatcattgccaaatgtttatttttgaaattttgttctgtgccaacttgtttcaccatgttaaactgcatacatacccatggaactatttatttacaatacatttgatctcgttaaggccccagttctatttcccaaggcatgcagnccaaaacccaaaaagttaaaaggtggataacnctctgtgggttggaattacccctg

SEQ ID NO: 459995 - DNA, 280 bp, Homo Sapiens
  misc_feature (14)..(14): n is a, c, g, or t
  misc_feature (242)..(242): n is a, c, g, or t
acattgataatagnttttttaattcatcatctctaaaactctaaaactttaggtgagaaagataataaatagaaaattaccctggaaattaaaatttttagcaatattgaatacagtagtataattttttgtggctcttgatttcctaaggaaaatagtgatttttatttaatgaaaatttctcaatttggttaatattctaagaaaagattgatatatttaagcatggtgattagaacgantatgcatatttcctgctcataataaattttaaaacaac

SEQ ID NO: 459996 - DNA, 376 bp, Homo Sapiens
  misc_feature (115)..(127): n is a, c, g, or t
ccccaaatcagaatgaacacagtcctttaaagtctgcactgcaggtgaaattcacatgactcacaattccctttagccaatgttaccgaagtcagtgtcaagaaaacttaacagnnnnnnnnnnnnngcacagagtgagttcctaccataaaaatccaggctgcccctgtttcctagctctaatataagccattttctttccttatgtgtaccaacatgtactaaatgtcccaaagagtaagaaattagaactacctgttgtccgaagaccttaagcccaaagctatctgtgaaagtcctatagggattttgtaattctgtgtgtgcagaacacagttaaattattattattattatttttgagacggagttttgc

SEQ ID NO: 459997 - DNA, 492 bp, Homo Sapiens
  misc_feature (24)..(24): n is a, c, g, or t
  misc_feature (42)..(42): n is a, c, g, or t
  misc_feature (63)..(63): n is a, c, g, or t
  misc_feature (122)..(122): n is a, c, g, or t
  misc_feature (305)..(305): n is a, c, g, or t
ttccgactgcccctgattagagtntgttttgtttgggatttncctccatgaaatgggaatacncccaacagccaaagaagggttggaacagatttcccttgaggttactggacaagcactgnaaaagagaagaggaatgaggaagagaaaagtacagataagataaattgcctgaagcagagttaactacacagcaacccttgaaaggaagatacagggaaaaggggctgagggagggtattattctatgaaagagacatgggacagatattgagacagccctcaccactgtgccatcaggccanggcagcagcagctgcaactcaactatgcgtaaataggtctttcccttatatgaaggtctacagttgagaagacatctgtgaaattagcagatgacggcacaaataatcccacatatatgcctttcaaaaaatctctctaaccgagtaaaaatgcaaagaatttcattcgttcattcattcatccaat

SEQ ID NO: 459998 - DNA, 508 bp, Homo Sapiens
  misc_feature (49)..(49): n is a, c, g, or t
  misc_feature (96)..(97): n is a, c, g, or t
  misc_feature (130)..(130): n is a, c, g, or t
  misc_feature (256)..(256): n is a, c, g, or t
gaaaaactccccctaaaactataagatttaaagaaagagttttaagccnttattgactaaaatgtcaaaagtccgttttggtaagaaatcccctannatccttaagaaatacaggaacttaaagttattncagggagtctttttgaaaaacctgattgacctttacctacgaccaaaagatggatgaaaattaataggtggattcataaaacaactggtagaaaaagagtggcctggtgtccccacggttgttaantcaccactacgctgcatcaaggtcccactgtgggagctttctgtgtgttaccatctagcctcgcaatgcctcgaaaggtgggcaccattaccgccctttacagatggaaggctgaggcttcaaaggtgaaacttacccagcaccacacacctgaaagctgggtccagtgcccgttttccagcctgtgtgccagtgtgcaccctaaatgaccttataccatgaactgtagccatacagtcacctctatcttac

SEQ ID NO: 459999 - DNA, 561 bp, Homo Sapiens
agggaggagagtttttcagactgcttaccacttaagcaattgtgtagggcatatgtaactgggaatacgtgctgagataccctaagttagaaattcttattccatgggaaacttagttgttaatatcttattaaaaccattcttatttaaagggactgtttgatgcctaataagaatgtggtggagaagatatgaatggataagcctgtttgaggctgcagcatcatttgggaggactgtttgcctcccctctctctagcaagtgtgttttaaggccaactggtggcatttctgtgtgactagggagactcctggactgaaaatatgaatataatgaacaggtggactgcagacctgtctccacaaagcatgggttgtccttttcccaccacattttagtagaaaagaaatgtatttgaatttttttctatgaacaatctatcttactgtacagtaccaagtgtgatgtattttctctcaaaggatgattaagttatgagaatgtagattaatatatgtttttaattttatattacttggaatacaagtatgtggagaacc

SEQ ID NO: 460000 - DNA, 497 bp, Homo Sapiens
  misc_feature (378)..(378): n is a, c, g, or t
  misc_feature (439)..(439): n is a, c, g, or t
  misc_feature (466)..(466): n is a, c, g, or t
ggttctccacatacttgtattccaagtaatataaaattaaaaacatatattaatctacattctcataacttaatcatcctttgagagaaaatacatcacacttggtactgtacagtaagatagattgttcatagaaaaaaattcaaatacatttcttttctactaaaatgtggtgggaaaaggacaacccatgctttgtgggagacaggtctgcagtccacctgttcattatattcatattttcagtccagggagtctccctagtcacacaggaaatgccaccagttgggccttaaaacacacttgctaggagagaggggagggcaaacagtcctcccaaatgatgctggcagccttcaaacagggcttattccattncatatcttcttccaccacatttcttatttggggcttcaaacagtcccttttaaattaaggntgggttttaataaggtttttaaccaantaagttttccctggggttaagggttttctaa

SEQ ID NO: 460001 - DNA, 222 bp, Homo Sapiens
agaaaagaaagaaataactcagggttgtaaaaatgataagtactttatatgaccataaatggtagttactattattactattccctgggcaaaatctaattccacagcctcatatacacttgatgcaatggttagctattgtacaaggtattgcctagcaagtgagatacagcagcacttgctgagattatctataacagacaacacacctttgaatcaaat

SEQ ID NO: 460002 - DNA, 267 bp, Homo Sapiens
cattcaaaaatatataatttattgagtacttgctagacacaatggatacaatgattatatagtcccaatcctccaggagaacaatagacagacacctttataatatgtatgtggagtgctctgacagggaaaagcacaaggtgccatgggggtgggagtggcccagaagctaaggaactcttcccccatgaagtggttacttactttctaatctttaatttagattctctcatggaacatttgaatggtgaaattttactacataaa

SEQ ID NO: 460003 - DNA, 389 bp, Homo Sapiens
  misc_feature (323)..(323): n is a, c, g, or t
  misc_feature (355)..(355): n is a, c, g, or t
  misc_feature (370)..(370): n is a, c, g, or t
agtaattggaccaggatttgatggcctgattagagttggctgaagaaagacctgcaaagtataaatcctggagaactgagggaagaaagatgtaactgacagggaaggagtaggaagaaaacttgattgaaactattttcagtttctgatgagttaaattattatagtcctatagaaaattataaatatgagcctgttttagaaattgctaatttagaaacaatgattaaacctgtgcaaatgaataaagaagaagaatggggggtaaggactgtgtttcagggcaggaaagagaaagaggagccagtgagttaaggaagctnaaagaaggagaaagcttcccacaggatcatgnaagatacatgaaaanagggatcagaaaatgtgag

SEQ ID NO: 460004 - DNA, 369 bp, Homo Sapiens
gccccactcagttcctgggtctactaatagaacagcgcatcaagcaaggctgtaaataaaagttattacataataggtgggtgccgaagtggaacagacggagctgaggcatggaggccttattactgctcatcagcaattataaacaggataaagtgtctgggacttgcgctgatgcagcgagggctaatagaggctggggatgacactgggcaatgataggatgatgtatgctgatgggttttactgcctcatcttgctgctagcttccaagacaagttgtattctctgttttcctgcttgctcatctgtctggaagagaatgggtcccattgccttttcccgccaggcaggtggggctgggcattt

SEQ ID NO: 460005 - DNA, 430 bp, Homo Sapiens
  misc_feature (356)..(356): n is a, c, g, or t
  misc_feature (363)..(363): n is a, c, g, or t
  misc_feature (386)..(386): n is a, c, g, or t
  misc_feature (396)..(396): n is a, c, g, or t
gtaaaacacatatatttaatgtacagaattggaaaaaggacttcttgataataaacatatttcatgtaaacacaagctttcaatatctatgaatatttcattgcaaatacaccctaagttacttcttctctacataaaggagaaactccaagttctgctctttaggaagacatggagggcaagcaataccttaggaacaaccattgctatttctcccctttccttgggtgacctaacattttacagggactaacgacataaagaaatattagattccattgagtttaaacacaaatttcccactgagggcattaaatatttgatgcttatgagtgtgaataaataattaaattttnggtttanggcaggttccaaaaccaactgangtttggaaancaatttgggctaggtacccaacagtcaggaaatt

SEQ ID NO: 460006 - DNA, 271 bp, Homo Sapiens
  misc_feature (81)..(81): n is a, c, g, or t
  misc_feature (124)..(124): n is a, c, g, or t
gggtcaatgttaacattgtagacgccagttgaggtcatggatagattttacatctacttttggcctttggaaatggatctnctgttttcatgcataagtaatttggggtaattatatgtgagtnatgtcatatttaaaaaatcttttgagtttggtgaattcttatttggattggagggtggtcttatttgagttagtgtcaggctgcttatcccaaagaattcttgcaattcttggccctagtgagtgtccctcagaatacttgcatttt

SEQ ID NO: 460007 - DNA, 455 bp, Homo Sapiens
  misc_feature (421)..(421): n is a, c, g, or t
aagatctaagcaatgaacttttattaaaccaatatgtacagatggtttaatacagagatcattcataaaccaatgtgttttactactgtgttttatcagtacatcctgtgtgttttctatagcccactagttccataaaatattgataatttttctccaaaaaaatattctgtggtgaaaaaatttggagagggtagaaaattaaggtaatttttctgaggtacaacaaaatatctaggaaattaagataatttttctgaggtacaacaaaatatctagccggtccaatcctttggactttaagacagctaatcttgaccaacactgaagacagccaacttggtgctatagaagggcccctatccttttcaactataccccaagccatcaataagctgctacttccaacaatatatgaagncatggaacacatatgtgtatgtagacagcaacaa

SEQ ID NO: 460008 - DNA, 415 bp, Homo Sapiens
tctgttctgctgaaagagtctacaaactcttaccctagacaagtataaaattccatgcagaggggacagaaatgacgattaacagaaatgaacaaaagcatcagagacatgctagtaaatgctagcttatacattctgctgttcatgtatagatctttatccttcataaataatgtatctatacaataaacctgtatttcatcttcctactcataaggtttaatacattcattttttaaacatatttcctatcttctagggtgttttttcacttaatcaatggttttcaaactcgaatatcagtgaaactctttgttccaatgaaatctcatagagaaccccaacatataaaacagttaaaagcagaactgctctgatacaaaggggaagggtgccagtagacacagtttgaaaa

SEQ ID NO: 460009 - DNA, 385 bp, Homo Sapiens
  misc_feature (310)..(310): n is a, c, g, or t
  misc_feature (317)..(317): n is a, c, g, or t
  misc_feature (336)..(336): n is a, c, g, or t
  misc_feature (342)..(342): n is a, c, g, or t
  misc_feature (362)..(362): n is a, c, g, or t
ctccaacaatctggaattttattccatccatatacatgcatagtaacaacatttgttgagaaattatttctatcagaagtagaacattatctttgtgatcaccaggtgcagtattgctactcttatatttaaatagatcttatatatgaattaaattcatacttgcagcattgagtttagggtttcgatttagactgtgcctttcaaaagataaaactgattaatactacctcattacttacaatactgcttccagtaattttgttcattctttataaagtattgcatttaacaggcaaaggtttaaaanttgagancagagctgcatcagcgaanggaaantacaagtactatacaagggnaaaatttgccatcttcctttaac

SEQ ID NO: 460010 - DNA, 452 bp, Homo Sapiens
  misc_feature (377)..(377): n is a, c, g, or t
  misc_feature (404)..(404): n is a, c, g, or t
  misc_feature (414)..(414): n is a, c, g, or t
  misc_feature (429)..(429): n is a, c, g, or t
ctcccaaacattatcaccaccccaccattttcacaatgaaaacttgaattcagacagcattctccattctgccagagtaacctaggaagaagaacatagcagcagacggatcctcagggaggaggcagcagagtgacagatggtaaactgcatcaggccacatatttgcacctttcagatacagccaactcttccagtgcctagactgagctggttggagctccccaaagcagcattcagttgcttttccttgatatccaccctgggctacctatattccctttctttatataggcacaaccattcaccactacgctgggattatctaacactccaattctattaactcatccagggggacacacagttgagtctgntggaagcctaaggaacttgccagggtnctggaggatnttgttactgggggantttaaggtttaggcccaagggac

SEQ ID NO: 460011 - DNA, 335 bp, Homo Sapiens
  misc_feature (184)..(286): n is a, c, g, or t
agcattttctgatttccctttagctatatgataagctcaagtgagagcaaaagttctgcagtttgagctgactgaaactgggaagagtccgctttttattaactcattttgggttttaatgacatattttgccaaagaataatttcaaatgggggccgggcgctgtgaccacgcccagcttatnnnnnnnnnnnnnnnnnnnnnnnnnnnnnnnnnnnnnnnnnnnnnnnnnnnnnnnnnnnnnnnnnnnnnnnnnnnnnnnnnnnnnnnnnnnnnnnnnnnnnnntcaactatgttcttgagtaagaactcctgatgcctgattgtaatgttta

SEQ ID NO: 460012 - DNA, 494 bp, Homo Sapiens
aaataaaactgtttatttatgggacacattagaaaagaaaggatcgaaaacgccacaaaaacaacgggatgcattttaaatcggtatgcagaggcatctaaaggattatacaaatctaaaattgcctaaaagattctttacaaaacgcaaatgaaaggctcatgcagcacatgaacctgggttgctccttctctgtctcttctttgcctcgatgctttgagtacagtaacccttttgctcagttaccttttctccttgaggctaatgaaaaaggggaagttgggcaaatgccttacaaagtgagactctctagtcaaccagcctgcctgctgtaaccacttttactccatggtctaaagctgagcttagagccatcataaagacttaactaatccaagagaaaatactcaaaaacgtactggaaaattgagaatccctcataagagcttatgattcaggactctctaatctttaccaatttattcacatgatac

SEQ ID NO: 460013 - DNA, 454 bp, Homo Sapiens
  misc_feature (244)..(244): n is a, c, g, or t
  misc_feature (246)..(246): n is a, c, g, or t
  misc_feature (413)..(413): n is a, c, g, or t
  misc_feature (428)..(428): n is a, c, g, or t
gcgcaacagctttggggaaggctgggaaaacacctccctgaaagggggatctttcctggcacaggactgtgtgtttaacaaatcatcttcccttgatgtacaagttctttccttttccccttttaaacattggtgtagtttctccatattgggaagtcttggggttgggggctatgtccaggacccagtgacccaccctcttttgcttctcttgtgactctacaggagagacttctcttttctntntccaatggccaggagaggtttcttcaagggggtccctgaaacctgcagccttaggttccttggcaagggagccactgcttggcctggtgcctgctcacctttttttccttattcccttggtaataaacttgagatctctaagatttccacaatgggaattctccagncccaaacagtgaatnagaatcattctgtccatttctgcatt

SEQ ID NO: 460014 - DNA, 386 bp, Homo Sapiens
  misc_feature (51)..(51): n is a, c, g, or t
atttgcttataaatatttataatataaacactcaattgctatctgtttttnaggttctcctctctctcccagaacagtggtaacaggaactcttgggggcttctccctgttcttgcagatgtggcaggatgtgttcctggggggctcccatgccagtccacaccctctgtggtgtaagcagggattggtaattaatgagatgctaaaccctccagaagtgagcgctcatgtcccagaaacacatcttccacctcagcagccagtgggaaaactagactttgtgtctgcatatttgttcttaaacacactcttctgcagtctaactctgctgaccactttccagtttgctcatatcagaatttcttcggttctaaggatgcatattt

SEQ ID NO: 460015 - DNA, 448 bp, Homo Sapiens
  misc_feature (341)..(341): n is a, c, g, or t
  misc_feature (361)..(361): n is a, c, g, or t
  misc_feature (368)..(368): n is a, c, g, or t
  misc_feature (387)..(387): n is a, c, g, or t
  misc_feature (409)..(409): n is a, c, g, or t
  misc_feature (419)..(419): n is a, c, g, or t
  misc_feature (436)..(436): n is a, c, g, or t
attattaaagcaacatgtttattggcgttgatgcagagacttacacaagtcttcttttttaagagaaaaattacaaggtattcaagttacgatttttagataatctctacatttgagacatcaaattataaaaggtcagtgttaccccatatgacatttgttttaaaagtttaaaggttaccaggtttgcagcttttaaagatatgaatgtcctggggcttacccctttgggtgtctgagctagcagctgcagagagggccctctggaatacacagtatattttgctatcccttcaagttatttaaatacccggaaacacaaaggggttttcccttagggnattgtgttgattgggggctncaggggntttaaacccggaccaaccntcggtcttggggggggattgtnttttcaacgnggccatcttcttgaggncccccttctact

SEQ ID NO: 460016 - DNA, 457 bp, Homo Sapiens
  misc_feature (424)..(424): n is a, c, g, or t
cttagacatgtagcccaaattgccattttacagatgagtaaactgaaccctggagatgggaagtgccttgtccatgctcccctagatgttcattgcagagccaggactagagagcaggtttcctgtttccctctctagaactgtatttttttcccctctaagccatgatgctgttttaatagcatggactgttgagacgcagagaacacgtgacctcttgagctctctgggtgcctgaaattcagtcattttcagtccatgcgaggagagaatcttcccttttccctctgctttcccctcacagtacagtcccagagaccactgaggacatgatagggatgacatgcccaaacttgtgccctcttgcttgctcaaaaggggagaaggagctgggcatcagggacccacctttgggctttttgcnagcaccacatgctaggggtttacatgccagggg

SEQ ID NO: 460017 - DNA, 482 bp, Homo Sapiens
  misc_feature (69)..(69): n is a, c, g, or t
  misc_feature (91)..(91): n is a, c, g, or t
aggcggcttccctgagcagggtgggcggacacagttgggatggatgttctcaacccctaacaggacctnccgccttggctccctaacctcnaggattaagggccatgatagcagcaagggtcttcctccctcctgaaatgtcagcatttcgtcctctgacaaagacctgggacacactggggtggtgacttcatcttcccattctgtgtcccacacagcaggagccccaggctctgaattctgcggattctgcagcttcagtcagctgtgatgccaggtgcaaaaggcctggcccttggccggcagcagttgattcagcaaacatatttctcttttttctctctacccagactcccagaagcagtttaactttacttagcagctcagctcagcttggaggttgagagtgcagagtctacaactggatcaaattccagctctgatgatgattagttgagtgaaagtgacttaatctttctgag

SEQ ID NO: 460018 - DNA, 564 bp, Homo Sapiens
  misc_feature (52)..(52): n is a, c, g, or t
  misc_feature (74)..(74): n is a, c, g, or t
  misc_feature (110)..(110): n is a, c, g, or t
atttgccttgggaaatttgttgccctagcctcagtttgcgggcctttaaganagcacagcctagttttcagtgnttccaaattaggaaaagtggggcaggggaggagaanagagagaaggcaaacaattggaaaatgttgttttggagactggtagcccgggaaaaaatagaattcagttccaaactgtggaaaataataaaaacggaaaaacattaggcaagattagaatctaacaacaggtgtactatagtttttgaaacatttttctctctccagttttcaatttttactaaagaccaatcatggtaggacccatttgcttgactattcttggcctgattataaaacagtgcagcaagaatgattatttttcacacaggcttttaaaatcagctttgatggaactttgttccatagaaggaatctcagataagacttttttaaagctgagcccagccacggctttataccatcaaatatctatgagttgggtaacttcctcgcctcctgaggtctcagaataacttggggcttctgggcctgtcagaaagtgacattcttt

SEQ ID NO: 460019 - DNA, 489 bp, Homo Sapiens
aatttatattaaaatttttatttgatataacacttgacctttttagctcaaagcttcacttggggagacaggaatgagggaattaatacctttttattatggaaaatgtcaaacacacacaaagcagagagaatggtataagaagtgtccatgcacctatcactccatttcaacagtgagcaacattctgttgctcttagttatactctatcctccccaccactttttgttcatttactagagtattttaaagcaatcaaggataaaatatccttttacttgtaaattctttaggaaaaatctctaacatagacaaattgaataaccataacacaaacacaattttatgaccagatccagaaaacttaacaataattccttatgaacacaaaatatctgagacaggtctcagtcaatttaagaagtttactttgccaaagttaaggatgcacacctgtgacccagcctcaggaggtcctgacaacatgc

SEQ ID NO: 460020 - DNA, 692 bp, Homo Sapiens
  misc_feature (17)..(17): n is a, c, g, or t
  misc_feature (24)..(24): n is a, c, g, or t
  misc_feature (47)..(47): n is a, c, g, or t
  misc_feature (69)..(69): n is a, c, g, or t
  misc_feature (79)..(79): n is a, c, g, or t
  misc_feature (669)..(669): n is a, c, g, or t
aatactcaagaaaaatnctgttgnattcaaaccacctcctcaaagtnccccaggccggaaggccatcanctttggtggncaagggctcaaaagcaaccctctctgtcccccttctcgtcttcaatgcctatctcctccctttacatactccaagaccttggctcctcaccctcccaggtccacaaagcgggaaaactcctcccagctcagcccgccggggactggtggcatctcagaggttttgtgcgaggacgggggcgttttgccgggagccagcccttcttgaatgaagctgctgaaaatgagctgaggaggcaccttggcccaggcggcagacgccacgtgcagggcgtccagcacggtgatgcctgccccggcctcggccagcgaggtgccatccctctcgctttggatggcagccagtttgcccaacagccggtgtcggtaaattgcttaaaggcccggaccactgagctgggcaggggaggcgtggtgctagaggcgccagaggcaagagcttcacgtggtagagcccagcaggcctgccagctcctccaccactcgggcagccagcagcaaagccactgtcggccctgctgtcccatgtcccggtcaaactgtgccaaccactctaaccaggggatgcccaggtccgggtggtaggaggcnagcagagcctcactgcggatccc

SEQ ID NO: 460021 - DNA, 594 bp, Homo Sapiens
  misc_feature (34)..(34): n is a, c, g, or t
  misc_feature (48)..(48): n is a, c, g, or t
  misc_feature (61)..(61): n is a, c, g, or t
  misc_feature (100)..(100): n is a, c, g, or t
  misc_feature (107)..(107): n is a, c, g, or t
  misc_feature (114)..(114): n is a, c, g, or t
  misc_feature (163)..(163): n is a, c, g, or t
gtcgggctgggcctaatatggcataaattaatcngacattttaccccngccctacccctanccttaaagggaccgcaacaaaattttccttttccttgangcactgnataaagnagcagtcaagctgctgcagcaaaagcaaaataaattaacatgtaaatgncaagcaaagtgtcacttttttaaaacttaggaactgttaagactattgtttagcagagtattatttattgttcctatacctgattagctttagctgcgtatttaaacctctcctttttgcatggattataatgagaataatttctgaatctcatagtctgaaaaattaaaataatgaataaccacaagaaatctctgcattgcctaacaattttagaccagtcatagtcctccaaccatcagaaatcagaggaaataatgcacaaaaatattatacggcatatactttttagaggacgtaaaaagaatgacatgctggtgggtgacagcattaccaaatcggtaccagtaattcttaatttcttgttgataagcaaaattatatttatcaatttatcaatgtatgtaaatctattaatattgcagttttgt

SEQ ID NO: 460022 - DNA, 422 bp, Homo Sapiens
  misc_feature (258)..(258): n is a, c, g, or t
  misc_feature (294)..(294): n is a, c, g, or t
  misc_feature (302)..(302): n is a, c, g, or t
  misc_feature (356)..(356): n is a, c, g, or t
  misc_feature (387)..(387): n is a, c, g, or t
  misc_feature (392)..(392): n is a, c, g, or t
ggtactctcaggagactgttttgtgctttccaaatttggaaagcatctataaactgctatatttacttacgagtattcaagaaaagattagaaacttctagaaggcagaaatctgccctgtgaacttggtaaatgtaagtttactaaatatgtatgagagcttcaatttagtaagttcaagcagatgctagcagagcagttaatcaggatgaggacacatggattggacaaagcagaaagtgagccctaccacagggnttggcaaactactggggtacgcacatggtgacgcgntcatcaantgtcattctgttcacactcagaaaaagccacatgggaagtgattaggaaaactnttgggatgagggcactgttccagtgcttttncccantttacccttctttgggcttttgttgcaacc

SEQ ID NO: 460023 - DNA, 351 bp, Homo Sapiens
  misc_feature (233)..(271): n is a, c, g, or t
  misc_feature (274)..(296): n is a, c, g, or t
  misc_feature (303)..(303): n is a, c, g, or t
  misc_feature (341)..(341): n is a, c, g, or t
cataatacctttatttcaatgcctacacacattcattcattcaacaaatatttactgagcatttactgtgtgacaagcactattctaggtgttagggatacagtgaacaaaaagtgcttaaacttaaggagcttacattctaatgggaggagacacacaataaacaaacatatttttattagggattataagtattacggataaaaataaactaggttacagagtggggtgannnnnnnnnnnnnnnnnnnnnnnnnnnnnnnnnnnnnnnaannnnnnnnnnnnnnnnnnnnnnnacgccanttgaggcaaaggcctgaagatatattaggaacttcagnaaaactacag

SEQ ID NO: 460024 - DNA, 617 bp, Homo Sapiens
  misc_feature (11)..(11): n is a, c, g, or t
  misc_feature (50)..(50): n is a, c, g, or t
  misc_feature (84)..(84): n is a, c, g, or t
tgaaaaataanactgaaaagtgaaaagcaatggttttgcaccatccatgnagtaaaaaatcatgtcatgcactttcctatagtncctccaagagaaacttggcagcaccatttgtcacacagagttcaccctaaattcacctggtaattttggtgaccctctgctagttagttgcccttttggtccaagggaaaaataaatttcttgtatctttatgacagaagatagctttgtaatggagcaaggtgcctaataaagttaggctcttatgtttccaggaagctgaaagataggggtactatttttctcaatgattaaatttcagtgagatagctccccaggtccttgaggaattcacattcttaggttgtaaaattggcaaaagcctaatttagtttttggaaagatttacaggcatttcaaagaggcacagaaaaagcttacaattaagtttcctaaagtaaatgaccaaagaaaaggatgtggagggtaaaagtctctctctctcctttgcaccaggcagaattaaatagttttatttctaatttgtactcacccttacaccaacagtgtgagcatcgcctaggaatttttgttagagatgcaaatcctcagat

SEQ ID NO: 460025 - DNA, 292 bp, Homo Sapiens
agattcagagaaatgtcctttattgtttttttcttctgaagagaaccacatattgatcataacattttccatacatacgtaataacttacattttgggacagagggagttggtatggcccaccttggtccatcctaacattttccaatcaagtcaaatactatctttggattaattagctgttgatggaggtttgatagagggaatactgcatgatcttctcatgataagcctgacttctatatctggtagattatcctgcttagtctctaaacacccttcatcagtggctg

SEQ ID NO: 460026 - DNA, 309 bp, Homo Sapiens
  misc_feature (55)..(55): n is a, c, g, or t
aaaatgacataaatttattatcttacattctgtaaggtcaaaagtccaaaatcangtcttatgaattaaggtaaagttgtcagtcaacaggctgattccttctggaaattcaagtggagaatctgttcttaccttttccaaattctagaggctgcctgtattcctaggctggtggcctcttctttcatcttcaaagctggcagagtagcatcttcaaaactgactccctgacctttgcttttatcctcacatcttctttgattctcctgtctccttaagagagggacccttgtgaccacaatggggccc

SEQ ID NO: 460027 - DNA, 434 bp, Homo Sapiens
aaagggcatttccataaaatggcacacaaattttaacataattccaaaatagagaatagccaaaaataaccttagagcaaacaaaaaattttattagattatatacctgagcaatagaaaacttcgagataacattttaaaaatattgacacgttaaggagtattttactttcaaaataccataaaattgattttaaattccctttggaagaaaacatcccctagtctccttcactaaattacaaataattacccaaatataaaaaggacttgcaatgtttgttaaatatggacggcatgaagacaattaagaaactataggacttatttccaacaagaatacaatatgcatgaagttttgaaaatgtgactttttaccacagtttctgagagtgtaatagtactaaatgttctaaatgtaatctttcagatcc

SEQ ID NO: 460028 - DNA, 301 bp, Homo Sapiens
tagcgtcagagacatttttcacgttgccaccttggcatgtgtaaataagacaaataaaaactgttaagcggaacaaatcacagagagccacaaagcggatttcacacatgcctagcagaccagaactctcggcagttgctacggacttacgaaaggacaaagcgaagagctgcactgtgatgtgaatctttcattatctttaatgaagacaaaggaatctagtgtaaaaaacaacagcaaacaaaaaggtgacagtctaaatgaagtgcacagccaaagtcatgtataccagaggcttagg

SEQ ID NO: 460029 - DNA, 481 bp, Homo Sapiens
  misc_feature (21)..(21): n is a, c, g, or t
  misc_feature (43)..(43): n is a, c, g, or t
  misc_feature (63)..(63): n is a, c, g, or t
ggaaattgtgagtaggggtgnagtgaggaggtattacgggaantcctactctgccctcatttnttctatacgcttactgcctgctctaaaaaataaagtcctattaatttttttaaatagagggaaacactggcgaataatccccaccagtacccacggctaataagagccaagataagctgtataaaaaggacataaaaatgtaaaaaattagactgtagggcttgatctcaaacagtaactaaaggacaataactaaagacaggaaagaagcttgaggaagtgaaggaaagacaacctcatagtggcattttatagtgactagtgtgcaaacaactaaaacaaatttatttccctcacagaaagagaacagaagccaagacacttaaaagggacactgagtttctcagcagaaaaatcaccaccatttaacctctggcatacttacgagtatcaccctgatgcctctccctgtgctaag

SEQ ID NO: 460030 - DNA, 439 bp, Homo Sapiens
  misc_feature (390)..(390): n is a, c, g, or t
ttcaaccaatcctcctgccttggctcccaaggtgctgggattataggcatgagcttctagtaaaagaagctgagatagcccaaaataaaatgcaaaagtaaatctgcttatcttgcacatcctcataaacttcaatatctcctttgctcagggaccattctacctaagccagtccacatctgtgatcccctaaccccaaataaaaacgtccatttttttatgtagccaatatcacagtcgtcattaaaccaattcatactaaagtgtgaatgacagcccccacagagttctccataggttttccaaggaacttaggtaatttacatgaatctttaattagtatagaagtacaagagtttatttctggatgaggaatctttgcactaatgntcttcaatcatatataaggctgcccatgggaagaagggagagaatgaga

SEQ ID NO: 460031 - DNA, 497 bp, Homo Sapiens
  misc_feature (130)..(130): n is a, c, g, or t
  misc_feature (479)..(479): n is a, c, g, or t
gttattattaactaatgtgcatagatttcattagagtttactcctttgtgttgtagaatctatgggttttggaagatatataatggcacatattcacccggtacccgtatcatacagaacacgtttcacntgacctaaaaatctcctgcactccaccattgatctctcactcccttcccccaagccccagggaaccacggatctatttactgtctctatagttttaccttttccaaaatgtcagatagttgaaattattagagaatgcagccttttcagattggtttctttcacgtagcaatatgcatttaagtttcctccatgtcttttgtggcttgataactcatttctttttgttgctcaataatattccattgtatgggatgtagtacagtttttatgtattcacctattgaaggacatcttggggtaatttcaggatttggggaaattattaataaaatgccggtaaaatattncttggcacaggatttttg

SEQ ID NO: 460032 - DNA, 499 bp, Homo Sapiens
  misc_feature (29)..(29): n is a, c, g, or t
  misc_feature (61)..(61): n is a, c, g, or t
  misc_feature (95)..(95): n is a, c, g, or t
  misc_feature (249)..(249): n is a, c, g, or t
  misc_feature (259)..(322): n is a, c, g, or t
  misc_feature (393)..(393): n is a, c, g, or t
  misc_feature (403)..(403): n is a, c, g, or t
  misc_feature (436)..(436): n is a, c, g, or t
  misc_feature (441)..(441): n is a, c, g, or t
  misc_feature (458)..(458): n is a, c, g, or t
  misc_feature (468)..(468): n is a, c, g, or t
  misc_feature (474)..(474): n is a, c, g, or t
ttttttttaaataaaatactgaagaaaanaaaggggaagacaagattatagaaaatatcanttaagagttcattttaaaaaatcaaggcacttangtttatttcactttcatgtacacagtgcttacatgtacatgaatatgttactatacactaacattcaaccaggggatttataatatgcaatgtacctctacttattttcatgcttgtatttattaaatactaaaagtcaatgtgtgcatgtagnactaataaannnnnnnnnnnnnnnnnnnnnnnnnnnnnnnnnnnnnnnnnnnnnnnnnnnnnnnnnnnnnnnnataggaggaggtaaatacaaggtactccaataaggtattttattggagggaaggaatatggccaatattgnaggggggganaaccaggttgtggggggcctggatccttcctanccctncttccagggtttccctnttaaatcctnccaatnattagggccattggccattggccat

SEQ ID NO: 460033 - DNA, 368 bp, Homo Sapiens
  misc_feature (13)..(13): n is a, c, g, or t
  misc_feature (339)..(339): n is a, c, g, or t
cctagtatcctcnttaggaaagctaacagctcctactttttaagtgaagcttctgcacttcactaatatatcacattaataatttttcattttgtaaagtctgttaaggcaattcactcaccaggcctttcatttgaacatgataaagataaatcaataatgtatgtatagtactctaggtttgctgagagaaagaggaaatgtgtacaataagcataataacatggtaaattatcaaaggactcttttgggctcaaacaagatactgatctgcctttagaagattttaactcaggccagagtgggctcagaattcacccagtttcccctccatatagntctgaccctccgaccatgctggcttttcc

SEQ ID NO: 460034 - DNA, 480 bp, Homo Sapiens
  misc_feature (23)..(23): n is a, c, g, or t
  misc_feature (55)..(55): n is a, c, g, or t
  misc_feature (60)..(60): n is a, c, g, or t
aaaggttttggagcatcttgaantcaaaagctccaaggtacactcaagatactgnttttntccttaaccaaattgctaaacagtggatgtggtgaatagtgatgatacagggaactacaacagaactacaatggaatttccagtcctctggctcccatttctatttcttctgtcagccccaggtctcccacagctgaacttgcagattcatccttgccctagtcccagattaatctgtatttgaggaagaaggtatttaaacaggtaattatcctaccacactgcctctatgtccatgcctaaatacagcacatcttatgagctctgcagctaagatttgatcactgaagcagagtcctaagcaacccagaaaatagggtcttattttcctttgtgtgacttcccaggctaatttcaaaccagctgcctaggcttaagcttgataataataacctgtctaatttccccatccttctgttg

SEQ ID NO: 460035 - DNA, 456 bp, Homo Sapiens
  misc_feature (418)..(418): n is a, c, g, or t
ttttttttcttctctttttatgtttatgacttcctaaggcacactcagccttgatgagataaataaatcctgtcctatgagacaagccccagggttgctcagaaataaacagagcttctaggtgagaaggagcaagctaaaagaacaaatcaggaagtcccagtgaactaggaacttcgtgtgtgtttgtaacggcagaaatggaatcaatttcagaatttcccaggaagcattatgctaagattcatacgcccgggttctaaatctaatattctacatatcctattaatgctttccattataaactaaataccattttagtttaccgtcaagatatattgtgggggattttaaagggtcaacaattgataaaaggttttgagcatcttgccctgtaatccccagcacttttgggganggccacggttgggtgggatcactttgagggccccaggg

SEQ ID NO: 460036 - DNA, 548 bp, Homo Sapiens
  misc_feature (527)..(527): n is a, c, g, or t
tcgcagacctgaagtaaatgttacttttttacgatatttgaaggatagatttattttataaattaatagtttaaataagattttgccagcatttgaaatgatatttatttctgtgtatcaatattaccacaaacttacacagcttaaaacaacatacactctttatctcatgatctcacaatttctgtgggtcaggaatcaggtcatggcttaggtgggttttctgcttaaggatctcacaaggctgcattcaagatgtggtgcctgaagttgcagtttcatctgaaattctgttggggaagtatttgcttccaagttcacatggttgttggtaggcattcagttccttaagggatgttggactgagaatctctgtatcttgttggcttttggctggctccttgccacgtaggtcttcccaataaggctgcttgcttcctcaaagctaggcaggtgagagtgagtccttagcaagatgcccttacagtctagggaacataatcacggacacaaaaatcatatatatnctgtcacctttgttgtgtctt

SEQ ID NO: 460037 - DNA, 653 bp, Homo Sapiens
tctaagaaggatggtagattatgtcattttggaaactattgtgtcccttgtattttaaatatttcaggaaaatgcctacgattgttacaaagatgtgtgttttacttataacataagctctgattctccagtggccactgggccttctctgtgctctgtattcaactgcagtatgaattacagaatgctgtgcatgttcgttagtaccaataccatgtgtatgtggtagaagttgtaaccagtttctggatctgtatggtactataaaatacttattttataattctgtaaccgtatggcagtgttatgccaaaaatgtataaagagcaatagtttttgttgcttactgctgtattttaaaatattgtttctaaaataatagagttagagttccttttgagtaattatttttaagaactattgccaaatatacatcctgtaaaactaataaaagccactccatcttagataacattttagcattgtgctagagtacattatggtgattttgcacgattaaaatatttttaaagaactagaaaaaatgacttgctgttttcctgtcattaagcatgtattttttatgattaacacataagactaacattattttcttttatcctcaaaaataaatattgtgaagggtgaatcat

SEQ ID NO: 460038 - DNA, 512 bp, Homo Sapiens
  misc_feature (46)..(46): n is a, c, g, or t
  misc_feature (422)..(422): n is a, c, g, or t
  misc_feature (443)..(443): n is a, c, g, or t
  misc_feature (467)..(467): n is a, c, g, or t
cacctcctccacggggacctgactgctgtgacttagtccatttttngttgcccatttctttccctgggcaacagcctggcacgctcttggacctggcagccaagtagtttggtggcattgacacccaagaagcataagtgctgagtgagttcacgagaaatggctgcagggcgctctgacgacagaacaatggtatgcgccccatactcatccagcccccaaaagacctttagatggaatagacaaacacagcagaacaagccaaaatcgtctctgaaacaagcacagcctgagcccaccccactgtgactgcatcgcccagggtccttcacctgtgactgcatcgcccaggggtcccagggaattaaccaacagcagcttcagcaggaatacggagcctgcacagttgggggaaagcgacnggggttttgggcaaaacagcntgagtcttttgccttgttcccttnttttaacattaacagaaaaaaggcccttctttattttaggttgtt

SEQ ID NO: 460039 - DNA, 470 bp, Homo Sapiens
  misc_feature (51)..(51): n is a, c, g, or t
gttggattaccttccaggggtgccagtgtgtaacaccccgggaagggagcncccgggagggcatgcctcctgggagcctagaaatattcctgccttttggctaaaaacatgtgtgcactgagtttgtgaaaattcatttatctgtattccttagtatgcttcgataaaaagttaagaaggtaaatataaagcacaaaaaaatgttacttcaaaacttttgacgaaagcagcttaccttttgaactagtttctgcagcagacaagaaattagaagtcaaaaagattttttaaaaatttacaggaaaaacactaagaaaaatcactgagactcctatcttatcattagatataaatggacatattgtttggtaaatgttattttctcaacaatgtatcaatcaaagctgtattaattgtattctacttatcttgtcaatttagttttttagcaattcaaattttcttatgcc

SEQ ID NO: 460040 - DNA, 233 bp, Homo Sapiens
  misc_feature (67)..(67): n is a, c, g, or t
gcattttaagtatttgtacacaactgtaccctacagcaaatattcaaacactgggaaaatatctgtnaatgttattggataacattaaaataatgtaaaatttgaattgctcagcaacactaatactacacagaatcaagtgtagaaattgttaattcaaggatacattttgcctccaaaacttgtttcttgggacactataggaacttacataaagtatattatgtgtaaaa

SEQ ID NO: 460041 - DNA, 253 bp, Homo Sapiens
agaccctccccccaggcaagggctgcggctggccctctctacacgtggcgcccaggtagacgtggaggcagtgcagtctgcccgaggggaggaagccgggctctggctttttttgcttagaaactcctgttccccattttgtaaatggtttgtattcattccctggaaaatgtatttaagaacatatagccctgcccctgaaagagccgtttgtaatatcttagtgttgagagaacttatcaggtggttgctg

SEQ ID NO: 460042 - DNA, 583 bp, Homo Sapiens
  misc_feature (23)..(23): n is a, c, g, or t
  misc_feature (36)..(36): n is a, c, g, or t
  misc_feature (47)..(47): n is a, c, g, or t
  misc_feature (56)..(56): n is a, c, g, or t
  misc_feature (71)..(71): n is a, c, g, or t
accctttaaccccggcccttggntttttttcaaggncccccttgggnacaacaggncttcacccatggaantgcttgtaagttccaaggcttatggaagctggcagcaggctttggctaagcatgaccagagcgtcaagcaagtcacaccgtggcagccggagagcttgaggaaagtgagccgaggacagcactcacctaccagctgcggggagacagaggggcagctggggttgggagacgacaggctaagatccacaagggaaacagacaaagtggctggtgccaaccccactctaccgccttagctgtgacctcctttctgcccatgccaggcctacttgggtgtccccgcctctgatacctccctgctggaggaaacagcaggaaaagagaaccaggcaggcaagcagacatccccacggagcagcgttgggcccccaaggtgcctgacccacttcctagagtactgaacagtcccagagtgtcacagctgatgtgcaggacagcctggagctctcaccttcaacacggggtgttcctgagactcccagtggatgagggtcagcctctggagctgtgaa

SEQ ID NO: 460043 - DNA, 351 bp, Homo Sapiens
ttttctttcatcgctctattgctgaccatctagttattaacataaccaagtcaacttcacctcaaactattgcatttaatgcttgccttgttataccctgtggggacttgccaagtcaaagacagctctctacctcagaaaagtacccctgtccctcctgactctcctcaggttaggcattagtaaattaggacaatttaatccgggaaaatttcgataaagactccagtgtcaaccagggagtcttgccactcaatgtagagcttttatgccatagttgggtccaacattctgtgggaccactaaagagcaagggatgggacttgccccaaccggtttttgtaatttcct

SEQ ID NO: 460044 - DNA, 667 bp, Homo Sapiens
  misc_feature (546)..(561): n is a, c, g, or t
  misc_feature (622)..(622): n is a, c, g, or t
cctactctattctttccccccatgaacttatcaaagggagaactggttgtgtatttaagagaaatgagagtgcattgcaaagtagtttcccaaggcatttcccctattgtttacatggtcaaaaggaaaatcaaaatcacttctaattacaaaatgtgctgttttggtggggtgggcaatcagattattatagttgatgactgtaccaaagatctggaatgggggccacctttatattttaatactcaagtcctgtgctccttttggccactttaaaaagtcttccctcaccttggataaataggattcagaaagctaacagttttcattctgaaggagcagaaacataatcaatccctccctgagataaaatgtgggcatgcacattgctttggagtcagtattcagctgtaagtgtagtattgttttatggctgaaatagaaagctaatgaagaggcctacctggatccagattttatgttaacatggcagcaaaactagggaaaatgggaagaaattacttgcggggtgttctagatctggannnnnnnnnnnnnnnngaaaagtttcagcctgtggggagggaaaagaggtatctttttaaaataggagatagttacntattttccctcatctagggctgtgttcactattggggtgcagggt

SEQ ID NO: 460045 - DNA, 310 bp, Homo Sapiens
  misc_feature (61)..(72): n is a, c, g, or t
gcaatgccacagttataggagtgtatgaagaggtaacatgtctccttttccttaaccatgnnnnnnnnnnnnaaaccttctgcacaaaggtaaaagtttttgttaatctcatagttaatggtataaaacagagattggcaaacctttcctccaacaggccaggtagtaaatattttagatttcacagaccacatatttttttcttttataactctttaaaaatgtaaaaatcatttttaggtttgcaccatacaaaaacagactggggccaaattcggcccgtggggaggtaggtttgccaaccccgggg

SEQ ID NO: 460046 - DNA, 481 bp, Homo Sapiens
  misc_feature (356)..(356): n is a, c, g, or t
  misc_feature (400)..(400): n is a, c, g, or t
  misc_feature (412)..(412): n is a, c, g, or t
  misc_feature (437)..(437): n is a, c, g, or t
  misc_feature (443)..(443): n is a, c, g, or t
  misc_feature (448)..(448): n is a, c, g, or t
aagattactttcactggtgttttatgtttcttacaggtattttaaacacagaaaaaccatgagctctttctgtttgtaattcaaaaagataaatgttattgtgttcaagttatgaaagtgtttccagatctctcctttcagatcatacccactggtatttattgtctgatcataagattctctattgaatatttagtatattcagtgtagtatctaactatatgtatattatcttatgttgtcgccaagtgtttcacctggccttgtctctccagcaataggaggggatacatgtgaggtgtggtctatatatatatacaggggcctggcatatatggtaggggggatggtctctnggggggggatattaatacatatggtggtggtatatatatggtcntaatatggtacngggtcctttcataccacacacactntccccntaggnagggggggataggtagggtagtttccggggttt

SEQ ID NO: 460047 - DNA, 472 bp, Homo Sapiens
  misc_feature (11)..(11): n is a, c, g, or t
  misc_feature (21)..(21): n is a, c, g, or t
  misc_feature (71)..(71): n is a, c, g, or t
  misc_feature (151)..(151): n is a, c, g, or t
  misc_feature (330)..(356): n is a, c, g, or t
ccggggccccnccgaacaccnacgtacgggagcccgaactctgttggccttacctgtgtttggtggcccangacacctctaagcccctgtttattctttaatggcctctggacctcaggaagagagatactgcaggtttcccaaacagtgntcatacacatataagacaaagacaggcatctgatgttaacaaaaataagtaacaaagaaataggattaaaccaaatctcttctcacagcatcctatactacatcctccttctgcttagcagaaaattgtacgtacacaaaaatacaaatacacaattttgtagaacagtctgattttannnnnnnnnnnnnnnnnnnnnnnnnnncgagtggcaggttagttcattatatagagctttttgcacttttggctcatatgcaacaaggcttataaattcagcttcagctttcattcaggttttatagcttttgaacaattgtt

SEQ ID NO: 460048 - DNA, 431 bp, Homo Sapiens
  misc_feature (11)..(11): n is a, c, g, or t
  misc_feature (21)..(21): n is a, c, g, or t
  misc_feature (126)..(126): n is a, c, g, or t
caacaatgcancatagtcagntttgacccaaataaaaacatggaagcaaagaatacgcttaacagaagagtgactgataaaagggagataggggtcatgaagtaaatggcagccttttagttgtcnttaaagtaagagagactgttttttgtttatacaataatgagaaagagtttgtcgggagattaaattgtctttcaccagggggtcggtaaagatgaagcaaggatttctgtgatactaatcactagtcactccccagacacctctctttccctgtctcttattttatatattcattttattttgaataaatctttgaataaatatattttattatatacattttaatgttcaagtatattatattgaatgacatcatgaggacaagtttttgaattaaatgtgagggtatcaggatgtttaatatt

SEQ ID NO: 460049 - DNA, 410 bp, Homo Sapiens
  misc_feature (56)..(56): n is a, c, g, or t
ggtcccctggtttttcctcctttcaaaaacggtgggaaaatgggaacctgaactcntcttcctgctggtcccccggggtgccttatcatcctttgttggctcctgatatggtttggctgtatcctttccccaaatctcatcttggattagagctccccatatttccttcatgttgtgaaagggacccattgagaggtaattgaatcatggggggcaggtgtttcctgggctattctcatgaaagtaaataagcctcatgagatctgatggttttataaaggggggtttccctgcatgagttctcttctcttgtctgctgccatgtgagatgtgccttttaccttccaccataattgtgaggcatccccagcaacgtggaactgtgagtccattaaacctctttcttttgt

SEQ ID NO: 460050 - DNA, 491 bp, Homo Sapiens
  misc_feature (11)..(11): n is a, c, g, or t
  misc_feature (32)..(32): n is a, c, g, or t
  misc_feature (51)..(51): n is a, c, g, or t
  misc_feature (463)..(463): n is a, c, g, or t
cccacaagacngccccctcacttcagaaggcnaatccacaagtaagtgggncccctagattattcacaatttcctgtcctgaccttggcctacaaaatccagagattcccggccctccccttcctagtgttggataatttccctaaagtggttccacagagcctcagaaaagcaattctacttactattgcctaatttatcacaaaggatattttaaaggatacagctgaacagcccagatgaagaggtacatagggcaaggtctggcaagatcctgtgtgcaagagcttttgtatgtgtaaagttggggtgtgccccctcttggcacatagttgtattcaccagcctggaagcactctgaactcagtagtttagggttctttattgaggcttcatcaagtaggcataatcaatttttaactcaatgtgtaatccctcaccccttcctgcaggatgagggctngggctaaaagctccaaacttgtcaccat

SEQ ID NO: 460051 - DNA, 508 bp, Homo Sapiens
ataaatcactgatgtcttgatcctactgtcagatattctaatttaatcattccggggtatagcctaggcgtagagttttttaaaagctcctgggaagattctaatatgcagctaaattttataatctctgttctagagtagagctgttcatccagtgttcctgggaacattgctatgttaggaaattaagaagtttgcaatctattgaggatttgaatcttctcagcccttggggtgctgggtgtgcttgctgaggcagacatgggctggtcctctttcacagtctattagtaaacttttctctttaccccagtgcaccctattaaatattattttctagggtctacccatggatgtaaaaacaaaatggaatgcatacctctagaataaagcctatgtatttttaaaaaattcctcagataactgtgatgtttaggcagtattgccaccagtctcccagaatttccttgcaatatttttttcagattagtataaaatttcaagaaaa

SEQ ID NO: 460052 - DNA, 318 bp, Homo Sapiens
  misc_feature (14)..(14): n is a, c, g, or t
  misc_feature (47)..(70): n is a, c, g, or t
ggcttgcctctaancaggatattgcttcgatttctttgatttccctnnnnnnnnnnnnnnnnnnnnnnnngcaaaaaaagtctgattctaataacagctagaatatataaataataatgttttaatgttattggttctttgtttccaacccaaagttcctcttctcttccttttgccaataaatatgaaaattgaggacatcaactctgctcctgtcaaaaagaccccctccccgtcagaaaagagacaatccgtctaacttcctatttctatggaaaataaatagcgcatcacgatgccatctctcggaagaacgct

SEQ ID NO: 460053 - DNA, 369 bp, Homo Sapiens
  misc_feature (336)..(336): n is a, c, g, or t
ttttttttgaatggctttttaaaaagcctgagagagcagagttgatctttattttcttatttaaaatgtggggcatttttctttagagttaatatgcagtcttttattttacattaagtactcttatgatttcatgtcttcacaaaattgcggttaacttttgaagtaggaggtactttaaacaaaaatactgtgccatgtcaggcacttttttccttttaaatattggaaataaataaaatagttaactctttttttccatcagtttgtttgtgttcagttatttctactgtaggggtattccggggcggaccggggggtactttcttcacaggncaatccaaggaaaatataatggaagggtttaaa

SEQ ID NO: 460054 - DNA, 514 bp, Homo Sapiens
  misc_feature (54)..(54): n is a, c, g, or t
  misc_feature (95)..(95): n is a, c, g, or t
caacagggcccctgcaaagtttcaccgcctcaacctgtgtggagggaaatttcntcctcacttaccctcctcatggttggtgggaaaaggcaaanggctcctctgttggctgaacggtaatcaggctctcctagggcaagtagtatccctggggaggatgtactaaatatgtctctttaggcatttggaccatgaggctggacagtgtctgatcaagaacgtcctcctcagcaatataggtgtatggacagtattctcgggtcctggagtagatgttggcattgtcataacaatctgagcaaatcacccgggtaccagtgccaccgtcagtgcctttgtgtatatatccattggcaggaggcataagttgctgatgactgcctgcctcagagttgctgtagccttcctgtggctcagacagcgttccttgggaagacaagtagctgggaatgtctgcaggcagattgagctcctctgtgtttgtgatactatagtcttcatttttccttctcat

SEQ ID NO: 460055 - DNA, 440 bp, Homo Sapiens
  misc_feature (16)..(16): n is a, c, g, or t
  misc_feature (209)..(209): n is a, c, g, or t
  misc_feature (245)..(264): n is a, c, g, or t
gtaaaaattttgaaangcccaaaatatatgtaatatcccagttataatattgacaagtagccttcctcagatcacagattttaaataactcaatttagtgagatcctaaaaattttatttaaagtataaaaactgtggctcacacctgtaatccccagcattttgagaggctaaggtgggaggattgcttgaggcccaggaatttgagnccaggctgggcaacatggtgagaccctgtgtctgcnnnnnnnnnnnnnnnnnnnntaggtggacattgtggcatgctgctgtagtcctagctacttgggaggctgaggtgggagggtcacttgagcccgggaaatcaaggctgcagtgagctgtgtgaagccactgcatcccagcctgggtgacagagtgaggccctggctcaaaagtaaaataaataaataaaaagtttt

SEQ ID NO: 460056 - DNA, 445 bp, Homo Sapiens
  misc_feature (34)..(34): n is a, c, g, or t
  misc_feature (39)..(39): n is a, c, g, or t
  misc_feature (433)..(433): n is a, c, g, or t
aatccctcaactctgaattaacatcaagccttgnaagcnactcaacatggctagctccctcacctgcccggtctcagctttaaaatgcccactctctgagatggccttctctgaccaccctaaacatgtaaagtgaggtcactttgttgcttctctagctcaggcatttctttgtaatgcatactcctatttgttttaactgtttacttttatgcctccaggtctaggctagggtcatcaaacttttttataaagagccagactgtaaactacatcctgtttgtgtcacgtgttactgttattttgttttgcttttaaacaaccctttaaaggtgtaaaaaccattactggcttctgggctgtacaaaggcagcagactagattttgcccttaggccatggtttgctgattgctcagaccagtgctcaacacnaccctgcacgag

SEQ ID NO: 460057 - DNA, 426 bp, Homo Sapiens
  misc_feature (222)..(222): n is a, c, g, or t
  misc_feature (319)..(319): n is a, c, g, or t
  misc_feature (416)..(416): n is a, c, g, or t
catgaatacatatatatttatttaattcataatatagcattttggatgggctggaatattgtagagagggatgaggctgtgtaatccacagatgctcatatttctgtcactaggagagacactattggtccagagctcccaatacaaacaggcgtggggtaaagcatttgataaaaaatagtccaacaatagtctaataaatagtctagccaataacaacantacagcatatgtctgaagctggcagactacaccataaaaggcagttttgtctgacctgatggcaatcagtttggccaacctgtaacacacagccaantacagccattggctccaaggctggcagttggcttcagggagctaggaattaagtttagggagtggtttctttacctacctggcctgacacttttccntttcccttgg

SEQ ID NO: 460058 - DNA, 427 bp, Homo Sapiens
  misc_feature (19)..(19): n is a, c, g, or t
  misc_feature (39)..(39): n is a, c, g, or t
  misc_feature (384)..(384): n is a, c, g, or t
tgaggagcttcccttcctntcctgaatacagtcatgtantccagaacgatgggctatagcacaatgatgggatatagtctaagcaaggtgtcattagggaatttcatcattgttgcaaacctcatagagtgcacttacacaaacttagatagtatagcctactacacagataggttatatggtctggcctattgctcctaggctataaacatttacagcatgttactgtattgaatattgtaggcaactgtaacacagtggtaagtatttgtgcatctagacatagaaaagttacagtaaaaatacagtgttataatcttatggtactactatcatacatgtggcttatagttgaccaaaacattgttatacagtgcatgactntatagtttaagaaagatacagaaagacatcagtgagcattttt

SEQ ID NO: 460059 - DNA, 474 bp, Homo Sapiens
gctggttgactcattctgttgcttttgatctactacttttgagctcccccaaagcaatcatattaagctgtgctgtgtgtgatgccttgagtctctcagctgctgtagccaaccaggtgccgcctgccacttgataattggtcccactgtctgcacatggggcttgacagatcccagcctcataatacggtagcacttaatttcaatgaaaaaacaaactggcagccagtttagacatgcaagggctggtctctctttggtagcagctgcttgatagagcctgtcaggaggtagatggcattggcatttgggagtgaagtcaccttctggagaagtggctgtgttttctccatatgaggccatgaaatactggcatgtagaaatggtttacagaaactactttatctttatgcatatgatatttgtgatataggaaacatttattttaccttcattggaaaaggaaaataaagt

SEQ ID NO: 460060 - DNA, 326 bp, Homo Sapiens
tttttggtttattctgggcttttgtttttatttaaaatgaccaatgaataaaattacacaacatgggatgtagcattttaaaattacctccttcaattataaaattgacttaatattttgtacacctacaaggtgcaaggcacactgctgggctgtttgttaacggcatactatactctatgtcttcacaagtcatttgcataggaaaggtgcttgaaaattctgtgtgatttgttaaaatcagtaattccagatgggtttacttcaaactagtgatacagtgatagaggcaggaggcagagaaattttaggcagaaaagggaggg

SEQ ID NO: 460061 - DNA, 585 bp, Homo Sapiens
  misc_feature (27)..(27): n is a, c, g, or t
  misc_feature (44)..(44): n is a, c, g, or t
  misc_feature (49)..(49): n is a, c, g, or t
  misc_feature (74)..(74): n is a, c, g, or t
  misc_feature (93)..(93): n is a, c, g, or t
  misc_feature (124)..(124): n is a, c, g, or t
  misc_feature (153)..(153): n is a, c, g, or t
  misc_feature (514)..(514): n is a, c, g, or t
gctcctgggagtatatacattggcacncccaatatccaacactnccctntcccactttgagtcaaaatttgaanggtaagaaggtaattatgnaaaaggtgccacaaaatgttaaatacctagnggccaaaataaataatatccttaataggntcctaaacaagcaaacatatattcaagataaataacagccctgctttattaaaagaaggaaaagacccaaattgtgtttggtggggtggggcggggcactttgccatcctttcagcaggatgttattttctgttgtttctactggcaccttgaaggaaacattggccttggcatatgtgactattgcttttcatagaagagccattttagaaatacctttgctcatatctgaactgattaacctaaaccttggagaaagcacaaagtttaagtatgaaaaataattcagcatttctgcatcatcccatgccttttaggcctgtccaaactgtactgataagaacttcacattccaaagaangttactgtcacgtgtttcttcatatataaaattcaagtgagttcttacgtgtgtaattcacatcatttttc

SEQ ID NO: 460062 - DNA, 382 bp, Homo Sapiens
  misc_feature (17)..(17): n is a, c, g, or t
  misc_feature (119)..(131): n is a, c, g, or t
aatccaagggagatttnaaaaagtaacccccatgtgacaaatcctgtacccaggggctatccctgcttcagtggccaacacactaacacctgcttacctcattacccctgggcccattnnnnnnnnnnnnngttgaattaattgaatctcatagaactaaagagctataagggggaaaaataatctcctgatttatttatgcagattatacatttctgcatctgcttgcgtagagccagcaaacataagcatttattcaaacaggcccacattttagagttgttacaatacctgcaacttacaagacgatgcataattatcctattttttacaaagtctaatgtgatttcaattgatgtcagtaagttttgattgaatttgc

SEQ ID NO: 460063 - DNA, 368 bp, Homo Sapiens
  misc_feature (48)..(48): n is a, c, g, or t
  misc_feature (335)..(335): n is a, c, g, or t
tccatcatatgccctcagtcatgtggaattaaggagaaccaaataccncgttggcattagccatacttccctaagcttagtataaattaaagctttgcctgaaaattcataaaaccctgaaagcagctagaaatgaaaactgacagtagaggtctgaaagactatgtctatatgaaggcatttctaactcaacataaaacaaaagatattcttaatgatgaagctgaatcatctaagaattactgaaattatttaaactctgtatttaggaaaacatgcaatgtactttaggaatactgccatcacaaacagttaaacatttatattggctcaancagtaaaccctagttaactgggaaacacatttg

SEQ ID NO: 460064 - DNA, 493 bp, Homo Sapiens
ttttttttgacaagaaaacacaaactaatcaattttattcatactactcatgaaaagcaattacatttttacataaaatcattaacacatacaatagaaataataagagtaatacatctgattagaaatacaatataggaaatagattttaaaatagcatattttagtgatgaaatttatattttctacttatttatagcagcatctgtaagattcttctatctgttcatagttaactagcagcaaaatattttaaattacagaaattcagtagatgtttccctccaatgtttcattcatacagaatgtatcacgttaaccaaacaaaaccacttatatttcctgaagagaaaaggtgggaaaagatttcatcagttaccagctcccccaaaaaaagaagaaacgagggagaaaggatggaagctagaaaaattttgcatgcaattactaaaaaatatattctcaaccactttgaccaattataggtggattg

SEQ ID NO: 460065 - DNA, 520 bp, Homo Sapiens
  misc_feature (52)..(202): n is a, c, g, or t
tttttctgaactattatctatgccaagtgttatccagtagaatttcctgcannnnnnnnnnnnnnnnnnnnnnnnnnnnnnnnnnnnnnnnnnnnnnnnnnnnnnnnnnnnnnnnnnnnnnnnnnnnnnnnnnnnnnnnnnnnnnnnnnnnnnnnnnnnnnnnnnnnnnnnnnnnnnnnnnnnnnnnnnnnnnnnnnnnnnnttattttgtgggagtattctgctgcttttcactcttctatttgaagttgctcactcacatgccatttgcccatccctggtgagattgaatttttaccgaaacttggccctctagactgtttagggacagcagacacatgttgcctgtatgtgaaatgtaaaatgtaaaatgtaaaatgttttgtctacaagcaatcgtagtgcactgtggaaactcactgcttccctgttaggtaatgcaagtctaaagactactccagtttatcctctctgcctcctatcttctcaatgattgtttcatttctaaacgccttctgca

SEQ ID NO: 460066 - DNA, 538 bp, Homo Sapiens
tgaaagatctgtaatatgtcataacatgatgtcattcttattgccaaaaaattaatggtcaatttgtattctactctgcagactttataaactctgccaagttcattatcaaaacaataagttacaaaatgagggacatccttttaagtccagtgcaatggaagtaactgtattgccaagatatacaaagtatttaaataccttagttcgctgaagaattatatttttcataacattaaaaaattatttcagtcctttattagttcagtctatgcaataaactcctgttgttcaaaacatttaacagcactctatcttagaactgctacagttttagtgttcaatatttctctaacaaaaatgactcagatgtattcttataaatgttcacaaaattggtaggttttaatgtggtttctaaggaaatactgcttccttaaaaatccatcacaacagcaagctaaagagtactctattactttaatgttagtgttgttagtgctaggctataatttgggcaatgtctgtggcttaaatc

SEQ ID NO: 460067 - DNA, 518 bp, Homo Sapiens
  misc_feature (92)..(92): n is a, c, g, or t
tttgatgggactggccccaagaattccatggttacggggggcctgtacccatgaggaccccgggagaaaaaccccgggaggaaatgaacccnggaggcctaggtaaggtggtattaacctcatgttggccagcactgtaattccttacatgtagggaagacggcagcattccagcttggcctgacaggaagctttgtgttacactgaagcatattgaaaatatcaaagtcccgtgaaataaaaatacagcttctgggcccaatactttacctgtgtgtaacttaaaagctttattggacatggagactctctaaccaaaaacaaagtgtgagtgaagggtggtgaaggaaggagtatcaaatagcagacccctgcaggtgtgtgtagaataacaacagatgctacttattgagcaaggggctaggtgctttccccacatcctgtctcactggcatggaagagcagcaccttatgttaggcagtgttagccccattttaccggaggagaaacctgaggt

SEQ ID NO: 460068 - DNA, 375 bp, Homo Sapiens
  misc_feature (226)..(261): n is a, c, g, or t
  misc_feature (329)..(329): n is a, c, g, or t
  misc_feature (346)..(346): n is a, c, g, or t
gggcttgctctgtcacccaggctggaatgcagtggatgatcatggctcaccatagcctctacctcctgggctcaggtgatcctcccacctcagcaccctgggtagctggaactacaggtttgcaccactatgcccagctaagttttgtatttttttacagatggggtttcaggcaggtcccatgttgcccagggtggtcttgaactcctggggttcaagcaatctnnnnnnnnnnnnnnnnnnnnnnnnnnnnnnnnnnnnagggtgacccaccacgagtggccagcaagaatgtttttcaatgttcaatccatgtttgttgcaatggnatcaaggacttccattnccttttttaaggggttgaataataattcc

SEQ ID NO: 460069 - DNA, 470 bp, Homo Sapiens
  misc_feature (17)..(17): n is a, c, g, or t
  misc_feature (92)..(92): n is a, c, g, or t
  misc_feature (449)..(449): n is a, c, g, or t
ccgaacatgaccccaantttagaacacaacatctgccccactggttaaagccatctggaaaaggagaggccccagtctccctcccagctgcncttcctactaattcatatccttcatctcaataagcacctccttatctttaagcacagtccttcagatgataggttcagtgcatttcctctttctcttctgtgaaatcttctgtgaaatcctttctaggacttcaagtcagccattcattgagaatgtaagaacttactatgaactagatggaagatacaaaaaattgctgcccctgagtgtgtagcagacatatagccatagcagtattgaaatgtgccattggaggtgaatgcagagtgctgtggggacacagaggacactgctgccactgtctgccagggagctgaggaaggttgcatagagaggggaaatgctaattgagttantacgtttattaactatctcgt

SEQ ID NO: 460070 - DNA, 480 bp, Homo Sapiens
ctcagaagtaaacatttaatagggacttaggaacagaaatgatgtcttgggtggctgcaagatggtggatccctgcacttaccctccagaaagtatgctttctatagaggcttttttggttaaacatgcagctggtcacacattatactttcttgtgaaacttatgagcactagctggtggggaggcttggtagacatctttgtgtggaattatttatgctacccaacactttgggatgcgggagtcagatattggtggtcatagtggttttgcatcaagatggcatcactcttgccatgcaacaggcatgttttcttaatctctaaggtctatcacaaagtgggaaaagcaaggtgtaaagtgaggggagaggtgaagattgtctgtatatgtctagaatattttcttgaaggatccgaaaaaactggccactgtgtttgcttctgggggaaggagggacacttttattgtacactctt

SEQ ID NO: 460071 - DNA, 224 bp, Homo Sapiens
gactgtgaagacctcctttattaggccaagagtggccatgtgcacagatttacagagctgctcctccctgtgccaggacccgcccagcatcttcaggagcctctgggccaggggcgagtgaggacagcaccagaatgtggtagggccaggagaggcaggacacatgtggtttggaccccagggaaagggaaagggcaagggcagggagcagcttggcacggacc

SEQ ID NO: 460072 - DNA, 509 bp, Homo Sapiens
  misc_feature (423)..(423): n is a, c, g, or t
  misc_feature (454)..(454): n is a, c, g, or t
  misc_feature (484)..(484): n is a, c, g, or t
ctacaaacttttttgagagcttgtagtgtgctagatgttagaggggaaaaaatcagacagttgctattccctgtttgccagtattgttagtatatctcctccctccttctcctccccaccactttctctttctttttaacttagaagttgtggtatttgagaagaacactgagtcaccattgccacagactctgatatcggtactgctggtaggccatccatccaaatctagaaagtttctattggtaaatactgctaatcgttatctaaaaagttttttaggcactctcaaatgtaactagtagttaggttttcgtagatttgcctttctcgggctcccttccctttattaggaaacaggcaagtacttaatcttggatattttacaggaggggaattggggggaaaatggaccaattaacngggattcccgggaggtccagggatttcaccnttttctttgtggcggttggaaaccctggtnacttttaccattaagccgtcccggg

SEQ ID NO: 460073 - DNA, 498 bp, Homo Sapiens
  misc_feature (362)..(362): n is a, c, g, or t
gtggagataaggtctcaactatgatggccaggctagtctcaaactcctgtgctcaagccatcttcctgcctcagcaccccccaaagtgctggaattacaggtgtcagccagcatgcacggcccaagacgctaactttaaatcacttgttgctcaagtccaatatccctgtgattctgcagaaaaatgtaaaacagctacaggtagttttagtatcaaattttatattattctagaagaaaatattctgagaagtcagctttttaactgatttcttaattcgtttgtatatttgatttagtcaggtattttatcctttgcagggtttcttcactataccactccagcccagcctatcacacantgggtaacttcaacaggcattctactgggtcttgctgcctttagactcacccattttccagttctgtatatcaaggttttcctcaagcatgaaacctcctccaacaaaactgctataaaatctttgttggttcatc

SEQ ID NO: 460074 - DNA, 399 bp, Homo Sapiens
  misc_feature (20)..(20): n is a, c, g, or t
gcagaaaaaagggaagcagnatgagagagttaagcaaaactgaggaggagtcccaagggatagttgattgtagatataaactttgcttcataattttaactagtcccagacccaccaatgctatttgtttatagctatactgtacaacatattgttttctttttcaagtgtaaaataattttatattatgtgggtttcctacataacattcaacctcagtattctagcccattgtgaaaaatgcttccaagtccactaaaagtcctttatcatatgtctacagacttaaaaaaaatggcttttggtggaagtataaataaatatggctttgtgaagagtaaacatgctcttatgtaactcagaatgcattttcatttttattttcccccctaaattgtt

SEQ ID NO: 460075 - DNA, 692 bp, Homo Sapiens
  misc_feature (652)..(652): n is a, c, g, or t
ctgttaaaccaaatatggactcctcagaggtgatttctactgcatgctcttttctgctctatagatcatatgttcctgattctttgcatgtctggtaattaaaagttcaacatgggatatattgcaaatatggttctgttaatttcttctgaggagcagtgatttttattctagtacatataagtcagttaatagttgactccttgaacttgtataggtttggatttaacctttggtatgctgatctgctgaaagctcaggatatttcccagggcttctctatctcgggtgagactcattgtccaaatttgggtctaccctgtaaggaattaattgggggccttcttttactaggtcttaggcctgggtctagagtaggccttatattagagcatggtccttgttcctcaaacctatcttttgtgttatctcagctagataactgaagttaacaaggatttctccatgttgactgggttggaactccagattccccacggctctatctctaatattacaattccactctcattctgtagcatctaatctctggtaagccttgggcagtctcattcagtgaacacgtagcctagtcctcagccaggaatcatgatacctggcttccaacttctcctcagtatactgggcttgnatatgaattacttccctgatttacacaggacatttacaac

SEQ ID NO: 460076 - DNA, 480 bp, Homo Sapiens
  misc_feature (398)..(398): n is a, c, g, or t
  misc_feature (424)..(424): n is a, c, g, or t
  misc_feature (439)..(439): n is a, c, g, or t
  misc_feature (460)..(460): n is a, c, g, or t
cttgttttggttaaaaagctttggatttggtacaacttttgtcatttcaaaatttaaatcaggaccagcactttttcctttttgttctttcttcttccgagatgtttctgagcatcagggagggaaagtgtgaggttttcaggcatgccaacaagcccgtggggaatctggtttgacactggtctgtgagctacaaggctgaagtgtggcctttctgtgcaacctgctggcatctgctgctgaatccctccagctaatataacccagagcctcctctctgtcttcagggactttggccatcatctcttgtttcctgcactccagatggccttgggtttgattcccactaggaccctcggacaactccagttaaaccttcagacccaagaccacttttnctggcaggacctctaggcatggtttnccagccaggaatctncaactttcttttctagggccnttcctggggttaacatgggg

SEQ ID NO: 460077 - DNA, 397 bp, Homo Sapiens
  misc_feature (20)..(20): n is a, c, g, or t
  misc_feature (58)..(58): n is a, c, g, or t
  misc_feature (67)..(67): n is a, c, g, or t
  misc_feature (77)..(77): n is a, c, g, or t
  misc_feature (143)..(143): n is a, c, g, or t
caaaaaattatattatgggnggataattccaagaggattaattacaaccttggcattnatcaaaganaggcccctanctaacccttaattccccagattatatggacaaatatgcctcttacctagggtaacaaaaaccttantcttctctttagctcatgtcaaaagcagactgagaaggaactctttatcccaagttaagtgaaggttggtgtcaccacacctctagtctttatctaaagtgttaagtcatcaggaagttgaatcacacttagtttaacctttattgagttattgaaatggtgcccttggcttttatcaatagaaaagccacataaaaacttcttccaattctccttcaattattttgcccattatattatagagtttgctatgc

SEQ ID NO: 460078 - DNA, 548 bp, Homo Sapiens
  misc_feature (28)..(28): n is a, c, g, or t
  misc_feature (48)..(48): n is a, c, g, or t
  misc_feature (60)..(60): n is a, c, g, or t
  misc_feature (114)..(114): n is a, c, g, or t
ggacccacccatgtcaagacagggtggncattggaaggcactgtgggnaaaaagtagccnactggtaaatactgctggtggtaagggcctacggggacacttctttctcccaanacccgtgagtttgaacagatctactttaagaggaaaaaccattccctgttctcccaagctggcaattgtaaacactgaagtcagcaaactcccacaggtacataaggctgtgaacttattagcttcctgttaaatacttccagctcattttcttcctcctcagagtcctcctggcttagaagaggccttgcttccagggctatccttttcttatgctcctcttttacaggcattaggggcttgaaaaactttggtggctgaggagagaatgctttaaaagggctgacggttaaggcatgaggagtctctgatgtacaaccttctttattccttcgaggagaatccctgggtaaagttccataacatgctacatcttggtaactggagctatagtcagacatgtccaactggttctctggccaaccctcgtgcca

SEQ ID NO: 460079 - DNA, 752 bp, Homo Sapiens
  misc_feature (714)..(714): n is a, c, g, or t
  misc_feature (738)..(738): n is a, c, g, or t
ttgtaaaaaaggttaattctatttactcattaaaatacttacatttaaatactccagcataatacattaggtgtattaaacatatagatgctcctcagatgaagaatatagtctaatctggttttatacacaataaagacaatttaaaatgtaaaaaactgggcttaaaaaatgcagccaaccacctgttttattaagttttaccaagtatttccttctaaaaagtccttatcggagctatttctttaaagccaacatttactacattaacagatgggttctttaaataagaaattttactttcaactcactgattttatacttagaggctttaaaattttttagaatatgtgaagaccggaattaaaccattctcaccatatttttccaggactgtttgctaactggcttgtttttacataaagctttaaacatgtctaccatgggtagtaaacaagaaggactatttgaaactataaaacctaccaaacaaagtgccaaatgcattatcactgctttttccttcttttataagaatcattactatgaactcgtactcgttgggtgcacagagggatgctattttcatactctctttctttgtaaagggtcttctctatagctccagggtttccaaagtaacaactgtggcatcttctcctccagtcaacaaaggaatcatcttggcacatttccaacaggaaaggaacggantgtaggcaggcatggccctccccngaagggctagtcac

SEQ ID NO: 460080 - DNA, 360 bp, Homo Sapiens
catgctacttatgagaacactactgagtaacaaaagatttattcaaatatttaattggaaggaactacatctggaataagttttaaaggaatccatataaaaagaaaagcaaatccattagaaattgatataaacagttgattttatctggaaccaagaatgtgaatgaattggaacctagatgtcctaacctgtttctttgcataaaagccagttgaattttgaaatttatatggcaattatactttattactttacatagagctttgtttttagctaatattttagagacagattacccaaaattacctaatttgggttcccacttcattccttctcaaaaaccaaacataaaacagg

SEQ ID NO: 460081 - DNA, 406 bp, Homo Sapiens
  misc_feature (291)..(291): n is a, c, g, or t
ctacagcaaaataaaaacattattttaaaaagcaatattctacattaaatacattaagatattgacaattttataaatacaatcattttaaacagtaaacatgataaatttctgatacaaggttttacatacgttaattgtgaaaatataaaacctttacacacttctcttaaaaagcattcaacgtaatcaattttacaaaattatcaatttaaaaagtgttagatatgcttctattttgttccattattaaggcaatgatagcatatcagatcttaaaaaagaaatggngaattagggcctaagacatcctatattgcctaaaaacgaacatttcagagactttcttaggcactgagttcaaaaccagtgaaggttgccttctccctagcaccactacccctca

SEQ ID NO: 460082 - DNA, 692 bp, Homo Sapiens
  misc_feature (661)..(662): n is a, c, g, or t
aacctgacacagacaaaataaaaacagttaagaatgcatctgcactgtagtcgaattgacatgtgcaagagattaggaagtttggctcgtaacagtttcagctttcttgttatgccttccatcacagcccaggctcaccccaagaactccaggctcccctaaagaatagcaaatcagtgtgttcgtgatgactgtgctaccttcattatagttcatttccaagacacatctggagccaaagcccgagggaccctcaggtggggagagctacaggaatctctttggatgttgatgtgtgtttctctcaccctcggcttcgatggtcttgttcagagctgcataaactaacacatttatgtctccgagatctaagtgtggatcttctgtctgtgacacagtggccattgtagtttatcccgaagacgcctatgtacgtaagtttgcatttcctcccttctggtgatgactcagggttgtatagtatctgttaccccttccctcccagagtaaccataactcgttccgtttccaaacagccatggtggtgtccaattagctgtgtatcgctcttcccagagttgttaatgtgggtgacatgcaccaacagccgtatgtgtactgtgatctgtaagaagtacaatgccatctgtctgccgacganngcatggttttaggtttatcttccttcacat

SEQ ID NO: 460083 - DNA, 511 bp, Homo Sapiens
  misc_feature (398)..(398): n is a, c, g, or t
gcttgggatcatcacattgaagagtcattgaattagtagagaagggataccataaactttgtgtagcataacatttctgattatttatttgaaaaaacacttcggtcagtgaaaagaatatatatttttttcagaacattactgttgattcttccaaaggccacgttttcagtttctttatccagagatgtatggggttaatagcagaaataatgctgctgttaggggaaggctttctgaccgatgaagtcagtccaagtataactctcactctccctggaggtctctgtgggcatttggcagccccctgggtttagaggacaccagaggaagacagaaagcctctttggcttgacgacaaatcactcttctgtattctggggaagactttttaattncattcatgtgcaaaacatcccagactcatgagggaatgggaggcgatccttgctggggttggattaaggtctggaatgcactggaagggcagaaggtagaaagggctaaaagg

SEQ ID NO: 460084 - DNA, 484 bp, Homo Sapiens
  misc_feature (19)..(19): n is a, c, g, or t
  misc_feature (27)..(27): n is a, c, g, or t
  misc_feature (33)..(33): n is a, c, g, or t
aacatatccacaccaaatngacaaccncatgcnaatccagcgcatcatatacctacattgttttcctaatccgtgtaactgtagaatttagcactttatttgtacagggctatcattttccatgaactacatcataaacatgatcattatgtagcatcccataattggcgaatagcacagcataccacaatggacagtgcagttcagagagagaatgtgaacgggattagaaaagagtcactatgaatgaaaatgattgggaaataattccaaaggaaagagaatatgagcaggcaataggtctgtttaacagtccatttatcaaataatttgccaaatgacaaatttgctaaaatttgtcagaaaattcatttgtagcagtgtcaccccaagagacatccacatagccaggagcagaaagggacacaggtgtctaaactgtgagattggtagcccagattgatagacatttgaggagtctaac

SEQ ID NO: 460085 - DNA, 440 bp, Homo Sapiens
aacaaccagcttggcaaaaccgtcccctgctgcctccagggtacttcctgtttgcaagtaaggtctcccagtgaatgcaatacactttctcccgcaggacctccacctcactagggttggagagcccttggcatctgggatggcagggaagagaggaggaagagaaatgaagacaaaccaaatcaggatggccatgcagatgtgagccacaggatgccccttttgggctgcacttgcttgccctttaccagagtcctggcaagggaagcagggcccactgggtttgtgggatggatccgtggatgtgggtttttcctcggccagttgggagatttccaggttgagggtcttactgagggggatagctgggtaacttaggagtctcggagaagaggaggctccaaggttgccttggccttgagagacaaaggtaatcctcc

SEQ ID NO: 460086 - DNA, 494 bp, Homo Sapiens
  misc_feature (23)..(23): n is a, c, g, or t
  misc_feature (34)..(34): n is a, c, g, or t
  misc_feature (78)..(78): n is a, c, g, or t
  misc_feature (367)..(367): n is a, c, g, or t
  misc_feature (376)..(376): n is a, c, g, or t
caaactcctttttttgttgtaanaaaacttcaanagtaggtaagttgctgtctaactctctgctgcatgcactcgccnagagggtagggaacaatgccttctgtgccagcatcatctaaggggatgaaaagaaccgttcccacatagctgaagagggcgtcccagtgcttccagagaaaggcaataaaaaccacaaggaataaagtgctgaacgtcctgttgcgagtcttcatgagggggaccacacagttggctacagtggagacaaagaccaaaaggactgccatgacagccaggaggatgttgatgagtttgcccagaaggttccgggcagtggcattctccagcccttctagctgcaccaccntgctgcctntgctgctgcagctccatcttggagatgcgcgtctggcattcctccagggcctcctggatgtcccgggcccgttcataggactgatacgcgattttttcttccatgcttgccagttcct

SEQ ID NO: 460087 - DNA, 479 bp, Homo Sapiens
ttttttttgacaagctaattctaaattttatttgaaaatgtggttggaaactaaaggaaaacatttaaaataactctatgagtggacttaatggctatctaatggctatccaaatagaataaatacagaactcgggcatttagtgcactattggaccaggaaaatacaagttaaagtaagatactacttttcacacactggcaaaaatttaagagataatagcaggagttcaagactgccaggcaggaatgtctttgtttactgctgatggaaatctaaattggtagagcaagtctaaattggtacagcctactgaaagagtgatacaaacactcacattcttcaatccagcaagtgcactgattggcaatgtgcatcagataaacatcattgtgtacagaaggaggtgtacacaaggacattcacggaagcactgtttaaatagaaaaagagggcctggtgccgtggctcacgcctgt

SEQ ID NO: 460088 - DNA, 383 bp, Homo Sapiens
  misc_feature (114)..(128): n is a, c, g, or t
atcattctagcttgaaaaatcattttccctcagatttggaaggtttatcttcagtgttgctagtctccagtgttgttgagcaacccaaagacattctttagtcctttgtgaccnnnnnnnnnnnnnnnccccttgtgatagattttaggaccttctctttttccccagtgttgtgaaattccacaggggtgtagcttgatggatctttttcattcattgtgtggcatactctgtgggcattttcattcaggaaatgtgtgtccttcagttctgaaaattttttcttatttattttaatgtttctcttcctgctttctggaacttctattagtttgatgctggatcttctgagttgatcctctgattctcttatctttctccta

SEQ ID NO: 460089 - DNA, 785 bp, Homo Sapiens
aattacagtaagatcttgaaacatcattttcacatacagtatttccaggcatttaccaagtagacaaagtactggttgatatcattgcactaatgaaatattattattgataaagcaggacaatgtagctgattttatccagactcatacccatttgcatgaacaggctgagtttctttggctctttgttcattcaagtgcattgaatgcctatgtggatagacgtaggcattgtgttaacctgtcaataaaatctcgcactgtccacagtgttttgcaaactgatttaggttttggactacaacaactggccattgatagaaatataccatatatacacacgggaattacaaaaatacattttatttatagctgatttcctttttaagtaacaaaacactaacactatgaaagatcaaccagcatactaaaaggacactacctattatcatccgaacaagagacttgtttgaaggttccatgacacatcatctctgaacattccagaaagggcagtttgccattggaaaatataaacaacttctttgaaaagtctgtgcattgacagtttgaacctccccttctaatcagttccatttctagtcttctctcaacttttaaatttctactatcttctttcagtaaagaccaaaggaaactcgttgagggacaatgggaaggatggggctcaggaaggaaaattgggatacaggctggaggctaggatgggggtcatggggttgaaaaggcagggacagggaccctccattcctcccaaacaggat

SEQ ID NO: 460090 - DNA, 520 bp, Homo Sapiens
atttgagttgctgccaccttttggctattgtgaatggtgttgctgtgaactttggcttacaagtatctgagtccctgctttcagttcttttgagtggaatttgctggatcatatggtaattccgtgtttaacttttggaggaactgccaaactgttttctaccgtggctgtaccattttatattcccaccaaccattgatttagtttgacttctgttgtttaaagaagtatatctgaattttacacatactccaaaactgtaattatttgaattaattggagtagaaattaatttgaaataatgaaatgtctgattactggacatcaaaagctgctttgcattaggccatggttctcagaattcacaatcctcctttccattttttcctccctccctcccttcctcctctcggctaccatgggtcactctcagcttcacaataaggcacgtgtatcttaggggcatttggaacttcaaatactacaggcacctcacacgtagggactctgtaacagtagg

SEQ ID NO: 460091 - DNA, 469 bp, Homo Sapiens
  misc_feature (361)..(361): n is a, c, g, or t
  misc_feature (376)..(376): n is a, c, g, or t
  misc_feature (415)..(415): n is a, c, g, or t
  misc_feature (452)..(452): n is a, c, g, or t
ttttttttaaacattacatgtacatttgcatgtactaaaaattgtggcataactatttcctctttccagtccaccaaaggttctggaactagcctagagttcaagggaaagtaaagggcctgataactgattcctacaaaaggtggttctgctacttcaccggatagtaagggaaccagacattcccctacccagttagtcacctatgaaacaacaacagttactgtatacatgtaattcaaatcccagaatgatggaggggaagacagaaaaagtgtctgaagaagtaatgtcaaaaatttccaatttgtgaaaactataacctacagatcccagaagtttgaataaattccacaggganaaaaaccacaaaggnaaaccacacaaaggacacatcatagtcaagtttccggantttcagcaacaaagagggaaaaccgttaaaattcagnggatagggggaaaacct

SEQ ID NO: 460092 - DNA, 477 bp, Homo Sapiens
  misc_feature (411)..(411): n is a, c, g, or t
  misc_feature (443)..(443): n is a, c, g, or t
  misc_feature (458)..(458): n is a, c, g, or t
aatttttaatggagatgcattcaaattcgttgctaaaatgggcctgacacctcttgaccttggctaaacagagattctggatggagcaaagcactgtgacgtcatgtggactttgaaggttaagaaactacggatcatcaggacatatttgctcttccatctcacagagaaaatggggatatacctcctcattccaggaaactttcttcctatatttctaatatatccaggataaaattcaatatatatagtcagtagcttcaaagttaagcataatttgtttactagaattcttaaggcagatgttggatcattaactcattctcttaggaaataactttgggtgcttattaagtagggcatcacattaatctggattacactggatattatattatatgatcctggatnttattaaatgttttttccataatttattaccntatattttccaggtnttaattggtgggaaaaacc

SEQ ID NO: 460093 - DNA, 462 bp, Homo Sapiens
  misc_feature (451)..(451): n is a, c, g, or t
gttatactcatggttaaagtttattacattgaaaggatacagaaaaaactcagcgaagtgaaaaggtggatagcgtggagtagaggagaaattaagcaccagcttccagttgtcctctcccagtgccattacatggagtacacttaattttctcagcaacaacgtgtgacaacatatgtaaagtgttgccaaccaacgaaactcacttgagggcatgtgtccaggggtttttactggaggtcagtcatgtagggcatgcagcaccttaggctaccagtcttcagggcctcagatccaaattgggtacagcatgatcccaaagcctcagggcattacaaaaacaggttttttggccattaaattcacactgttggggcattaaactcctatttttcaggccaggggttcagggaggttatttttcccggggggccggggggccagggccccnttttttgaggg

SEQ ID NO: 460094 - DNA, 543 bp, Homo Sapiens
  misc_feature (501)..(501): n is a, c, g, or t
  misc_feature (515)..(515): n is a, c, g, or t
ataaacctgattttgcctcacatgaaccaaagactctcaaaactccgcttctatagaattagctgaataaaggcattttactgatagctgttcgtgttagcgaaaccttgtctacctgctatagcacactctccgatttgggccatttatgcaccccgcaacctgggatctcaaggagctttaaagtcttaatgggaacttggcattttcctgatgatctttaaaatgtggtcactaaactcaggattggcgtgtgcttttagaacactggagtagcccttgttttagaggctgtgcattgagtatcgaccgtattttgtaaaaggcaagatatcctcccttccagggctgggtaacgggtttcaaggggactcttgagggaagtgcccccttaaattagaacacagcaataactggggcttcctgttccccacccccaccccagcagtgttcttttggcactggggaactttgttagggagtggtggaagtagggaaggnttttgtgcaaaggnaatcgtggttgagtttcactgcagcagg

SEQ ID NO: 460095 - DNA, 538 bp, Homo Sapiens
  misc_feature (20)..(20): n is a, c, g, or t
  misc_feature (55)..(55): n is a, c, g, or t
  misc_feature (60)..(60): n is a, c, g, or t
  misc_feature (82)..(82): n is a, c, g, or t
catcaagattccacactttnaaattttgtaccccctacacaccttcccactgaanccagnaaatacaaaaaccccacaatancctcaaataacccagcaggcattccctctttagggactgtaaggtggtggcttttccaaaaggtggatagtagggtggagagtaacggggcggtgcacttgaggacccacatgtagctgggtgagggagaggcagactggggctcatcagaaagtccagagggaggggaggatggaaagacaccggaatgctgaaagtcataagcagaatatggtggcaggtgaggagggctatggtagtaggtattgtaggatgccacttggggatgagcatagtaagaaactgttggatgggtattttcaacagaacagttcagtgctgggagagttgggttcatgtccttaaagcctccaaggacagcggcagtgatgatgcccaggaacaggccaacaatgttgaggatggtggcagaccagagcaggtggtagaggtggatgatcctcgtccaagctggcg

SEQ ID NO: 460096 - DNA, 491 bp, Homo Sapiens
  misc_feature (471)..(471): n is a, c, g, or t
ggctcaaatggtcctttccttttgttacatttagtagttgtgccatctttagtttttgctttgaacattgttttcctaaaagtcaactattactttcccatcaagttggttttatagttatgtctaaatttatggttcatgtcaaagtatttttgacttaatatccttttaaaaatatttaaactgatttattgctcaattggtgatagctgagaaaattttttcaatatgtagaattttcatggttattttgtatgaattatttttctgggtaagccatctgccacagaaattgacactatggtgagattaatgttaatgaaatgagcagtagagaagctactgggattgccttaaaacattctttgattaaattactacatagttgggtaagttcatagttttaagttacttaattgaagccctcaggaagttgcaaaggaatttatctggataaatctgcctttgcancaaatgtggatactggatgc

SEQ ID NO: 460097 - DNA, 612 bp, Homo Sapiens
  misc_feature (15)..(15): n is a, c, g, or t
  misc_feature (30)..(30): n is a, c, g, or t
  misc_feature (52)..(52): n is a, c, g, or t
  misc_feature (105)..(105): n is a, c, g, or t
  misc_feature (113)..(113): n is a, c, g, or t
  misc_feature (137)..(137): n is a, c, g, or t
  misc_feature (161)..(161): n is a, c, g, or t
  misc_feature (229)..(229): n is a, c, g, or t
  misc_feature (288)..(288): n is a, c, g, or t
agggaccccaacaanaaagaccccccccanagggaaagggcccccaaagggnacccccggggatgggggaagggggaataaccctggacaaacccccaataattnaaggtaangaaaaggaaggccaaggtaagganggttggtaaggaaggtaattgganccctcaagccccccagtgggaaatataggtttcccatccaccacctaaaccttttaataccctaaatncctgtaggaagcctggtggggtttgcccctcaccccagaagggaccttaaaataccccnccccatagctgatttgttaataaagaaacaaaatgggtgttccttctgtttcccttttgattatgtttactgtaattatttcattttggatttatacatttacaattgaataaggattataggttgataagctgtttattgtgaaaagatgtgttttgttacaaatacttgttttaaaaattaataagcccccaggaagtacagcattgactggcacaactgcccatagtgagcttcccaactaactgccttcagtggattcgggcaagtgcaaagtctttggcctattgtgtgacaaagaggtatatattaaaggaaaaaaaa

SEQ ID NO: 460098 - DNA, 466 bp, Homo Sapiens
  misc_feature (49)..(49): n is a, c, g, or t
  misc_feature (61)..(61): n is a, c, g, or t
  misc_feature (85)..(85): n is a, c, g, or t
  misc_feature (456)..(456): n is a, c, g, or t
attttggaaccagaggtgaattccggctggctcatggagtgccctcggnagtagtaaatangaaattattaaactggatgtggancccaagagagtccaatggtaagccctggaaatactccctcaattccttgacttctgggctattgtgctgaccaagttgatttccaacacacccaattgtctctaaattttccttcctcctactaaatcagcagaatttacccaggaggtatgaaggagattaaagtccttttcctaggcagcaattactcacaccagtcaacatgtattcatcagagataaacatctcatccaattcatattccatacctcaagccgctgtgcgtaagagaaaacgacagtcagtttctgggaaagacaattacattacatgatttcaaacaactcaagcttttccttttctatcttcattgtattcatggaagtcttacnatgcacgagg

SEQ ID NO: 460099 - DNA, 524 bp, Homo Sapiens
gctgattagtaatgatgtgtttaatgaaatttcaaggttcattacggaatgtggattaattaaattgagagggaagataatgaaaaatattcccattggatacataaaagagcaggcctgctgtggtgggaggagggagttgaaatgtatggacctgccagaactctccaagtctgcccctggaaaatgagccaagtctttctgctgcgtcctctaagcaaagacggtggcctgagtccatgtgggagcccagtggggcctctgagtctcacttgtgatttggggagagtcatactggctccctgctgggctcagcatcacattcaaagtcactggttcatgtcctcccaggaccttggagttggccaagcactcatgaatccctctgtgtactttctttaccaagggttctggaaggaaaggaatgaaaacatacacatcagattcatccagatgcaccaatctcagcagccaggcagcagcaggaggaggcgcagcagtgtctgacagctctgaagtttccg

SEQ ID NO: 460100 - DNA, 471 bp, Homo Sapiens
  misc_feature (26)..(26): n is a, c, g, or t
  misc_feature (43)..(43): n is a, c, g, or t
  misc_feature (51)..(51): n is a, c, g, or t
ggccttgggttaatccacacattacnaaaggaaagttatatgnaaactatncaaaacatgaacaggtaaagcttggacagaacaccccacactttggcaggaacctgaaatgcctacgtggatctttgtggaaattcaaacggaagttacatatgccactcaacaatgtcactaaaatcaaagtctaggcaatgaaacctggttctgtgtcctccgtgttttctctccctggtgtcaaatatattacctacaacagagacaagaaaatgaaggcggagagccgcttctctaaggaagagttgtacatggttctgtgacatggctggaggtgggcgttctggacaagtaaacaatttactggggaggtgtctttgtttcacacttaacgtcggctaacgtttttagccaaggctttagttgtcctccatgagcaattgtagaaattggaaatttgtaatgattttttatgag

SEQ ID NO: 460101 - DNA, 466 bp, Homo Sapiens
  misc_feature (22)..(22): n is a, c, g, or t
  misc_feature (28)..(28): n is a, c, g, or t
  misc_feature (47)..(47): n is a, c, g, or t
  misc_feature (66)..(66): n is a, c, g, or t
  misc_feature (94)..(94): n is a, c, g, or t
gggccagggggcccccaaaatnaggggnaaaccccccaaaatcccgnatacaacctagtgtacatnaccagtaaataataataatggtaaggcnaaattattatttaccccacagaggtaacaaatttcccttgtcaattttgtcctttggactgtggctgccctaacactttttgtcagctatggacatttgttgtttggttttggtcctctttagaaggtagttttataatcagctatgaaactctaacaggtgttcttgaatgcaaggttctgataactttggagattgtgacattagaagaaaaactttcaggagtctcatggagagcttgaatgttcatgaatatcaagcagaacatgcatggcctgaactaagagaagactgaagtaatcatttttgacttttttgcttacaacattgccgatcaaccagcatagcacatgtttacctatgtagccaacc

SEQ ID NO: 460102 - DNA, 431 bp, Homo Sapiens
ttttttttgaattaaggttattacatccatgtaactttctgtatgtgcttttaaagtccttgtgccataagttatagggctttgactcctgggtctaaaaaggacaccaagtcctgctaaatcttaacactgatagcagttaaagcctcatattcaaacccagtagaagatgccaatcaaaataaacgtcgttcatggaaacacagggccaaaaattaaagccattcaactcctcagggcccggggactatcacagaagaggtggggtgcatgaggattatagggggccaattttgaggggatggaattaattcattccataagttcattcattctctatggaattaaccgttattgtccaagggcacactgatgttaacctggctttgggggcccctttgtccggtttaccgggttttttttggggtttt

SEQ ID NO: 460103 - DNA, 489 bp, Homo Sapiens
  misc_feature (76)..(76): n is a, c, g, or t
  misc_feature (408)..(408): n is a, c, g, or t
cagagatgatcccagaacgagggttgctgggttttctggaaacactgatggatgaacagaaaggaagtattttgtnaatggaagtgcatctccctgcagtgagggggaactgaatctgtgttaccccagaaaccctccctggttagcatttgcacttcaaagaaaaagagccctgaggcacccagaaaagacagccagctgtgcctaagtacagaggacccaaggtttgtgcacccagttggcttgcctgctgagtgtgaagctctccgggacccagggcactgcggaagacaggaagggatctggagtgaggtgagcaggtcagggagacagcatatgcagggcaagtcagctctcaccccatgggctgctcagaaccttcctgtcaaacagcctcgtaaaaacagnctgccttgggcagcagggtcacccaattgaatacttttataggaataacttatatgatagtcattgtacagttgttttttt

SEQ ID NO: 460104 - DNA, 305 bp, Homo Sapiens
cctcttgaaaagcatttttaatataattttgcttttaatatcataattatctatacaaagtttctgatatattttgttttgatttgttttgcattactaataattgcagttgtaacagttcaaaccaaaaatgttaatgcctagaagttaaataaaagttaagtttatgtacatatttttatatgctagggtgataaaagacttgaaagcatagaaatgcattcaggtaaaattctggaggtaagtgggatagtatacaagctcacggaggatataggcacgcttcattttttgcagttgacttt

SEQ ID NO: 460105 - DNA, 453 bp, Homo Sapiens
  misc_feature (293)..(293): n is a, c, g, or t
  misc_feature (299)..(331): n is a, c, g, or t
  misc_feature (374)..(374): n is a, c, g, or t
  misc_feature (385)..(385): n is a, c, g, or t
  misc_feature (420)..(420): n is a, c, g, or t
cctcttgaaaagcatttttaatataattttgcttttaatatcataattatctatcaaagtttctgatatattttgttttgatttgttttgcattactaataattgcagttgtaacagttcaaaccaaaaatgttaatgcctagaagttaaataaaagttaagtttatgtacatatttttatatgctagggtgataaaagacttgaaaggcataggaaatgccattcagggtaaaattctgggagggtaagtgggggataggtatacaaggctcacggggggatatagggcacngcttcnnnnnnnnnnnnnnnnnnnnnnnnnnnnnnnnnccaaattgaggggttgtgggcccaccctgtatcccagccaggnctgttggggcncccctttttcccaccaggcatggttcctcaccttncatggcctatggtccgggggattttgttagggc

SEQ ID NO: 460106 - DNA, 429 bp, Homo Sapiens
  misc_feature (33)..(33): n is a, c, g, or t
  misc_feature (45)..(45): n is a, c, g, or t
agatggtggcttctatgttcccaggatggactnaaactcctgggntcaaggaatcctctcatctcaggctccgagtagctaggaatacagacacgagccaccatgtctagctggaagttagactttatctgcattcctggaatagtaaaagcaaagcacgggtcagctgctttcggtaaattctagcccataggtccaagtcaagttccaggaagccccctatgaaaaagattctgatattagtaccagtgtttagttcatgtcatggcctgacttaagtataggtcattaagtgtaatgccaaggcagggggcttgagtggtttgggagcttcatgactgttccacttgggaatttatcctgggtgtatgaatacggaatctatcaatattttttttcaggtggcttcccagttctcccaacactttt

SEQ ID NO: 460107 - DNA, 727 bp, Homo Sapiens
  misc_feature (430)..(654): n is a, c, g, or t
aataggggaaggaggttgccactttgtcaggtttttggatcggggctgtgctagcctcaagataatttggaagcttactattttttccctatgttttgaaactgtttgaaaactggaaatgatcatttctttaaagtttggcacaactttgaaattatctgggcctggtgttttgttcagaatagatcttttacaacaatggaaagttgttgtaaaggcttatatgaaagctattgacctgtatctttttgggtagacaggcaatataaaggctctctcttattgtagttaatacattttgggtttgaattctacattggaaattaacattgccatgctttatgtctatttcaaataattgtacttgttcaaacagctttacttggggataacccaaaactggaagtaacccaatggacattggaacaannnnnnnnnnnnnnnnnnnnnnnnnnnnnnnnnnnnnnnnnnnnnnnnnnnnnnnnnnnnnnnnnnnnnnnnnnnnnnnnnnnnnnnnnnnnnnnnnnnnnnnnnnnnnnnnnnnnnnnnnnnnnnnnnnnnnnnnnnnnnnnnnnnnnnnnnnnnnnnnnnnnnnnnnnnnnnnnnnnnnnnnnnnnnnnnnnnnnnnnnnnnnnnnnnnnnnnnnnnnnnnnntggatggatggaagaaggccatgaagaaaggactgcaaaagactacagggaaacttttggggagtgatctata

SEQ ID NO: 460108 - DNA, 452 bp, Homo Sapiens
  misc_feature (371)..(371): n is a, c, g, or t
  misc_feature (441)..(441): n is a, c, g, or t
caaatgtgactctttttgcaaaaataaaacattgcagaatatttgtaagccttcaaatcaacaaaaattaactatgcaaacctctggatgattctaaataagattaaatgatttctaatgattttagcagtcttctgttagattgagttgcttcatccttctgcactcccaggtatttgtgaaaataacagggaatttttcctatcacaggaaacattcttttgaatacagtggcataaattcttggatttctcctgggattcttgacttttcattaaagtttatgctgatgtaaagctgaggcaaaccaatatatttctgtacttgggggctcagaaagagggaaaaatagttctttgtcacttccgatnaatatttgccacttcctcgcctacctggccccttcaacaaagggggactttctgcagtccacttgagggntttccatatac

SEQ ID NO: 460109 - DNA, 378 bp, Homo Sapiens
  misc_feature (243)..(243): n is a, c, g, or t
  misc_feature (246)..(246): n is a, c, g, or t
  misc_feature (306)..(306): n is a, c, g, or t
ttttttttccaagtatcttcttcaaactctttctacaagaaccttattatttaagcttctcttgctattaaaattaatcaagatcaagatattccgaatcttgattattttttttcaaatatcttacccaagacttttaactcatactatgtattgtataaacatatctattcattgtgttctgaataaaagtttttatttttccatatcctttgtcttagagcatattgcttaataataatngtnattctaaatgtcaatgaactcatatttatatgatttaagataaaggtacaccccaaagantctccccagcagacgtgtcatgtgggacttttgatattgcaccacctagcagccacagtaaaataagtagag

SEQ ID NO: 460110 - DNA, 414 bp, Homo Sapiens
  misc_feature (83)..(109): n is a, c, g, or t
tggtaccgtgcctaaaatgaataccgcaagcagaatggggttccccggacagaaagcaaaagaaggaatttgtgaagggtagnnnnnnnnnnnnnnnnnnnnnnnnnnncataaaggagagtttgaaaaagggaagacatttaaattagatgaggggaatctggttgtacagtgggcacaagagctgataaaaacctaaccaagctctacaaatgaaaatagcaaatatatttttgaaaattttatagcatataaaattgtataaaaatatcatcaaagcaagaaaaaaggaaatgtatactctatagttctacctctagaatcagttattggacaatacctatggctgtaggtttttcctatccatctatatatattaatataatatgtgactgtatttctgtaccatcacac

SEQ ID NO: 460111 - DNA, 421 bp, Homo Sapiens
  misc_feature (84)..(84): n is a, c, g, or t
gaaggcaagcaaaaatccctgggaaggggcctgggccctgggacaacatggccgccccccagggttaagagccgcttgtcctcnagccgccctggtctctcttgatgaggatttaacctctggtcattaggtcctgcctactacctttgtttcaggttagctcaatcccaggcctaaccagcgttttcctggagcccacccccgggccaggccctctcagctagaacatctctctcaggtaagacgactcctgagctctgagcccacagccccactgcctccttgctctgcccctcctccgtgggactccatcttttacacctaaaaagagtgtgggtggtgaaatctgagtcggggttagaaaacggaaaggggcaattgtgacccagctgcttgcccatgggggctgggagctagtttc

SEQ ID NO: 460112 - DNA, 296 bp, Homo Sapiens
  misc_feature (260)..(260): n is a, c, g, or t
atgttccaaaagtggaaaagttttattcaagtgatagaaaacatccaaacctgtcacaagaagcccatctgaacacagcatgggaccgccaacaagaagaaagcccgcccggaagcagctcaatcaaggaggctgggctggaatgacagcgcaggtgagccttgaaactatttatatcccaaagctcctctcagataaacacaaatgactgcgttctgcctgcactcgggctattgcgaggacagagagctggtgctccnttggcgtgaagtctccaggggccagaaggggccttt

SEQ ID NO: 460113 - DNA, 424 bp, Homo Sapiens
  misc_feature (366)..(366): n is a, c, g, or t
  misc_feature (387)..(387): n is a, c, g, or t
aaaaatttattttttgccttttatttgagatgaggtagaaggctttcacggtattatggattcacattctttgttgaatatatgcattatgaatattttctcctagtttgtgacttggctattaattttcttaagcccttcaatgagcaggcatttttaaattttgggaggctaacttaacttttttattcttttataatcattgctttttgtgtcttacctaaaaaaatctttgcctgtaccaagatattcttgtatgttttcttctacaaatttcatagttttaacttttacatgtagggattatgatgtatctgaaattaatttttgtgtacaggtatggaaggtaaagggttaaaatttatntcatttttatatatttacacnggttgttacaggaaagttgcaggaaaatatttacctt

SEQ ID NO: 460114 - DNA, 161 bp, Homo Sapiens
  misc_feature (121)..(121): n is a, c, g, or t
tctaaggcctaacagacactacaccagaggaattaacagaagacaacttgatgggagtgagtgcatctgagccagtgccagatgacgagggaggagacatttgaaggagcagtgcccaggnaaacaagtcgatgttaggacaatctgggcaggaagggggt

SEQ ID NO: 460115 - DNA, 489 bp, Homo Sapiens
agaaaatggaggcccaaacttcgtggactgtccaaaggctgtgtgacccgttgggcattggaaccagtccagccatctttgtcagtccgttgcttttacccctgtggtttagggcagtcagttttcttgcccttaaattatcaaaagccctttgattttattagtagtagaagttctagcttgttcccgctgccaaagtgtccttgtactgacaaatgtagaccagcagtgttcgatgcaattttcttcaagggaaggaaaatgtgtctgctgggccagtatggtagtcagcagtcacatttggcagccaagcacttagaatatatggttgatggtcctaaggaaatatctccgttttactttaaatgtaagtaaccacatatggggtagtggctaacgagtggggacggcacagatctggggtgttctcatttgttctccacggcccagggattcaggtaaggtcaggttatgagttttaaactggtc

SEQ ID NO: 460116 - DNA, 355 bp, Homo Sapiens
  misc_feature (66)..(66): n is a, c, g, or t
  misc_feature (153)..(153): n is a, c, g, or t
  misc_feature (163)..(163): n is a, c, g, or t
  misc_feature (262)..(262): n is a, c, g, or t
  misc_feature (299)..(299): n is a, c, g, or t
  misc_feature (331)..(331): n is a, c, g, or t
catgtttattgttgttttatttagtgttataattggaaatgtggaaaacacaagagataaccatangtcataatatacaaggcttccttataatgagtacttttttctacaacctcatagaattatggtaagtgtattattttaaaaggagantttagtaggntaaaacacactgaattttagtccaactacagctatgtacatatgcatacataatttatgagctatgtataatttatatgtatacaaacaccacattttnttgagggtaaaagagcacagcgggggtttaaaaacantgggcctaaggctcaatgtagggccttttacnaatgccccctggaaggcccatttt

SEQ ID NO: 460117 - DNA, 539 bp, Homo Sapiens
  misc_feature (205)..(256): n is a, c, g, or t
  misc_feature (434)..(434): n is a, c, g, or t
  misc_feature (440)..(440): n is a, c, g, or t
  misc_feature (447)..(447): n is a, c, g, or t
  misc_feature (490)..(490): n is a, c, g, or t
  misc_feature (502)..(502): n is a, c, g, or t
  misc_feature (508)..(508): n is a, c, g, or t
  misc_feature (523)..(523): n is a, c, g, or t
ttacaacactcagaaaaagtgtgatcgttgaagccagttaaggagagcatatcacaaaactagaatgcaagggaagtggagtttgttttgtattttgctgggtcagattaggtaaccaaagcagtgcaaattcaggggagaggaatggctcaggagaatccaaacttggcttctatttttcaatgtaccacttgttctctgtggnnnnnnnnnnnnnnnnnnnnnnnnnnnnnnnnnnnnnnnnnnnnnnnnnnnngaagagtttgttatgcacatttttttaatctacatacggcaccagggaaaaggtggcatacagagtaggcagctactcccagtaccagggcaaacaacagaggtcatggtgtgaagcaggtgagtctgagcatcgtggtccaggggaagcactgcagccaaggaattcccggtagganaacctnaagctcnttgggggttttaaattttagggccgttaagcttaggaaaggcntgctgctttttnctcctngcttgccagaggggngccttcttagttccag

SEQ ID NO: 460118 - DNA, 440 bp, Homo Sapiens
  misc_feature (428)..(428): n is a, c, g, or t
cacccctacacaaacccatgatgaagttttatataagaaaagacataatgaagaaattaagctttgaaaaagtctataaatttttctaaagtagcaaaattagcatgttatgaagcaaagattcaaactactgcttgcttcattacctcatttttatcactctatgggtatgtacatttgctaatcctcatagggctcataaatcctgggatatctgaccctcagatacttgtgtcataaaatgggaactaaatttatccttagtgacctcaggacctcatagatgagttgaaacacgaggtactcaaggtggcctgcctgggcattttgctttcagggggcctgaggcacccagtgggccatgggatgtgggggtctgcatccccatggtggatgtgaatgtccctggcctgttcttcaaggtgctngtggaaggtgca

SEQ ID NO: 460119 - DNA, 512 bp, Homo Sapiens
  misc_feature (34)..(34): n is a, c, g, or t
  misc_feature (111)..(111): n is a, c, g, or t
cagaagaacccacctttgccgcccccctggaccncagactttcggccctcccagaattgtgggaaaataaatttcctgttgtttaagccacagtctgtgcctactttgttntttctgttgtttaagccacagtctgtggtactttgttatgacagccctggcaaactgataccagagcagttttgtatgctgtaagaaatagactactagtaacactgctttgggcctagtaacacagtgtggactgaagggcattctttctactaaaagtggttaaggatgggaaggtatctaattttatatgactgggaagtgtattggtgagtaacatcaccaaagggccctttggattcacatgaccaaaactagtagtgacacaggatgatgtcatatggttgcccatatgtttgtaagatatgctctatcttgatgtattcaaggattctttgtagactaaaaaatatatcctccaaatcagagatgtcttacttgccaggtctgtttccatttat

SEQ ID NO: 460120 - DNA, 395 bp, Homo Sapiens
  misc_feature (340)..(340): n is a, c, g, or t
  misc_feature (366)..(366): n is a, c, g, or t
caataaaattgagaatgttgattgtatagcctagttaagaaatacttttttatgactgccaagatttaggccccaacttaggagcaagggtcacctctaacctttcaggaagtcttgggtgtgacccactgcataaatggaatttcaccataatatttaacagactcaaagtgtacatacaagcttgtttcataaataagggatttcaatcaagatccatgaatgatgcagtttaacatgtgttctcagcttgcctactgaccacctttccttttctaaatatgcaacagcacagcaagtcttgcaagtgacatgttgtggggataaattgtggtggccntctaaaggcttctgcattgaaggttncaacttccccggtacctcgggatgtggac

SEQ ID NO: 460121 - DNA, 711 bp, Homo Sapiens
  misc_feature (678)..(678): n is a, c, g, or t
  misc_feature (689)..(689): n is a, c, g, or t
atttatccgctggctcctgtttccaattgattgagggatgcccccaaggaagttaacttcactgcaattctgagctgtaattgactttaataagctccaacagcactgaaagacgtttggattattttcagtttgggataatactactatgaacattcctgtacatgtcttttgagaacacgcatgtgtacatttgtgatgggtatgtaatggggtggaattactggttcatagaatatgtgcatattcacctttagatatagaggctgccaaccatttttctgaagtgattatactaatttatattctcactatctgtaaatgaacatttctgttgctccacatccttgctggcacttggtattgattgatttctcttttaattttaggctttttaatacgtgtgtagtgatatctcacttgctgtttgtttgctttttggtaaattttttattgaagtataatttacatacagagaatcacacaaattgtgtacaggtgtgatttttcacaccgtgaatacatgcaaaaactagtatgaaattaagagttggaacatcaccagtactccagaagccccatgcatgttctcttccagttactataccactatcccaagggtggtctattaattcaacagcataggatttattttgcctgtttttccaacttcaaatnaaatggaaatnaatatggcactcttgtgtctgg

SEQ ID NO: 460122 - DNA, 596 bp, Homo Sapiens
  misc_feature (20)..(20): n is a, c, g, or t
  misc_feature (33)..(33): n is a, c, g, or t
  misc_feature (49)..(49): n is a, c, g, or t
  misc_feature (79)..(79): n is a, c, g, or t
  misc_feature (85)..(85): n is a, c, g, or t
  misc_feature (99)..(99): n is a, c, g, or t
  misc_feature (107)..(107): n is a, c, g, or t
  misc_feature (134)..(134): n is a, c, g, or t
  misc_feature (168)..(168): n is a, c, g, or t
tgggtccactcatgcaagangaatccccaaaangcaaaacatgacaacnctttagcaaactgggaaaccctgggtgggnaagggnccgcaaagaagcangctggctnccctaagaagactgggttgggccaaancgtaagaaattaaagaggatggtgaataagaaanccagggatcccatggggcagccttccccagtttgctcaaaacattctgttgccaggctgtgaccaggactcagagaccagtcctaggtttaccatccagacaacaatgtgggggagcagagagagcgttatagagaaaagtttaaaaatataagtaaaatgaaatagtattcttgggtattaaaaaaagaactctgaggctaagattattgttggcctctggacttgccctttctggtctatcttccacattgctgtccgagtgaatcattccaacactgtatggcactctcttgcttaaaatctttcagtggctctctactgtgctcaggatcaagtgcaggtttaaagtgcaggtttattacctggtctgcctagccccatcttttgttatgcttttgtatgctctatctcggcctactcaacaat

SEQ ID NO: 460123 - DNA, 347 bp, Homo Sapiens
  misc_feature (102)..(102): n is a, c, g, or t
  misc_feature (275)..(275): n is a, c, g, or t
aatgcagatgatccaaagttttattaaagtttacatacttaagcataaataaattaacagatttgtaagcaccaataatggtggcatgatggtacacctggnggtaacattatcaagagcttttgttgaaacctttcattttcaatcaggtgctgatttttttccacccaagtcttcaattattactgttctaacactgcaaaaaccattcaagcataaaaaagcatgcaagaggcagtaaaataagcccaaataattgaggaattgaacaaggnaaacaaaataatttactcttaaaatgacaaaaggtaaaattaagggcaacctctaaaccggggggtctgggt

SEQ ID NO: 460124 - DNA, 507 bp, Homo Sapiens
  misc_feature (17)..(17): n is a, c, g, or t
  misc_feature (57)..(57): n is a, c, g, or t
  misc_feature (131)..(131): n is a, c, g, or t
  misc_feature (163)..(163): n is a, c, g, or t
  misc_feature (165)..(165): n is a, c, g, or t
  misc_feature (181)..(181): n is a, c, g, or t
accatctcttctatccntgtgtctggggcctttgccttcaccctttctgccagggcntgaaaaaggtgagaccctttacctcttccccttccctttttcccaaaggtccaataatggccagcccacaactnagaccaagtcactattttcgccagaggtgggnancggcctcagggccgcnacctcggcagctcatccctgctgaatgtctgcctgcacacagctggtgaaggtgctgctcatttgggtatccttgtgaatgcatgtccaccaggcaagtcaccacggggagctgcggccttttagagaaacacttgaataagacatgcagccggaaaccgctcacagggaaggctaaacactcccagctcatttgcaacaaactcacaatggcctgtgaacctcaggtggcatttccatcatgtatcttagagagaaacgagtccaagaccatcgaaaccaccacagattccctcgtgtgaaatccttcagtttcacagtgtggac

SEQ ID NO: 460125 - DNA, 545 bp, Homo Sapiens
  misc_feature (33)..(33): n is a, c, g, or t
  misc_feature (53)..(53): n is a, c, g, or t
ttggaagagatccctgagtgtcacagaaaactnccctggcatccacaatgtcnaaattccctccctcccagcattcgggacagtttgtttttttgtgtagcccacagatattcactgcatgctggctgaaacgatatcctctttggagcaaggtttttaagcctacgcccacatttcccagaatagatgctgtggcttcattttaaaggtattaaaaacacaactagtctcagtgatgattcacaagctgtgcaggtctcattgattgtgacatgcagctctcctgttcaataggcacaacgaggccacagaagtctctatttatttgtcctctttagactttgacccagcgctacaaaggtgacagtttggaaatgtcattcctttcctcgggattgtgaagctgaagcctgagtcctgggcaagttcgagcatccttccttcactctcacaaggcctacgttcttacagtcttgggttccactgaaagacttgggcgtggggagttgggaagggtgggaccgaagtgagagagctggggttca

SEQ ID NO: 460126 - DNA, 433 bp, Homo Sapiens
  misc_feature (389)..(389): n is a, c, g, or t
gaaaaactacttttatttatgggcattattgacattctgcaatcatataggttaatgaagaagttagaacattcctggaaagctcttgtttatgatggggacactgtttctgttcatagaccaagcttttatgcagacagatttcttaagttcatgaattccagagttttcaagaaaattcaagctttgaaggcttcaccgtctaagaaacggtgcaattcaatcgccgccctaaaggccacttcacaggagattgtgtcctcaattagccagggaatggaaggatgagaagcgggatttgctgactgaaggacaaagttttagcagccttgatgaaggaagccctggggatcccgacacaggccagacctgggtccctagcactcccntcacttgtttgaagctgctttcctttggccaaccaccaatttca

SEQ ID NO: 460127 - DNA, 361 bp, Homo Sapiens
cgttaaaataagacccaggcgttaatcactaacacaattatccttcacctttggtcttggcttgggactaatctcctaattttgtcctattttataaagggtttccttgtgtcaactggaaggactgagaaaaaatagtgttcccagatggtgttagatggtaggttcctggcggtactcgttgtcagggctgggacactacactccttcttacagttatgttatgcttattcatgtcaggatgaatggaaggaaaagaaagacactggatggattccagaatctgaggacttccactcacaggggctctgattgataatagacctagggcagttttctgacagtttcatttcctgaaatt

SEQ ID NO: 460128 - DNA, 480 bp, Homo Sapiens
  misc_feature (367)..(367): n is a, c, g, or t
  misc_feature (391)..(391): n is a, c, g, or t
  misc_feature (401)..(401): n is a, c, g, or t
  misc_feature (411)..(411): n is a, c, g, or t
  misc_feature (417)..(417): n is a, c, g, or t
  misc_feature (426)..(426): n is a, c, g, or t
  misc_feature (448)..(448): n is a, c, g, or t
  misc_feature (460)..(460): n is a, c, g, or t
gttaatttcttgggaaatataaatcatcatagctagtcattctttcatcgtgggaagctaacagtcctgattgttcaggattataattatagtaaattctgaatttgtgacgtgtgaattttagaaggttacaaaacaacttccagacaactgagtcataaagtttttgagagaagtatgtggcacacgtctaattcattgtcctttctctccagtggtatagttatgatattaacctaaattgcaaaagggaatcgttttagttgactgctgcttgaaattgtgtcacttttccaaatttagggtaatgtctgttacaagggagtatattttggggaaacattaacttggactggatacttatttncccggggttaaggtgacccttccnggccatgtgnctgagtgccngggggncttactggnccctcagtaatttgggaggggntccgggggcccngccggggggaccaaggggtt

SEQ ID NO: 460129 - DNA, 434 bp, Homo Sapiens
  misc_feature (50)..(50): n is a, c, g, or t
  misc_feature (78)..(78): n is a, c, g, or t
  misc_feature (81)..(81): n is a, c, g, or t
  misc_feature (93)..(93): n is a, c, g, or t
  misc_feature (317)..(317): n is a, c, g, or t
aaatatatattcgattttattagatgaaaaatgcagcctctcacatcagngggggaaaagaggtactattcaataaanggngtcagaacaggnggttagctctctggaagaaaatgaaaggatcagatgtcccccataaacaactactctactcagtaggaagaaaaaaacccacaaaacaatagcattagttcagttcagaaaatccagttcaagccaattattcaaacagtttttgggaggtaacactgtccctatgggaagacttggtatttttcagatttccctgctgtttatcaagatgggcatatggggtntaggggagaaggaaggagggtgctgggagccatctatccagggtccctgtactcttcttctgggccctctgggtcttccacaggcaaatgcccctgttccaccttgttttttggggc

SEQ ID NO: 460130 - DNA, 329 bp, Homo Sapiens
  misc_feature (316)..(316): n is a, c, g, or t
tatgaaccactgtgcctggcccactcttttaaattggaaaggaactaaaaagctgtatggaaaagaaaacaaactgcaactaattacacggttgtaactcacagaaaatgtaatctgattacatttctttgttttcttcctatataagcaagatcttaacttttaactttgaagcgctgacccgtttatgtgggagtctcttttccggatggctactcccaggtttttgcttggactaaactcttttaaaactgtggttctggttcttttttaattggttttcgggattgatcctgtttggaggtacaagtttccnggctcaaaggtgg

SEQ ID NO: 460131 - DNA, 386 bp, Homo Sapiens
  misc_feature (104)..(104): n is a, c, g, or t
  misc_feature (115)..(115): n is a, c, g, or t
  misc_feature (154)..(154): n is a, c, g, or t
  misc_feature (202)..(202): n is a, c, g, or t
taggggaaccttccagggaataaacaattcgccctgcccttaactaattcaaactacccttaactgaacaaaggtttcctcaaaaccttgaaatgtcccacccnaggttatttgnggatccccatcaaaaaatgcaagattcctgaattcaagnggatcttgggtggggtctgaggttttgccctcccttgtaagttccccnggtctcggtttgggccactggcacacaaaccacacttgtaagtaccaagacccatgtcaaagattctccacatcagctttttaatagaattatctgggaaggtttccagaagtccaatgcccaggccataccacagaccaattaattcagactctctaagagaaggatccaggtgtcagtgtat

SEQ ID NO: 460132 - DNA, 489 bp, Homo Sapiens
catccttgaattttattttgtgcatagttttctaacaataattgtttgctttaaattaaacataaaattagaattcattatgaaacaaaaactaccccaaagataaaacttcattattgatttagattagaatgctcataccatccaaaaaactagacgttcaaataatcacgtttgcacactatggtacatacgtatggtacaaataacagtggaaaagagcaatgattttgtgaaataagctgtaagttcttaacaattataaatagagatcataaatttttcaaatgaaacatgataatatgaactgtattgtgaatacacatgggcttcatggattctggaaaaatttcttaccaatattttctataatttggcagtttgtaaaaaatgattatgttattgccactctctcttaagtgtttcatatacacatacacatgcatatatagatacttttagactaactttaggtaaaaagactttttc

SEQ ID NO: 460133 - DNA, 437 bp, Homo Sapiens
  misc_feature (306)..(306): n is a, c, g, or t
  misc_feature (419)..(419): n is a, c, g, or t
ttttttttacttcgctaagcactttggactataatgtgtaccaatagtctgctgcctttgttttcttgttttcttagataatttgatttgaaactgacactgcacctgatgggttaacaagatctaggcttcagaaggtgacagatatgagtgaggaccatgtgtggggcaaagctcagaatgatgaaaaggttccggcactatagttggggccatgttgactccttttcaaccatttgtcacagacgtgagaagaagaaatgacttcaaaatcaagagaaaacaaatacttgaaagtctctactntacatccaaattttaaaaaataaaatctgtaggattaacaatctgatcattgctaaagtgaagctgtttttgtctatttgatataggctatactgggtatcccaaatatgccngtccttctgtgtctttaa

SEQ ID NO: 460134 - DNA, 653 bp, Homo Sapiens
  misc_feature (348)..(540): n is a, c, g, or t
tttgaacaaaacagaatgttattttattttgtgtctaagagtacaaaaatcataatcaccaacctcttgggaatcccaaggcagaattttagtcccagaccccccaacatcctcactacatacatggaagttgctttactcctttctaccttagttatttgacctataattagaggataaaatacaacattctaaaatcctgggtaatatggccgatatataattttatttttgatgtgggtgagagtcttgaagtctggaaagcatttaacttattaaaagacagatcatcactgatcattatggcaaggacaaatttagaagacttattaaacttacctcggcggnnnnnnnnnnnnnnnnnnnnnnnnnnnnnnnnnnnnnnnnnnnnnnnnnnnnnnnnnnnnnnnnnnnnnnnnnnnnnnnnnnnnnnnnnnnnnnnnnnnnnnnnnnnnnnnnnnnnnnnnnnnnnnnnnnnnnnnnnnnnnnnnnnnnnnnnnnnnnnnnnnnnnnnnnnnnnnnnnnnnnnnnnnnnnnnnncagggggacctccctccccagccaagggaagtggtgagggacagtgctacccaccaagggtactaagcttttcccacagatttttgcaatccacagatcagcagatcccctcg

SEQ ID NO: 460135 - DNA, 493 bp, Homo Sapiens
  misc_feature (343)..(343): n is a, c, g, or t
  misc_feature (479)..(479): n is a, c, g, or t
ttttttttagtgtggaagctaaaatttctttcctccttcttagcaaagtacacattataagtgaggcccaggtgaaattaactttaaaaaacataggtagatcatgaaaattcactgctgaggctttacatgtaagtggtaaatttcagccttgaaagacagctacaatacacagaaatgtgatcatggaaaacatggcaaaacgttaaaattaccacatgtccataggctttcacaagcaaataatgttactgagaaatgagtcaattataactatgttctatttttgaaatgtaaatcatgttgatgatatgaggcaaatatgtatacttttcccgggggnggtaatatttggggcttgggaataccctccaattgccaatctttgtttttatttcttgctcttttcaggaatctctacttacaccccggttggggccccagcaaacccttcacagggctgctacggcactttgtgnttggtggggcccca

SEQ ID NO: 460136 - DNA, 325 bp, Homo Sapiens
tcggtacccactagtccacggttggctgatgcacatttgcctatttaatgtgcatcagtcatctgaactaggttgatcctggaataatgaaaacacttcactagtattaactaatgttttctacatagtagttcccaatagattaaggaaaatttccaacctgagattctttgttttggaatttgaataatgtgtttgtaactattccttgattgtcccaaatccaggctttacgtctgcttttgtcaatgtaacatcctagtgccaggaaattggaaaatccaatgactttttgtgtgtaaagtactggaatttttttgttcgt

SEQ ID NO: 460137 - DNA, 427 bp, Homo Sapiens
  misc_feature (317)..(317): n is a, c, g, or t
  misc_feature (390)..(390): n is a, c, g, or t
gccaaagcaaacatccaatgttagaaaatgtaagcacaaactgaaaattcatagggttttaaattctaaaattcggaatactaagaagtaatcaattaagaccagttaggtttggactttcaaggaatgaactcaaatatgatcaaatattcacatctctggtatcacctaggattggctaacattatgcttaaatatattaacttgtaactgcttctgcatcccagagacatatatgcctgcttgtctggcaaggttggacatcctgttacaatctatattcagggtctctccacttttgaaaagggaactaggantcaatcaagggaggctgtgacctactacccaggtcaccattaaaggtatttaattaggttttcacacttgggnaagggatcccagggctatttttcccaggggccccagt

SEQ ID NO: 460138 - DNA, 383 bp, Homo Sapiens
  misc_feature (366)..(366): n is a, c, g, or t
ttttttttgcatgtttaaagatttatttgtggttgtttggtctgtaggatatattccattatgcaaagtacagacaaaatactaagttttcaagtcacttgaagtaagtcttctgtggggttatatcaccaacttgacaagactgttaagtttgttttagttttaagagttgccttttcaaaaaatgtttattatataaaacattgacagggcctcaaaataaaaggtatgtaagatacagaaatagttgccatccttgtctagctccctaccaccactaacaagggagatccattttattaggttattggggataacctaattcttctattgctttaccaaaaaaaggcaaatacatattttttncccttttggcctcttcc

SEQ ID NO: 460139 - DNA, 187 bp, Homo Sapiens
tcccaaagtgctggaattacaggcacaggccaccatgctcagcctcatttttatcctattttagactttatgtttaaaaaaattttaagatgctattaagtcttgaaacaaacatttttcattcattttctaactcctgggtagtttgctaggattataaactacttaaatttttttgctttagttt

SEQ ID NO: 460140 - DNA, 388 bp, Homo Sapiens
ccaggaacaaagggcctgtgcttttaagttttctaccacttgtccctgtccatgaataggtgatacagatcccaggggacacagttcgagtgaaggctgattttttctgccatgatgtatttacagttaggtttgaaaaagatacattttgataatcagtcactgatgctggttgatttgaagaaagtggttcagaggaagttgaggtagcagataaagaaactgtaggaggaagtaaggccttctttggagatacagctttttcattttcacttgatggcattttttctacataattgcatggaaaccagccaaaatttccttgaaaactaccataaagccaaccaggttcttctacggttttttcatcaacctgaacctcgtgcca

SEQ ID NO: 460141 - DNA, 1059 bp, Homo Sapiens
aagtaagaaatggaaagtcttcttttgttcactcaagcacaaatcattttaaagtgctactcgaataaggatagctgtcatcagcgtagaggtcactggtataaacaaacagtagctatatgatatttgggaactattttacaatatgctcccattgggttttccaaactgatacaaccatgaggtgaacactttcactgtttcacagttcctccagagataccagtttatgaaaatgtcagatgttaaaacagatattaggcaaatatccaaggaagctacggtctgccataggcccttcccatccactctatccccgtccttccttgatggggctcctgccacatccaacgaagccatgcgaatgccctcttgttctcccgcttcactctgagtgacctcatctgggggaaagagctcattagagactttcaatctcaagcattatccggcaggcagagacagcatttggaggatgtgagagcttccgtcactatttgtgaattcacacatcaaaagtgatgccttgctttgactctgcgtggaggcagccctgagtctgatgcccaccatctctcatgagagacagcagatacccccgagagctagccagcagcagcctcctcacctcgaccgacgagctgaaggtcagccatgtaccgctcttcggtctgaatcagctcatgaatatagccctgtcttttcctctcaattgggtgcattgtgtccagggtttgcagatcagcacaccactgttgacttggatctgagtctgtcgtcatcttaacgtagtttgaaggaaagagaccagtcaccccgttgatctctccttgccaccaatcaggatcatctttgttcataacattaatgagttgtcccttggagaaactgagctcatcttcattatttgctgcatagtcatacatagcaatcacctgacatacaggatgaaaggcaggtgtggctctttcactacttggacccaaaagtttaacatgactggcaggaaaccatcctttctgtcgcttttttcctctggcctgtagaaggtccagtatg

SEQ ID NO: 460142 - DNA, 424 bp, Homo Sapiens
  misc_feature (392)..(392): n is a, c, g, or t
gatgagcattcggtagaatttttgaagtgagattttatgaagtcaaaggggactttacacagatctcgacctgctttgaaacctagaggtggccctttgatttgtgcgtgtccttgccctctggacaacttaatatttcaagtaatcgaataccaacttccctgccagcccacctgccttccgccccgcttgtgtaacagtcctgttttgttgagttgctgctattgcactgccagtgcagcccacaccaaatcacaacccaagatactcagataggaagactccttcctctcccagtactttaccaaaggaacccccgccgggaccccacatgggggcccacgtgttgggcagtggggaatcaggcctgtggcagggtggggggtttcttnagggctggatccagtagggggggccaggtttt

SEQ ID NO: 460143 - DNA, 548 bp, Homo Sapiens
  misc_feature (19)..(19): n is a, c, g, or t
  misc_feature (68)..(68): n is a, c, g, or t
  misc_feature (80)..(80): n is a, c, g, or t
  misc_feature (95)..(95): n is a, c, g, or t
  misc_feature (110)..(110): n is a, c, g, or t
  misc_feature (151)..(151): n is a, c, g, or t
  misc_feature (518)..(518): n is a, c, g, or t
aaaattcctaaatgttaangctgcctgtccctaacacaagcctgccttaaattttacctggaacatgncccctatgttgntttggggggagggtntccccagatgttccngtattttaaagctgccatgattttaaaaataatttaaatanagaagaggggtatcatccagcaacatggtggaataggagtttcccttcacaaaaatatcccatttgaacaaccatccgcaccagaaaataccttaccatgctctaaggaatgcaggtgaaagattacagcacttgagcgaagcacgagaataagaaaagatgcacagcagatggtaaggaggacagttttatattacctgcatcaaccttccccgaaaaccatgcagcacaacatggagaatgatacctttagcatgtggggagaagaatggatcgagcaatgagttcatagtgaaccccagtatcaggccttctccagttaaccctggtgccaggctaggccctgcagacccaagcagtaggcctnccctagtttcaagctggcctgggcagtccc

SEQ ID NO: 460144 - DNA, 475 bp, Homo Sapiens
  misc_feature (348)..(357): n is a, c, g, or t
  misc_feature (417)..(417): n is a, c, g, or t
  misc_feature (422)..(422): n is a, c, g, or t
  misc_feature (435)..(435): n is a, c, g, or t
  misc_feature (442)..(442): n is a, c, g, or t
ccttaaatgtttggtagaattcaccagtgaaaacatctgagtcttgtgctttccgttttggaagagtattaattatggattccatttcttttaattgatgtaggcccacccagattatatttctccttgtttgagttttggtagatagcgtttttcaagaaactggccaatgttatctaagttaccaagtttatgggtgtagggctgttcatggatattccttttaatctttttattagccatgttaccagtagtgatgcccctcctttatttctgatgtttgggaatttgtgtctcttttcttttcctcttgtttagccgggctaaagttttattgattttattgannnnnnnnnncaaagaaccagcttttggatgtttaaaattttctctgatttcccgttttcaatttccatnaattnccgttcccaaagntggatantaaatttttgttacggttccccaaggtggaggt

SEQ ID NO: 460145 - DNA, 603 bp, Homo Sapiens
  misc_feature (488)..(488): n is a, c, g, or t
  misc_feature (529)..(561): n is a, c, g, or t
  misc_feature (582)..(582): n is a, c, g, or t
  misc_feature (588)..(588): n is a, c, g, or t
caatatctgtgtcgttcttggcagaaattatattttccagcccgtgtctgcaggtatattcgaattgttgggactcacaacacagtgaacaagatttttcacattgtggcttttgaatgtatgtttacaaacaaaaccttcactcttgagaaggggctgataggttactactttgggattgtgacactcaaagtggacacagtggaacacctgggagagaaaaggaaaagaccccatgagtgaagggtcagcatgcggccctggagttgccgcaagttgggatactgccctgcccagctttgggggccaccacgagggagttagaggaggtccttcccactgcccacgcctgccccggcgcagacacctgatggcaactagcatgctgtaaacacattttgatcagtcaagaggaaaggaaattgagccagtggcccaaaagttagagacaccatgacacgggtttcccacaaaatctttcacacttnggttacttccgtttttgccaacctttgtctaattgggctcnnnnnnnnnnnnnnnnnnnnnnnnnnnnnnnnnggcagtttgggttaaaagtcnacaggngttgacttggttggt

SEQ ID NO: 460146 - DNA, 332 bp, Homo Sapiens
  misc_feature (310)..(310): n is a, c, g, or t
aagcgtggaatttatattttcaatataattctgcagttgatactacatttgtctctgtgaacttgattctacggtagaaggccgtgtgtatgtatgtgcacacatgctcgtgcagtggcaacgacagcccccaccccgcccttctctcctgcaccccacagctcacacatgcatgtcaggaccccccgaagcacgttgtctactctccaggtcagggccatggcttacccttgcttgcggggcgctgagctcggtgctgtgccctggtctgcacagtgctggcacgggtgttgggcacagagttcatggntgcttccagggctgacctgctg

SEQ ID NO: 460147 - DNA, 312 bp, Homo Sapiens
aagtaacaatttattgagctttcactcaagtttggtattcaaagttgcaagcacttgacatttttttacaccatttaatccttacaacaacctgccaggtacatgctcttattcccatcctatagatgaggaatgagactcaatgagaggaagaacattgtttttaagtggaagaacttggattagaataaacagaactctagaatccatgcaatgagttaccaccttcactctcactcgaagacattgcactgcctacaccatggccacatctatcactaacacagagccttaagacttaggagctggctg

SEQ ID NO: 460148 - DNA, 467 bp, Homo Sapiens
  misc_feature (34)..(34): n is a, c, g, or t
  misc_feature (81)..(81): n is a, c, g, or t
attcacaagctaaaaggtttgtaatataattatnaaaatcttaatggaaaaacagatacacagctaattcatacagcaagnaggtgggtgtgaggaaaatgtctgctttggcatcaaaccttcaagtccagctgctgtctgtccaactcctcctgtctggagcctactcccatcaggcactgtgcatccaggccactgcccctgccacatcctctaattagcctggactttggggtatcctcagcccctccccacgctcccctttgggcccccatgcctctccatctttctgccattttcccacacagagtgccactggcccagcagctttgtcccgtgggctcctcagaggcctgaatccttgcctggagggcagtggggctggggtggatgtgatccctgtgggacatctttcctggatcacaggccttttgcagcttgccagctacatgggccctggacagtgc

SEQ ID NO: 460149 - DNA, 317 bp, Homo Sapiens
tgcacacatggttttcagatgacccagccatctacaagatctgaattctactgaaaatatctagaaatgtggaagagacctacttgcacattcttaacctgtatttgaacacaaaatatctatacttcatgctccagcccaagcctataccctgtaatagcatactattattgaaatcgcttgaccggtcttgttcacataggcctctgggagtgatttggttctttgccctaatgtttcatttgacggtctctttttgatcaaccaatttttctaaaagttcagtcgaaagcttttaagtatagcttcctcccttg

SEQ ID NO: 460150 - DNA, 564 bp, Homo Sapiens
  misc_feature (470)..(470): n is a, c, g, or t
  misc_feature (515)..(515): n is a, c, g, or t
cagaattatagtctttggtgctctgttttcaatggggcatattacataaggttgtttctttcaccccaaagagactactaggttaccactctgggcattgcctttccacctaacccctcaaccagtaagactctacaccatattgtagccccactattctcctctttatcacagatgaagtgccagagcatcagagataggtagctcccaacctcttgctctggatttgcagaagagggggagatgtacttacccaggataagaaaaatctagtcaaatccaccccaaatcttccatttaacaggtaggaccatcgaggctggaccaaaccactttttccactgcccttggtggaatctattcctagtggaccccatttgggcatgtgcctagctaccttgggaaggcatgacttttaagtcacaccttcagggtttgggaaattgaaagggttctattaggatattctnttactttccataggctgggagagggtagtccaggaaatttcagtncttgctctgaggtccacagtaggcttttaaaatttcaactcaacattgt

SEQ ID NO: 460151 - DNA, 611 bp, Homo Sapiens
  misc_feature (12)..(12): n is a, c, g, or t
  misc_feature (21)..(21): n is a, c, g, or t
  misc_feature (71)..(71): n is a, c, g, or t
  misc_feature (94)..(94): n is a, c, g, or t
  misc_feature (118)..(118): n is a, c, g, or t
  misc_feature (126)..(126): n is a, c, g, or t
  misc_feature (143)..(143): n is a, c, g, or t
ccccttggtggnggttttttntttctggaattggaaaaaccggaggaagcctgcccaccattaaaaggatntgttaagtggtataaaaattggngaatgttgaaattccaaccatgcntccatatnataacccaccctgccangaatattgtggtccaattgtgtgaatacccaaatccagtatatactgtatactgtactatgaaaatttgtatttaaaggcaaagatacaagtaattgttggtataattggggaaaagggtattccaatatttattaagtaacaatgagaaatgcaacaaacttccttatttatgccttatgaataaaagagtgtggaatgtaaggtgaaattttatgtgcaagatcctgaaggaatgggtattcttgaaggcagggactgtcttttctatgtttgttctgtacagctctcagcacactcttggtgcttgataaatgttatgttatataataccaataactaagcacatttttagatcttttttcaaatggcttgtgtaaaatttggttaatgtacaatggttggtttgaagctatcatgtaaaattggcctctccaaatataatcagaaataaaccgaaaaaaatata

SEQ ID NO: 460152 - DNA, 481 bp, Homo Sapiens
  misc_feature (19)..(19): n is a, c, g, or t
  misc_feature (30)..(30): n is a, c, g, or t
  misc_feature (78)..(78): n is a, c, g, or t
gggtgaaaaaccgggagcnatggccaattnccacccttccaccttggatggaagaaccatgccggactgaatccaaanggaggtttgccccagcatctgccagcccagtaatttaatggcatattccttttgtggacctccataagtccaagatatgctgcaagtcccccaggaggaactgattactgaatactggccttaatctgaaagggatttcatgatctgtgaagcatgtcaccctgccattatggtccgcatccttatccgtcacagttatgagagcaattttggtgttgagtggaatattttctgaaagaacaactgtgtcattgacaggattgacgatgtatcttatgtcaatggatgggacattatcattgacatctgtaacatttaccagcaccattgctcttgctggcatcaatccaccatcacttgccaaaaccagtaacttgtggtttggtgtttcttccctatccag

SEQ ID NO: 460153 - DNA, 292 bp, Homo Sapiens
  misc_feature (147)..(147): n is a, c, g, or t
  misc_feature (252)..(252): n is a, c, g, or t
ttttttttcttcatcattatcatctgcctgttttctgggtttggggtagcccattcagaattctgcttgtttttctgagcagccttaaggtgtggtgcctggcgacatcttactacagcagtgatgaaaataactacaacgacagtnatggtgccagcaacagctgcaaccaggatcttgacatagtcactagttggtgaggatacatcagctatctcagtatttggggtcactggtgcttcagtgcttttncgcaccagttcattaatcagtgtagcattggtcaccgact

SEQ ID NO: 460154 - DNA, 484 bp, Homo Sapiens
  misc_feature (72)..(72): n is a, c, g, or t
  misc_feature (78)..(78): n is a, c, g, or t
  misc_feature (126)..(126): n is a, c, g, or t
cacccgtccataccaaaagaattttagggaagcccgggaaatacaaatacctaacccgagaaaacacaaaangttttntattttgggtaagtaaaatccactgtaaagtgttcccttttatttttntcctggaaccttccaagtatttccctttttagcttccctgtagtgcctagcaatggtgaatttgtttttatttctgtttattaatctttgaccatgaggatagctaggctgacctagcaaatggtaatggaaagaacatgaaattcattgatttcacctcttctgagttcatttgcttgctgcttcagccctttcccttgcatttgactggatagttgatgaaggatgtagctccttgcccagttccctgctttagcagttggatgcagagggtatcttctcttagatctaatacctagacttataaatggatgagatgaatgaaaacaacactatcactatttattgttacaaaggc

SEQ ID NO: 460155 - DNA, 410 bp, Homo Sapiens
  misc_feature (368)..(368): n is a, c, g, or t
acatttgcaaaaacatttaaaccaacaaattcgagcaagcccagaggtgtaggggactccctacaggtcaggagagacgcagcgtgcagtaggccggtggggaaccctgatgagaaacaccgccagagaggaaggaactccagtgtccagcgggcacggggggttgttggtcagactcacacctgaaaccaccatgagaacacactccccaaacggctggcgaccaagtgcccagcccagtgtgagggagccgagcagctgggccctctggctctgggcatgttcctgggcatcatccagagaagctgaggatgcagccacacccacgacctgccttccactcccaggattagacccgaggcagggantcacgcaggagacacagcgtccttgcaagggcaaaccgggaa

SEQ ID NO: 460156 - DNA, 431 bp, Homo Sapiens
  misc_feature (24)..(24): n is a, c, g, or t
  misc_feature (71)..(71): n is a, c, g, or t
  misc_feature (417)..(417): n is a, c, g, or t
aaaatttggtcctccaaaaattangaaaaggcaaaaggacaaaaatgttggggcttcaaaatctgtaagcnaattgtcctaacacttcccacttttggccttccgaaaaccttgagtttcagcgtctgaggagtgttggatgaaatgacctttggaattctgcccagcctatgataatatgctttgcttgtcctcctacagagggaatttctgatttaatcagaccaggctgctgggcatcctactttctcaaccagtgtgcctctgcctgctcctgtgtgcttgcttcttgctgttctccttaacttctcttttaagacctggttgctctgcaatgctccccatgttttccttgaatctgcccttgagcactttatttctcattgacctttcctttaaacttgcctggcatctagncaggcagttcactg

SEQ ID NO: 460157 - DNA, 524 bp, Homo Sapiens
  misc_feature (452)..(452): n is a, c, g, or t
  misc_feature (479)..(479): n is a, c, g, or t
  misc_feature (490)..(490): n is a, c, g, or t
  misc_feature (499)..(499): n is a, c, g, or t
aaatcagttgtcttagtttaagctactataacaaggtactgtagactgatggcttataagcaacagagacttatttctcagttctgtagtctggaggtccaagatcaaggtgacactgtggtcaggttctgatgagggccctcttctgggttataaactacggacttcttgtatccttacatggcagaaagagcgacagagctctctgtagtcccttttataagctcactaatcccattcatgagggccctaccctcatgacccaattacctcccaaatgcccctcctccaaacaccaccactttgggggttaaggatttcaacagatgaattttgaaggggacacaaacattccagtccataggcatccactttttcaagcttaggtattttaattacctctttagggccccgtggggaagggggaaaataggataggggaacctggcccntggaaaggttgctttcagttggggggnggaaagggtgnaatttcccnttgtttaggacatttgtttttaagg

SEQ ID NO: 460158 - DNA, 347 bp, Homo Sapiens
  misc_feature (119)..(119): n is a, c, g, or t
gaatatgatttaattttatttaagggcttgacatttgcatttaaggcagccgtaagtttttattcattgcattatacgactccaacaagcctgtccagccacccccatggtgctttgcngtttcaagatttcacccgaactgatgaaaccctttcccaaatattttgtaggttccctgtgctttttagatgcactttcccttctcgctcactcttccattcagcagaaacttgctaaacaccttctctgtcctggggcactgtaccagggtgtggaagataagctcgccttggggcgcttcggattctctttgcagccttgcaccttggggggtgtttaggtaaatg

SEQ ID NO: 460159 - DNA, 495 bp, Homo Sapiens
  misc_feature (478)..(478): n is a, c, g, or t
gtcaagtattttatttgacagcttcattatgaacttggttcttagaaaaacctttcccatcctaacaacaaataaacttgtagcaatttttttgtttcctccttttcttaaatatttaactcttgagcccatctgaggtttattttagcagatggtgtgaagaagggcctcttttctccaaatcagtcgttccagcaccatctctgaacaactacatgcccttgctgcactgactgaaagctgcccctcctatgctaaacgcacatgcactcttctctgtcttcagacttttactacatgtcagcgtcagagtagggaaggatgggccaggggagatgaaggcctgagggctgaggggctctgaggaacagggcagacagcagggcaagggagggacatggaaggaggggacaggacggcacaggtgcagggggaggaggcagacagcaggccagggagggcttgaagaggggccagncgcacaggttccagggg

SEQ ID NO: 460160 - DNA, 411 bp, Homo Sapiens
  misc_feature (14)..(14): n is a, c, g, or t
  misc_feature (25)..(25): n is a, c, g, or t
aaaaacggtatgcntggcaaaatcnttggactttccacacccccctcaccccatttttgccctttaaactgatcatttgctggcagcagatgggtaaataggatgaaagttttcaatatggtgtggtggggatgtatgtttcccagacacaacatcaaagagtaccaagcagagttcttaatgtgattaacaaagaggcatggaatctgctatcaatcttccttgttactgtcatagtacttccaggactgttaaagaaactttacaatagctgaatacatgttacacatacagaccaagaaagtgccctgggcagtgtagcagaatttacagcaagtgcattttttgaatttctgcttctgagtcactactgtcagtctgacatttgtatctcagaagtccctcgtgcca

SEQ ID NO: 460161 - DNA, 429 bp, Homo Sapiens
  misc_feature (327)..(327): n is a, c, g, or t
  misc_feature (335)..(335): n is a, c, g, or t
  misc_feature (341)..(341): n is a, c, g, or t
  misc_feature (362)..(362): n is a, c, g, or t
  misc_feature (401)..(401): n is a, c, g, or t
gactcatctagaattttattcatataggtttaaacaatggttaacatgtacagttataagatcattctcatttacaaatttaatgtttacaacaatcctaaaagtcaggtatagcttttaagcatcattttacagatgaagaatctttcccaagattacacagctggaaagtggtacagtgaggctttgaccctcatgttttgcctccagatcccctgcacttaggggttgtgctgtactgtttactaggtgcaactggtcattttactatatgagaaaagtgcaactgctctattgaattgaatgattttgcctcccaatttaggnttcagggnctaggnctttggtggaaatatttctgnatggaccaccttactggatatgggaataattggaatccnctgttagggggttatttttattaggggc

SEQ ID NO: 460162 - DNA, 390 bp, Homo Sapiens
  misc_feature (189)..(211): n is a, c, g, or t
gaaaataataaaagtggtatttggatgagataattttcctttaaatttattcctcagaatgatgtaaattttccagctggaaggtcatctttctatacatgcatgcatctatacaaatggttaaacagttactctctcaatttgctgagataggaaaggtggatataaatataagcaagggtctgattnnnnnnnnnnnnnnnnnnnnnnngacaagagaagcactgcattgttggccagaaattccttttaagtcagacttaagtccacggaaagctggacctaagcagtgaaggatgtaagggaacagagagagactctgctttgcccgagtttgctattctcctttgtctatggtccattcgggctaccataaaggttcaccacctt

SEQ ID NO: 460163 - DNA, 282 bp, Homo Sapiens
  misc_feature (70)..(70): n is a, c, g, or t
  misc_feature (205)..(205): n is a, c, g, or t
  misc_feature (221)..(221): n is a, c, g, or t
  misc_feature (266)..(266): n is a, c, g, or t
caaactccttgacctcgggtgatccgcctacctcccaaggtgctgggattaaaggcgtgcgcaccgcgcntagcatatgtttatttttaatttagaactcatcgtggcttgtctatatacattgaaataatgatgtgacacacaaactgttgtgaaaaatgtcagttactttgaatgtaaggcatttttcccaaatcacttatgngtctaaacccattccntctataaatcaggtaagggaaatgataaaacaattcaacaggggnaatgggaccaaagggc

SEQ ID NO: 460164 - DNA, 482 bp, Homo Sapiens
aatccaacaattttgaaggccatcgggcaagcaccttcaaatcttaccatgaatccttccaattttgctaccccacaaactcacaaattagattctgtggtagtgaattctggaaagcagtctaattctggagcaacaaaacgggcaagtccaagcaacagtcgcaggtctagtcctgggtccagtaggaaaaccactccaagccctgggaggcaaaattcaaaagcccctaaacttactctggcctctcagacaaatgcagccctattgcagaatgtggagttgccgagaaatgtattggtcagtcccactcctctggccaatccccctgtacctgggagctttcctaacaacagtgggctgaatcctcagaattctactgtgtctgtggctgcagttgggggtgttgttgaggataacaaggagagcttgaatgtgcctcaggacagtgattgccagaattcccagagtaggaaggaaca

SEQ ID NO: 460165 - DNA, 185 bp, Homo Sapiens
agagatcatcctgccaggggctggaagaagggttgagtataaaggggtacaaatgattagagaagataaagaaactgttgtatgtattaaccgtggtaaataaacagtatgtgtttgtcaaaatttgaactatacattttaaaaacagtaacttactctatgtaaattataccttaacaaagatg

SEQ ID NO: 460166 - DNA, 446 bp, Homo Sapiens
  misc_feature (409)..(409): n is a, c, g, or t
ttttttttaaatccatcaaattcattcattcattcataataaagtgattaatcattataaagagagcaatagtagtttacatatatatataacagtacatttatctaaaatagtagatgtgtgtgtgtttgtatcctttgtccattattgagcttggcaaacaggagtacatagaaataaaagcagaccttactgacatgtaagtcaataatgaatgccttttccttccctcatcttatcattctctccattgttaatttaaaaacaattgcttttgccagtattcacaaaaccacgtaaactgacaattgagtatggggaattagggccaaatcctttatgggttatctcccctgatggatgcttccacgggcatctgcaaactacagtctcatctgcaaactacagnctcatctgcaaatggcccaggtgagaataaaatctgc

SEQ ID NO: 460167 - DNA, 446 bp, Homo Sapiens
ggcattttcattttatataaaagactagaaatttcatgtgtatagtaaagaaccatgaacttactatgggtatttctctttggatataatactaaaaataataatgaataataaaaaggttggcaatggccgttcactgtttgggggagacctccattctccaacagcgtggtagtgcttgcagataatgtacagggcagaggccaacttgtctctcagcatgatcaaccccgagtacagcggggttttaatctgcctgggggcatttccacaatacagcctttatccttgagggtaacaagttagcctcataatatcagagaggaaaaactagttcttcttcatgctgggcagctgaggaatgcgcttaatctaaaaacttaattacatcttcaaaaggtttaaggggggaaaaaattgggttttcatccaccacctggccgggg

SEQ ID NO: 460168 - DNA, 383 bp, Homo Sapiens
  misc_feature (260)..(260): n is a, c, g, or t
atgagccaccactcccggtggcagttttgctttttaaggcccatttctctgtaagagagccatgagctcacctcactgctaagcaatcgcgtgcagggcaggaacgccactgacctgtctgcagtgagatgtgcgctccagtgttgattgtgctctttggagatatgcggtgctaacagccccttgagtggcacatgcattatcccttccactcttagcacagccctgccagtatccagaagggccagggctttgagctnggggcaaagggaggaggacctggaggacgaggaatgaaaaagaccaactccttgacaccacttctctctgcctacaggcttctccccgttgaactgtcaaagggctggggtatcctgggtttc

SEQ ID NO: 460169 - DNA, 313 bp, Homo Sapiens
  misc_feature (29)..(29): n is a, c, g, or t
  misc_feature (33)..(33): n is a, c, g, or t
  misc_feature (72)..(72): n is a, c, g, or t
  misc_feature (75)..(135): n is a, c, g, or t
  misc_feature (137)..(137): n is a, c, g, or t
  misc_feature (151)..(151): n is a, c, g, or t
gtgtacacctagatctatgtgtatacatncatntgtatatgtgtacacatatatgtatgtgtatacatacanacnnnnnnnnnnnnnnnnnnnnnnnnnnnnnnnnnnnnnnnnnnnnnnnnnnnnnnnnnnnnntntgtgtatatatgtnttaagtggacattgtacttctgatgtggatacggtgatgaagctacaaagtcacactatcctatggccttgtgtttagatggagcaaagcaactaaaaattgcctcaacaatcctgcaactccagatcttcaatttacactgaacaccgtacgcaattgttc

SEQ ID NO: 460170 - DNA, 590 bp, Homo Sapiens
  misc_feature (31)..(31): n is a, c, g, or t
  misc_feature (37)..(37): n is a, c, g, or t
  misc_feature (47)..(47): n is a, c, g, or t
  misc_feature (53)..(53): n is a, c, g, or t
  misc_feature (69)..(69): n is a, c, g, or t
  misc_feature (74)..(74): n is a, c, g, or t
  misc_feature (79)..(79): n is a, c, g, or t
  misc_feature (85)..(85): n is a, c, g, or t
  misc_feature (96)..(96): n is a, c, g, or t
  misc_feature (110)..(110): n is a, c, g, or t
  misc_feature (116)..(116): n is a, c, g, or t
  misc_feature (168)..(168): n is a, c, g, or t
  misc_feature (179)..(179): n is a, c, g, or t
  misc_feature (191)..(191): n is a, c, g, or t
gccccccatcttcccgcttccatgtgccaanaagaanggaactccantgaggnaaaaacatccaactgncctgnaaccnactgcntgttttatgangggaaggatgaaancccaanacctccctcaaaaaaacccctgccctgtccccgcccatccgtctttcctgcnaatggaaaaantaacaaaaaaangcggattcctgttggaaaggtgggtggtttaactcaagtgtgctccctccttaagcagcccccagcaagtttttgcttctcccagagtgggattattttccttttggacaacctggctctgtgggagcacgtggatggaaaacacgatgccgcgagcttccatcggtgtgccagaggctgcagcttaaatcagagccaatggaaagggcaggttacaggaagccatggagactcgggaagtctgctcagtgacatcccaaagtgcagggctgatctgagcgcaacctaacgtttcggggctcaccccagaggttccctctctcagaatcgctcgatggaccgaaagctgccaagggtgactgcttttctggagttcacctgtccatcatgaattaatcc

SEQ ID NO: 460171 - DNA, 414 bp, Homo Sapiens
  misc_feature (33)..(33): n is a, c, g, or t
  misc_feature (56)..(56): n is a, c, g, or t
agggaagtcccagatatggcacactgaaaagcnatccaacagcctagtcattcccnaacgaataactgatttcaacacatggctagaagagagagagtggaaatgaagtcgctgtaggctactataaaccttcaccttctataaaccttcgccttctacaaaccttcgccttctacaaacctttgctttctacaagcttcaccttccaggcaatgcacatggacgcacccttacggccctgtggttccatctactgaatgtggtccccaaggacgctccccaagctccaagagatcctcagcctcaggttgaggggctgaaccccaagggtacgctctgcaatgaacctgtctgtacttgccctctgctggcttccttctttcgtgttcccagcttgacctgggaggagccagg

SEQ ID NO: 460172 - DNA, 373 bp, Homo Sapiens
  misc_feature (304)..(304): n is a, c, g, or t
atttgatacaaatctaaaccagtcacagacagacacacagagtcacacgctagcaagggaaccagctgagggaaaccagatcccagtctaagtaggagggcaggaaacagaggggcgggagggtctctagacccagcatgggtaaaagtccctgctaaatattccaagaggctcctggggagagacccacttacaaggaaagagcctctcagggctgcctgggcttctaaagcttcctgccccaacttgtaagctctgcactcccggcattacaagaagttccagagaagataaatagattggncgtggagagggaaacagactatggatcccagctcagctggaaacgtatgaagagagacagagacagagt

SEQ ID NO: 460173 - DNA, 492 bp, Homo Sapiens
  misc_feature (15)..(15): n is a, c, g, or t
  misc_feature (26)..(26): n is a, c, g, or t
  misc_feature (31)..(31): n is a, c, g, or t
aagatttactatggnccccatccacntcggngggaatttccagcagcttgggaaaaaaagtgccacaaacaggacaaccccccatctgctgccataggaatcccatggtctgcacttcccaaacaatggaggactacatgatcacgactatagaataaatttcttcacatacaactaagggaaaataaaaacttgtcacagatattgaagtcacacagttcaagaaacacactgagacccaaaagaataaaagtcatgcatttgcctttcagaaaaaaagtggcaagaaatctagccccctggctctgtgaagaagggagtttgggcaagacaagttggagtgtcttttataagccatcactaaattgaatagttttcatttttagactgtttgctattttttaaactgacctcctgttatatcctctagttgtgacaatcaaataccaaaacaaaattgagtattagaaggggaagatctccatcccctcc

SEQ ID NO: 460174 - DNA, 530 bp, Homo Sapiens
tgtggctgctccttatcgaatgtctctctcgggctttcttgggggcaatgggttttccctgttgatacccatcttaatgagaccagtgttggtcacaggcttgggtgaccacagtcaccatgaggaacaagaatcctttgtgggtggctcaagagggcttcccagggtcacactgagttatgctaagtccccagtgaagagcatcctgatgcccctcagtcagtggggagtctgtacactgggctccctcacatccctggtgatctgccatgtggttggatgggcaattgggtatagggcctgaccccaagctgggaggtcaggagtgtggtaggatatacatttgtaacaggcatctcacacttcgtatgctcaagaaagaactcccttccacaatgcccccaaacatgcatgggcttctctaagctctgctatcacagacttatggcactgccacattgtgcttgtttgcttgggcttgtttgctcaaactctaattctaagagtcatcctggatttttctctttctc

SEQ ID NO: 460175 - DNA, 425 bp, Homo Sapiens
  misc_feature (208)..(208): n is a, c, g, or t
  misc_feature (290)..(290): n is a, c, g, or t
  misc_feature (349)..(349): n is a, c, g, or t
  misc_feature (381)..(381): n is a, c, g, or t
acataccctataaacagggggtttattgggtaacacatcttaacataaggaaacaagattattttgcaaactgcagtccattattgggacttcaaggtgaagaactcatgagtgactggtttaacttagtccactgctctgactactacagagtcctgtcttaaattcagcctattgcactctcctccttgtggctccagcctctggnaactcttgaggtccataggacaagtcttatgtctttcccacattgtaggctctccaagtgggcaggtgggcagctgcccaanttcacagttagggcacgattggattaattaacatgtgtcttttggcgggggttctgggnggaagggcaggttgattacaaccaagccagtnacggggctgggggtttgggacccttttggaggtgttcgctactg

SEQ ID NO: 460176 - DNA, 563 bp, Homo Sapiens
  misc_feature (11)..(11): n is a, c, g, or t
  misc_feature (43)..(43): n is a, c, g, or t
  misc_feature (54)..(54): n is a, c, g, or t
  misc_feature (66)..(66): n is a, c, g, or t
  misc_feature (125)..(125): n is a, c, g, or t
  misc_feature (489)..(489): n is a, c, g, or t
tcaattcccanacaagtgtgcagcctcgtgttacacctttgancctggctatgnaaattctccggncagcataaaatcactggtcatagattgtgcttaagaccgcttagccagttctacttttnactctttaccttggatgtgtttgtggcttggaggctgctattgcaatttaaataattatgtgtttgccttcacattttgtgacggactactagcttggatttttcttctcccatcactctggagaaggcacagtcttgggtgtatacagggactttcaggctgcccagggatcagcatggtttttcttcttaagcctgctttcctaggagttgccctctgggtcagttcagccagctgtggtgaagtttgtgcttaagcctctagtgccagtgaggcttctgccctttgtggattattccgtatgtggtttagtggtgtttcaaatctgcccacatctagctctgattgcttctgcactattgnctaggtacagccttgcactgcacacagtccttcatgaaccgccagggttatgtggcatcccaggagggttcttc

SEQ ID NO: 460177 - DNA, 390 bp, Homo Sapiens
tttttttttggattacataatctctactgatcttcttcaaggtcagtttctttcttctaccagctcagactgtctctcgagaccctttagtcattgttttatttatatttttgtacttttcaaattcagaattttcatttggtacctttaaaaataatttctcttttactggcattttctatttgattagatattgttatcatacattttctttaattctttagacatgatctcattcagttctctgaacttatttaaaatgtgtgatgtcattgtctgctaagtcaattatttagggctccttcaaaagcagtttctattccctgcctttcttctgtctgtgtatctactatgagctgaatatgttatgggatgaagtgtttctcccca

SEQ ID NO: 460178 - DNA, 504 bp, Homo Sapiens
  misc_feature (13)..(13): n is a, c, g, or t
  misc_feature (26)..(26): n is a, c, g, or t
  misc_feature (36)..(36): n is a, c, g, or t
  misc_feature (47)..(47): n is a, c, g, or t
  misc_feature (170)..(170): n is a, c, g, or t
  misc_feature (253)..(253): n is a, c, g, or t
cccgcaaaaaatnaggcccaaagggnaaaaccggancccccaaaagntcccaaccaaaaaggtgcccggaagccacccctaaaaaaccgcctacctaaaaaaagaggacggggaaggagaaatgggttacctgtgaaggatgtaagttttacctgtgtaagaccccgganatttggaaccacattagcctaccttttgaggaaaacctgaaaatttcccagaaaactctggtgtattaagttccttgtgtgantccagtggttgtgccttaggtgtttggagttttaaggtggttagctgatttattatttaacagttatcctcgaagtgagagtattttagtctttctgctaaactgtatgtgggtttgggaaccttagttatttgaaggttaagcattaggccctaattcagtaacaggaagagttgtaatggctaatttgtcagaaatatttgtctagtcatacatttattttaacattccactaacaaaaggaaaaaaaa

SEQ ID NO: 460179 - DNA, 412 bp, Homo Sapiens
  misc_feature (130)..(130): n is a, c, g, or t
  misc_feature (159)..(159): n is a, c, g, or t
  misc_feature (196)..(196): n is a, c, g, or t
  misc_feature (215)..(215): n is a, c, g, or t
  misc_feature (217)..(217): n is a, c, g, or t
  misc_feature (224)..(224): n is a, c, g, or t
  misc_feature (227)..(227): n is a, c, g, or t
  misc_feature (240)..(298): n is a, c, g, or t
  misc_feature (304)..(304): n is a, c, g, or t
  misc_feature (323)..(323): n is a, c, g, or t
  misc_feature (333)..(333): n is a, c, g, or t
  misc_feature (347)..(347): n is a, c, g, or t
  misc_feature (362)..(362): n is a, c, g, or t
  misc_feature (376)..(376): n is a, c, g, or t
  misc_feature (398)..(398): n is a, c, g, or t
caaatgtataaaccttttatttaaaattagacagactcaaatacaaattaaataagtacaatataaaatagtaagccttcataaaacacatcataaccactttaaatcatttactatttctacagcaaanttaaagggaaatctaaatacagtccaaantcaaattatttttaaactcttattgtcaacattaaanttattacaaaacattcaangntatttanttngaagatgaacaannnnnnnnnnnnnnnnnnnnnnnnnnnnnnnnnnnnnnnnnnnnnnnnnnnnnnnnnnngtgggntcacgagggtcaaggaggnttgaggaccntccggggcccaacntgggtggaaaccccntctcttacttaaantttttaaatttaggctggggcntgggtgggccgtgt

SEQ ID NO: 460180 - DNA, 370 bp, Homo Sapiens
  misc_feature (47)..(47): n is a, c, g, or t
aggagtgaacttaactgtgaggcatctgaaatatttattaaaagccnggcagcaagaagaataaacaaggatttttcctatctacaatcatcaataagaagctgaaaagaatgtatcagctgcatctatcttggatggtcttctgactagttgctactgtccaaggaaagaggccatggggtcatctggcctctgacgtttcattctatatgcctccatttcctcttcagtaggttctcgagtttcatacatgctattgtaaggccgcttcctctcatcaatctgcatggtctccttgacatgaagaaggcgggcctcctctgcgttcagtgcctttttcaatttttcatgcttcttttcttcatcatca

SEQ ID NO: 460181 - DNA, 443 bp, Homo Sapiens
tacaaaccactcacagttaagtattgtcatttatgtatctttaacaaaagataaaatacaaaacggacacaacatcagcctttatgttgaaccaccctgtttaggtaggaaaatgaacattgtttttcattcttaaagtaaataggaattaaatctatttgcattgctgtttaatttcataccaatctaaagctcgacactatgtatatccaaagtacttgacaatttgactcagttactcacaccactgtttctgagatgctgacttaatgcagtatcctacaggtgggtttttgggtagtttaggaaaagccagtgagtggggctgttaaaagttgatatactgatgtcagagggttttgttagggctgttttcactggattctactctgtcagtattatccttcacagtgtttccgaggagggggcttcgggtcctgggc

SEQ ID NO: 460182 - DNA, 110 bp, Homo Sapiens
caaatcataccaacactgaaaagaagagacaataagaagcattctttctttcaacatcacagacattggcaactctaggatgtctatacagagggataaaaaggggtggc

SEQ ID NO: 460183 - DNA, 564 bp, Homo Sapiens
  misc_feature (29)..(29): n is a, c, g, or t
  misc_feature (36)..(36): n is a, c, g, or t
  misc_feature (56)..(56): n is a, c, g, or t
cccggaacaactgaaagggctgagcccantgtgcancccacctaacaagggcgcanaaaacacaggtgacccatgtgcaggaaagacccacatgagccacgttcactcgtgatgttaagcattacttcctagccctgccttataaaattcaccgtgtttttgtcatttatatgcctaatatcacaagacaaaaacctcagttgggaaaagcaaaaggcaaattcaggtgactggctaataatgacgtttctgaagataaatatttgtcatatttgttagcttcctaggaggtctggcctgatgacctgtatcagggcccaaagatgttgagtaagcttggatccctgctgggcaatgtgtgggatggaaacagttttccttcgctgccaagagtgtctgcgtctctaaggagctgacttaatgcttttatcagatcctggaactctgtccttcgcctttctcactggttccttctgtgtcttgcatatttgccactgacatgaccactgccgtcacagccaggggtgggacagctgaacagctcttgtatggctggttccacgc

SEQ ID NO: 460184 - DNA, 381 bp, Homo Sapiens
  misc_feature (190)..(190): n is a, c, g, or t
  misc_feature (223)..(223): n is a, c, g, or t
  misc_feature (230)..(230): n is a, c, g, or t
  misc_feature (235)..(235): n is a, c, g, or t
ttaagctgattattttgagaaatagcagacgcaggagaaactctgaagacagaacgttatatatcctctgcctctcctacggagctcatccctaccaagcctgctcctgcagagggatgcaactttccgacccactgacatctgtcttggtcatatgacttgctttggtcaatgaaatgtggtgtaaaanggtggaggctttgagagccattgcctggttctnccttgtnctttnctttgggtcacaaggacggcagcttcccaggtacaatctgctctctcagtgtgcatcttgatatgaagacatcatgaaggaaagcagagtgaactgactgggcaaaaacataaactgtgggataggaacccaaagagaaaacaaag

SEQ ID NO: 460185 - DNA, 414 bp, Homo Sapiens
  misc_feature (87)..(87): n is a, c, g, or t
  misc_feature (91)..(91): n is a, c, g, or t
  misc_feature (190)..(190): n is a, c, g, or t
  misc_feature (370)..(370): n is a, c, g, or t
  misc_feature (381)..(381): n is a, c, g, or t
  misc_feature (394)..(394): n is a, c, g, or t
  misc_feature (401)..(401): n is a, c, g, or t
ttttttttgaaattgttatatgtttcactttattatttctaattactggttttcaatagtacatatatttttgcaacagtgattttntttnaattggaccatagttttaaaaaaattaatctttaagctggttttgatgatttggatactatctgaacctagtcttggtattccactcagcagccacagnacagcctctttttgatgaacaaggccttgaatctgtaagactccctcatcctgccttcgggttttggagtaattcacccaaaacaagcttggtaaggttggatcagggtgaaggaaaagaaaaatagagctgtaaataagtgaagacaagtccagggaagggacatgccaaattccaaanttgtgccaatntaaaatttagganatatatncaaggttaacctt

SEQ ID NO: 460186 - DNA, 777 bp, Homo Sapiens
  misc_feature (26)..(26): n is a, c, g, or t
  misc_feature (46)..(46): n is a, c, g, or t
  misc_feature (51)..(51): n is a, c, g, or t
  misc_feature (67)..(67): n is a, c, g, or t
  misc_feature (106)..(106): n is a, c, g, or t
  misc_feature (224)..(225): n is a, c, g, or t
  misc_feature (671)..(671): n is a, c, g, or t
  misc_feature (727)..(727): n is a, c, g, or t
  misc_feature (750)..(750): n is a, c, g, or t
aatttccaaaaaatgaaaccaaatgnaaaacagaccccataaaacntgttncctcctagaaacaacnccccttaagacccaaggcaggaacaaaggtggacatatntcctttaagtttaacttttaaataatggaacccttaggctgcaaaaatacctatgttggcctagtgaatattaatagacaaaagataaatgggggagttagaggaatgttaaaacagnnaaaaaggatctacagtgtgttaatttaaaaagtgtgtattcctagcctacagcaaaaagagttggctaaatcgaaaggatttttattttagtattttcttgttcacatttttaatcaaaaaactattagtcataaaaagatgagttcaagtgtctgagtgtctccgtttagaaggcacagtaattggattagcgatgctgttacctgttacctgtcttttccaaaatatacactttgtactgcttactctatccctacgtatataagcctaagatacagagcaacatggagttctcaatcccagcccatgacgtgctttgcagtctaattctaatcatgattgggaaacactgaatcaggaagtgtgtgtctgaagagatgctaatttaggatcttaaaatagattcagtcatcttcaattttaggatgattgggagagaggggantttctaaggcctgggaaacattaacttcagggagccaactttcctgtttcaggggnctggaaaattttaaaaggtgggntgttcataaaaacttttccggcacagt

SEQ ID NO: 460187 - DNA, 148 bp, Homo Sapiens
ttttttttggaagctttgttctttaatgagccatggggtgatttgttcatcaagctgcttttgtgtagccatacagtgcatattttgagtgacacaaactgcactttatacagatggtatcttgttacccctcaaccccccagcaaag

SEQ ID NO: 460188 - DNA, 643 bp, Homo Sapiens
  misc_feature (402)..(402): n is a, c, g, or t
  misc_feature (455)..(455): n is a, c, g, or t
acaatggacagctgcaggacagtaccgtcggcaccagaccccaccccccgagggctgtggacagagacggggtaacatgagcccggggatgtgctctcactcccagaaagtggccatcttgccataagagcgccaaccccaaaatggtgacccaaaccacaggaagggcgggcacaaatgccactcacacctccacaagacagcccagaggctgtgcctgccagcgggctttggtgccgaggctggggctgcccccttgagggcctgcctagctcgctgtgaagcctggggacgcaggagggtggtcgactttgcccaaacgcttcagcccccggcaagcctgcccccaggatgacacaaacatgaaccctgacttgggctttcggtcgcaggcccgtgggnagccagcagtggctgcaccgagatccccggacctcaccccgtcgcagctcagnggaccccccgggctcgggcaggatccctccccgctctggtcggacactgctggacagacacgggagggaaaaagcaggaaaacgcctgtgtcggggagagggcagccccctcccgtccccgcaggcagcctgattgggccccccgctccctgctctgagcacagcccacccctcagggcaccgactcg

SEQ ID NO: 460189 - DNA, 465 bp, Homo Sapiens
  misc_feature (39)..(39): n is a, c, g, or t
  misc_feature (54)..(54): n is a, c, g, or t
  misc_feature (82)..(82): n is a, c, g, or t
aacccaaaaccaaaccccaaaatggaccctgggttcttnaagaatgaactcagnaaccttcgaatggaaccctggagattcnacataaacattaggtcctgtggatgtcccagtagcagcgaaaggccctgaaagcacctccttctgcccttaggacttcacgggagcccagccccaaccggcacaaggtgatgcccagaacaccaggaacatgagcggacagcgaccatgaggaccacccaaggaagatgaaaggtgcccgagctctgccctcaaagtctccagtgggtccatggggtcagcctacctgtggggtcatgtggcctggcctgggagctccctgtcataaccaggggaaggtgctggaaaggcattggtcaaaatcactctgcaagaaggtgtctggagaccatcctgcctcttgcaccatcacagaagccagagcctaatccacaccctaaggac

SEQ ID NO: 460190 - DNA, 249 bp, Homo Sapiens
cccacaaataaaaagcaagttgtttttcaccaaaccccaagggacattatggctaaacacagttcctgaactcccaggaagtggctggggtttggagttgctgatgatggagatgtttgcccctgaagtggagaccttgccaagtctgccatggggtcctttccagaacagtcgtgagcccagagaaggcagcatggtccccgcgacggcttcctctcactgccctacaagtggccacaccttgggcag

SEQ ID NO: 460191 - DNA, 720 bp, Homo Sapiens
  misc_feature (411)..(411): n is a, c, g, or t
  misc_feature (416)..(416): n is a, c, g, or t
  misc_feature (422)..(422): n is a, c, g, or t
ttttttaatattctttccaaacgtgaccagtgttgctgagtgacactcaagtaactggtggtttttcctgtgcagctggctgctcgggactgttcaggtggagttggaagctgatgcagaagcagcattattggtctgtccacggtctccagtattagcatcttgagtggtgaagttgaagagtgcaggtgtgtctcgcccatttggtagtttgacatttgggtcccgtaattcatcaaaaaatgaatgtgcacaagcttccagtggtgttagtcgggcagttggtgtatactccagcagacggctacacagtgcaattgcctccggtggagttcggggtcggaagactttagtccaaggatgtgccttaatttgagggaatttaaattctgtgtagtttgggttcatttnctctngatttngctcccttgttggagttcccaggaccttgattatttctaccaactgatccacaccactatcccctggaaatattggttgtcctagtaacagctcagccaacacacagccagcagaccatacatctatactagaggtataatcagtggctccaaagatcaactctggtgccctatagtaccgagaacagatatacgaaacaatgggttctcctcggaacagctggcttgcacttccaaagtcacagagttttaatacagcagtatcaggaatccacaagaaggtctgcggtttataatc

SEQ ID NO: 460192 - DNA, 476 bp, Homo Sapiens
  misc_feature (270)..(270): n is a, c, g, or t
  misc_feature (290)..(290): n is a, c, g, or t
  misc_feature (366)..(366): n is a, c, g, or t
  misc_feature (443)..(443): n is a, c, g, or t
ttttataattaaattctcatttatttaaaaagttaataattgtggctgttttgtttcttttgaagtatattttgtgtaaaaagtatagatagatatttctctctgtgtaataagggaagggtatatatagagaactgtaagggacaggtatgtgaaaagcaggaattataccaagaacaggaaaaactgattaatcttcctgatcacataaccaagaaaaaagataatgtgttccaagatgacgcattaatcaaatgtcatccaaaaagnaaaaagttcaaagataaaantataatgccatgttcccaaattgatgttgtgacagattgtcagggcacccactgacaaactaaatgaattccaggntgaccagtgtcagggcgtctttacaccatgatgccccagcttcagttaactcctgtaagtgctggaaagtttttacntttaaaaaagagggctaggtgaatgtgggctcc

SEQ ID NO: 460193 - DNA, 579 bp, Homo Sapiens
  misc_feature (43)..(43): n is a, c, g, or t
  misc_feature (56)..(56): n is a, c, g, or t
  misc_feature (68)..(68): n is a, c, g, or t
  misc_feature (71)..(72): n is a, c, g, or t
  misc_feature (427)..(440): n is a, c, g, or t
  misc_feature (487)..(487): n is a, c, g, or t
  misc_feature (506)..(506): n is a, c, g, or t
  misc_feature (531)..(531): n is a, c, g, or t
  misc_feature (546)..(546): n is a, c, g, or t
  misc_feature (555)..(555): n is a, c, g, or t
  misc_feature (569)..(569): n is a, c, g, or t
ccactggcagcccctttggagaagagtctgacagtgccaagcncaacatgctttgnttcttgcccatnctnntgaatcagttggattctgacataacttcagataagcaaatactaatattcagtcttaactatctgctcaaatacttttagaaacccttcagtacctctgtattccattgccagtttgcctggttacaggttagttacccacttatggagtgaattgtgatttgtatttggttcttttaaagatgaccaaaattatcaatccatgactttacccaaattattactgttgtggaaaatgaactaattgcattacggttaacttgagggcagaaatgaatgtaactgactatattgaccaatacagtgggtttaaggttcatatatttatgggtaaggaaaagtaaacacaggaaacnnnnnnnnnnnnnngaatattaaattaaggattgttgttgctttacacgtattacatgggnatgctggagggtgtggacngtataggatagcctttgccagtacntttagggcctaatgncctatggcntccgggggggtacncctgggttgt

SEQ ID NO: 460194 - DNA, 451 bp, Homo Sapiens
  misc_feature (30)..(30): n is a, c, g, or t
  misc_feature (49)..(49): n is a, c, g, or t
  misc_feature (56)..(56): n is a, c, g, or t
caaggccccccaataagtcacccactccancattagtacccagccaaantccaganccctcctatttgtggtgaacatccacattccacagcatccagaaacagatgtccacaaggaccttgataatcccccggtcagatgcacttgaaaatttcccaggtaacctgatcaacagggtctttaactttaaaagtgtaaggggtggtgctgatgttatgtaaaaaagtcaatttaatttggacgaattattttgtgggttaggttcgacccagtgctctggttttgaaagacatggggaagaggaattcaactaagattactaagttccttcagccaacacaaagattcctgattttacagactaagctgggtgtcattgccagtctaaggagtgactcatttaaagcagattctattaacagattacagtgggactctctgaagtgcagct

SEQ ID NO: 460195 - DNA, 551 bp, Homo Sapiens
  misc_feature (43)..(43): n is a, c, g, or t
  misc_feature (69)..(69): n is a, c, g, or t
  misc_feature (78)..(78): n is a, c, g, or t
  misc_feature (95)..(95): n is a, c, g, or t
  misc_feature (148)..(148): n is a, c, g, or t
  misc_feature (195)..(248): n is a, c, g, or t
  misc_feature (275)..(295): n is a, c, g, or t
taacccctgacatttggggggcccgaaaagggttgaatcaggnggtcaaaaggaaacgagaccaccccngccccaacnggtgaaaccccctactnctactaaaaacttacaaaaattaagctggcccatggtggcaacacacctgtangtccccagctacttgggaggctgaaagcaggagattcacttgaaccnnnnnnnnnnnnnnnnnnnnnnnnnnnnnnnnnnnnnnnnnnnnnnnnnnnnnnctgttgacagagtgaaactctgccctnnnnnnnnnnnnnnnnnnnnngattggctgacatcaactggctgagtcattttgtctgcttagttgtttcgtacctcttccatggtgaatcctttctagtaggcatactgtatacctactctcatgtgtctaaccacattcttctaactcagaccctttagtcttttattttcaattgtttctcttccagacccctgaccaacctctgcccactgtactcagaccaattctccttccatgcaagtcaatgacaggcacatcacctaaagccccaccc

SEQ ID NO: 460196 - DNA, 466 bp, Homo Sapiens
  misc_feature (46)..(46): n is a, c, g, or t
gccaaatttttagatgacgaagtccataaataactagagaattttngttatctgttgttaagttgaaatgtataatccatttatcactaaattgcacattgcctttatttatttgtgctctgtttttggtttacagtgtaataatacctcatttaaaaaataaaaaccactactgttacattttattaatttaaaaagctagaaaattcatgtagttactttttttacatatataatctgttaatgaattattgatttttgtatctgccacagtaaattaaagcattacacagtatttatcagtattttttaaacatcctgtccttttttaaaatctttgcttagtcagtcatatttttgtctgtatgattagaagtttttacgtccttccttttttgtacaaatctgtattgtattaatttctggatgcaatttttcaaatattaaaattatacagtcagtcagg

SEQ ID NO: 460197 - DNA, 493 bp, Homo Sapiens
  misc_feature (422)..(432): n is a, c, g, or t
  misc_feature (438)..(438): n is a, c, g, or t
  misc_feature (478)..(478): n is a, c, g, or t
agtataataagctctttattcaaggtatgcacagtgttctataggaagagaggaggagcacagaacccaagctgagttaactggaatatttcagagaaggaagtaaaaataggtggcttatactactcattgcaagaatttttagattttttacatgtctgcataaataatgggtgtactttgcttctgattgaaatgcattttaaggagagttctgatttatctaaaagcgttctctgcattgattgaattcatcaaaaaactactcagccatgacaacagccatggaaaataaattcccgggggccaagggttttcagtttttggtactaggactcctccccaaggaccacacggggaaagggggcaactttcggttttttaaaaatggttttttttccctgggtggggttttccggccnnnnnnnnnnnaaacantttaattaaccggggctttttgtccttggtttgatggcanccgtcggggggggtt

SEQ ID NO: 460198 - DNA, 462 bp, Homo Sapiens
  misc_feature (424)..(424): n is a, c, g, or t
  misc_feature (429)..(429): n is a, c, g, or t
acttggagagtatattattttgacaatacacagaccttccctttttacatagagaatctgcaaatttatggcattaaatgacaagggaaaggaaatggctgatagcatacccatcttcccttaccctattctgtctctttcattatagtcaatcgtcctgaaacctgaacagactcccaggaagagtgtatctgctttcaagacaacaaaatattatagctttaggttatacagatacacacaaccatatatacgcacatctttttgatttaaaaatgaattatgtaaatcaaaacagaaaagacgcagatcaaaggttagagggtctaacacaaaataaacttgggatcagggtcactaactatgacccatggaccaaatccagccctccatctgcttttgtaaataaagttttcctggaacnatccnacgcccattctttacatagtatctctatctgtt

SEQ ID NO: 460199 - DNA, 213 bp, Homo Sapiens
gcctagacaacaagagtaaaactccacctcataacaaacaatcaatcaaaaagccactggtcagtatgctgccttctccagctccagctccacagccaagttaaggcacagcagttccgcttcctgtgtctctgccgagggcctgatctagctgctgccaagacatgccaaggtcaccagcttcccgtcctgaccaacagccacctctcagaa

SEQ ID NO: 460200 - DNA, 420 bp, Homo Sapiens
ggatttaagaaacccctttccccttactcctaactgtaacttacaacaatttagtagattatacttttgtaaacagaaatgaagcgtttatctttttttcttgcctgatttttccagaattttgaaatccttactgaatactcttatttccacgatgatattgttgttagcaaaagtccaataagaatctattcatcttataacaggacataattggaaattttggttatattatcaaggtttttactggaatatcatatttagggagtgtacctaagatcagttatgaccagcaattttaaggaagtaaggttgacttttatggagacaatgcttacaaagcactgtggaaaactttgaggaaagttcttcctcaaagattataaagtcacaactacccactatttttatatgtatgtg

SEQ ID NO: 460201 - DNA, 470 bp, Homo Sapiens
gaaattcagatccatatttatagttttgctttagaattggataaagaccatttgtggtctcaatatttgggacttgctaaaagtaggtaccttgatgcattttggaggcacttcttaactcggattcctgagtgtaacccaagtattaactctatggccatagaatgccgacagaagagcagaagaaacttccacttttatggttcctgggcatgcaataagactctcaagaaattagatagccaaatcagtgtgccatttctcatcaccagaatagcaagcttcctggtctgagaaccccaagggaaagtctaaactccattttcgcaatcacttttctattttcctgacttttcactgaattgtactcacgggtataaatctaacctttgatctacgtggacctcatggaataagtacaagttctacttgtttggggttttaaggactagcaaaagcaaacaaccagg

SEQ ID NO: 460202 - DNA, 466 bp, Homo Sapiens
  misc_feature (370)..(370): n is a, c, g, or t
actcaggtgatcctcccactgtagccttccaagtagatgggactacaggtgtggtccaccatgcccagctaatttttgtattatttgtagaaaaggatttagccatgttgcccaagctgatctcaaacacctgggctcaagtgattcgtctgctccgtactgagactatgggcatgagccacgaagcctggcttggaatagtctttgaaaatataataataacaatgaagataagtagagctggtattttattgagaagtcaactcaccactgggataatgaggacaacttcatttcctattatcacttgaaattacccttttccatattctcatgtgataaaaattagctgtatttttgtttgttgttngtatccaaaaagcagtttagccttaaagtaaaatgttatcattgtttctgtgtacatccaatgaggcaagttattattatctcattttataaatga

SEQ ID NO: 460203 - DNA, 327 bp, Homo Sapiens
acaccgcaggtcttttcctctttccttaagggatttccttgtcccagttacctcttcatgaagggaaaacattgtctcattggcagtttggccatgctggggggcccactgtcctctgggtgtgtagaggctgtcttggcgggcacagtcttgctggcagggcccaggctgcaagatgaacgcgtgcagcggctgtaggctggcctgggagaacgaagtggggagagggggccaatccagccatgtggccttgcagcccggctctgatcttagatggacagcagatatttgatgtgctgcgtttctcttctgaagtctcactcctcc

SEQ ID NO: 460204 - DNA, 382 bp, Homo Sapiens
  misc_feature (63)..(102): n is a, c, g, or t
  misc_feature (246)..(247): n is a, c, g, or t
  misc_feature (302)..(302): n is a, c, g, or t
gtgaagacggggtctcactcaccatgttgcccaggctggtatctggaactcctgggctctgannnnnnnnnnnnnnnnnnnnnnnnnnnnnnnnnnnnnnnngtatgagaaatcttgtttttaaaagggacaaaatagacaactttctgagactcatattctgtcttcccctgtattgttccttgatttccacggatgagcccaagattctgaggagcagggtctgtgtcttgtgggatgccgggnntcaaatgctctgcagctgggtatgtgagggactgggggagggggagggagcaggnagctggggcaggggagaagcactgccaccttgggcacaccccgcctcggggacaccatcatgggccccccggtattccat

SEQ ID NO: 460205 - DNA, 308 bp, Homo Sapiens
tgagagatgacaaaagataaacccagctaaagtaccaacaaacaaaaaaagggataatatgatagaactaggatgggggaatagcattaggtaggatggtatggttaatcagggtctgatcagaaaagaaccactaggatctaatacacatacacatatcttaatattcaaaataaggggcttattatagggattataggaggcggtttcttttgtgtctggcagttggaaagggaagacatgggaaatgggggaagcaaggaacttgctaggatgagtagaacctgtgggaactgagtggaacttgt

SEQ ID NO: 460206 - DNA, 535 bp, Homo Sapiens
ctattggctcagaaatagacaaatagatcaacagaaccggagtctagacagggaattgagagaaaagatggtgttggaaacaataaatggtgcttagcaaaactggatatctggaaaaagaagccaaattaagaagctctgtgtcacacccatacatgaaaacacatctccagatgggttaaagatttaaacatttcaaacaactatagacgttttagatgcaaacacacaatgtatatacactgcggtggggacctgctttcatcagcagtgcggcaggacacttaagcatccagtagggttccaggccgacctcacctcccacctttggaaagggcctgccgagcatctccatctggacctcacagactcctcttcctccttctctccagctccacctggtcctgggaagagggactgccacaccggatggactgaggtctgaagccagctcctgccacttgtgctctgtgtcaataaggcatctccctctctggcttccagttcctcctctatgagtaggtaatggggttac

SEQ ID NO: 460207 - DNA, 501 bp, Homo Sapiens
  misc_feature (30)..(30): n is a, c, g, or t
actttacccctgaagactgggaaactgccnggttgtgaaaacacggaaaatcagtaaatagaatgccagacagaagtctccccatttccagtaattccagatgaagtagtacgagattgcatgttgccagctctaggccggcacgtctgaaagcttgagaaaacaaggcatcattatcgcattattccttgtgaatctggtacttggaaaatatacagcatctcagttttactacaaatcatccacgcacggtatttctgaaaagaccgttgggccaacacatcaaaagctactttgaaggacaaggaatataatgcagtatattttcagttattaagggaagcaactgaagtctgagatttagttctaagtctgaagatgccattaggaagaaaagtagtaagttcatctgcaagtacagttttggggtcctaggcaaaccaccaccaattgaatggaaaacaggaatgatctggattaaaggtttctggtatccctcgc

SEQ ID NO: 460208 - DNA, 486 bp, Homo Sapiens
  misc_feature (386)..(386): n is a, c, g, or t
  misc_feature (394)..(394): n is a, c, g, or t
  misc_feature (410)..(410): n is a, c, g, or t
  misc_feature (436)..(436): n is a, c, g, or t
  misc_feature (452)..(452): n is a, c, g, or t
  misc_feature (468)..(468): n is a, c, g, or t
ttttttttaggtatttatagacataagtttaatagacacagggcaccataaaacgtggacagcagggagtcactttcataatggcatctaaaaagtcttggtacagatggcatttcaatgtcaacattaaaagaggaagtttgcatacccaatgaagcaggctatggaataaaagaaacaacaaatggattcattcattcatttgttcactcactcattcattgttgggaatacaaagggaattgatgcacagttcatgccctgcagaaaaatacagggaacacaaactcaaaagagtcgaggaaatgtacattattcaggtgaacacacaaacccgaggaagtctttcccaattaggccattaatgattgcttcctaccttgggncggcttcnttgttttataaggcantctgttcgttttttagggactggccnttttttaacagttttnttttactctggcaggntttgggggctccaggggt

SEQ ID NO: 460209 - DNA, 347 bp, Homo Sapiens
atagagcatttgcagagcctcattgtttgatttcttgtgactattctaagaatgaatgcaatcagattttaaaagtaactaaatatacttcagcacttttttgctttaaactagatcatcttagacttgtttataccttccagatttgattgttttactcccaatgactgcactatatgtatgcataagaccacttttgagcgctgtgttcccccttctgagtagtcctttgacgacgtgttgtgttttctgatgttgacttgagttccatttagtagcatctcttccttccatgtcttgatgttatgcaggaagtacagacgtactttaaatttttgttatgaaat

SEQ ID NO: 460210 - DNA, 541 bp, Homo Sapiens
  misc_feature (22)..(22): n is a, c, g, or t
  misc_feature (40)..(40): n is a, c, g, or t
  misc_feature (46)..(46): n is a, c, g, or t
  misc_feature (87)..(87): n is a, c, g, or t
  misc_feature (112)..(112): n is a, c, g, or t
  misc_feature (149)..(149): n is a, c, g, or t
  misc_feature (177)..(177): n is a, c, g, or t
aattaaaacaacaataattccnctctgcaacttcgaaaancgaatncccaacaatgttaagggttcaatgtcccaggaccaacccanccgttgtctggagccaagaagctgnaattcacttccttgcttccttgtattaggtctctaangctctcatgtggaattgtaatagtccantgttaagtcaaagactctgtttccatgatgaagcaggtattttgctttaaaaggaaacctgggggtcagggagaagactatatggctaagttaaacctcacctcagccagccacatgattcatactgaccattattagtgggaggaatgtagggagcctaagcatccccatcctccaggatttagaacccagccctcctggatgcacacatatctagcactgggctttggttctgataacagggcttctgtcttcatctggaccttcagcccatgtcttattaattctactttatttttgccaacccccatcccaagcacgggagttctgaccccaaggctgaggtccatcctctcactctaat

SEQ ID NO: 460211 - DNA, 425 bp, Homo Sapiens
  misc_feature (342)..(342): n is a, c, g, or t
  misc_feature (347)..(347): n is a, c, g, or t
  misc_feature (366)..(366): n is a, c, g, or t
  misc_feature (414)..(414): n is a, c, g, or t
agttcaagcaatcctaacacatcagcttcccaagtaggtgagactacaggtgcacggcactacacccagctaatttttgtattttctgtaaagacagggtcttgcttaggcttgtctcaaattcctggtctcaagccatcttcctgcctcagcctcttaaaatccacactctaatttaaggattttgcctaggtccagctgtgtgctgggtgttagggaggagaaggggaggtttaatccttcttgttcaaggaagaacataaataaaagtaaccaggggttgttaacttgcagggatagccccgggttagtgatctgtgaatgaactggcattttggggtngacangttcctggctatgagtggnttacatcccctaaacaggtaaagttgctgtgtttatgacagtttcctngtaaaggcatt

SEQ ID NO: 460212 - DNA, 443 bp, Homo Sapiens
  misc_feature (410)..(410): n is a, c, g, or t
ggagctagtgaaggaaacatagggtttatttggggaatcttacagggtggtccagtggccgcgggctggacagaactgcaaccacttataaaaagcatgcagtttacatagcactttcactcagcaccctcccctcagcagcctccacgtggcaaccctcacttcttaagttattgctgtcagatgcatctgccatacagggtcattctcaggggatgcttaagttatttctgtcaggtacatcttccatacactttactaccttgggagtaaagtagtaaggaatacagctttttccttaacctttaccagcttaactcagtgcttagggggccttgggaatgcctgctgtccagcaggtgttcacagggccttgactgggggggctgggcctttattccaacagtgtntggaagggtcacatatggggttccctgaggtga

SEQ ID NO: 460213 - DNA, 535 bp, Homo Sapiens
ttttttttccaagtatattttatttcttggcaaacatggccctttgtgatcgctgtgtttctctcctcccatccattatacaacactaagtgattcatcattctttgaacaaatcaaactgtttcacacctgccatgcatttgtaccgaccgtgctcttccctctactgccgcagccccccaggtagaagtcctttttatacttcaaaaattcccacccaggcaaatttcaagcaccttacccctaccccatcccactctgcccatctctaattgcggctggtctggaacccgcacaaatgtctgtgtaggtttctggcacttcataacaggttatatgacagttgctccagccattctgtgaacccctgaggggaagggccaggtcttgctagtcattttatttctaatgtctatcatctggtagatgtttaataaatgctaagttgaataattctatcttacacatatattgtatttttaattctcttttcatgtcttctgttttagaagcaattctcaatttaaaaacgaca

SEQ ID NO: 460214 - DNA, 496 bp, Homo Sapiens
  misc_feature (15)..(15): n is a, c, g, or t
  misc_feature (40)..(40): n is a, c, g, or t
  misc_feature (63)..(63): n is a, c, g, or t
  misc_feature (467)..(467): n is a, c, g, or t
tccaactcaacccantgtaaaggaaagggaaattcaaaanggaaaattttgaatggatgaaanccccatttgcccagccagtaacatatcctattttagattgtattttgaatatttaatgtttccaatattgttgccctgatcctagtaaattccacagaatgtgtccaagaaaatagtaataatggcacatctctgaaggacactgaaaagaagtgagacatgcactttttttattcactggactaggcaggtgggcttcagcagggttctggggggcgggggagtctggacagctcccaaaagtccaatgctcttaggctagctctctttcttctgcacaacataccctaaagaaaaaacaacacttaaactgagttgtgtgtcattgatttcctttgttaattatctgaacagcttccacgtaatagaaaaagtcaatgttatatatctatttcaacctggcntaccacaggctagggaaaatactaaaagg

SEQ ID NO: 460215 - DNA, 551 bp, Homo Sapiens
  misc_feature (459)..(459): n is a, c, g, or t
  misc_feature (469)..(469): n is a, c, g, or t
  misc_feature (488)..(488): n is a, c, g, or t
  misc_feature (504)..(504): n is a, c, g, or t
atagggttggagtagagagacttggaagctctggctctgtcatttgctatgtgattctaggttggttgtctacttaaatgctttgagcttaaattgcctcatctgtaaaaagggaataatatagagtggctgttaagtgttaaatcaatacatgtaaagtgcctggcacatagcttggcacccagtaactagttagtaaatggtaggaaacttcctatttgtcttgatttgatttatatacaatgattccttcctatgcctccatgaaaaaggatcatcacatcattcccaggctcaccaactcccaaatctctctagattccccacaaataaaatgcacatgaactgtgccctctaaagacacagtccattacgcagcactgcatatcctctgaaacacacctaatgctacaagtgcagcagaagacacaagacatataagcatgctttcagttagancacagaacgntcacacagcaaacatcgtncatcctactaaaatgncagtcctacgacagtcctacatcctgtcttacttttcccaatatgtt

SEQ ID NO: 460216 - DNA, 787 bp, Homo Sapiens
  misc_feature (163)..(163): n is a, c, g, or t
  misc_feature (765)..(765): n is a, c, g, or t
cttcaagtcttcccagtccaaggcagggagaggattctccagtgagtgcacacactatgcgaggagaagcatttctctaagtcaagtgcaaggacttaacttgcgtttgaaaaggaattagagggtcagaaacacccaggttcctccagaaagctccttgganccaacaacttaacaaatcaacttggctggaagttagagtcattatatgaagattgggcttgaagtatatatttttgcatttaaaagtatcacctatcatattttccactcgaaaattgacatagtagcattgaggatactctgatctagaaagccaagtatttgagcaacatctatagagatctacttttctcctatgtctcctaggctttccatgataattaggtaatacatttaagaaggatatttatttctgttttgctctattcaaagaaacggaatgggatagttattctgtaaactaagtttgtatataactttatttgggtttaatttccacaactggtatctgcaaatattgccagcattttagccatattttgggagaacttggtgtttgaggtcccagggaaatgaggtctgatcaaatgaaatgcaagcacaatttctttacagccatttaactttctgttggggaggatgaattaacaaactcacattgtgccagtccgcttaattccgggcactttttctttgtgccggtgtaggtgagtagttacttctctcccttacacaggtgacttgtggaactccaggtcaccntcttccgtgctgggcttttact

SEQ ID NO: 460217 - DNA, 536 bp, Homo Sapiens
  misc_feature (215)..(215): n is a, c, g, or t
ttactgtcattttgtcctttccttgttctgaaacctttaattgctcatcaatatctcagggtaaatcccatcttgcttagccctggcattcagcgccattcccattctgactgctacctacctttccagaaagatttcctgatatcctgaggctagccttctggtgcaggcagactagtgtcttcgctgtccctggcattgcactgacccagccnacacgccctgatgagtctggcaagtgtggtgcacaccttcagagcccaagcttcagagtcagacttgggttcccaagccccaggttgtcacctactggccatgtgaccttagacaagttctctaacctctctaggccttggttgccttctctgtaagatgagcatcacacctccttcacagacttaccgtgtgggtaactctgatgtaagacatgccaagagcctggcataggactggcacacagtaaactcaaaaccagcccaactctctgcgcaagcccctcagcactgccttcaggatgaaggccaaggactttcaag

SEQ ID NO: 460218 - DNA, 471 bp, Homo Sapiens
  misc_feature (358)..(358): n is a, c, g, or t
  misc_feature (387)..(387): n is a, c, g, or t
  misc_feature (401)..(401): n is a, c, g, or t
  misc_feature (410)..(410): n is a, c, g, or t
  misc_feature (426)..(426): n is a, c, g, or t
  misc_feature (446)..(446): n is a, c, g, or t
  misc_feature (456)..(456): n is a, c, g, or t
gtcatattaggagatttctggtcatttttaaagtttggagtctgttttcttttaggttatcggagacatggttacagaatttcattttgatccattatggtcacctggtagctttgtctgatggaggtttgttacagttttcaacagggtaagacttcgccttgtggtgagttggggagcagctgtcattgggaacagcttttgcttttctcattatttaaacactgaagtatttcctgtggtataatggacactgttatctataaagtacctcagttaaattgttgaccaaaattaagtctgttgaggcagaataattttgattaaaggctaatcaaagcccaaatgttgagggttngcctggggacgcacccaaccaagttgttntatgtttccaaagntcttttttnccaagtttgggggccncttcattaagttttaggggnggcccagggngcccttggctttttg

SEQ ID NO: 460219 - DNA, 413 bp, Homo Sapiens
  misc_feature (347)..(347): n is a, c, g, or t
  misc_feature (399)..(399): n is a, c, g, or t
cagtaaacattccttttttattttaaaatacttcacaaagattgtatatgttcatgatgtacagttatgttttgatgtatatatatacattctgtaatggttaccacagtcaaattaacacattgatgaccacccatgctgtacattaaatctccagaacgtgttcaccttacaacttggtttttaacctttgaccaacatttctccattttccctaccttctgggactctaggtaaccaccgttcctccctctgcctcgggggtttaagtttttaatattccacaattaagtgggatcatggaggtatttgcctatggtctggccttattttatggtggtccaccnggggttatttcatggtggacaatgtcaggggtttcctttttagggctggggnaatattctgtttta

SEQ ID NO: 460220 - DNA, 496 bp, Homo Sapiens
  misc_feature (355)..(355): n is a, c, g, or t
  misc_feature (389)..(389): n is a, c, g, or t
  misc_feature (410)..(410): n is a, c, g, or t
  misc_feature (441)..(441): n is a, c, g, or t
  misc_feature (474)..(474): n is a, c, g, or t
  misc_feature (482)..(482): n is a, c, g, or t
aaataaagcagccataatttatttatttatttttgttgggggggcatcaggaaccaatatcaggggtgagacaaatgtattccgaatttctcagtgaaagaacaaaagccacccaacatcaatgctcctcttcaagtctaccagctctgtttttccccaggaactattgatgactgaggagacttgaaaagagacctaaagttccactaagaagagatgggcaaacaatggtttcattgaacaggccaaagatgagaatgtggggaatctgctgtcttcatctgtgaatgtttcctacctgccgcaccctggggactcagggcatagtcactttccagacatgggtttgcctctnccatgtgggagtagggtcaaagtcttccgtcctncctgggccagggtggaagctnccagaagggacatgttttcagtttaagttancaaggttggcttgacattatttccctttggcanggaaaganggtttggcttggtt

SEQ ID NO: 460221 - DNA, 527 bp, Homo Sapiens
  misc_feature (27)..(27): n is a, c, g, or t
  misc_feature (36)..(36): n is a, c, g, or t
  misc_feature (50)..(50): n is a, c, g, or t
  misc_feature (60)..(60): n is a, c, g, or t
  misc_feature (100)..(100): n is a, c, g, or t
  misc_feature (147)..(147): n is a, c, g, or t
ccccctcaaaagcccctaacggagacnactttgccnggtccaaaaccccnaaaaaatgtnaaaatccttgtgaatccagagaaaaatggcctttgcctcnactactcctagcctcggttagccagagtaccgcagccccttggcagntgtgacacacacactctgaatgaagaaatgcggctgacttggatgttggagtttcctagagatttccagttttaaaatcattgttttatgaatcctttttattcctagttagcctgaggatattttcaaatttttgtcaaaattcagtacattttagaggaaagtttaaaattagcaacaggattcaaactaccatgttttataacatggcttttaagaaacgatgaaccaaaacagaaaaatgggcaaagtggggactaaaaacggcttgctggccaaatagctggtagcagaagaggggatcagctgacaaagagggcacaagaaaataaccctcctgtttttcatcctgtttcccagacagctcgactatagctaag

SEQ ID NO: 460222 - DNA, 736 bp, Homo Sapiens
  misc_feature (666)..(666): n is a, c, g, or t
  misc_feature (685)..(685): n is a, c, g, or t
  misc_feature (696)..(696): n is a, c, g, or t
  misc_feature (722)..(722): n is a, c, g, or t
ggatcagtgctattgtgtgttctcagtttaagatagcagatcatctcagcagtaagcacaccaacagaactgagttccagaaaggaagcagtttctggtgctttgcatatgtccaaatccatgcaagtgggagaaagttccagtgcacacttcccatgcttctgagtctaggcgttgtggtgaatatgcaggaatcattcatgagacagaatgtattttgttgtatgacagaaggcttttccaagcaaactgcggtgagcgtagtgttgaatatgttgcatgtccatgttaggaaaacagaatccagtcatcagctaatacaaatgatttcccagagcagtgtttgtttcaagcttctgtcaaatagtttgggcttttctgcagggtctctgtgatttccccacctatgtacttttctgtgttaactcacttattatggtataactcaggaacaggtctcaggatggagagaagcatacaacatgagcaaagctttttctcgtgctctgaagggtcttgagaggggagtgggatgccttctgtgaggaattttatcgcagtgaagctcaagtgggtaccccaactgcgttgtaattaacatggattattgggccatgtttttggactctcattttctacaagggctggcagtggggcccacccctnggggctgggccccttaacntgtatgttatntggggagggaattttgggggattgangggggttttcccct

SEQ ID NO: 460223 - DNA, 735 bp, Homo Sapiens
tccaacaacaaaagtgaattatgggtttctctcatagaaaaagctacatgaaagtcatgggaggatatgattttccaggatccaactccaatattgatcttcatgcactgactggctggataccagaaagaattgctatgcattcagatagccaaactttcagtaaggataattctttcagaatgctttatcaaagatttcacaaaggagatgtcctcatcactgcgtcaactggaatgatgacagaagctgaaggagagaagtggggtctggttcccacacacgcatatgctgttttggatattagagagttcaaggggctgcgatttatccagttgaaaaatccttggagtcatttacgttggaaaggaagatacagtgaaaatgatgtaaaaaactggactccagagttgcaaaagtatttaaactttgatccccgaacagctcagaaaatagacaacggaatattttggatttcctgggatgatctctgccagtattatgatgtgatttatttgagttggaatccaggtctttttaaagaatcaacatgtattcacagtacttgggatgctaagcaaggacctgtgaaagatgcctatagcctggccaacaacccccagtacaaactggaggtgcagtgtccacaggggggtgctgcagtttgggttttgcttagtagacacataacagacaaggatgattttgcgaataatcgagaatttatcacaatgg

SEQ ID NO: 460224 - DNA, 280 bp, Homo Sapiens
  misc_feature (41)..(41): n is a, c, g, or t
tgtagaaacagggtctcccctgtgttgcctaggctcttccnactctgctttggagcagagacacctgacagtgaaggaccaaaatggcttccatatacatcaggggtgaagtgactgacagtggcccttgcctgggagaggctgaatatacaaacagacaatggctagaccatgtagaaaaacagaactctgacgcacaatagcagcaaccagcacaggaagccagcctactatccacaagtcagacttgtaggaagtcagaccactatctttaccaacc

SEQ ID NO: 460225 - DNA, 521 bp, Homo Sapiens
cacggaccacccaaggcctctgcttcccgccgccaccctcctcgctgccattctctgggctggaatgtgaagcctcagtcactctaaatgaagaattttcttttgaatgttttgtatgtaaaatagcaagtggctatttttaaagttaagtttgtataaatagttagatattctagatttacattaaattgtaaaataaatggacttattgaagcatatcttgatttttaagcttatcttgattttcaaacatgcatagctatttttatcactctaatcagtaaggctactatctagactcgaatgctttcatacaagtgattttcaaaaattagtcaatataaattgatgtcagtgcagggcccgggcccgcccccagatacactagtttctaggtctggggccagcctagtaattgttactaggcacacaggtgatgctgactcgatggcctgagacacaccccttgagaagaagctgctctggggagacgagggtatgagtggaaagaggatgggcga

SEQ ID NO: 460226 - DNA, 393 bp, Homo Sapiens
  misc_feature (39)..(39): n is a, c, g, or t
  misc_feature (45)..(45): n is a, c, g, or t
  misc_feature (56)..(56): n is a, c, g, or t
  misc_feature (88)..(88): n is a, c, g, or t
  misc_feature (117)..(117): n is a, c, g, or t
  misc_feature (119)..(119): n is a, c, g, or t
  misc_feature (123)..(123): n is a, c, g, or t
  misc_feature (190)..(190): n is a, c, g, or t
aaagacacctcccatcaaactccatcccaatcctgcggncaaagnagagtgcaagnagtcatctccctcaccagtccccaagcaaaanagctccgcaaacacgtggtcaagggtctnantgtnaaagggtccctataggcggtggtttctactgtcctggcagcacgagcaggcagcagccctgtgcgtnagaggcacgtgttcctggccatgtgtggtgttaatgcacctgctctttcaacccagccaggaggtgtcactgacctggcctacggaggcctgaaagcccagatctgggagcttggtcccatcggtgggacctgggtccccaggtactggccttgctgacagagagacacccctctggtgaggggcaggccagaggcaagactc

SEQ ID NO: 460227 - DNA, 466 bp, Homo Sapiens
  misc_feature (37)..(37): n is a, c, g, or t
  misc_feature (58)..(58): n is a, c, g, or t
  misc_feature (72)..(72): n is a, c, g, or t
  misc_feature (81)..(81): n is a, c, g, or t
  misc_feature (117)..(117): n is a, c, g, or t
  misc_feature (448)..(448): n is a, c, g, or t
ccccactgtactcccaaccccgggtgaacagagcaanacctgtcctcaaaaaaacaangaaaacaaaacaangcactgtanttaacagctaataaatgcccctcctaggtacccacngcaagctgccagcacagagattctgacgtggcgctgcacccatcattatttggttacaagtatcttcacgtttccttttttctctttaacccatgaattactgtggagtcatgggtgtgtcttttagcttctagaggcattctttagcttgttatcattggttgtttttccagtttcatcagtgagtgagtgagttctgaacagcaggatcctttggaatgtaaggtttcttatggcccagttcatggttagtgtgtggatattccacacatgagaggagagtgtttctccactgggcaaggagttctgtacttaccatcagatcacgatnggggggctgtattatgac

SEQ ID NO: 460228 - DNA, 128 bp, Homo Sapiens
ttaaacacagtttttagggaagattccaactcaaacaattttaaatagtagaaaataaaccctgaagcagtgtgcattcattagtactgtgtttgcctgtatttaattaaaacctgattgccattggc

SEQ ID NO: 460229 - DNA, 284 bp, Homo Sapiens
gaaatgtctccttcgaaccctggcagaagtggtatcacgacatatacccggtatttctggttttccctgtgagctttcaggatcctctgggcaatggcatcgcctatcttgttgaacacaactttgtcatcagcacagcttatgaaaaactggttttcgatatagatatagtgcctgctgttctctatcacatggacgtaagcggcgtggatggactcttcatggtactttataccagcagaccaatcagcagcagagcggagcaactgtacgttagcatggac

SEQ ID NO: 460230 - DNA, 357 bp, Homo Sapiens
  misc_feature (259)..(259): n is a, c, g, or t
acggaatttgaatatgtgttttactcaacagagtacatgctaccaacaagaatgcagccccctttttacaagttaggcagaaggaattataaagtcttgctgatgtttacagtccttacatcaatgtgactgcagccctccccagtcattccaaaaggtccttgggttggatacgagaatgcgtcaggcctggctttggctatgacatccccaggaagtcactgtgtgcagtgtggtctccagggtggaagtctttgangctgccaatgaatatctcttaaagtccaaacctccatggggcactatgggcctctttgggtcccaacaggaagggcagtagggtttttctttcaggac

SEQ ID NO: 460231 - DNA, 525 bp, Homo Sapiens
  misc_feature (41)..(41): n is a, c, g, or t
  misc_feature (81)..(81): n is a, c, g, or t
  misc_feature (87)..(87): n is a, c, g, or t
  misc_feature (121)..(121): n is a, c, g, or t
gcgttcatacttatttcatacataaaacccccagagacagntttaaaatcctaccattcaaaggcttcatgcctgtctccnactctncccccttggccgtgcccaacagttgcatgtgccnactcaggatgctcaaaggcattcactcccagaaggttccccgggactgctcaaggaagaacaaatgtgtcctttcctacagcatgaagcattgccctcctccttgctgccctcccagggagggaggacagcccaggaaaataaagggaatgtctttgggagccgtctgaggaaagaaacaggagccccaaattttggtaaagcaaaaccactctgctctctccctctctcccacaaaaggggatattgaggatgcctgagcccttcattcttactcacatctgcttcattctctgcgtccacgccacttaaagttacacaacgaggacctgagaagaaagctggcttcacagctggggttaattctagaaggaaactaggagaagcaaacatccacaaaatacc

SEQ ID NO: 460232 - DNA, 579 bp, Homo Sapiens
  misc_feature (232)..(257): n is a, c, g, or t
  misc_feature (536)..(536): n is a, c, g, or t
  misc_feature (569)..(569): n is a, c, g, or t
gttgggcttttcttaacaggttaacagtttgtgctggttataagaaattaaccttcttttctttttgccaagggttgcatgtgaattatacctttcttaatatttgattaaataatgcagtcagctaagagccaacaaaaccccatatccagatagttagctgtgagccagcactcagctgtgtcagatttgattaatattgtattaatctcatggatggttctcaaaggtnnnnnnnnnnnnnnnnnnnnnnnnnnctagctgtgggattctgtgtagttcttcactatctgttccagggctagtcggaggatcataaggcaagctcagacctgcccccagttcagtacttgaccacatcccagggtttatggtgtctgtctatgggccacagccaaccagaatgagtggggtcatcttattaaccttttctggaaggttccatggagggacatgttttaggaatgctggcacctttcagccagctctgctcttgatcttttgcagatcttttaagttgttcactgttttctacnggtaggacaatttggattggtggtttagatcancccttagttc

SEQ ID NO: 460233 - DNA, 468 bp, Homo Sapiens
  misc_feature (184)..(211): n is a, c, g, or t
  misc_feature (352)..(352): n is a, c, g, or t
gcggccgcccgggcaggtacagggtttttacctgtcacattgcattctattgccttctttgaagaagtggaccttttaaagtgtttcagctaagggaagacatttcttttctttttacataactgccttgaacctgtgagtaaatattgaggctttgtgttgtaattcttcagttggttgtgtnnnnnnnnnnnnnnnnnnnnnnnnnnnnctgattagctttgtgtttggtttacatttaaagcattgctgttatgtctgtttaagaaaagtattttgaagtttacatttttatttatgaagtttaaaacagtatttattttgtaattatgatttgggttggggaaggggngggctacattataaacgcttattgtaagaatactggagaacttttcgtaaagcagtaccttgccaaagagataagagcctctttgatgtgggtttaaaaaaagcatctatttttat

SEQ ID NO: 460234 - DNA, 470 bp, Homo Sapiens
  misc_feature (295)..(348): n is a, c, g, or t
tttattcaggaacttggtatcttcatttaatgatatagtgcacacagggtttttccataggcatgattggcagcagagtcttcagccctgaacagattttgcacaggtgttctataatttattaacttcatctcctaccaccagcactgtgataagcaaccttgttttccctatctttatttcttaggatgaattccaaggcttctgataaatagtgattttcagaaaggccatgccaggcagtgtgtgagagcctgattcccaaaaccccatggccaggcccggctgggaggtnnnnnnnnnnnnnnnnnnnnnnnnnnnnnnnnnnnnnnnnnnnnnnnnnnnnnnacagtagtgggccacttccacagagggcttgagggacaaatgcgttaaattccgcaggacaggcgctggaggaccagttttttgggcgccgcgggttgcacctgggggtttgttgctgtggc

SEQ ID NO: 460235 - DNA, 515 bp, Homo Sapiens
aatctctattttataaatgaaaaaactaaggccataaatttaagaaatttgtcagtgtctcaaagctaggaaatggccatctaatcccagagcctatgctttaggtcactatgatatatactactcctgtatcctcaagtaatgtatcatttagtaacactaagcaccctgcttagttttcatggatactgccaaattgccctatctcaagctttatacttgcaccatttaaagttttccacactgttggcaatatcagaagtgataaggctttgaaatgttcgccactttgataaagaggaaatgattgtttgttactgttatatacatgtatttttatcagagatgggttatgtacttttccacgtttgatagttggttgtatttctttagtgaattgatttttcttttcctttgcccatttttctgtttgggatgtttgactttcttcttaatttgtaagggtatcccatgtagtaaccaaaatcccttttttaaaaaatttttaaagggaa

SEQ ID NO: 460236 - DNA, 518 bp, Homo Sapiens
  misc_feature (127)..(179): n is a, c, g, or t
gcctgggcccatcttccggcggaaggaaggtccccggcccccaccaaatccagggaggaggctgctctcctcctctgggctccagcagggagaggagttattgccgaggcttggggggtctgggctnnnnnnnnnnnnnnnnnnnnnnnnnnnnnnnnnnnnnnnnnnnnnnnnnnnnncagtggtagggacccggccccctgtcccccttgaagctccggggccggcgaaagtgaaacaggccccggcgcctcttcttctggaggtggaggcagcggtgcctccgagagtcctggccgcacggtcctcagagtccgggggtagctagaactttcctccatgacccttcggctgaagaagtcctccagcccttcatccaggcgggtggccatcccattctcctgacgagtcccaggtgctggcatactgggtcgaccaggtcctggaggtgtggtcctgggggggcggggcctcccttgtgtttgatgccttagtttgtaaccatgagtgggcagctc

SEQ ID NO: 460237 - DNA, 500 bp, Homo Sapiens
  misc_feature (12)..(12): n is a, c, g, or t
  misc_feature (26)..(26): n is a, c, g, or t
  misc_feature (148)..(212): n is a, c, g, or t
acaatggcaatnggatacagcaatgngagcgaaagggtcattcaactacatgcagccaatctggaacaatcctttacaaacgtgttgcagcaacagaagcctgaccaaaataagagtacatacttgtttcactaatctatacttgttnnnnnnnnnnnnnnnnnnnnnnnnnnnnnnnnnnnnnnnnnnnnnnnnnnnnnnnnnnnnnnnnntgagaagatgggatagctgtgccaatttcctcttctgatttcaccttagttgagtcataaggctgcactcagatgcagatttggctgggtgggaaggtctgaggtaccctcacgtgacctcattctggtgatgctcagttctttccccaggtggcctagaccaccttccttacacggcagtctgggggcagcatttcaagagagtgaaagtagaagctgcaaagttttaaaactaagggttgtaactatcaagagttgcaaggcccagcctcaggagcttcatcgtgt

SEQ ID NO: 460238 - DNA, 405 bp, Homo Sapiens
acacatagaagtttttattgttaaagtctggcctcttccctggagctgtcagggagaaggtagatgccaaaaccagctggcccagcttccttccgtgattggctcatggagcaaacattccccttgtgcacttttcaacatctacacactcatctttaaaatggagtgttgtaaaggtcaagggcacaaagcgttgacaagggcgtgggaacaactgaaactctactaatgcttctgcacagctgctgggaagtaaattggtacaacctctttgggaaaattgacagtatatacttaaaactgattcatgttgaattcccctatgttacgggcccagcaagtcctctggctattttatggtaattaaaccccgggtttttttggggatgtttcacccggagggcc

SEQ ID NO: 460239 - DNA, 389 bp, Homo Sapiens
  misc_feature (36)..(36): n is a, c, g, or t
ctgaatccacgtgtcatgagtggcaaaagctaatgntcccacagtcacaaaaatcaagtcctattttacctttctttcagctgctgcactcaggcacagctagcactttttccttgctttcacatctggggctgctatgcttcgactatctgcttcccaaaccctgtgctggaggcacttctgggcaagaccctgagagtggttttcatgggacggtgtgtgctcttcaaaggaggtacacactcctctgtggctttcaaattctaatttagaatgggaggtcagaggatgcccttcagccttagatctaggtagtgttctcaaaactcccttttagcagggacccaagcgttatagttacagggaaattttactgactaatgtaattg

SEQ ID NO: 460240 - DNA, 431 bp, Homo Sapiens
  misc_feature (26)..(26): n is a, c, g, or t
  misc_feature (125)..(125): n is a, c, g, or t
  misc_feature (131)..(131): n is a, c, g, or t
  misc_feature (237)..(237): n is a, c, g, or t
gaaggcccaacttttaaccccttacnttggtaataaaccaatggtggatgctacggaccacattcagtctgttcataaaacatggactgatgggtctgctccaggccacatttgttttttaaccngtaacntggctaggcttccatttataagtcttagcattatttcctttgtgaagtactatgtaacagatgattgtttgctagattttgttttctacaatcaaaatgttgaccngcaaagcagtgtaggattttctctcctcaagagcgtgtattattatctagtagaaaaagcattcccaaagacttggtccatgcagataaggataatgaaattgctcactctaatcctttttctaaatacagtgtttttcaagctggatgtaaattagagtgggtggatattgattaaattatttgatttatatg

SEQ ID NO: 460241 - DNA, 399 bp, Homo Sapiens
  misc_feature (134)..(279): n is a, c, g, or t
ccgaacctgtttccaccgtagaaaaagtgtttcctgaaagtcccaccccatgttgtagtaccatatccagtatcctcactcccttttattgttgtgtaagtattcccattcctatggacatatcactgtttttnnnnnnnnnnnnnnnnnnnnnnnnnnnnnnnnnnnnnnnnnnnnnnnnnnnnnnnnnnnnnnnnnnnnnnnnnnnnnnnnnnnnnnnnnnnnnnnnnnnnnnnnnnnnnnnnnnnnnnnnnnnnnnnnnnnnnnnnnnnnnnnnnnttcaattggtttaactagaaaaacagcaatttcatatggttttacctaataagatgaggacagggagactttttgatgatggcattcactgatgtctctcttgtgcttagatcagagttg

SEQ ID NO: 460242 - DNA, 564 bp, Homo Sapiens
  misc_feature (24)..(24): n is a, c, g, or t
  misc_feature (47)..(47): n is a, c, g, or t
  misc_feature (65)..(65): n is a, c, g, or t
  misc_feature (113)..(113): n is a, c, g, or t
acatagtgttttgcatgcatgacntttagggtaagtccgttgcaaanggcagggataaatacatnttcacctaaaggcttatttgtatattgcacatgcaaaggaagatgcangcaaggacaaacaaacgaaaaagtacaactttaaagaccctcccttattccttccgattttgctgaacaggaaactactgatcagtattttttcttagttataatacacaatagctactcagtcagccactattgcatattttaaatgtgggtcattagtctgaattactataataaggaagacaaaaaacacaaaacaattagacagaaaatcatctaaacaatatgaaataagcctgggcttttttcatatattatcattgcttctaaatataatctcttaggaaatttatctttttatttgaaaactttagaatagacagatcctgaaaattttaatctctgtaaaatgtatataaattgtaataatcaatctagttgttaaaatagttcagtgcttttagttacatattactagagttattgcacaggcctcttatatactatcaag

SEQ ID NO: 460243 - DNA, 527 bp, Homo Sapiens
  misc_feature (57)..(57): n is a, c, g, or t
  misc_feature (108)..(108): n is a, c, g, or t
  misc_feature (137)..(137): n is a, c, g, or t
  misc_feature (159)..(167): n is a, c, g, or t
  misc_feature (171)..(171): n is a, c, g, or t
ttgccccagtgtggtggtgtgtgccctgtagttcccacgacctcgggaggctgaganccggagaactgccttgacccccgggaggcagaggttgcagtgagcccgagntcacgcccactgcactcccaccctaggcnacagagtgagactcccatctcnnnnnnnnncaanaaagaaaggatgcaattatagtatactaatggcttagctgtgaacactgtacagtaataatagtgtaaatattggaagataatttaagaaagttataattgtgatataaatacactggaaaaatgcatagaaggaaagagtgtatggcataagagaagtaaatcactatcttccttagaaggaataaataacatcaaaaagtgaaaaattataaatagcagtattaccgtattacaaaaaatagggaggtaaaacaccagaagaaaaggccggaagagttaagtgttgtccctaggggctagaaagtggcagaagagagggtaggacaggcaactgatgattttgtactataaacc

SEQ ID NO: 460244 - DNA, 515 bp, Homo Sapiens
agcttcggtctcataggacagttcaggtgtcctggcttgcaggcaacatgccagcctgtggggctcgggaactgtctccctctgccctttatctgccaccccccgggcctggagaacacccagaagagacatgagccacgtccatctggaagaactacttcacgtggccccacctgggcatgggggaatgggaaatgtcatctctgggtgagccacagctctgtacttgaaaggacaagcaagagggcaggaagtgtggctgacagtcaccattggcacaaccttttacacaccttattctcctttgctttacactcttcacatgtactaaaaggagccgctggtgtggccctgaatgagccacctacccgtgcctcagatgacactggtggccactctgtaatgactcagacctttctagtgtaggatggcttgagcccgggaggccgaggctgagtgagcattgatggccccaagcactccagtttgggtgacagagcgagatgctgtctcca

SEQ ID NO: 460245 - DNA, 432 bp, Homo Sapiens
  misc_feature (17)..(17): n is a, c, g, or t
  misc_feature (266)..(266): n is a, c, g, or t
  misc_feature (311)..(311): n is a, c, g, or t
acaaagcatcaattggnaggtaactgtgtatatttccaagtaatttttccttttacaatgtatagagaactcttctactttcaataatttatttagatattattagatatttgaaaggccaaggaataaagaaaattaaaattaaagccttaggaaacgttaccgattcaagaccctaaattaagatacagctggcttggcaattataattacattcaggagtgaaagaggaatttgactcataaatagaaaagcagcttccaccngggcttccaggtacgggctaatcccaaaacacaggtgcctggggnggatcctcagccaccccctttcattcaaaccccaacccttgtgggactgcctgctgtgtttcacagaatgtttctttactcaaaagggacctctcatccttaaaggccattattctttctt

SEQ ID NO: 460246 - DNA, 494 bp, Homo Sapiens
  misc_feature (21)..(21): n is a, c, g, or t
  misc_feature (29)..(29): n is a, c, g, or t
  misc_feature (54)..(54): n is a, c, g, or t
tcacttcctgccttttggganatcccacngctgcatttccccggaaacgctganccactgtccccaattggagatttaggaattgggttatgtccagcacccacccccaacatttcccccaggatgttgaaggcccagcccacagcccctgcccatccccacagagacagcccccatggcagagcagcaaaagaggaccagtgctcccaccttggtgaaatacaagatgactggggtgaaggagatgaagatcaaattgaagaaacccaaggtggagacaaagtgtgcagcttccccaaagttggcacttccaagaaacattttaaacaagaccttatataatgcagatgtagaggctgagcccaccgcaaatgccactcctatgatggaatcagcgtggaaattatctgcatatgccatcatgacaatgccggtaattgccattattgcagcaactatcctcactcccatgaacctgtctttcagcacaatcc

SEQ ID NO: 460247 - DNA, 507 bp, Homo Sapiens
ttttttttaaggacaaatgtgttttaataaaaaaatccattatgattatttacaccaattccttgataagcatataaatgtaaacttttattgttggcattatttcacatatgatttatccaaattcagagttaatactgtcgtttgagtgtacaggtagtgagaaaattttgttatattcacagaatatacatacacgtgcattcaaaatatgtccctctctaagccagtggtatagacactgtcccattggctctgcctctgccccgcaggtgttatgctgggatcagtcacatcatccacatgctcctcactcttcttttccttcagggctgttgatgaacctcagggtgatttcatcccattcctcagggcaacagcatcagcaggaaacccaatgcaggttgatggatggtagcagcccgggggacaaccttggaatttcacctcctgctttaggagatccacagctgcatttccaggaacgctgagcactgtcccaatgga

SEQ ID NO: 460248 - DNA, 529 bp, Homo Sapiens
  misc_feature (428)..(428): n is a, c, g, or t
  misc_feature (433)..(433): n is a, c, g, or t
  misc_feature (440)..(440): n is a, c, g, or t
  misc_feature (449)..(449): n is a, c, g, or t
  misc_feature (464)..(464): n is a, c, g, or t
  misc_feature (474)..(474): n is a, c, g, or t
  misc_feature (486)..(486): n is a, c, g, or t
  misc_feature (491)..(491): n is a, c, g, or t
  misc_feature (496)..(496): n is a, c, g, or t
  misc_feature (508)..(508): n is a, c, g, or t
acttatttttgttattttaattttctatttttccatttataaatagataaatattccacaaacaatttcttaaagaggaataattagaaatcaacttatgtgtgctgctggggtgtgtataatgcagctacaagttgggatcctctttgttctgaagttgaagtctcttgctagaagtgtccagggtacagggaagacagtaggcagtgaggacccagggtcaccacacgttcttgggtattattacctctcaaatctcaacagaggaatgacagatgtcatattgtccttggcacttttttttacttcattggattgaatgtattaaattaggataatcaaattcataaaggatggaaatcaatccatatttgttggggataactaaactattgggctttcataccctggggttccctttactcccnttccnttcccanttcttaacnttgatttcaagtttnccatcccttncccacttcaggnccagntgccncaggtaggaggntgacaactttccccaggttcc

SEQ ID NO: 460249 - DNA, 514 bp, Homo Sapiens
aggtgttaaaattatttttaattcctttttcacaaagatgatggtgagggctaacctaagaaaatatgaaacatttttatagcaatgtaaatagagtaaagaccaaggtgaaaataaatggtgcaattattcttgcagtgaaaattatacttggctatagtgccagaattgcttgctacaagagattttttaaattttcttttcattcattaattcatccatcaattcaatgccacaaggaaatgagttttcattgcatggaaagtcggccaagacattaggtatatgagatcccagaatttaacaacaggcatgccaattaagacctgggagtctaccacctatctagaaatattaaagtttagcaagcagcttagatggccatttttgaggattacatttttctttctctttattttagtaaaggatttgattccataacagtttaaatatttatagcaaaatattgcccaagattggtttaacatacctcttttttatcacagatatccct

SEQ ID NO: 460250 - DNA, 144 bp, Homo Sapiens
gaatcggaaagccaagatcttaccatcaggtggctagaaccctggacaggtaggagtcagagacaggcgactctttggaggagggtctgaggaggtggaggtgatgtacagattctgggacatggtttgggaatctctttatag

SEQ ID NO: 460251 - DNA, 672 bp, Homo Sapiens
ataatcctgagtgcgggaggcgtctgagcacacatctgtttctacaccccgcccataatgctgagtgccgcaggtgcctgagcacacatctgtttctacacccggcttataatccttagtgcagcaggtgcctgagcacacatctgtttctacacccggcccatagttcttcacattgtgagtatatgaatacggggaaatagaaccccctccccaccacctacacacatgctgttttaccttccaagaataggacatgtgcaaaaactaggcttccagatcgtgaggctggggagcattctaggtaccatttattatctactgcgtttcggtcagtagctgttgtaggtacccgcatcagcccttgttcctaaggatgtgtggagcccaggctgtactctttgacattccacaggtcagtctgcgtgaaagccctttgtggggagtttccaagccagtgtcgtttttgcactggtttccacctcactgtcagatattgttcttttgatatgcagtttccagccctccaatgaggtccccagcacagatctcagggttgtggctgggaataagcccagctgagcaggtggggatctcagccagcctcccagactgcacctcttctattgctctcctctgtccaccgttccaggcagcagcactcccacctgg

SEQ ID NO: 460252 - DNA, 418 bp, Homo Sapiens
agaaatcctgtccacaattgcccagcccacaaagcacacccataaactaccttaagtgccatatgaaatagcaaagtgaggtcccacccatgggattatcagttacacaacaggacaaggagaaaacctctctgaacccatttggaagagctggcagaggagcccaggacctatgacaggagaaccaccctgagatttattcactcacatataagctccatgagggcagtgagctttgctggtttccatctgcactgtagccccagctcctagaatagtgcctgatacaaaggaagccattgctaagtatttattcaatgaatggaagtttggatggatggattcatttaactcatatcaagtaactgcagtgggtgcctgtagcagagaagttgtagcagaggagtaggatagtgat

SEQ ID NO: 460253 - DNA, 392 bp, Homo Sapiens
  misc_feature (39)..(39): n is a, c, g, or t
ccgtgaaaaccctggcgtccctccgtggaagtgcaagantctgggcaggactaaatctgttccttctttcttctctcctttcctctactgcaatgcatgcagccattacaacagtttctatctcaatatacacatattttctagggcagaaagatagtagtgggatcccatattggcaggaactatcagggaagcaacaggatgtaaattccatcatcctcacctggtgtcctttgcttttccaacccgtttgtcacttaaactgctccacaccttccccagtgtcccaaagccacacatgataggctgcaaatcagcacacagccccgggaaaatctttggcccatgagcgtgaaattttttaaaatatacatccccactatcttgaagtg

SEQ ID NO: 460254 - DNA, 542 bp, Homo Sapiens
  misc_feature (99)..(254): n is a, c, g, or t
gcaggagggttaggcctgcggcaggactgcggtgggactggggacagcgacacagaccacagacgcagacgatgtatgcacacggttgggcccttggtnnnnnnnnnnnnnnnnnnnnnnnnnnnnnnnnnnnnnnnnnnnnnnnnnnnnnnnnnnnnnnnnnnnnnnnnnnnnnnnnnnnnnnnnnnnnnnnnnnnnnnnnnnnnnnnnnnnnnnnnnnnnnnnnnnnnnnnnnnnnnnnnnnnnnnnnnnnnccgggtgaggctgcgggcctgggcggctgctggtgagcatggagccgacttcccagagcaggcctggggtacgctgggctgcttcccagggccaaatcccagaactggcccaaggaccctggaagtcccctctctcccaccaggtcccctaagctccccaaggccttgaggtggctggtccaggcttgaggtgtgggcccctcctgctgtcctcaccaagccaacacaaacaaagtggcagaagtcatagaccaaataggagctatttattcggttcacagttgtgtg

SEQ ID NO: 460255 - DNA, 403 bp, Homo Sapiens
  misc_feature (208)..(208): n is a, c, g, or t
  misc_feature (285)..(285): n is a, c, g, or t
  misc_feature (379)..(379): n is a, c, g, or t
ataataaaaagattttgttttatttaatgtaaccttcaagaatttcaacacacaaaaatgcgggggtgggggtgttcacaattttgataagcacagttgtaaatagaaacattcattcatttctcataagattataaatatttgatactggaactgtaaaatgcacatgttttataaactaaaacaacaaaggaaaacaaaaaacagnaaaccaactttgacttcctgctaaaaaggcatgtcatttcattgagtttcctaaggcaggcagatgggttattcagnacttttaaattacaacttttgtttttatactttccttttttaaaagggtttacactattatggtacaacgtaaaactattactggcaatggaantaagggggtttaggggcaaggggc

SEQ ID NO: 460256 - DNA, 525 bp, Homo Sapiens
  misc_feature (30)..(30): n is a, c, g, or t
  misc_feature (37)..(37): n is a, c, g, or t
  misc_feature (55)..(55): n is a, c, g, or t
  misc_feature (70)..(70): n is a, c, g, or t
  misc_feature (88)..(88): n is a, c, g, or t
  misc_feature (172)..(229): n is a, c, g, or t
  misc_feature (250)..(267): n is a, c, g, or t
caaaaagggaaaccatgcctcctaactggnaaggccnccccggggtacccctganccctcttagtggttnaagaaacacagtgttttnattaagctgggccatgggggtgggtgccctgtaagtccccagcctactcaggaaggctgaaagcaggagaatccccttgaaccnnnnnnnnnnnnnnnnnnnnnnnnnnnnnnnnnnnnnnnnnnnnnnnnnnnnnnnnnnaaagagtgagactctgtctcnnnnnnnnnnnnnnnnnngcaagaacacagtgtttgatgctagctgggcatgagttcaggccgcagctctgggtctcttaagctgtttgatcttgggcaagtcacttaatgtctccgagcctcagtttcttcatctatgaggtggggtgacaacagcaacccccagttggtgaggctgctgggtagatcaaatgaggggatgcacatgatgggtccagcccatgacctggttcagagcgagtgcccggcaaatcatagcagccaatactaggaagc

SEQ ID NO: 460257 - DNA, 421 bp, Homo Sapiens
  misc_feature (34)..(34): n is a, c, g, or t
  misc_feature (46)..(46): n is a, c, g, or t
  misc_feature (314)..(314): n is a, c, g, or t
  misc_feature (411)..(411): n is a, c, g, or t
gtgaaaggtaagatgcctcctctgcgaaagcctncctaacctcccnagaatctgtgctctgactgtgacaactctcacttgaggcctgtcacaaagtatgtgagtggcccagggtggagacctcatctgtccgggctctatgctccattgctcctgcctggccccatcagtccgacgctcatgtaaccatacatgtactgaagcttaactccatcttatctctgtgatgtgactgccagcgactcaagtgcagggaggttgtccacgtctcctccacgaccacgtgctaaaccccagcaacagtgcctatgganattttgcagtgcacagcctgtccaccatgatatcaagtttaaccctgggtacaccacagctagcttgcaccgcatttgcttaataactgtaatcgtnacagatgcta

SEQ ID NO: 460258 - DNA, 414 bp, Homo Sapiens
  misc_feature (241)..(241): n is a, c, g, or t
  misc_feature (373)..(373): n is a, c, g, or t
  misc_feature (377)..(378): n is a, c, g, or t
tcttggtagccaggtgagctgggttccgcccggaagattctgggtcccgggggctcccgtcataagaaaatccagtccccatactgggccactagggcctgcagcccactggcattgaacacagtctcgaaggacggtatgttgtagctggcccagtaggtcttctggtagagctccgaggtccttgtcagccaccaccaccatgccggggatctgctccaggatggtaagcacccggctnccggggctgggcccacccgggatgaacgccttgtagtccacgatcatccactggttgttatacgtgccgctgttgaacctcttgaagatgtctgcccaggtggccccatccgaggccaggcggttggccacnatgnngcgtacccactccagcacacagcccctgggccgcac

SEQ ID NO: 460259 - DNA, 437 bp, Homo Sapiens
  misc_feature (92)..(92): n is a, c, g, or t
cccccaacctccggcaattaaaaataaagggcaaccacaatttcctcaaactacccagcctgggacccttaaaggattagcccatgttttcnccctttagatcatacaaaaagcaagtcccatcctgtaggtaggaacatgttctctactttcactgcttccctagtttaggtttctatatctttctatctgaactactgtgatagaattttggtatttactccttccctatccaaatccatttgactcacagtggtcagcttgattttcttgtcactccttggattgaaaatcttccttacctgaataagtactgattcttcagtttgacattcagccttaacctacctcaccaactttatttttgtctgttctcctatatatatattaatagcttattttttcttaagctacccctatgctttcccatcattaag

SEQ ID NO: 460260 - DNA, 508 bp, Homo Sapiens
  misc_feature (16)..(16): n is a, c, g, or t
  misc_feature (90)..(90): n is a, c, g, or t
  misc_feature (95)..(95): n is a, c, g, or t
ggccaaacaatcccancccaaaaggtttaaaaataaatgtccaaataatttttaaaaaccaaacctatattttaatatgtaataataaancctgnaagtccactgcccttggataagtgttaacactgcatcccaatatttttatgaaggacattcattccttaaggcagaaaaattgaatttgacatgtaatgacttggttccttacatcccaaggatcaaactaggagtagactggagcagacagattccttgctaacaaggatttacctgtggtgacagtttcattcttagagtatgttacgtaagagacatacatttgagagaacatataaatatgaatcttaagacacacaaatatgattttttaacgattggtcaatgagactaggcattctattatgtgaaatgagtcccatgacaaacgccaacatactctttctgacatggtacataaaaagtataaaatatcaaagaactacttttttggggtagacattagattcta

SEQ ID NO: 460261 - DNA, 448 bp, Homo Sapiens
  misc_feature (378)..(378): n is a, c, g, or t
  misc_feature (398)..(398): n is a, c, g, or t
  misc_feature (425)..(425): n is a, c, g, or t
cttgcatagtaatcagttttattttctccaggcttaccttttttaagtagaagaatccgtgtttcattgaaggctattaggcaaactgaacatttaaatgtcatccatgtgagggctctagatcatggtaggtgattgatacaaatacgatccataaaaaaacttttatcttttgctggtattttcttacaaaatacttggatctgtaacatttgagtacttacagtgtactagcactgtgctaagtattcttcccttatctcagtagactagttattatgatgtacattttacatgtgagggaaatgggaagtttaggtaaggttaaggcagccaaggcaacatgctgaggaatgggctgattctttctcagatccngagttccgtttctcttaacnttttgtactatgggccttcacaatttnggataacccaaggcatgttttcc

SEQ ID NO: 460262 - DNA, 472 bp, Homo Sapiens
  misc_feature (17)..(17): n is a, c, g, or t
  misc_feature (59)..(59): n is a, c, g, or t
  misc_feature (168)..(168): n is a, c, g, or t
ttatttttgataatggncaaaaaaaacctaatggcaaacccccatatgtgggctctccnaacactgactgacccccaaaacatgctgagccccagatcaggctggccggccgaaaggtggactgtgtcctatcatttcctgcctagattccctatgtgaggaggcccnggatggtgctgaccttcatgaaagatagcaggctggagttcccatgataccagcaagatgaggcttgattataaaaagtgcgcctcaaggcagtgatacagaggagtctatgaagctggagtcttaggggagtggttgagtccttctgcagcggggatggggcaaaatggctgtgctcaggatcggctgaggcgtttggcgacatcagcgtaggccaactcgatctcactgtcagctgcacaggtgttggtgaactcattcacgggcataggcgttcttgaggtccctccacaggcctgtcatc

SEQ ID NO: 460263 - DNA, 481 bp, Homo Sapiens
  misc_feature (455)..(455): n is a, c, g, or t
cacctggacagttgagtcagattgtaggaaaattaacccagatgggtctacatttttcttcaagttcaaaccacatggtttcctagtcagaaagtctcatggactttcttcctaagctgttctatgatcagaccacctcctaaatgtggcttttacccattacaggctacagttgaatcaggcaggagcagctgctggagagcacccagccgacagacctgcattccagaagcagcttggagaaactgggaagacatttttgacccattcttgggtttttactgtaaggttagcagttacatgatgccaccagtccaagacttagatcatgagagaaggcctttttaaaagtttaccagggaacatcgaggctcataaagaactcttttgtcttcacccatctctcctcctcccactcccatccactttctcatagctcaaaaaccactcattgntaagcacagtcaaacccaggcctgta

SEQ ID NO: 460264 - DNA, 350 bp, Homo Sapiens
gagaaaacaggtgagttgggattgagaactcctgattttcatccctggtttagattcttggccaaagtagtggtagagttaatctttgcttgtggaaagcattaactatgttgcagattcagttgtgttacattattgtgggttctataacaacatattcctcatggacactttaccagagttgctcacacctttttcaatttctcatcccttttggaggaatgaacatgagacttaactgcctttaagcctaaaacggacatgctttccaatgacaagagattttctaaagagaagtcttgggagcacatctgttaatacctgaggcatctacttctgtcttcaaggaa

SEQ ID NO: 460265 - DNA, 433 bp, Homo Sapiens
  misc_feature (246)..(246): n is a, c, g, or t
  misc_feature (266)..(266): n is a, c, g, or t
  misc_feature (281)..(281): n is a, c, g, or t
  misc_feature (376)..(376): n is a, c, g, or t
  misc_feature (415)..(415): n is a, c, g, or t
ctagacaaatgaaaacatgttttatttacaagaaaaaagtctgtacattgtgtatacataaaaatatacaaaaccaaaatagaaaatatccaagtgttaaaatgtgtacaaacacttttaaaatgcgactcctgggaaacttcaagctttaattagtttgaagagtacacatttcattttaaaaattatcatacaaaagatttcccaaagctgttaaaaaagttcactggtttccactggaagganttgtctaagtatttcatctnggattaaaacagggntttgttataaatgttaggattttaacaccaccaatggcaatttctttgtttccaatctacctggcaggaggactattttccatggaaccggtaangtttctcctaatctttggaaggcctggggctacagctanggttcccttcaaggttcg

SEQ ID NO: 460266 - DNA, 306 bp, Homo Sapiens
ccaagcactgtgctaggtactagatttaataagtctaacaagatttcttcttgccctccagagggcttccttgtctagtacaaatgatagaaatacaaacacacacttgtgatacagtgtaagcattacactctataggagatatgcataagggattaatggagaatccaggagaggatacctaactgtaaatggtcatccaagagggtactagggagcaggtcatgttggttcctgaaaagatgttactcgttgtagcatgtaggactaggtaagcatacatggatattgcctatattatgttct

SEQ ID NO: 460267 - DNA, 144 bp, Homo Sapiens
ctgcattcacaggttggtctgctaatttctatagtagtttgagaatcagctcttctcaaagctttgctcagttcatgttttagacgacatataattgtggcttggaaagaagtcactgaataatgtcctttccttttcactttg

SEQ ID NO: 460268 - DNA, 431 bp, Homo Sapiens
accaatatgggttggacgatcttacctccggtctcctgaattctccttttccttctctgagggtgtctcccctctgcctcacttctctccttctctcttctgatgtcttcttcaatcaacgattccttgttctcatgttgatctctctccttctccaatatttccttctttcattgtatgacctggcctgtcatgcattatggtcattattatcatttcttctctcctttctgctgtctcccctgccctgtctggtttcgtgtttttccacccatgtgctgcctgagttctccccaccttgtttctctgacttctctcctctgatttttactcccaccagatctcttagtacgcagggccagaggtgacctgcacctgactgatttgttgtgctcgtccaaccaataatggggatcgtgctagagaacgag

SEQ ID NO: 460269 - DNA, 628 bp, Homo Sapiens
  misc_feature (55)..(186): n is a, c, g, or t
ctcggtacccctagccagtaacagaaaataaggtggccagatgcgctggctcatnnnnnnnnnnnnnnnnnnnnnnnnnnnnnnnnnnnnnnnnnnnnnnnnnnnnnnnnnnnnnnnnnnnnnnnnnnnnnnnnnnnnnnnnnnnnnnnnnnnnnnnnnnnnnnnnnnnnnnnnnnnnnnnnnnnntgggaaccctgtaattccagctacttgagactgaagtaagagaaccgcttgagcccaggagtttgaggctacagtgaaccatgatcatgtcactgtactgtagcctgagctacagagcaagacgctgtctctgacaaggaaagaaaacaagtgcaagtttttatcactttatgagtgtagccaagttggaggagaaatagacaataataaaagagcactgaataatgacagtgagtggctggttaggctcagttgctagctaaatggcttctaaaaaattcattaataaagttacagctctggggacagtcatgtagtcaaagaatgaatgctaaattcattacaaatgcccatggtctttctttacatgccttctagtgaaaaattcctaagtgcctaaatagcaagtctgcaatgataacagctgtttattaaagactac

SEQ ID NO: 460270 - DNA, 360 bp, Homo Sapiens
tctccagcaccagagcctaatgaatgtgcatcatctaacttggactcgtcatctcctgcttccagactctcagttctctcggatttatttgtatcttcaaatccctgcacagatcccagatctttatccattctctctttatccaaggctagagagtctcgggaagtgctttctagatccctttcatgttcaccttccagttttgcttcacagcgtttcacagactctatttgagaactctcaaaagttctgtctctgtctctgtccctgtccctttcaacagaatcagaaattagtctctctctttccctatccaagtctctccttttgtctcgttctctctgctcgttctggttctcg

SEQ ID NO: 460271 - DNA, 215 bp, Homo Sapiens
ataaaggtgatggagctggctcacgccatcagtgtgcatgtgagtatgtttatgtctgtatgtgtgtttctatgcttgtgaacagaaggggaaattgtcctttccaggaaggcaacatacaatagaatcagtattaattactactgatattattattgccactgggatcctacatgtctggcaggaatttaggacataatgtttaattgatccca

SEQ ID NO: 460272 - DNA, 400 bp, Homo Sapiens
  misc_feature (266)..(359): n is a, c, g, or t
gtaatatgacaccagtgtaagtgtattgtttcctactgatagagctttgttaggtatatgcagctggtacaaaatgtccatctacagattcatgtgtatgaggaatgcaacttcattctttggtaacacaaagttaatttctatttggaggccccattttgcaagattaaagaaacttaatctcagctatggagttttctgtccactgtccccagggttatgtctatgttccaaatgagggtttgggccaggcatggtggctcatnnnnnnnnnnnnnnnnnnnnnnnnnnnnnnnnnnnnnnnnnnnnnnnnnnnnnnnnnnnnnnnnnnnnnnnnnnnnnnnnnnnnnnnnnnnnnntacttgaattatacaaagattagctaagcgtgccaaacggt

SEQ ID NO: 460273 - DNA, 404 bp, Homo Sapiens
ctttttcctgatccagaagagaatccactaacagtctggcaccttttaaagactgataagatacatttacaatctattctctgtgaagcctgctacaaggaagcttcatttgcataagaaccttggtctcccccaccccttatcttaacccagacatttccttctattgattccaggtcttcagagggtaacttaactacaaaatctttgaatctgcctatgacctggaagtcccccctttctgaactgaaacaatgttcaccttacatgtgttgactggtatctataacttctgccaccctaaaatgtataaaatcaagctgtaacccaagcaccttggacacatgttctcaggattgcctgagggctgtgtcatgggccttgatcactcatatttgctcaga

SEQ ID NO: 460274 - DNA, 317 bp, Homo Sapiens
  misc_feature (38)..(38): n is a, c, g, or t
ttttgacatttaagttgattcttttattgtgaacatcngcactgcatgccattaaagtatgtactatagagatctgatgagaaacagttcttaccctaaatattttgttatattgtcgccattatgaatttataaagacaggaaaatatagttgcctatgttttagggaccactattaaagcttataaatatttgtgtattttcatttagaagtaccatctatgagagtagtttatactgcactgtgtacatgaatggctaatgaatctattttccaactttcccgtgtttatagatattcttttccttagggctgg

SEQ ID NO: 460275 - DNA, 533 bp, Homo Sapiens
ctcctctctttttctcccagtgattgaatctgtgaatccctgcttaattctagtggtgcgtagagaaaatattgtaggagatgcaatggaagtccttaggaatacaaagaacatagattacaagaagccactcaatgttatatttgttggagaagatgctgtggatgcaggatggggtgcgcaaagaatattttcttgctcatcatgagggaattattggatcctacatacggcatgtgttaggtagttatgtagattccaggctcatttggttgttgctgataagacatttgaagacagtgatttgttgcatttgattggtgttatctgtggcttagctatttgtaattgtaccattctggacctcccttttcctttggcttgatataagaaactactgaataagaagccatccttggatgagttgaaagaactaatgcctgatgttgggagtagcatgccactcttactggattatcctatatacgatgacatagagcgaaacattacgtcttaattttacgatcacactc

SEQ ID NO: 460276 - DNA, 497 bp, Homo Sapiens
taaagtgaaaatacggtttttagttggggtgggatgaattgtgatactgtagttggtagagctgaaaatgggtttgagaggaatggagaagaaaatgactttgagtttaaaccatgtttgagattccttcagaagatctactagtagcagtctactaggtgattgagtttgtggatattggccccagagttagactgctagagataagtagacttgttttatatattgggttatgggagtttaactctggaagatgatgatgtttgggctggggtgctaagagtatagaaatcagtagtagagaattagtagagtaggatttgtggaagccaagggaaaaggggacatttctaggtgactagagtgattgccagatttatatactgtagactggtccttaggatttaatagttaataagttagaggacttctagcagcaatactagtcgtggtagaggcagaagctgaatgtcagagtatgtgtcgtctgtctgttt

SEQ ID NO: 460277 - DNA, 522 bp, Homo Sapiens
  misc_feature (68)..(68): n is a, c, g, or t
ggacctccggtggaacccacccccttggcaatggcaaataaaattttaaaacacaaaccctccatccntaaacgataataagcaacggcctttgagagagaaaacctactttcaaacaaaagcaacagtaaaccagttgaaaagagaagcaggaaaacaagcatttgactaatttcttccacactgtggtatagtgctggcagggaagagttgagaattcccagctgctaactataagttaggttgagtacattttcttttcatttgatagtttttgtttgtttgcacaaatttctacaaatacttacaacttggagtggataagaatcactcctaaaatttcagagcccagagaggatattcttaaagacgccaggtagagacacacagaacgtatgtattaagagtttagaggctaattttcataagatgtctgatgttatttttaatctatattagcaaagaaaatctttttttcctagtttctttttggctggtgtttggccttcttgtcctggtact

SEQ ID NO: 460278 - DNA, 261 bp, Homo Sapiens
cagaggctccaggttcacgtgaaaacgggtagacaccagaactgaccccatcagggtgatagtgaagattagatgatttgtacacagttcactgctacctcatgccttcttatactaatccagtcctggttttgtgttcaggcagcctatcccagagtgatcagatgtggtgcaacgactaagccaatccaggaaaatcctgttccttgaattccttacttgcaggtagggggtcagctctggccaacaattttttatttt

SEQ ID NO: 460279 - DNA, 390 bp, Homo Sapiens
ctgacatcagaatattaagtaggtgtatgagagcagaggtgaggaatagagattaaactgtgttgtggagcagaaacagttttaggagataggtggaagataaagcttcttccttgcttagtaacaaaacagctgatgggttatttaagttccatgagtaagtcaagatgatttgggaggactagggaatttttctggtaacacattcaattattcattgaatttgtttgttgtatcatagcctagtcacagacaaaatggagttgggtgccaggaaggacccactgtgaaatagcatgtcacatgtcatgtcaattgaatggacagtacagagaattactcgttttatcatcatcttttctagattgtagtttcacgtgatccgggagc

SEQ ID NO: 460280 - DNA, 445 bp, Homo Sapiens
agcggggaacaatcacttagagtgacagagccatgtccagccttctctgttcagcatgaagagttattacagacatattctatacagtgtaagcagttttacacttacagggattacactgtatttctttgacttcagttgtctttgtttctcttcagaagagccacctggcagcaaaggttctgtcactctaagtgatcttccagggtttttaggtgatctggcctctgaagaagatagtattgaaaaagataaagaagaaggtaatgtatgtgggattgctatgagttgataaaacctgaccctcgctctgctataaatctgggattttgtgccattgctcacaggcttgctggatttttcttctcttgaggtaacaagatgggtggtttagtctgggacctatgccaggtaaagtgattgttccccgctgggtaccgagctc

SEQ ID NO: 460281 - DNA, 561 bp, Homo Sapiens
ttcgatattcacatctggaacatcaatgtccaccttgggtcctgagacatcaagttcagccttgggcaggttcacatccacttctgggccctctcctttaaatcctggcatgctgaatttgggcattttcaccttgggcatcttcaggtgccagtctgggccatgaacatccacatctggggcatcaatgtccactttggggcccttgatgtcaacttcagggccctttagatcaccttccattttgggcagagaaacatccacatctcctttcaccttagggcctttcagatgcaaatcaaagtcaggcatggagatcttgggggctttgatgttcatctctggcatcttgaatttagggcccttcagtttcgcatctggaccttcaatattcacatctggaacatcaacgtccaccttgggtcctgagacgtcaaggtcagccttgggcaggttcacatccacttctggaccttctcctttgaagccaggcatgctgatcttgggcatttttatcttaggcatcttcaggtgaaggtccagaagtgattgttccccgct

SEQ ID NO: 460282 - DNA, 149 bp, Homo Sapiens
tacgtccacttgggtctgagacgtcaaggtcagctgggcaggttcacatccacttctggaccttctcctttgaagccaggcatgctgatcttgggcatttttatcttaggcatcttcaggtgaaggtccagaagtgattgttccccgct

SEQ ID NO: 460283 - DNA, 441 bp, Homo Sapiens
cgacaaggacattaaaaactttattcaatatatacaacaaataatttaaaaatatattgggaattgcaaagccaattaagaagaggaagtagagagaaagggaaaaaagtggggatgaggaaggtagaggaaaagagaaagcggtcaaacaatggtttggttgggctgtgtttcagagtataccaccctttataattctgatcaaatactcttgacccataaacccttagcccttgttctgatggggtagccacaggagttcaccagctgggaatcattcactgagctctggatcagagcattctagaggctggaatgtcgggggagtattaggggtagttttccggtcattcctaaaaccatccgtcctaactcccaggcaggtttaactagtgcaaactcttaggcagagagctcccagctgcatagtttcccggtggt

SEQ ID NO: 460284 - DNA, 272 bp, Homo Sapiens
cgtctttatgtaggtgccttttaccttgtatttgagtatatggaccatgacttaatgggactgctagaatctggtttggtgcacttttctgaggaccatatcaagtcgttcatgaaacagctaatggaaggattggaatactgtcacaaaaagaatttcctgcatcgggatattaagtgttctaacattttgctgaataacaggtaacatagtaaccaaataagattaagcactttcctcttctcctctgacctttttagtttcgcggtggt

SEQ ID NO: 460285 - DNA, 470 bp, Homo Sapiens
atcatgtaatatgttattagttatctgtatatatttcacaaaatgagtttttataattcaaattttcataaaacatttacaaaggttcaacttaaaaacatttaaatagagaactattttcagattttaattacctgatcttcataatcagatcctgtatcaatgatctctccagtgtccaatatcatcgaaggatcaaggtcacttgaacctgctgcagcctctttgtttggaaataacttgttgtcaactgccatgctgatgtcatagaacacctcatcctcatcgcggtcggcatcaaatgtcatgatgagccccttttcctggaagtatttaaccaatggagcagcattctgcttggaagttcattagtctcctttgggtagcttttacattgtccgtctggtcggccctgctgttctgcacgcttcagtaatctttctttgagtctccggattagcaccaagcca

SEQ ID NO: 460286 - DNA, 918 bp, Homo Sapiens
  misc_feature (106)..(225): n is a, c, g, or t
  misc_feature (475)..(475): n is a, c, g, or t
tcaccgcgaaacggaccaccgtgcccggcgcttaagctatcctcttgcctcagcgccttccaagtagctgggactacaggttcatgccaccacacctggctaattnnnnnnnnnnnnnnnnnnnnnnnnnnnnnnnnnnnnnnnnnnnnnnnnnnnnnnnnnnnnnnnnnnnnnnnnnnnnnnnnnnnnnnnnnnnnnnnnnnnnnnnnnnnnnnnnnnnnnnnnacccttttttccttttatactgagagcttgcataattagttcctatgtacaactaagttttcataccatcttaactgtaaattctatacgaattcaacaggactcaattatttacaaaagctaatgtgtgacaacttgatcttctcacttggaatcttcccttataaaatttgatttatcctgcagtgtctgcttgacttatatcctgtgttgctgctggctttttccatgtgcattttttgcaagctgnctctttttacttccagtctcgttaagtcttgcagttttggctacgcggcctcctgccatgaataagctgccgctccacagtggcttctttgaagtcttagagtcagatgagtttcacggtgttcaggtttgtgatccagtgtggccccaggttctgggtaacacgtgtgatgcagtgctgtgtgcataccatgtcgtgaataacattcatgatgcagtgcacataccgtgttcaagttaacagtcctggtggcatctgaagtagcaccctaaaatcaaatgacacaaattctgcagagaagcaagtgaagtcaaaaaactgagttggggtagtaacgataaatagcgttatgctagttcaggttatgttttgttgccaaatgaattacaaaaaactaccaggaatcaggcttttatggtttccggggtccggggatcttagag

SEQ ID NO: 460287 - DNA, 580 bp, Homo Sapiens
  misc_feature (16)..(16): n is a, c, g, or t
  misc_feature (47)..(47): n is a, c, g, or t
  misc_feature (65)..(65): n is a, c, g, or t
  misc_feature (101)..(101): n is a, c, g, or t
aaaatgccaaccccantccaaagtttaacattccttagtaaaacatnaactaaatcctccttaantccaaaaaggaacatttggataacaaatttatattnactcccaataaattccccaacattccattttccccacccatgttcccaagcactgtgaaaaataaaaatgactatgacaaggtccctgcccttgaagagcccgcagccctggcagatgagacaaagatcaactctgcctacctagaacggaattactgtgatgcacagcctgatcaaggtacgagccgtggagcacaaagacggattcatccttcctgaagtttccacaggggctcaggagagaggtcttgggcacaagaagaaatgagtttggcagagagaaagtgactatgggaggagagggctcccaggcagaggacacacgggcacagagaggaagtccagggccaatgacagggacagggtggctgaagcagggtgtaaaaggcaacagctagtgatacgaaggcccggactagtcctgtgaaataagaccatgctgtcatgtttatcatctactacctgctcgtcgactactt

SEQ ID NO: 460288 - DNA, 438 bp, Homo Sapiens
  misc_feature (386)..(386): n is a, c, g, or t
  misc_feature (403)..(403): n is a, c, g, or t
  misc_feature (421)..(421): n is a, c, g, or t
tgtttctgtttctcttcaggcaagtccatagatagaggaaaatcagacacaggctggtgacaactggtatagatacagtgagcatggaatgagaaccacctacaacattgcctgattatttttaagtttatatcaaaactgcttcacaagttcacaaaagttgtcactcttaatttgggttaagaaaagtaatagtattatctctgctgaagttgattgtttttctcttttaccatgactgttggccaaaagcaagctgaacctctgcactttggaaacaaagcacagtatggaatctttaacccaaggcacttagtttcaccactggggattcttacatccatctggcaagggaaatggcaccaaacttttgggtcccattgttnggattcttccaaagtgnctgggcaaaacttttggngccatggccgttggttg

SEQ ID NO: 460289 - DNA, 259 bp, Homo Sapiens
catctctgtatagaaagtggatgggcacaaaatcccgatgaaagaccatctttcttaaaatgtttcatagaacttgaaccagttttgagaacctttgaagagataacttttcttgaagctgttattcagctaaagaaaacaaagttacagagtgtttcaagtgccattcacctatgttaccagaagaaaatggaattatctctgaacatacctgtaaatcatggtccacaagaggaatcatgtggatcctctcagctcc

SEQ ID NO: 460290 - DNA, 491 bp, Homo Sapiens
aggaggttatccctgcctcttccagagagactcccccattgctgtctcttgtgtgtgtcatgcacaaggaaggcttggttgtgtgccaggataaggggcacaagggcctcgggtgtggccagagaccccatgcttaagcttttatggtataggtcaggctgcaggggtttgagggcctcagttgtatatccagaatcttcagagcactgcgatgttcaggggtgagtcagttctgtagatgtgcacggggtcttctgaagggtcagtttctgtaatcactttcaggtgtgtcagggccttgtgcagtaacagtgcacacagaagttagtgtttctgtgggctaagggttgtagctctgtatcaggattctgggagtgggtctggatttctggtgtgtggacttaagaagctgtgtctagacttgggggaggggcgttcatgtataactggggttcacatagtccaagactcccaggtgcatgatagatagg

SEQ ID NO: 460291 - DNA, 289 bp, Homo Sapiens
ggaaatggaacgaacagtggaactttgatatcaaactcatacagctgtctctgtctattggcaaggaaaactgtcctgatgtgatagccattgtctgaggtatagaagatgtaagtgttgttagagctccccagtgaactccagcctcttgaccagtttctccacaaggtcatcaactgagaggagagtttgccaccttttcctaaatgcattatctaaaaactgtattgaagaattagtcattggagtcttggcttgcctaattaaccagtgcttgttcgttccattt

SEQ ID NO: 460292 - DNA, 172 bp, Homo Sapiens
ccagatacatttatttactttgcaggtaagatgtttggtattgtggtggggattcttcatggtacaccacatctctgcacaatgtccatggagttggatttaacaaatttggatcttggcacaatgataacagggtgttgatcttagagtccaacaaatatgcgtaatgttt

SEQ ID NO: 460293 - DNA, 410 bp, Homo Sapiens
cgaaaggacgaacagaggctgcaaataagaataatatagtactatcagaagtaggagacctcagatggtcagaagtgttgaggcactttggtgatgcttatattatattagacaaacttagatgccactcagtggaagactcagagaaaaggcataaatattccagcagaccagccaattactaaacttaagaatttagaagatgttgttgtccctactatggaaattaaggtggaccacacaggagaatatggaaatctggtgactatacagtcatttaaagcagaatttcgcttagcaggaggtgtaaatttaccaaaaataatagattgtgtaggttccgatggcaaggagaggagcacagcttgttacgggccgtgatgacctgagacaagatgttcgttccattt

SEQ ID NO: 460294 - DNA, 322 bp, Homo Sapiens
tacagaaatggacgaacaggtgtcagttgagaactgttattgcaagctgcttatcgaaagtatgctagagagtgtctagagaaaaatagcttatctattcagtaatagtgcttttaaaacagataatgccacccctttggatgttaaaatggaagagataatagccacccctttggtgttatcgaggcatttttctttattcatcacaatttaaatttagtattgtagagcctttcacaaaatttgtcccctcttacggaattttgaggtcttcttattttagaaaaatatgccttcattacattttatttgcttgttcgtt

SEQ ID NO: 460295 - DNA, 270 bp, Homo Sapiens
aatttttaagtaatccaagtagtcctgtaatgttttcactagttagatattctcatggctatgatgtaagtacctattttcccataatcttaccaggctaactttggtctttctcaagctgataaatacctgaaggaaacttgttctttgcctataatgagatattacagatattttccccagatctgtttgttgactttgtttatgatgaaatatagccaaacttactcctttcctttttttgacgacaggcttgctctgttgcccagg

SEQ ID NO: 460296 - DNA, 353 bp, Homo Sapiens
tttttgttcccctatttggttttctatatctctatattcacttgatccattaatctctgctctataattaccgttcttgctgctagctttgggtttgagattgttctttttgctaatatcattgaagatgtgaagttatgggagggttttttgtttcattttatttgttgttgttattgagaccaagcttgggcgacagagccagattccgtctccaaatataaataaattttcatgcagtccaatttgtctattctttgttgcctgtgcctttggcgttacatccaataaatcattgccagatccagtgtgtggagcgtttgctctctgttctctcctaagagtttgttcga

SEQ ID NO: 460297 - DNA, 372 bp, Homo Sapiens
aaatgggacgtacacaggtaagaaatgtcacactgcagtatgatatttcaagaaaagggtgagtttacgaacagtccaagtctattatcatttagagctgcatctatatagaatggcctagagaaaagttcaatagagaaaaacaaaaagagtgtgtggaagggaaggaattatttctctattcaacacagaacagtagattaagactaatgttccttgtattccaagggaaaactggaagatggtattctgaatctacctaagttataaagaaaatcaggagatcacaatctttagatgtggctatatcttcccatgtatttttgtggctagatgttaggaagtgactgaactgttcgttccatttctgta

SEQ ID NO: 460298 - DNA, 450 bp, Homo Sapiens
accggcgaaacaggtgatacagggagaggcatcagtcagtcctatgcgagatctgagctctgccacttggggaacaagcgagtcataaaatcctctctgagatgtctgtagacagcagaagctggttggtgaaagtcatgttagagtcacatgcagctgttaggaggcccctctgtgtctactaggagatttgccgctgcagtattaggttgcatttgcagacactttatttcattagccatcaatatttcctttcaccccacactatggcttgcagttctagtgactgccagcgggtaaggcgatcaggagtctctgcctccattggcgcctgaccctctcccctgtgtgtcttgtaacttcttttcttataaggatgcaaatcatattagattagggcctcccctacttctatgtaaccttaactaattacgtgtgttcgttccattt

SEQ ID NO: 460299 - DNA, 278 bp, Homo Sapiens
gcgatgtgagaggatgccccgaaatggaacgaacaaaaaaagagatgttgtgctggaaactaaataggtgatgatcaaataaacaagtctagagagaccatgtgaaagaaagtcacggaaatcctcctagaaaataaaccataaatagatgacagaagaaataggagctatatggggaatagaaaagttaccaggcacagggtcacagggtgttctaagaaagctacgtgagtatgagccaccgggaggaagtataggtgtgtgtgttcgtccatttc

SEQ ID NO: 460300 - DNA, 323 bp, Homo Sapiens
tgaacgaacatgcagtcccctccccctgcaatatggaatgcagaacaaatgaaagccttttggaaattgtctagtatttcagaaaaatcagaaaatggaggttctgggtccctccgagcaaaatttgatctttcagaaggacctagtaaacccacgacacttgcagtacaattcctcagcgagggaagtaccctttcaggagtagatttcgaacttgtgggcactggctataggctttccttaataaagaagcggtttgctactggacgatacctggcggattgttgatggacctgggaaagtgatgcgcttctaggatacta

SEQ ID NO: 460301 - DNA, 340 bp, Homo Sapiens
tggtgtagcgttctagaggatccctgtggctactgctggagggcgcgagttcaccatgaggctgaggaacgattctctctcgtggggtccaagactagcccaggaaacaggtagtcgcagggggactggagaggagacctgggccagcgagaggcagtgttctccagagggtcagatgcgtctctgattcaggccagaatacaggtcccgctggcctttccggatgggctcatagtctgggttgggaacaggtggtggcctctccttgttttgtcccctttgcctgccgccagcacccgctcctcgtgtcacaggcttggccttggcctttctattcttg

SEQ ID NO: 460302 - DNA, 681 bp, Homo Sapiens
  misc_feature (87)..(97): n is a, c, g, or t
  misc_feature (243)..(280): n is a, c, g, or t
ctattccatttgtaatgccatcaattttatttttgaaatgcaagggtgctacttcccccaggtaggtcaacagatgagtaacaagcnnnnnnnnnnncctctaggaaaagcaaaaagaggcagtcatgctacattcaagcatgctcatctgacagtgataataatacattgtgtatgcaccattctaattcccagtagaaaacttgttgctggtttataagatgcagttaaacatagacactnnnnnnnnnnnnnnnnnnnnnnnnnnnnnnnnnnnnnnggccctacagcttcagggaggtaacccgggggatgtggaagagctgagtctcctcagagctggtggagctgaggcgtttccggataggacggaagtatttggaggtcttgacggcaaagatgatgctggggatcaggaagaaggtgcaccatgccaggcagaaccagaaggcattccaggggtcagccatcatgtcgcacaggatcacacggctgttgtccagggctccggagaggggctggcaggtggcaatgcgctgagtcacctcctctctcacccaggccacgtactgggagaagtagcccatctcccgggccaggaaacactcacccacagtcctcaggcccctctctggctgcagagccctctccagcagtagccacagggatcctcgagacagc

SEQ ID NO: 460303 - DNA, 327 bp, Homo Sapiens
ggagctacgtgctggagaaagcaagctcatttgcaatagcagcgtccaccagagcactttgcagagcctgaatgctgtggaaactctgggtctcgttcctgtcactcactcagaaagagccagagtgaaaagatgtgaactgtgcgtcctgcatgtggaaattgcctttcagcagagtccctgcccgtggagtaactcggctttcagggctagatcttaacaggcgccacactggttgtatttggagttggctcttcctttaagtagctgcgggtccccaagtcgatgggtctgcaccgtcatcattgtcacctaagccacctacgg

SEQ ID NO: 460304 - DNA, 467 bp, Homo Sapiens
ccccttgtcagagctccccgtggcagagtttttaatttttaatttaggactctccgagaatccttgattaacataagtctgaaggtagagagatggggttattatatcagttgtggtgtctttccagggagcttatccagactgcctccaggggagatgttattggccctaaccataggtgttgtctcaatcctatataattaggggtcatagcccagtcgaacccttctcagccctcaagccctccaagttgcatcacaaatgccacctcctccatgtggtctctcctgatggtcccccaccccttcacaaccaggtgggatctttccattctgggcattcttcccatgcccgggatgctggtagggatgggcatggtgatctggttgggttggctcctggatgcgtgcccctacgcctctccttgctccctcagggcctcaccaaccatcgcgctcaggacgttc

SEQ ID NO: 460305 - DNA, 406 bp, Homo Sapiens
taggccggagacggaaagcaaggattatgagatgaatgcgtaccataaagatggtaagaaggaagactgcgtgaagggtgaccctgtcgagaagcgaagccagagaaagttctaagaaagcagaatctggagactaagaaaaggatactttgaagaaagggccctcgtctactggggcctctggtcaggctaagagctcttcaaaggaatgctaaagacagcaagacatcatctaaagatgacaaaggaagtacaagtagtactagtggtagcgtggaagctcaactaaaaatatctgggttatgtggactttcatctaataccatagctgctgatttgaagacctctttggcaatatggaaagttgttgagtgcaaaagcagttacgtatgctcgaagtcccccg

SEQ ID NO: 460306 - DNA, 499 bp, Homo Sapiens
ctagaggatcccccgtgactgtggatctcaagtactaccggcctactgaagtggtaaggactctctggccacccagtgcgtggccacgtttgtctggctggctgggcaaatgcgctcatggaatgcctggtgccagcctttggagctgtcagttcagctccctggcatccttcagcgtgcatttccaaaatcagaacacagtgaattcaatttgagattatcattcttaccacaaacttcattgctctataaaggataacaagagttaaacccaccaaaagaaatcattgatttcagaaatggaatctcacatcacacgcagatctcctcatgttggtctcctattctaatggctggtccctgataacctacaggatgcctgacttaactacgctgtcccagacctgcaggacatctaggtcctctccatgctatgtctatgtctgtgtctgtgtactcatacactgtgcatacttgcacactataccataatgttccc

SEQ ID NO: 460307 - DNA, 187 bp, Homo Sapiens
tggcggacggtagctgtgtggatgttttctggatgatggcttccttgtcccacatttgaacagtatggcagctttgcagatagaatatgacgatggtcagactgaggtccagagaggggaaggtactgacccaaagtcacacaaaaacgtggacttgaatgacgtcctggcctagtcctccggccta

SEQ ID NO: 460308 - DNA, 318 bp, Homo Sapiens
taggccggaggacttaggcctaacaaacacctcctttcatgaacaaagcccctaggttttcaccgactctctgggtgactgtgtgtttaaccagccttccaggaacgagtcagccccacagccctagcccaaggagggctgggagcatcccagcgtcctctgagagctggttggtactgctggggaggggtggtctgtcctgagctcagctgaggggacagctggcctcttgggccttttcaccgaggcagattcgctttgaccacccatagctctgcaccagtgcaccagctcctcatctctaccgccaccggtccg

SEQ ID NO: 460309 - DNA, 389 bp, Homo Sapiens
taggccggagacttggtgaagttggaaggagatacagtcaccttctcctttgtaatgagaagtggccgtgaacacgacactcctgataatatccatgtggggctttgcttgcacagttcgcgctcaggagtcttcggaggatgtctcaggaggcttgccctttctgttagacctggctttaggtctgtctgttttagcttgttccatgttaagaatcctgtactatggaccagaaattatccaaagaagatagaagcctgtcaggatgctattgcggtccaacttttacaaaggtgccagtggcaggtggaggccaatggcgtgatctcccgtgcccttactccgagcccctctccactgcctctgaccatagaggtgacagagattca

SEQ ID NO: 460310 - DNA, 529 bp, Homo Sapiens
  misc_feature (21)..(21): n is a, c, g, or t
  misc_feature (33)..(33): n is a, c, g, or t
  misc_feature (54)..(54): n is a, c, g, or t
  misc_feature (83)..(83): n is a, c, g, or t
  misc_feature (504)..(504): n is a, c, g, or t
  misc_feature (507)..(507): n is a, c, g, or t
aaccttcagactcccgggccntgctcactccantcgtcccctagagagagaaanatggtctgtaaataggtgttctctcatcnggtgtcttctgcttagccaatgtcaatcaggaattaaaaccctaaaagtgcagaatgttagagccagaaaggaccctaaggaccactcaggcaaacgcccctggcttcacagatgaggaatgtgaatccaagcccctgatgttccattctgtgtatcttgcacccatcatgttacttcgcttcccaacagagtcagaaattaaatctggccaaagacgtttacttccttctttgacactcagtgtctctttgacactcagtatgaggcaggccacggatcagcaaagcgaaagtgaaattaaacaggatttgacattcagaagatacttggttggtaacagatttacccaccatgactgtatcacaaaataaccaactgctgagttccaaggaggctccccgactctgcctctgtcctcgnccncccctccccagcgagccagaga

SEQ ID NO: 460311 - DNA, 444 bp, Homo Sapiens
  misc_feature (300)..(351): n is a, c, g, or t
ttctttacaggaatttgaggctgcctttttgtgatggagtggaggggagagggctgcagacgaaacgcaatctagcagccaaaaccagggtctttcagatgcctactgggaatccagggccagtttttcccagggctaaaagtggtctctgggactcactgaatgggttttggttgaaccaaaacaatggaatcctcttgacccttaaacagaatgaggtcaagctgcatggatgctgggggagaggcagggtgcaggaggggcttcactttctgtgctccatgcccctgtggaagctgnnnnnnnnnnnnnnnnnnnnnnnnnnnnnnnnnnnnnnnnnnnnnnnnnnnngggacaggggctcccccttttttgcccagcgggggtttccagaccctcggggcccttcaggcgcttctcccccagtgtgcacgcctccccacg

SEQ ID NO: 460312 - DNA, 645 bp, Homo Sapiens
tgtttttcacatcaaaatattgtaaatgagaagtgaaaaagatgctatacaaatgcaaggtattattaactgatattcgaattgcgaggttatgtttaaggagtattacatgtgattttagaaatttgagaagtctgataacactggttcccaatagatagaggttctcaataggtagttgtctcaggtgttctagggttcaaattgtaggtttttctgcagattctgttttgtctgtatccctttttttggtaagcgtaaaagtaagtgttcactgcagaaattttggaaaatacagaaaagtaaagaaggaaagaaaaattagcacttggcaacaaccattatatcattttggcttatttcattcttaacttctgtattgttatttatatatgtttccccttttttataaaattgggatcatatgtagactcttgctttttcatttagaagttaataggaaaatattcacaatagtctaaaaaatactttaatgaccacattatacaaatgcatcgtaatttaaaatattccatactgcctttaatttttcaatactataaactctgaacataagtcataaagaactagtgtcacagagtggttaaaggtgaggactcaggagccagactctcggaatcatca

SEQ ID NO: 460313 - DNA, 551 bp, Homo Sapiens
  misc_feature (393)..(393): n is a, c, g, or t
  misc_feature (489)..(489): n is a, c, g, or t
  misc_feature (498)..(498): n is a, c, g, or t
  misc_feature (539)..(539): n is a, c, g, or t
agaaaaccccaaaccagtatgcagagatcattaatgtttatgcaaatgaatcactaaccaagaaaacaaggaaaataaaaggaacaaaatgaattttaatggacatgtgctttaagcatgccaacagacaacacaccactagagacacacatcaaaagcaatcacagtgctatgatcaaatgatgggtacatgtgaacacatccctcgcaaccccaccccccacgttgcttctctttagcgattagtccagagtgctttagtggctgggcacacccgagatacttaaatcaggaggtgaacatgaatgcaacgtgacaactagtagcacagaaaacacctgattggtattcaaagtgcacgaagcaatgctattttcaaagttcattgagtcnctggcggtcatcactccaaaaccataaaaatacctttttccttctcatacaaggccaattgtaatttaaaattttggttatgacaagctacatttnaaaaatctngataaaaataggcatgatagcaaatgctaagaacatcatangcactcttttct

SEQ ID NO: 460314 - DNA, 549 bp, Homo Sapiens
tattctatgaattggttgtggctgcgcttgtggtgagtaaggaggatatgtttggttttcatgatgcattccagaggagtcctctcttacaggctcagaggaccgtgtaatggcagactccggtggagtcccaacctcatcattaagagtttcatctagttcttgatcagtgtaggccccgccttctgtgtctgtgtcttcatagtcagaagtgtgtctactgtccgtgctatacattgagtattcactacctggagctgacaggtaggacagacgatcatcatgcaaatcaaggtcatcacttgtagcaccatccgcctttccctcggaaacccataccagctggttttgctgttgttgaattgcttctttcagcgcaccataccaaccatcattcattgaatttaagttaattgtagttgtaaaaagatggtgattatttttacgaagtttatgagatcgctcgtataacttcctggcacttttccgagattctggacataacctcattctcattgtttttactccttgcttagaatcagggttaag

SEQ ID NO: 460315 - DNA, 716 bp, Homo Sapiens
  misc_feature (94)..(226): n is a, c, g, or t
  misc_feature (599)..(599): n is a, c, g, or t
  misc_feature (617)..(617): n is a, c, g, or t
  misc_feature (684)..(684): n is a, c, g, or t
tagaagcgatattttgctactttaagcaattctgtaatggttatccttgcatgtaccttttacaaatctttaactagatttttaaatcctattnnnnnnnnnnnnnnnnnnnnnnnnnnnnnnnnnnnnnnnnnnnnnnnnnnnnnnnnnnnnnnnnnnnnnnnnnnnnnnnnnnnnnnnnnnnnnnnnnnnnnnnnnnnnnnnnnnnnnnnnnnnnnnnnnnnnnttaattaattaattaaatgtgcaactagtcatattgctcctggctccagtgatttttttaaatcatttagaataaagtccagtcctcaggtgtggtctacagggcctccatgatgacctagaccctggctttctacagcctcactcttgctcactgcactgagctacactggccgggctccttgctgttctttcaaaacaggcttgtgtctactcccagagtcttctcacttgctctttcttccttctggaatgttcccccacctccccgatttgcacgagtagcttctttacattgttcagatctctgctcaaactaaggtcattcctgatcaccctatccaaaataggaaactttcttccctgtctctgtnctctgctttactcttttnttttttaacattgtaaaaagttgagataaaatttatatgccataaaatttacccttctaaagcttanaattcagtggtttttaatatactcagaggtta

SEQ ID NO: 460316 - DNA, 327 bp, Homo Sapiens
tataaataactgaagaagctgtgctattttaaaacagtgccctgatgatttttcattggtacatacatttctatcacagccctttagtatcattgtaatttgctatttaataactcccctttctaaaaactgatatttatggaatacattattgcatttaatttgttcaaaattattattttttaatactattaagcatttcctcagttcatgatccttcctcttgctgaacctgtgcagccccttgcctggttttgttgctgctttgtttttgtcgttgttattttccttcccatgaccacagctccattccacctgccggtgaaa

SEQ ID NO: 460317 - DNA, 395 bp, Homo Sapiens
gaggtcaatttacaagcacagtgtatgtccctaaccttttagatcctttagcattcttgtgacttttctcaggcatatttgtaagtcttgtaacagtagttgagatacattttatccaactatatagtaagtctccagctggactaactaaatccttaataataatcttacagttacatctttcctggatggtaaggagccctagtaccaaactcaacaatactgaagttaagtgtgctcatctgtttcatctgtgggaagcctcaacttggtaatcaggagcccctccaagcagacaactccaatcattacagtggggtatccagagtcctgtccagccaatcacattgtctttgatacacctcagtatatggtgcaaccagtcatcactcccg

SEQ ID NO: 460318 - DNA, 436 bp, Homo Sapiens
gttagaaattgagagtctgaggtttctcactgggtactgtcctcagagagtatgatgaagctccctctgatacggttttatcttatgccatttgacacacatccttgcccactctctttactcttctcacaaccctttcaggttcagaggacttgacattttcaggtgcctggcaactggttcttatcatacagatagctctgcatgttgagtttgtactcttgttttcacattttcatttgttcttctaagatctcctttagaagaatgatcatagtcaaaataaaaggttctttccgcaagggcttttgcaagtcagaccgttataaataggactgtcctccaaaagtacagaatgcgggtagagtgaatattgtagccagtaaactgcacggtgtacgtattaaccagtaagctaatgaggcgttcaaccgag

SEQ ID NO: 460319 - DNA, 214 bp, Homo Sapiens
gacagacagttggtaaaacgagacaggccaagtgcacaagcattgctatgcaatgcaggtcagacatctagagatcacaccccaggaacagtagatggctattgaggagtatccatgaggcatgggggtcaggggttgaggtcattggtgagtgttttagtggggttagcaatgaggtagattgtgctgccaggtaaatctggtacaacataat

SEQ ID NO: 460320 - DNA, 192 bp, Homo Sapiens
ttttttttgagtttctgacaaagtgatttattaatgaaaattcattcactatataacctttgaataccagagaaacttcaatatgtacaaatcagcatgaagttcccagttctcaaactttggttatatgaatatgcctcaagcaccacaaaagaaacattagtcctgccggtgaatctggaccggctcgtc

SEQ ID NO: 460321 - DNA, 614 bp, Homo Sapiens
gtagatggcttgaatcggtcactgcaggggaattgtacaacgatctctgacttgcttattggatcttccttgtctgcttgcagtggtgggatctttacaatgttgtaggcaattgaaaaattttttccaaagcaattaccaatattgtaaacggttccatcattttcaatgtgggggtgagcagtggccccattgacagagacatagttgcaaagatcaacctgcttaattgtctgcaaggtctctggattaatctttgtaataaagttggtctctgtgcaagcgtagtaatcttcccccactgggtagacattaacaagggcattgtcagtaacctctactcctcgaaagtaagaaaaaaacctggaaaatatattcttgcagggatctgggaaagcacaggtgccgaattctgttatgacgatccttttctcagtcattgcccgtacgtaagcatcagtgcggatgaaccttctgtggtatgtgacatgtccttctttaaagtcaaacttgtgcaggagggcttgcccatcaaacaggtggtaaaatggctcagatccacttcaaagagtcctggcccacatcgaaggagactgccggtgaggtacgagctc

SEQ ID NO: 460322 - DNA, 650 bp, Homo Sapiens
actagtccacggttggcttggtatcaggctttaagcggtgtaggcaaagaaatggaaggccttaatgtcttgccactatgtctcaagtgtctgtttcatggaaggatttcccaccctgtgacaatcatctgtttgaggtgttcatatgctctgcgcctctccacagtaccaggaatctcggccctactcatgagttgtccgcggcttggttgtaacatccctgcaccacttgcagtgacaaattcacctgaagtggaggatgacgtgcggccctgtttctccctctaggttctcttagctatgggatgacatcttagtctctggtggaggaaaagtgggcgacatacaccaaaaattggggctttctggtacttcacagcacagccatttgtcgtactttgtcatcactgtggttttctctttcctttctcagctctttgtgacgggagagtcggtcatcctattacagaagctaagccatagtccaacattgtttggtcaccatgggggtccttttgtaactgccttatgactcaacattaccaataaagtgatgatcctggtctgcgtttatacatacgcttgttcggtcctgttcctgacacgtgggttgagtcaccacagctctgtgtgggaaacgtgcgaccaca

SEQ ID NO: 460323 - DNA, 639 bp, Homo Sapiens
cgtcacccctacattgacagacttcaagaactagtgcgcagggggaacagccagtacccaggcgccaagtacatcatccgagacaatggtgatcgcattgacttgcgtttccaccccaagcccagtgaccttcacctgcagaccggctataaggtggaacggcacatgtgtgatggggacattgttatcttcaaccggcagccaactctgcacaaaagtgtccatgatggggcatcgggtccgcattctcccatggtctacctttcgcttgaatcttagcgtgacaactccgtacaatgcagactttgacggggatgagatgaacttgcacctgccacagtctctggagacgcgagcagagatccaggagctggccatggttcctcgcatgattgtcaccccccagagcaatcggcctgtcatgggtattgtgcaggacacactcacagcagtgcgcaaattcaccaagagagacgtcttcctggagcggggtgaagtgatgaacctcctgatgttcctgtcgacgtgggatgggaaggtcccacagccggccattcctaaagccccggcccctgtggacaggcaagcaatcttctccctcatcatacctggtcacatctactgttaccggggtaccgg

SEQ ID NO: 460324 - DNA, 361 bp, Homo Sapiens
ctgaactcagagttacagggaatgccttcaaaaacattgctgtgattttagcatcacctgacataaggcagaagccgccaagtgttaggtgaaatatacagtcatcattcagtcaatgtgtactgagaagctactatgtgtccggcccagggatatactggtatataacaaaagaaacattttacccatatttaagcctaaagaatgaagtatctggatggacggtattctcttcaagataaagtgaggcttctcatctaccacctccccattcatgccttcctcaatccgaaagttatcatcagatttctttattctttcagaaataccactactgcctagatactgatcactgtctaga

SEQ ID NO: 460325 - DNA, 220 bp, Homo Sapiens
cctgtagctcaggggctgtggggacaactgtttcaggtgtcttgacagaggatctattttttcttcccctagtagcctgagatgtgggctcaggggtgacaggctggtctgtggaggtggaaggctggagctcaggggctgtggggacaactgtttcaggggtcttgacagaggacctatttgtcctgctcctagtggcctgagaagtgcgcctgggtgc

SEQ ID NO: 460326 - DNA, 638 bp, Homo Sapiens
gtcaacctttctttaactgaggaaacatttgagggctctgctgatgttctggctagctacactcaggcaacacatgatgaatcaatgacttatgaagatagaagccaactagatcacatgggctttcacttcacaactgggatccctgctcctagcacagaaacagaattagacgttttacttcccacggcaacatccctgccaattcctcgtaagtctgccacagttattccagagattgaaggaataaaagctgaagcaaaagccctggatgacatgtttgaatcaagcactttgtctgatggtcaagctattgcagaccaaagtgaaataataccaacattgggccaatttgaaaggactcaggaggagtatgaagacaaaaaacatgctggtccttcttttcagccagaagttctcttcaggagctgaggaggcattagtagaccatactccctatctaagtattgctactacccaccttatggatcagagtgttacagaggtgcctgatgtgatggaaggatccaatcccccatattacactgatacaacattagcagtttcaacatttgcgaagttgtcttctcagacaccatcatctcccctcactatctactcaggcagtgaagcctctg

SEQ ID NO: 460327 - DNA, 309 bp, Homo Sapiens
  misc_feature (11)..(11): n is a, c, g, or t
  misc_feature (24)..(24): n is a, c, g, or t
  misc_feature (50)..(50): n is a, c, g, or t
cttaaattagntgtatatcctaanaagtgtctgttgaatagaatttgacntctaataaatctactgaaagtgtgaaacagagtaccactatgcttctttatattgctaatctagatcctgttaggtccaatattgtagttaactataagcactgaaccttaaatgaaacaatggcaacatgtgtgtagatgaaattttattcagtattgtaaaatataatgccttgatgtttactcacaattatgagactatcactattcattttaatcctttaagaagtctcatatgataggtcctgccggtgaatct

SEQ ID NO: 460328 - DNA, 413 bp, Homo Sapiens
  misc_feature (42)..(42): n is a, c, g, or t
cccattctctaattcaaggcttgtgtcaagaataacagtagnaagaaggagaagaatccagcagatcctcaactgctgtacgacgacatccaacaatcacactggaccttcaagtgagaaggatccgtcctgggaggaaaatagagatcgggatagtattgcaaatagaactcgatccagagtagggctagcagaaaatacagtcactattgaaagcaatagtgggggctttcgccgaaccatttctcgtttagagcggtcaggtattcgaacctatgttagtaccataacagttcctcttcgtaggatttctgagaatgagcttgttgagccatcatcagtggctcttcggtcaattttaaggcagatcatgacttggttttgagaactgagttctctaatggaggccgatt

SEQ ID NO: 460329 - DNA, 612 bp, Homo Sapiens
  misc_feature (15)..(15): n is a, c, g, or t
  misc_feature (39)..(39): n is a, c, g, or t
ataaattttaaaacngcctgaagctgatttacacataanggcatacaaaccctaactgtcacccataaattaaaatgtaataccttcaaatttagctttcagttttaactaacatataaccatgctaactaggaaaagtttaaaattccccatttacaattaaaattgaactaagtgcattttcagcaacactagctaataaaacacacataattgtttaaatggtttggcttcaaagtaacattaaattccagatgaaatgcatgggctccacagtggactactggaattttgaaataaaagatcgaagatttgctaagactgaacaaaacattttaaagacccaacatttgaaatgcttctagtacacatcctagatcacttcctttccctttttcaaactaagtggggccccaatctttgcctttgttcactgctgactctgagacagcatggtgaaagaaatttacatagatattatttactgttaatgtattataaatgatctgagacttgtgacatgcaaggaaaaaatgagacgggagacaagtgatgctacatgatgaactaagcacatttataatgataaaatgagtatatatcgcccgatgc

SEQ ID NO: 460330 - DNA, 327 bp, Homo Sapiens
ctttacagcaatacaaaacggactgagacaacttatactataaaaactgcaaggccaggagcagtggctcacacatccaaagtacatgctttaaatagtgtcttatgtgtgtcacttggagagacacatgcttgagagaggtggtaggtctcaccatcccatcaatttggggttttaaatttctcttgaggaagcccacatgtgctacataaattctatgcacagaaagaggtgagacaaatgatatcatccctctatttcacacaacatgagtgtagccaagtattggtatatgcaacatcctagagttataattctcaagcgcca

SEQ ID NO: 460331 - DNA, 681 bp, Homo Sapiens
  misc_feature (27)..(27): n is a, c, g, or t
  misc_feature (51)..(51): n is a, c, g, or t
  misc_feature (59)..(59): n is a, c, g, or t
  misc_feature (74)..(74): n is a, c, g, or t
  misc_feature (82)..(82): n is a, c, g, or t
  misc_feature (323)..(337): n is a, c, g, or t
tgtgacatgcgagactgtaagcacagntcagaacctctgcagcgtctcaancccaacangaggagacgtgtggncttcaacnatgcccaacctgagcagggtctgcctctgcattacgcttcctcccatttctcttcctgggtcctgatgaggtgagctggaggaaccaatagtcaggatgccctggaattgatgttgctctgttttgtgctcacaaaacagccatgtaacacatgagcacctgagttgaagccatccagtcgcaagtcagcagacagcagttgatggaattctcagtagaaattcagtgagggtgcccaaannnnnnnnnnnnnnncacctatactctaccaatatatggtatttaggaaaacttcttttatccatagcacaaagatcagtcacatcacttttttatgatcatctgcttcatcagggtagaattaataatttcaccaaatttgatcagcatctctagtttaccagtactttaatattagttttcttacaaattaatgtattttgcaatatttccagaaaatcactgtgggagaataatgtaatatactttaggatatatttcctgaccttttcttaaatggcttcatgtgctattcccccaaattctgctttctctattttcttttttatttaacctataattatactttctagtatatt

SEQ ID NO: 460332 - DNA, 258 bp, Homo Sapiens
gaaccattcctcttccccttaaaattataaagttgttttgctttgtttaaattcaaactagtataatgtgtagtgggctacgtgactgtcacttctatataacagtgctaaactaaaggttatgactaacatgagagcactcaagtatacatatttattcagctccataaaaggtagtcaggagggttttctacacaatgtatgctctagttagcaacactgctctatcaagtaggaataggtaccgagctcgatcta

SEQ ID NO: 460333 - DNA, 277 bp, Homo Sapiens
aaggagtttcaacactgaactttaaaaagtctatcatattccagcaatattttttctttgtcctttatgttgtaagttgtgtggaaaaactacttcggtaagaaatgttactgagataacaacaactggctaatactggatgtagattgcttaggttttaaagtgactgcctgacttcacatgttattgctacagcctgcagtatgttcagcattatctcaaactcagggaccccacaggacaggagacaccctatcctgaaactggtgccactgag

SEQ ID NO: 460334 - DNA, 595 bp, Homo Sapiens
aggatgtggcgtgaaagtattcaagtgggagttaagcactctgtcagatggtctagcctccatcagggcagggatcaggagaacagagaaggcctggagcagctgtcagttgggtttgggaattcctctgggatcacaaaatgtggcctccactgtgggtccccagcatgagctcctagcagctgttctcgactttaatttcacagaccactttctgtgcagggaaaagaggaagaggccattgttgccagttgcagatgagcaatcctgaactcagactgaaattccagtccccagatttctaccccactcctggctcacacagatcaactgccattggaagcattgcagccatttgtaagtctactcaagaccactccagtggagacctgttccaaagcctggtttttaattacagcacctacaacacagactgagaaaaacaagaggaagaaaaccagttcctgtcatctcaaagtgcctgctatttttcttagaagattcaattccactacgccctgcttttagaaaactccatgtgtgaattcatataggctaggaagtatatatttacagtcaccagtagaattcatta

SEQ ID NO: 460335 - DNA, 214 bp, Homo Sapiens
cctctgagtgtgagtgtgcaggggcacattcccaccctggtgtgtaagggccagcatggtcctcatttagggtggggctagactactgtattgatggacaagagggtattgctgtaaggggcgtgccgccacaaggtacaagtacacggggtgcatgtttatgaggcttgagaggtgtcattccagagatgcaggggactaggaagccattttc

SEQ ID NO: 460336 - DNA, 280 bp, Homo Sapiens
tagggggcaaggtgagtcagcagggacctaggcaacttccagagcctccaagagagaccagcagcaggaggaggaggtgtcctgagggaactggacttctgggcagttgggcttttcctctgagtttccctcttggcatcattactgtctcattcctaactcctggtggctgaagtatgaagggccctgaaatgaggggccacctccatccccaacctcccaaagccactgcttccagcaaaccagacagctccaggctgcctgtagaggtaccgagctc

SEQ ID NO: 460337 - DNA, 240 bp, Homo Sapiens
tggatccttcagtaatggtcgaggtcctcattcatgtgttagctgccatgtaggttgggctagtatgacttcagctaggaaagcatgtttctgcttcatgtggtctctcattctccagcatgctcactcaacatgttcatggctgggtaaggttccaacagacatttataaggcctcttgaaacctaggcttggaactggcatacagtcacttcttccacacgtatacgggccgagctga

SEQ ID NO: 460338 - DNA, 405 bp, Homo Sapiens
atgccctccaggaccccgttgcagcgaagctggtccagcaccagccgcggctccagcttcccggccctcttctcgtggttggggacaatgcagcggacaaaactggggttggtgttgctgagtgtggccatgaggcggctcagggactccttgtagagctgtcccactgtccggaacataccccgacgggggcggccacctggtgggccgtcgcccaggctgctcacctgttccagccccacgatgccctccacgtctttccagatctctgccgtcagccggtctgtgctctggtggagcaaggctgcgacgttgtcattcagagggtccatgtttttcatcagccactcgttggccttgtagtcgcctgcccgcgtagtggagacactccgcgaactccaggta

SEQ ID NO: 460339 - DNA, 153 bp, Homo Sapiens
cgatcgatgaaagggaggaaattttctggagggatttatatttccaggatgttcaggaccctacctgctaccctcaattctgcccctaccgaggggttgtcctgataatcactgaacaggcctgtgggagaacctacctcaccccttcccctt

SEQ ID NO: 460340 - DNA, 240 bp, Homo Sapiens
atgaaggggaacttcatgtctctcattctcttcagtatcctgggcaactgtgttccccacaaatgcctgccatgctcttcctcatgctattcccttatctaaatttcccttcctatctgtctccattccagccctcaggtcctgaagatgtcgggcccacccatgttcctatgtgggtgctctaggttctagcactccatggtcattgcttgtgtacaagcatgtaatctcctttcatcg

SEQ ID NO: 460341 - DNA, 165 bp, Homo Sapiens
tcgatgaaaggaaatgagaatagggcagaagaaaaaatggcatatggctaagaatactccaatagtgacaaaggacccaagcctcagattcaagaaacagtataaattcaaggcagatgaaagcaaactccacctagacacatcatagtgtatctgatgaaaaac

SEQ ID NO: 460342 - DNA, 177 bp, Homo Sapiens
cccgatcctgccagttattaaataccttccctcttcaagtcctaaccttgcaggctaattcctccctggaagaagaggattccaacgctcctgagcataaaaaattcaggtccttgaatgacgtggacccattctccagctctctggtggtagaggcctgaggcctaatttattcag

SEQ ID NO: 460343 - DNA, 373 bp, Homo Sapiens
gtgtaaaataccagtatttgggtggtggaggatattggtatattatattgacctgggttgatgactactggactattttaagatacctacttctaaaacttattttattctagaggaccactaaaaatcagaattacagcaatcattttaatttttctactttccttgttaaggtcttctgcttacccaaagaatagtgtatatcttaacatgacttttaaaggggtatcttgatccccatcacagatttttatctatgaatagaaggattgaaaccctatttgatccctagctctttgtctgaaaagtgcataaacaggaatcttgaattattatatagacctcctcgcatatataatcgaagcaagacgtg

SEQ ID NO: 460344 - DNA, 452 bp, Homo Sapiens
  misc_feature (162)..(192): n is a, c, g, or t
gccccccgtggtgccgcttttaaagacttatgacaacatgaaagtggtgttcagcctggaatgctttgtcagagatgggtgtggatttaggttatactgggggagaacttttctcagcacagattctatgccagcttctttgggcttgttctgtcactatcnnnnnnnnnnnnnnnnnnnnnnnnnnnnnnngtagatgtgggatgaagtggactctgtcgtgtatattgaggaaaaaagaaattataattttaaaaaatcccttgtaggattattatctaaatttatatgtctaacttctactacaactacaggaacagtgagccttgctacttctttagtagcttcttggcagaattcctttctactgagttatttgcaaagatgcagctctacctttttacttaaggcctgaatggtgagcatggggattttgatactgggactcatca

SEQ ID NO: 460345 - DNA, 633 bp, Homo Sapiens
ggcatgattctttgcgatgctgtaatttttggggaattttcctccatatactcttttaagaatgtcatgttgcagagaaaacgaccagtaaaggctcggagcagctggaacagcaattctatatctccgtaattccttttgcagtagttcagcaggcagtaggccagcagcttgggctccttccagttggtggctgccatgttctccttgcggtgcctctcttggaagttctcactcacccacacacgtcgcaactggctcaccagagagtgctggctggccagccaggagtcatcgtttttcactataatgcttatgatcttgatggcctggaactggaggtccaggcgcatggtgctggtgctgggcgaaccggggcgcacagccgtctgggcaccccccggcagcagcagggtgatgaacctgttggggttggcagccagcacatcccgcagaggtctggcgtctttgtgttttaaaaaactcataaacattctgctccactggggatcgttcagtgtggcttccatcatgaacagctccactgtctgcgaggaatgtcgagtcaggaacttgatcaggggctctcggaatggactccccgcctcgatcagcatcgcccgctccgtttca

SEQ ID NO: 460346 - DNA, 284 bp, Homo Sapiens
cacgattctttgcagttactgtgaataacaaagtgctttgaaaactgcaaagtacttttccaaatttagtcattatgttattgtactagggaaaaaaagaaatcaggaaaagcccgtttcctggcacgttttagctaacgtgaaaaatcaggaaaaactgagttttaatttcaaaggaacatgttctctcttctcactttcaagaacttcactatcgtccttactacttctgtctaatctgcaaactcatggcaaagaatcgtgcaaagaatcgagccggtacc

SEQ ID NO: 460347 - DNA, 282 bp, Homo Sapiens
aacttttctgtaaatctaaaattattcccccaaaagtttatttaaataaggtgggttgagctatagttacatgaactgcaatgtcccacgccagcatccagcagcatggcacatgctaagtgccatttgcacatatgtgtgggcgcacacatgccgcatggaggtcttttctcatcagacattaaaaatacagagggccattttctccctgatgacctgttcgagtgtgccggatcaaactggccttccctgcagcggagtctgcaaagaatcagccggacc

SEQ ID NO: 460348 - DNA, 404 bp, Homo Sapiens
ccggcatgattctttgcattgcctagaggacagagtctgcattcttggcaggacaaataagagccttagcagccttcgcaagcccctctaccagctttattgcctgctgctctcctggcagaaaccctgtccctctctcaacgtcctaatgccctcagcacttcatccttagtatgcttccctcttccctagctccatcagaattctttacctacttcaaagtaaattgaaagcttagctttcaatctttccgtaaagttagccctattgatccctccctggagtacctgtcactgtcactcatacattaccagcacatgctgtcatgctccaaactaaactggagggttccactaggaccatgtttgatgtatttttgtggcatctggagcaaagaatctacc

SEQ ID NO: 460349 - DNA, 596 bp, Homo Sapiens
taagagttcgtttctgcctctgggctctcaagggactctcacaacacagccacccactcagtgttctgggaggagtatggagggaagctctgactttcccagacagcctgtagggcccaagtcacacctcctaaggtcaccctactccatcatcaccagcgaatgcaggaaggccctggaattgggaagtagagaagacccctttctcagttttactctattagattagaaaagagcacccttgcttaatagcgagttgggatgaggtttcagggccctgttacacttcatcctttctcaccgctccccaggctgaaggaaaatttgcagagttctcatatattctaggaaggcctcttgaactgcctggacccacagcacgtagccagctcccagcagcctcactgttgggaatgggccacaggtttgaagaagccaattcttcaaaggtctgctcgctgaccagaagtcccagccaggccccatacaatctcccagacctctactaagtagacatcagcttcagtagtcacccaggagctgcgcagaagatgcgggtcagtcccactttgcctgcaaagatatgccgggccgcc

SEQ ID NO: 460350 - DNA, 238 bp, Homo Sapiens
ggaccggcacgatctttgctgtcttgccttttctgcattgttgtttaattctgttgattgttttaatttcaagggtattatgtataggatgttttaatcctatcaatgtgaatcatgactagttgaaagaatgtttatttactctaaatgaaatagagaatctattcttaaaagtcctctttaatgtgttgctatgcataggatcgttccaaactcttaatatttcactcttttgttt

SEQ ID NO: 460351 - DNA, 472 bp, Homo Sapiens
ccatatttgtagagttctctgacaccagctgtttctgttgtgagtatagagtgattcagggcaggttggacaccagtgagtataatttctacaaaagcagtttgcaagagcctctcattctacctggaaattagtcacactgattctaattacaaggcttttgtgaccccagctgactggccacccctcccagagcaagcatttcaaccacccagctgcaatgtctggagactacttgatgttactaccactaaaagaactggagctcctgggggaaacccttcagatattaaccactgtattattctggacagaaagcaaaagctaaggtgggaagcccacttcaagaaacttccaaagactcctgggtcctggggaaatacaggatgagcccatatggctaaagttagctttgttgttgagggaactgtagatttaattgctggctggatggtttgtgttgctacttccc

SEQ ID NO: 460352 - DNA, 213 bp, Homo Sapiens
agcggaccggctcgatcttgcagtaagttatcttcttcatgatatatgtgaattattttatgtgcagattgtgttttgggattgtcagatctaaacttttattcttgctggctaatgtgctgatagccaggtctgaaacttgatgtgctatccagacacatatgatcagaaaagatctagagtgcaaagaggtgcctgaggagcaaagaatcg

SEQ ID NO: 460353 - DNA, 583 bp, Homo Sapiens
gatcaagtcgtctttggtgagccagtaaggtgaaagcttgctgactgtccaaggcacaagagaaaattgaggaattgaaatgcaacctgagtatcaaactaaatattctaatcaaaggtaggtactgttaggtggaattctatcagcaggcaactgcaaatgagaagaagatagaaggacgcccgtcgggactttggagggcattgttattttcccaaagaaagacggccaagggcagaggcatggattctttgcagagcacttccttttggtttttcagtactgtttcatagacagtgggctcacatgttcctgatagtgctgcagttgcttaggaaagcatcccagttaattgcagtaattaggaacttctgggaatatgctagggcagaagtatgtcaagtatgttcacatggaaggaaatgtggaattccaagagtaatccacacgtgagaaactagacaatgtacattcatgtgttctcttgaaaggaaagggagagctgtaagcttcactctgtcctacaccggagaaaagcaggaataactttaccgtggaaataatgtttagcttttatcagaga

SEQ ID NO: 460354 - DNA, 655 bp, Homo Sapiens
ctcactgagcactcctttacagacttacaagtctttactctgtgcctatttttctgcatttagcagtctctttatttgttggtcccacccaaggcccagcatgatgcctggtaccatacttagtgcttataaatgtccaatgaatgagtgaaactgaccaggttagagaaggggttaggtaaggagagctgttccaggaaaagccccagaatgaccagtggatttcagagaggcttctcttcctgattaccagaggcgccctgcacctacagatgaagaagggtggcagtttcaggtgtctggactggttctctgcaccccattcagggcagaaaggcagggtttcaggactgggagccagctgtgttattacaggtggcctgggttctgtgttgagcgagatcctaatggtcccttacatttaaggcagccatttccagcattttggccattgcatcaggagaaagagaggcaaaaacaagaggggatgtcattcaaagaacagtacactgaattgtgggggtagagtggggaggaggaaagaggcaaacatctggccactgaatgactcaccaaagttaggagtgagccatctgtgtgaatcccagaggaaaggctcacaagcactcatctgctacgtactcaccctgtaatg

SEQ ID NO: 460355 - DNA, 422 bp, Homo Sapiens
  misc_feature (330)..(376): n is a, c, g, or t
gttctttgcaaggggacatattttcaatagaaaaatcagcaggttttggcctttggtctgtttctgaagggtgagtattctccacgacagaaaaaggcaaaggtaggtcagaggtggcgagtttcttcattctcaaacaagggagaagacatcctttgattaaagaatgaggcggggtgggggagggaaggacatggaccccctccctttaaaatttcatctgggccttcaaggcacttcaaaagacacagagtgaacagtgctggctgccacttcactcggtattgactggatagtttagactgttgggctagacctggctcacccttnnnnnnnnnnnnnnnnnnnnnnnnnnnnnnnnnnnnnnnnnnnnnnntaggctacaaattttaaaccagacctctttcaaataaactgaaaga

SEQ ID NO: 460356 - DNA, 255 bp, Homo Sapiens
ggcacggatctttgcctgacacttctctccttgctgccgctggctagcacagaacatccagtccccgctgctgtactaagcaacacggaaccgggtggcacctagacttgttccctgtcgctgcagatgtagagtagtgtctttccctccttccaagctagtcgcccagggcagggtcgccctgtctggctagggtgctgcacccgcagctctcggtatcttaggtcagacgcctggaacgcgcaggccgtttct

SEQ ID NO: 460357 - DNA, 443 bp, Homo Sapiens
cacgtgctgttgcgattgtagacactgatggcattttatgatttttaagaacagattgtgtctgtataaaggtggagagggaggagacgcctgagatggggagcttgggagtggaagcttttctcatgcttgtgatttggtgactcttctaaatgctgattcattagggattattacagcggatgtcaactggttcgtggtcgatggggtgggtgcagaagatgagtagcagagaaaagggagagacgaaaagggtactaggctcacgtaaagtaatgaagcctttcccaaccaggatggttcacaacaaaagctgtgagatccacagttacaagtgacacgcatgcacacataggagttccacataggggtactgttgacatggagcacactagatagggaagcttccctactcccagcgcccccttcgggagaaaggtgga

SEQ ID NO: 460358 - DNA, 197 bp, Homo Sapiens
gctaaaaatcgagaatccagtttcaaaccttccatctggggccccatccacatcacagcgtatgagatacataaagtcctactatagtacagtacatatacaatctttaaactaagataacagctctgaggtctatatcaccattttcaataaatctttacctacaaatattgaacaaatctctactatagctgtac

SEQ ID NO: 460359 - DNA, 380 bp, Homo Sapiens
ctttcataaagttaagcaaaatctaatgatagtcaaatccttcctggtttgaactacacaaatactaattaaaacaacagaaactgcctttagaaattttgcttcccatattgatcctttatattcctaaatttattacaattttaactatgagatcatgaaggtaaattgtttcataaaactaaaaccaatgtatacacataataacttgagtatttcctggtcttgtagcgaccatcgatagcagggtatctcaaaatgagcactgatgacatttggactcaataattctttgcttgtagaaagttatacagatatatatattttaaactatgctactcctcatttatttaggaaacctaaactgcaaagaatcgtga

SEQ ID NO: 460360 - DNA, 389 bp, Homo Sapiens
  misc_feature (72)..(82): n is a, c, g, or t
  misc_feature (106)..(147): n is a, c, g, or t
atgtattaatagatgtcagcattttctctttattgggcatactgtgggccctttcaggctgaaatttggccnnnnnnnnnnnagcctaaggtagattatcggaccnnnnnnnnnnnnnnnnnnnnnnnnnnnnnnnnnnnnnnnnnnagtcactatggacaccaaagctttgccagtgacctttacccagccaggtacccaccacgttcttgcctgctttcactttgtggttaacactgtaaacctcacaccattttctgttttctctacttatttcttctcagactcttacaaatctgacttgatactacttgttatcagattcctccatttttcaatacgtccttcctactcaactctagtttttgttattatctctttactttttc

SEQ ID NO: 460361 - DNA, 667 bp, Homo Sapiens
taaaagagaagacagttatttaaggaggtttgagattcaagggcttttttaattttaaaattaaccatggtagaaacctgtgtgttaatatgctgagggaagttgcctatagtgagatgaaagatctaggcaaggggatagcaaggtgactgcaccagatacctggatatgggcaggaataaacctcaacagtgatcatgttgaccttgagtgacagggtataatgttttgggaaggtgctttgtaaactataaggggcaatacaaacatgtagtacaccttctctgagatccgggaaaggacaacctgagcataggttggggctggtcataggccactctcccctactgtttctctagagtgtgtgtagtccctagcaagtcttagatgcctcgagtcgtggatggaaacaaggtcccaggaccattgtcctgagcctcctttctccgtgctctacctggggaatgcttgactatcaacccacagaagctctctctggagcctcactgcctaaagagcttcttgtcgtaattgtaacctgtcatggttaaccccttgcaagcatgccctgccccttgtctctcccaagctttggctgctgcagcttctttccacaaaatcccagcagatagccgggcgtcgtggtgcgtgtctgtaatcccagcta

SEQ ID NO: 460362 - DNA, 466 bp, Homo Sapiens
cctgactcttgaggataaactaccacgcgacttgcgagtgagctggtagtgccttctcacctggcgtaggaagtgagcaaggtgtgcactgcaggtgctgctgccaggaagtgggcaaccccaggatggggattaggatatgaacagggtgtgagttgcctttgggacttgctcttacgaccaagaaggtgtaagctaggcataggctttcactgctggaggggccagccccactaagactggggtatgagtgggggttgcatgtttctcacccattggcccagactatgaccacccaggcaagtcctcagtgcagctgctactgtctctttaccaagcagaacacgccacctgaggcctggggattgtccacccatgcccatcatggctggttgctgctgtcaccattagggaaccggagcacaagcctgcgcagctcattttgccctcttcatcaagttgggcg

SEQ ID NO: 460363 - DNA, 531 bp, Homo Sapiens
  misc_feature (464)..(464): n is a, c, g, or t
cgcatcgagctcgccccaacttggaaagaggtacaggagagcgaccctctactttatagtgttgccaaggctgtccaacttactggttcagataaattacagcccaaaatcagagcaatttcacccatggtggtcactgttccacagtggggacggtgctctgctggtgactatcaactcggtgatctcagtcattttccattcagggctttagtttcttcaactgcaaaactataagctggaatgagattatctccatgttccccactatctttataattgaataacagaaataattgaaagacccgggaacaacaatttcgcagtcagagtaccctaatgctgaattacaacctgatgccaactaccatggcagttaaaagagactccgtgcccctggcactaggtcagacgttgtgggtagaatcacaggggaaagggagtgacaccctgactcggagtgngaggagggagattaacccatcacagagctactaaggaatgcttacagagcctcacatagcagcactg

SEQ ID NO: 460364 - DNA, 344 bp, Homo Sapiens
gaagcaaccttaggatgaaagaaacattcaacataagccctatattccatcatctctgttacctcagcataccttgacttaactataatttcctattctagaaatgtcctccccctcttgccagtgacatgtttctgtactgtcagattcagttctagtgccatctctttgtgaagtcactgagagtcccaactgggtgagagggctgtgccttcaaactctccctccttcagagcatgtaatgatagtacaaactaactgactttaactacatccaacaccaagttcatgttttatacagcaggccagtgattctctcctgatctgataaatacagtggtcca

SEQ ID NO: 460365 - DNA, 213 bp, Homo Sapiens
taataaggctaggcccacagttcctctttctcttgcccactggcttcgtttccttacccgtcgagtgattccccaggtgactccccaatagtgtgaagtgtactccctctcttggaaactgtgagtataataaactgtcttttgaatgacagtcatttcctgctctgtcagcctttaccatacctaagtaataataaagcctattaagaacac

SEQ ID NO: 460366 - DNA, 166 bp, Homo Sapiens
tgacttagcaggaccctatatttgccagaggtggcagtagcaagtaatttaccagagcttgaatgtgcaggtcttcactctgaaatgtgcaggtatgaggcaaacagggactattcatgaaacaatagcttttcttctatttgttttctaattcttcttccaaggt

SEQ ID NO: 460367 - DNA, 898 bp, Homo Sapiens
caacccaattgtcctttattttcggctcatctaatttacagacatgatttctgaagtttaacagtatttgtaatggcaatatccaaagtgattttggctgagtaaactgctatttgttgaacaaaaatgtagttgtttgtgcaagtttaaacatttcacaaggccagctgagttcatttcaaccctacttacaaaataattattggcaaatgaaatgggctgagggggtagagacaagatattttcaagcttctgagagatttacaaagccaagttcttcaactattgaaagtgaaattgaaaggtcacagacaattgaaaggtacaggtttaaatctcaggattaaaaagagttccaacaagaggaatatttacaatggaacaatgaggaaaatgttttgttacagtcagaaacatgggaaaatatgctgttcaaaattgttgggctcaggaataaataaaatccagacttggactattaaaaatatcaaagtgatccactgtgtgccaactccattttctcctgttgtttgttataaagaaaatccgttattgaatataatgcagttctggttaaattatcaaagacattttccatatgcaaactgttgtttaccatatgctatatattcttcgataacaattttaatacacctctatcacatggttccataggtgcagcgttagaaggaaattttgagttatattttaatctcttacccaaggtacaaaccccctttgtaacagccattcagctcattctgttgagcacctattataaacaaaattagagatacaaaaatacctttaagatgttaatggcctgttaggtggaagaaagcatctttgtccaatggttgccattaagcctagactgaaactcttctatcttgttggg

SEQ ID NO: 460368 - DNA, 242 bp, Homo Sapiens
ctctctccacactgggtatcttgcatttggaagtcacttggtgggactctcagtgaaggtagagttccatgcccaattggaagggtctaagagctgaggtggaagggagctgtagaaatctgaaaccacgggagaaaaagcataagcactgggggatgctgggtgaggactttatgggttctcacaaaatgacctttgcagcctgggttgtggttcagtccttggagccagtgtggagagag

SEQ ID NO: 460369 - DNA, 165 bp, Homo Sapiens
tctctccacactggaggaaatcttgtatacttggtattttagttcaggtttctttcctatttctcaaatcttgtgactctaggatgagatttagtttgcatagattgcaatttttattttaaattattgtaggtagccatggctactttttacagttggagagag

SEQ ID NO: 460370 - DNA, 247 bp, Homo Sapiens
attagagcagttattattaactgtattaccagtgtggagagatctctccacactggaaactgcaaggtctccctgtcataattttccataatttccttcttcctgtattgatcttaaataacattggtgatagaaggtattaggctgttttcccaagaaaagagtgaatacatctaaaaaatttccttggagtatattagttgctggtttatcaaaggaatcctttattacatcaagaatgaaacct

SEQ ID NO: 460371 - DNA, 244 bp, Homo Sapiens
tctctccacactgggaagtgaaaagagtaataatgtctgcttctcagcttacattaggtattcttatttttctatgatagttcaattatattaatatttattacagccataaatgtttcagaccaacacaatctatttttggggggtggggtgtggtaggaggagaaaaaggaagataatcctagggcaaatggagagaattctagaagaataacctatttagatgtttgccagtgtggagaga

SEQ ID NO: 460372 - DNA, 383 bp, Homo Sapiens
tctcccacactggcatcaaagcaccggtgttattctgaaaacaccagtggcctcatttttggcttttgcaaagcatgaattttttcatttggattgcactttcctggttcatgactgtacctgtaggtggttgttactttatatcagcttgacaagatatttccaaattgctttctgaagtggcttgattcctgttttcaaatccttactaatatgtggtgtcgtcagacattaaacttctgtcaggtagtatctctgttgttttaatttgcatttccttggatagtgagattgagtttcttctaatatgtctgtagttcatttggatttccttttttcatatcctttcccatttttctgttgggatcccagtgtggagagag

SEQ ID NO: 460373 - DNA, 137 bp, Homo Sapiens
gggtgacttagaggatcccctctctcacactggttggaaagagttgagagttctattccttgtgccttgaaacaggctgagtaggaagagaacaggtgacaagaaagcagtccctgtcagccccagtgtggagagag

SEQ ID NO: 460374 - DNA, 248 bp, Homo Sapiens
acattctcccttcctttgggcccactccactctccagacccttttcagagagaccccacagaatgcacctcctatcttcccgaagctcctccagcaggctgctaggagacggtatgagagcagaacagtcaatgcagaaagagaagttggagccaaagccctgagttggggagaacccgggagctgattgggcagcagtgagtggacttttgtggtcagaacacaggctcaggccagtgtggagagag

SEQ ID NO: 460375 - DNA, 584 bp, Homo Sapiens
tcgtctgactcttccaccggctgtggcacatcatgaatgaaatcctggacctgaggcggcaggttgctggtgggccacctcacccacgaccggattaaggacgtgaagcgccacattactgcccggcttgactggggcaatgaacaactgggactggacctggtgcctaggaaagagtacgcaatggtggatccggaagacatcagcattactgagctctaccgattgatggaacatcgacatcggaagaaagacaccccggtgcaggccagcagtcaccacctctttgtccagatgaagagcctcatgtgttccaacctgggagaggagctggaggtcatcttctcactctttgacagtaaagagaaccggccaatcagtgagagatttttcttgaggctgaatagaaacgggcttcccaaagcccctgataaaccggaacgacattgctccctctttgtggatttgggcagcagtgagctaagaaaggacatttatatcaccgtgcacattatccgaatcggtcgaatgggagcaggagaaaaaaagaatgcctgtagtgtccagtgccagtgtggagagag

SEQ ID NO: 460376 - DNA, 168 bp, Homo Sapiens
ctctctccacactggcacgtcagggctgtaaagattgaaggaaatcctttggcatgtgagaacataaatttggggtgtgggcaatgaaaaaatgctatggactgaaggcttgtgtcccacaaaaattcatattttgaaatccagtgtggagagacggggatcctctag

SEQ ID NO: 460377 - DNA, 175 bp, Homo Sapiens
tccactggaaagtatgatctcaacgaagctgcatttaataactgtttctctgagatttctttaaaactttgagttgtttgttacagtcataatctttctaaagttttatattagataatctaattcttaaagtacctattgaattatccagtgtggagagaggggtcctctaggt

SEQ ID NO: 460378 - DNA, 518 bp, Homo Sapiens
agctcggtacccctctctccacactggtttcatgtttctaagggaacttgtcctggttttcttgaaaggtaatcttcttgcggatcaactttgctaagaaaatgaaaagcttttccctctccctttaaatccctgctcgtatctgcctagagcaggaagagtccctgccagagccttgggattgcattgggcatttgagctctggagtcaggaaggtctctgttcaaataccagctgcgtcggtccctgagtgctgaccttgtgctggtcacctggttcctggagcctcggttcctcatctgtgtaacaactaatggagtaaatagagtaatgggaattcaccatctcgtgaggtggtttctaacattaaataaattaatataagtgaagcacacagcacattcctaacaaatactcaatatgtaatagatattctagttttgttattaatgattacatatatgatgattgagaagtcaatgacgacttatatacgccgtgctctgtaactgccccgt

SEQ ID NO: 460379 - DNA, 247 bp, Homo Sapiens
cccctctctccacactggtctagtgtcattgtggccttccttccctccccagccctgaaaggtcctgaacttgcagttcctttaatgcgctctggggtttcattgctcacctggatgcttgcatctcttccttgtcaggtaaacactcatcttttaaggctatctcaagttcagttgatgaaacctttctgatcttctagagagacctaatattcctctgtttgtgtccctgtgaactttatatgga

SEQ ID NO: 460380 - DNA, 748 bp, Homo Sapiens
  misc_feature (156)..(195): n is a, c, g, or t
tgtgaacttctgacctcgaggatccgccgcctcggcctcccaaagtgcgggattataggcatgagccagcatgctcagttcatggtggtattttttggtagacatagggttatgtcatgttgtccaggctggtgttgaactcctgagctcaaagannnnnnnnnnnnnnnnnnnnnnnnnnnnnnnnnnnnnnnngtatgagccaccacatccagcctgtatctttcatttttaagaagattactttgtagaatggtattcgtttatataaatgtgcttgagtcattgctataattagtaaatattggccttgagggcccccagtgtagtacagacaaagcttatttatatacctaatttttaacaaatagcatattattaagtaaaagaaaaatgatccaagtaaattttgaagcaaaatctgaagaaaaattaacaacataattagatatcattttaatagtatgtcagtggaaacaacacacaaactgtttttttctctgctctcacaccacaataacaatcaacacagaagatttctggtgaccaaatgtgtggaggtttctccccacacaccaagtaagcaatcagttctgcagtggacaccagctgggtatcctctagttcaattccaacactatctacctggagacagtgtcagatcccacagagtgtcagatcgcacagtttgagggctcagtcccacagacgtcctcctccttcctaccagtgtgccagtgtggagaga

SEQ ID NO: 460381 - DNA, 623 bp, Homo Sapiens
  misc_feature (413)..(476): n is a, c, g, or t
caaaaattttttaaggccaacctaaaaacaagatgggcgggtattttggattctaggaaaccagctccaggtgcagagcatctcccatgaatcgagtctgcagatagaaggaatctctagtcttttctttcgtagcctgagtagatagcagggcacctgttcattaggacctcttctaggcttgtcatggtaagcccgtgttgtcttcatatacaagaattgtattctgttgaatacagaggactggtggcagggtaaatacactccctcaaggggtagaaacaacagcaaaaagtgctagacattgatgaggctctgattcaagtgacgttcagctatacatttaaaaatccagtgggcttagccctgctcctgtctctaggccctaggtggggaaagtgaggaccacaacnnnnnnnnnnnnnnnnnnnnnnnnnnnnnnnnnnnnnnnnnnnnnnnnnnnnnnnnnnnnnnnnagggattacaggctggagcatctgaggtttaaaaggtgggagaccaggacccagttctgttacccacactggaaattgttagcatgcttgtcaaggcctgtagcccctgactcccctaggtgaatgtcaggatccctcccaggagta

SEQ ID NO: 460382 - DNA, 311 bp, Homo Sapiens
cacactggtgagaaaccctatgaatgcactgaatgtggaaaagccatatgaatgtcgagagtgtgggaaaacctttattatgagcaaaagttttatggtccatcagaaactccatacacaagagaaagcctacaaatgtgaggattgtgggaaggctttcagttacatttcaagcctgcttgtacatcggagaatccacaccggagaaaagccctttgaatgcagccagtgtgggaaagccttcagggacactcttcactgaagacacatctcgacccataccagagagaccatatgatcaccgttgagtg

SEQ ID NO: 460383 - DNA, 401 bp, Homo Sapiens
  misc_feature (72)..(72): n is a, c, g, or t
  misc_feature (117)..(117): n is a, c, g, or t
  misc_feature (215)..(215): n is a, c, g, or t
cagcaaaaagaaaagacaaagccacccaacctcccccttctcaggagagtcccatcctatactcctcgacanaactaggtaagttaatgtcagtcagaaggctaggacacttggaantggtccagagtttaccctgggaattgtgaaacattctgtcttttgcaggagacaaggcatgcaacctgataactaagcttgtgattggaaccaacccnatatgatcccagggtacaatgcttctctcctccactgaagtctcacagcaggggaaagggactccagacacactgcacctgcatgtcacctctccagtcacagagagcattctttcctgtctcctagacactaaggactaatgaaactcaaggtagaggagctcagactctggtcgctgtgccgaa

SEQ ID NO: 460384 - DNA, 538 bp, Homo Sapiens
ggaatcttacaagttttgttttttgctctttgattttagtgatgaatagagatgtgataatgttttaattagaaaattcgtacagctatctagctgcccatttttcagtttaaagatctcatgttacaagaaatttgtttattaccaagtaggcatagaatagaaggaaaaaaaatacctctaccattcctcagaagaagctagtaacaggtcagcattagttcttctaccgacaccctcttagtggtttcctttcccgtggtaacacagaatatcactcttactgtgtggtgtatgattttcccccaccctggaaatgctattggaagtgataggtaaaactgccaataagattgaccaagagggaagggaatgcaggactctgcctactaacctcactccccagtttcatgttagagctcctgtgcgacctcctgccatttagtttcacacttcttatacactaaatatttaacttttctttcacttttgactttacacattctttgtcctcagaccagtgctggaggggatcctt

SEQ ID NO: 460385 - DNA, 291 bp, Homo Sapiens
ccacactggggtcacaagagtaggcgctaaatgtggcctggccagagacagcactcattcctgcttcccaccgtggtgaggacaaggtgtatgtggccaaggagaggccttccatgagactcagaaggtgaggagaggcagagaaatggcttctctcacctgtcaatcccgactgataagggcactgactgtggctgctgcagccatctttcccaacacagaacaagggcctaggaaggaagccagcactctccaggaaagcgagtgtggcgagagtcagtgtggagagag

SEQ ID NO: 460386 - DNA, 444 bp, Homo Sapiens
aggctttctgctgagattaagcaggatttggggctttcaaaaggggagcgcacagaaggctcagtataaagattatccggcccagcgtgtaagagaaagggagaaagatgctgggggctgagtcacagcctgatgttacatggggaggattccctggggagatggagaactgaagccggaaggacagagacaggaaacccacagggattccataatgaacacctttgaatgctccagccagtcaggatctgtcccgtgcccgagtcaccgccagacagcctggcgctgaactcaaccgagctccacgtgacggatccgcaatgctccccgtgccgggaggaggctgctggttctaaggtatgctcaggagttcccagagatgcctctggccttgtgtggtttctcctccaccccccacgcctgagcagccccagtgtggagaga

SEQ ID NO: 460387 - DNA, 328 bp, Homo Sapiens
ctctctccacactggtaacaattttagcatcccgccctcacagacattggcttttattgcacatgaaaacattgtaacaaataaagcgtttctagtgaacactgaaagctataacacagcagagccctctggtggggaatctaagagcaagtataaaaaaattctttagacccatagttaaaaagcaacactattcatctgtatatttcatgccttgaccaggaatcagtgccatgtaggtatattttttatttcagtaggatggcaggctaattccagggtcactgatggctaagaatattccatgattactcgtgtggagagacgg

SEQ ID NO: 460388 - DNA, 165 bp, Homo Sapiens
ctctctccacactctggtttctttctgtgcaaaataggattattcattatatctatactttatacttgatacagtgtttgtatacaatttatacaatttaacgtatctagtggtggcttagaaaatgtggcgcaggagatggcagaggggtagtgatgatcccag

SEQ ID NO: 460389 - DNA, 260 bp, Homo Sapiens
ggattataataaattcagctactaaagaaggaactaactgggtaaagtttaacagaggaaggaaatttcaagatactaaaagctcatcaggtaaacgattttctatctcaagaactaatgataccagtgcacaggaatgacagaaagaatcacagatactaaattggctataatcagagacctgaaagtcaatgccaagccacaagagtggaattcagccgtgtggagagagccgtgtggagacccgtctggagtagagc

SEQ ID NO: 460390 - DNA, 511 bp, Homo Sapiens
attttagtctgtgccccctcctcttgaaaaagtgagatgtagaagactttggaaacaatattcacagacttttgaaagtgaaaaattgtaagctgattgtactactcttacaattgaatgagctgggcctattactcatggcaagagagaactcacaccacagggaaccactggtgtctccataagaatgtaagaaagaacccactatacgatttgggatttggtttacatgatttggaagagggtctaagtaaacagggattcactctagattgagtgctgcaagaagtcctatgaggcaattctatgggtatgtatctcaatagatcttatctatacggaggccagactagagcaaatctaaaaccgtaattggtaaagaagcagtagtcactcattttaactgagagatggagatgtttgatattttgcgggtagcatagtgatcctgtatgtactgtacctaggcaaattatggatcccttgttttgtctcactttattactggtac

SEQ ID NO: 460391 - DNA, 362 bp, Homo Sapiens
  misc_feature (64)..(64): n is a, c, g, or t
  misc_feature (97)..(97): n is a, c, g, or t
  misc_feature (131)..(131): n is a, c, g, or t
ccacctcaattaatcgggcacttgaattcacattgtgtagaatactccaaggttggatgatagnctgggaagggaggaggaaaggaggccagagatnaagcgattggggatacctgagccctatttagacntttggtccgccagcttttggatgaacttagcacattactggctatgcaggactaacctctatgggatgcaaaatgactccaagtatggaacaacattgcaaaaatggacttccatattacatgaaggatttggctgctttatataaatatagaaacaagcccagtagattactccactaaaggtgactaagcaaatgttacagttcaaattgcactcaagaagtcaatcga

SEQ ID NO: 460392 - DNA, 380 bp, Homo Sapiens
gtgttctacattcctatcatcacctgattgattggaatgatattgctatataataaggatttcgaacatacataagcattctgaggaaacatgaggttagattgaactgcagtggatgctctaccacagttcaagggcaagattattacagttgccttgacaaccatagctctgcactctctgttttattacatactctttttctatttgttaatccttttgagaagaaacaaaagaaagaatgtcagtatggtctcattttcaatttatgaggcttctggaaataatagagtcttatatagctacaaaaacgtcttcatttctttaaaatttccccaaacattggaaagtccaggcatatgaaatgaactgaaaggagt

SEQ ID NO: 460393 - DNA, 137 bp, Homo Sapiens
tctagttctgaacactgtacaaaaatccaatttctgttcttttttgtgactagtctgctggtaagcattgccagtgacagactcaggagtcaaaacatggtgactggagaaaaatacacatgctaggttgtttattt

SEQ ID NO: 460394 - DNA, 517 bp, Homo Sapiens
tctttatctttgacatatacagtaggattttaatgtgttctcacgtagatttctttggatttatcctatgtatagtcctttaagtatcatgaatatggatgtctattttttccctcagatttggggacttttttgccattgtttcttcaaataagctttttacccattttcctttgtttccctcttctccttctgagctttcatagtgaatatattggtccacttgatgatgtcccatgagttccttaggcttccttcacttttcttcattattttattgttgctgttgttcctctaacttgataattccaaatgatctgtcttcaagttcactgattcctctgtttgatcaagtcttctgttaaatccctctggtgaatttttcaattcagttattttgttcttcagctccttaatttctgggttttttaaaattagtttctatctctttattgatattctcactttgttcatgcagttttcctcatttcatttgattgtctgtgttctcttgtag

SEQ ID NO: 460395 - DNA, 495 bp, Homo Sapiens
aaaaatgtggaacgaactggattttactagaaaaacaatgtacttaggaactcctggtaggaactaaaacatgtttttaaaaatcctgcaaattttttaccaccacagtataaaaatactaacggcttatagattaataagttaaatctctgaatctttgacctttgacaaacgtcagtgttatgctttcactacagatagatgttttcctttggattgcctgataaagtatgcacagtatattgaaatcacttgagataaaattttgcaaggagtcagaaggttatgaatgcttgacatacttaaatttaggatcactactgtatcataaaggagattatatttcacagctatctgttgtctggaagctgtctaaatagatgtgttatttgtggacttacggaactggcaaggatcagagctcacatgcttcagcctccaactcaattctgcaatcggagccacatcatcactgccaaatgaccgggtaccgag

SEQ ID NO: 460396 - DNA, 463 bp, Homo Sapiens
aaaacatagaagatggagttcatcattttaaccactttatccattgtctggatttatcctatatttagcccagagattcacagatgtggaattcatgaatgggcattgtatgcttttatagatggaatgtttctgtctcctcaaaattcatatgttgaaatcctaacccatcgtgtcatggtattaggaggtggagcttttggaaggtcattaggtcatgagggtggagccctcataaatgggattactgcccttataaaagagaccccaaggagctccctagtcctgtttctgccatgtaaggatgcaatgagaagttggctgtctgaaacctgaagagggccctcaccagaacccaaccatgttgttactcttaccttgggctcacagcctccagaactatgaaaaataaatttctgtgtttataggctaccaggtttatggaactctattatagtagcca

SEQ ID NO: 460397 - DNA, 208 bp, Homo Sapiens
ggcgactctagagtagacccgctcatttcagttcccccattcatccatttgtcccattagttgctgtggattatcaagttttgaaggaactgtacatcccaacagactgaaacattctaagtgaaatgagtataatccaagtaactggtgaactttggaggtttggagcttgaagagaatggctaagaagatttgaattatagggagg

SEQ ID NO: 460398 - DNA, 531 bp, Homo Sapiens
ctcatttcagttcagaaaaaagaattaccagagacacttatgacagatggagcacgtcttcaggaactaacagaaaagctgaatcaattgaaaattattgcctgcctgtccctaattaccaacaacatggtgggtgctattacaggaggcctgcctgagcttgcaagcaggttaacaaggatttcagctgttctacttgaaggcatgaacaaagagacctttaacttgaaggaagtcctgaattctattggtattcagacttgtgttgaggttaacaagaccctgatggaaagaggtttacccactttaaatgctgagattcaagctaatcttataggtcaattttcaagcattgaagaggaggacaatcctatctggtccttgattgataaacgaattaagctttacatgagaaggctactttgtcttccaagccctcaaaaatgcatgcctcctatgccaggaggcctagctgtcattcagcaggagctagaagccctaggctctcaatatgcagggcaccgagctcga

SEQ ID NO: 460399 - DNA, 410 bp, Homo Sapiens
ttttttgcagcctaatgttctgtaatagtaacttgcttccaagtaaagtatgaaaagttagtggaggggccatggctgtggtctctgataggtcaaactatactattttggaatgcgtggagttagaacaaagtttttattttgttattaattagtaaagcaataaataaaattgtcttactaatatttatgagtttttgttttgttatttattagtaaggcagtaaaacatttagtgttttttctggagtttgttgaagaaactgaatattgatcgtgttccagctatggcatagaccagtgctgccccgcctgattcatatagcttcggccttgctcctgtcaagcagctgatttttaaatgcacgtgccctgtgacgtcagtacactgacacgcctcactgactcgg

SEQ ID NO: 460400 - DNA, 144 bp, Homo Sapiens
gatcggcgatggtcagttctctctcctctgcaagccttgctgatgtctccaggtggaatctaccctgtttagagcttttatggtgctattcctaaatctctgtgcatcattttatgcgactgtttttatgtttcttcatataca

SEQ ID NO: 460401 - DNA, 375 bp, Homo Sapiens
ttttaaaagagttatactcatgaccaaccaaatcaaaatctccaggagcaggaccaagacatctatatttttaaatcgctggaggacacctaagtgcaggcgaagttaagaactggtggcttggagttgacatctgggacatggaaggggagagggagctggggccagggaggaggaggcacggaaggcaagaaggaactttcaggtcagtcagtggtgttccaaggaggtacacgttttttgaagaatctgaccattcatttatttgtttgttcactgcttgatacaattacatgatgcccagcattggattaagcattgagtacatgcaagtaaatacgacttcgggcatgagcctctggaagtgcacgatcc

SEQ ID NO: 460402 - DNA, 137 bp, Homo Sapiens
atgggtaactgtatgatatacaaattattatctgactaaagctgttagaacattaggctaacatgaaagaaacctaaactctataaatgtttaagaaacagaaattttgtttcataatttacatttttaacttaata

SEQ ID NO: 460403 - DNA, 394 bp, Homo Sapiens
tcacacagatgttatggccaagacactgccattgccaactaggacagcgaaagggctgagtagggcagtccttctcatcactcatatccccgcagtcattgtcccgatcacagagccatgccctgtggatgcagtttccgttgtcacagtgtgaaatatgatgaagggcaatgtcttggggacacaggtcattgtgctcatcagatccatagaggcagtcgtggatgcccatcacattcccagaagttcgggatgcagataccatcttcttggcactgaaattcatctgagtggcacttaccaggaggcctggttggacagcctgcttcatccgagttgtcactgcaatcaaaaacaccatcacaacgatttgtgacgcctatacatttatccc

SEQ ID NO: 460404 - DNA, 536 bp, Homo Sapiens
atgccttaggacgacagtagaggatccccccagaaccaaggagggctgtgacgagttagccatgtcccgcagcagtgacttccagcaagaccgacacagcttcagcgggtctcagcagaagtggaaagattttgaacttccaggagacactctgtattaccgcttcacctccgacatgagcaacaccgagtggggctacagattcaccgtgacggccggacacctggggcggttccagacaggattcgagattttgaagcagatgttgtcagaagaaagggtcgtgcctcatctcccattggcaaaaatttgggaatggctggtgggtgtggcctgacgccagactggccaccaacgattaaaagccatccacttacttctgaggattgtgcgatgctgcggccacagtgacctgtgtgaccttgcgctgttgaagcccctgtggcagctctttacccacatggagtacggcctgtttgaggacgtgacgcagcccggcatcctccttcccttgctcgtgccctctttcctttttc

SEQ ID NO: 460405 - DNA, 468 bp, Homo Sapiens
cgtccaaaacaagcttctcccagggctttgatgtcatcgaggtcgcccggctcgactggctccttccgctacgtggtgatctcccagggtctagacgagccccggtccatcaccgtccacccggagaaagggtacttgcttctggactgagtggggtcagtatccgcgtattgagcggtctcggctagatggcacggagcgtgtggtgctggtcaacgtcagcatcagctggcccaacggcatctcagtggactaccaggatgggaagctgtactggtgcgatgcccggacagacaagattgaacggatcgacctggagacaggtgagaaccgcgaggtggttctgtccagcaacaacatggacatgttttcagtgtctgtgtttgaggatttcatctactggagtgacaggactcatgccaacggctctatcaagcgcgggagcaaagaccatgccactgacaacgg

SEQ ID NO: 460406 - DNA, 477 bp, Homo Sapiens
  misc_feature (11)..(11): n is a, c, g, or t
  misc_feature (43)..(43): n is a, c, g, or t
  misc_feature (85)..(85): n is a, c, g, or t
taaccagtggntggtaaacaaccattggggaaagaaagtcaangtctgaaaaagtaaatcccccccaggtttcaatccatgaatncaagccagcctttgcccagtggttaagtttcaagattctcccctgctagtctgggcttggaccccataacaagctgagagcctctcttcccagaaatctctgagctcggatgtcatagaacagcagggagccctgccctgttcccacagtgatgatgtgctcgtagaaactcactgaccggattccactgcctcgctccctggaacagacagacttgacgttgtatgatggctgccgtggatccaagaaggagacatgagcttgggagcccactgcataaactgaccattcactaccataagccagacacacattctcacgggcaatatggcagtttggtggagagagcttagatagtgtattttcagccttccagagatgaaagtagccat

SEQ ID NO: 460407 - DNA, 257 bp, Homo Sapiens
gggaccttacgcgatatatagtcatgcccggttccagccctttgatgtgtagtatcctactgaggagtcacaaaatcttcaaaaatagggataccttctcctgccgcaactactgtgatgcggtacccaataatggtggaagagtttagcggggtccacctcaggccgatgcttgaatcggttatatcaacaaagcttaggtcagtgagttggggcacctctgggatgatggtatcagagatagggactacttccct

SEQ ID NO: 460408 - DNA, 229 bp, Homo Sapiens
tcatatgagtactctcactcacagagttgcagcagcttggttatctcaggaaggataaatatgaagtaaatcataggaaggaaaaacatactcagatgaaaaccaagattaaggaaaatctagaaagtggtcaaagaatgcaaagacaacatacaggaaacagtgatacaattaaattaatggttgatttttaatcagaaacactaggggcaagaagctaatgagaaaa

SEQ ID NO: 460409 - DNA, 205 bp, Homo Sapiens
aggtggatctagaggatccctccctattagacattaggaggatgtagtaacattagctatatttgtgatatctagaatggcagaaaaacacctctgaaatttattagtggaagggatagaatagagtgttaactaacaattttttaaaaagaaatttcacacatatgatatataaactgaattttttgaagtgatgtctaatagg

SEQ ID NO: 460410 - DNA, 399 bp, Homo Sapiens
ctcttggagctattgagttttaagttgtatgaatgcattgcattacatttcaaatttaaaatacaattttaagaataagaatgttaactagataattatgtaacaacttaaaaactttgcttaccagaattttattaaaatgttatttggctttcgatcatttgggaaattcttcatttcttaaagatttatctaatttctctaccaagcatacacagtaataatagcaacaagaaaattaccatcagggagacataaaagcagtataatgaagctagtatagcaagaaggggtgctaataagtaacgaatactcagaggatctcagctttttatttataacaattgcaagagtctctggcactatgcatatctgcgtgatcaggattgcagtgatgat

SEQ ID NO: 460411 - DNA, 614 bp, Homo Sapiens
gtaagaaatagacctgagtttttatttctaacacccaatcactaaaccacggcagcaagcactggccaccgatttaatggattacgacacaggaaaccccatcagggttctatgtaatttagtgatactcatgtcactaatattgagcattatacttgatctgcattatattgttgatatgcagaggctaaactagtcatcatttgctctttcatctatcagtagagtccaaagttgtttgcttgaatggactacatgttaaagtacaagtctgtccccaccttgtgaattgcttgccaacgagcaagctttttcttgatacacagaagaaaagtcttatagtcatgaagttttcatcagcatttatgcaaagtaaaccactttccagttacagagcagaaacattatacatgaaaactgtctctcatgcatgctagctaaaaccagttcagagaccaagaagttgaagtgaggtctggaacaacagttgatgcaaagtcctaagcaacaaaagttgtgcttttgaagacttaggttttcttgtaaacattttggactataacatcacatccctaaagctaagggaaccaaattcaaaaagctactctgaaagt

SEQ ID NO: 460412 - DNA, 251 bp, Homo Sapiens
atcgagtagaggtcttgtacattttgttaaattgatgcctagattttaaaaaaatgatttcaatgctattgcaagtagtatttttaaaagtttgaattccaatgatcctttgtggtatataaaaatatagttaatttgtgtaaattggccttgtaaattgagatctctgctaaattcagttattatttctagtatcttcttgtagattccttaggattttctgtataatgatgtctcatagggaggggata

SEQ ID NO: 460413 - DNA, 616 bp, Homo Sapiens
gcaagctgatgccctttaaaaggtattccatccatggaagagctgaggcctgtgccttggtgttcccagagccccagggttgagcatcctgaaggagccactgcagccgtcactgtcccccagagcctgtggagatagagcctgtttgctgctttttcttcccgctcttaagacatgagctggagctcagtcttcattgaatgaagtttgctgtggtattgcatagctttgctttcttgaactaaactgtttgcccttcacaagtagttcttctttcaggattagttcgttccaaggaggctcttcagtctcacagataagtagatctctcctgctgtctggacacatttcactcggaaattgaatacaatttgtattcaggctgggaacctgaacacacacttgtgtttttaagcttcccttttttacagtggacaaggacacaaataataaataaatcatccctaatgcccaagacatgacctggtacttagtcaataacaaaataccagtaacttccagttgtttcgtcactaccttgtatcttgacgtaggatgataatagaagtactactctagagggcaacatcatattggtgatatcggtgttgactat

SEQ ID NO: 460414 - DNA, 320 bp, Homo Sapiens
catctttctcatgaaattagcagaagaaatgtttcaccaaaatgagagtcaaccaagtaaaaggaagacttaccacaaggaaaagaggccaaggaattcccagaatgatggcagtaaaaggaatttccagactgacaggtgaccttgagattacacccagtcaagatttgagagttaaaaagaatccaggaagaatggctccaagaaaataaagctgatagattatttgatgggtagaagcatactgagagagtgtatacttctactggtcagtttggaaactatattactcacagtaatcatcgttagtatttaataac

SEQ ID NO: 460415 - DNA, 534 bp, Homo Sapiens
cgacgtgtatcagcgaaaggctttccaagcaaaagcatggacattggaagtagtatgatgagtttggggaactacaaatagttctcgtaaattaggttggaaatgtaggccaggaatagaactttatatggtatgccatgggatttggatttcattataagtgttttcagaaagggatgcttttagatgatcactggcagtagtgtggggtgtgttcaggaatgttttcaaatctggacagggagatgagttagaaggatactgtggtggctaagatgagaaatgatgtagggctgaaaggagtgggagtggcgaagaggggataacctcttaggaagttataagaattgagtcatgcattgcttagcaatggggataaacacgttcgcgagggataacacgttcgcgagggataacacgttcgcgagggataacacgttcgcgagggataacacgttcgcgagggataacacgttcgcgaggatacacgttcgcgagggatacacgtcgcgagggtaccggctcgattctatc

SEQ ID NO: 460416 - DNA, 672 bp, Homo Sapiens
  misc_feature (335)..(335): n is a, c, g, or t
gcatttggagagaaagaactctggcctgattcctttctctcccacaaatgtcctttattcataaaccaggaataataattcctgtatctcccaattacatggaagctgcagccctcacagaagaagatgatctgagaaattctttgatttcctcagtacagttatacccatgcatcataatactttaagcctggaaggcttcttaaaaataatgcaacagtcaaacctaattttacagagaaactgacatgaaatcacggcagctaatcatgataaagctgggtggaaaactttatcttgatggggcagtacaggaagatgcagtaggaccttanggatgtcctggaaagtttctttatctcaggggaaactcccaggtaggctgtatgtcagggacacagaaaaatgctccctgaaagtcaatatattcgggctagacagacaaattcctgtaagtgtggtttgtctgggaaccacagatgtcactaatcctggtttgctccagagttctttttgttcactcctaccccccatcaccatttgattgatctccttaccctgtaatttccccttcttgtcgcttacctgcagtatctttcccacccaggcatgccttattctttggaaaggaaagtatgaatggagaggggtaagtcttgggaacttgtgtga

SEQ ID NO: 460417 - DNA, 848 bp, Homo Sapiens
aggaattgctccagcgaactatgtttgaagttctccaggttccggaactctaccagggtgatgccgtagtaatagttggttacgtaaatccgctcatccttggccagggggtccttcatccaggccccttcattccgcccatatgtgttctgggtggtcggccccgtgattgtggagagagtgtccttgcaccttcctatgacattccggatgtcatcttcttcttcggggctcagcgtggggctggcaggggttgttccccgcccagcaggagcatctttccccagcgagtctgttctgactgtggtgggaggcactgggactgtgtgcatagcttccatcaatgcctccctgggaagacactgccggaggagctggggctgctggttgctgggtggctgtgtgggccacaggtggtgggtggtaacctgaggagaaggctgcaggactgactcccttgtgggatctggagacaccgaggttgtttggagtgttggtcccactgaggcatggttggcgatgctgggatctgaggtcgagggctgtggcagtgctgaggaccagggtgcggtccgagcgttcaggtcgcttgtcacagcagtgctgtgtccctgacgggtggctgcaggcctccgggtgacactggtcatcaggccgttgtgtctcaggagctgatcttcaatcagcaaatccactccattgtcaccgctgaaaaactcatcttgctgctcttcaatgtcattctcttcttcagagaccttggctttatagtaggtgatgccccggatgacagtgggctgggaggccggccggcctctcaggtgacctgcctactgcaggggccctgt

SEQ ID NO: 460418 - DNA, 479 bp, Homo Sapiens
atactcatcaatgccagccaatactcatcaatactggccaaactcattgatacgggccaatactcattgatacaggctgatactcattgataccagtcaatactcatcaatgcttacccacggtggcccagaaccggctgctgctcgtcaagaccggccaatactcaatactgccctgaatgccagatctccccatggtacccggataccacataaatacaaactaaaaggacaggagaaaaccgcctaaatgtcacatttcacccacgagccagcctggccagggggcaaggcaccgcgccacccacgcccagccaaactcatcaatgccagccgatactcatcaacgccagccgatacccatcaatgccagccgatactcatcaactccaaccgatactcatcaatgccagccaatactcatcaatactggccaaactcattgatatcggtccaatactctcgtgatctgcgattgc

SEQ ID NO: 460419 - DNA, 699 bp, Homo Sapiens
cattgagccctggatgctggtttcggatgtcagggatgggttcagtgcatcatccctaccacataagcagggaggcagactttgagaaatttggagtttttcaatatgcccagtacatggagaacactctggcgatccattttggagctactagccttccgaagaacctgacagatgagctcaaggaagttagatttcatggaataatgagaaaggagctctttcagccctaaacttgtggcaagtgtgatgaccacctcagaagggtctttctgcagaagactttctaagaacttgtagcccagtttcttcgcctgctgtggctgttctgtaggcttctggtggggagtccgccactgctggaagttgtcattggaccatggtggtctgcggttcctacagtcctggttgccatttctccacctggtgtcattctcctggtcatgtctttggtctctagcttcgtcgctggcatgcccctcctggttcctccttccttgatgtgggttcctgcccatggccctaaatctctcttacctctgccagtaagcagcaggatggttgttggccctaggatgcattccagggtggctggctcctcctcggagagcattggctggtgggttattggcctgatttctagctcttggtgtaactctccatccacagggcctctgtgttggtatgggaattcctggg

SEQ ID NO: 460420 - DNA, 333 bp, Homo Sapiens
acaaaataaaataaacatcatttgccaccataaaccttttctttagagaggaaaaatttttgcagcaggacacaagggttctattaagtcatttcaatgctgagaaaaacaaattgagtaatagaactaatcacttccctatatatggatgttaagatgacaatttagattatttttcaaactaatcctgagaaaaaatctgtttacaatttaaacagtaatgttatgtaaaaagtattattaacaaatccactattacaaatatcaatttcctatatgggtcttctatatatacacacaattaaaatgggtaaatatatggcaaaaatattt

SEQ ID NO: 460421 - DNA, 655 bp, Homo Sapiens
ggcttcctgtcccacaactttctcacggtggcgcctggacacagcagccaccacagtccaggcctgcagggcagggtgtgaccctgcccgggcagccacccctccctgagaagaagcgggcctcggagggggatcgttctttgggctcagtctctccctcctccagtggcttctccagcccgcacagcggggagcaccatcagtatccccttcccaaatgtccttcccgacttttccaaggcttcagaagcggcctcacctctgccagatagtccaggtgataaacttgtgatcgtgaaatttgttcaagacacttccaagttctggtacaaggcggatatttcaagagaacaagccatcgccatgttgaaggacaaggagccgggctcattcattgttcgagacagccattccttccgagggggctatggcctggccatgaaggtggccacgcccccaccttcagtcctgcagctgaacaagaaagctggagatttggccaatgaactcgtccggcactttttgatcgagtgtaccccgaaggaagtgcggttgaaagggtgctcgaatgaaccatatttcgggagcctgacggccttggtgtgccagcattccatcacgcccttggacttgccgtgcaagctgcttatcccag

SEQ ID NO: 460422 - DNA, 660 bp, Homo Sapiens
gtgcatggcgttcaagaggatccccgccatggcagcgagaccagaggagaagcagaggaaagcagatatttgtagggggttgtttgtttgcaatgagaaatcagttcaaagcaaaggagatggtgcattaaaaatgttcttttaaggcagctttaaaaagctaactggagtgctccagtgtggcctgatcttaaaactcacctatggggagacttccaccctcaataaatatttcttgcatatgacttgaattaaaggaggcacatggggctggaagccgcccgaaataattttccctcccataggaagcagccgctgtaattcacttgcaagttatttcaaaaggcctgttctgatagaaattgctgccttctcgtggactgggatttttctcgtactgtctgtgacatcccttcttgacaagggtgtgtccgcccatattttacaatgcaccactccctcaaagagcgtctcggtttgttgttgcccttttttgggggtgcttatgctggtttctcttagacacctgagtgtggctgatctgcctcacagcctacactcagggagaccttcaggttagttaagggagtcctggggtaggggggctggacgacagtcattcaggagctctagaatgctggtgatcatgggaacactgga

SEQ ID NO: 460423 - DNA, 183 bp, Homo Sapiens
ggcttcggtaccccgctatccctcccaaatctatacttaagtcgagtcattttgtcaagtcagctcctttttgaaattctcctctaccaggtcagcccagagagagtaagtgctctcacttctacacccacagaatatttacccaaatgctgctctgttatttgactaaactagcggtgaggg

SEQ ID NO: 460424 - DNA, 379 bp, Homo Sapiens
catgagctggtaccctcatcgctacatttggttttcacaaagctaggcctgggcagtggggaccgggcaagctcccagaatcaagtcacccaggttaagacaccagaaagggccacaactgccgtccctgggctccagggaggaaaccggccacaccaggcagagcggctcgcctcccaagacagggtccgggggaccgtcccgtggtgacacacacagttgtggccacaccgcccatgccctaatcaaacacaccaggctccctgcaccatcacccccaccccgggaggtgggtcccaacttgccgcctatttaaagggaggaaacagggaacggctgctgaccattccacagggctgtccctagcggtgagggcggc

SEQ ID NO: 460425 - DNA, 184 bp, Homo Sapiens
gtcccccttacgctatacaaaactgaatagttttttgtgcacacctaaaattatctactatctggttcttcaagaaaaagtttgatgactcctggtttatgccagtaaatattcttataaataccatgttaatggctgcctaatattctaattaaatgctcagcagaatttccctagcggtgag

SEQ ID NO: 460426 - DNA, 429 bp, Homo Sapiens
  misc_feature (309)..(317): n is a, c, g, or t
accccctcaccgctagatgacaccattgagcacttcaaatttaggcactgcaaatattattactatgatttccatgtaattacgtaacataaccagagacactgctggtgttaagtctgaataaatttcctgtatcaggacatacttttcctgaacttgtttagaaaaagaaacatataacatcttctgatgtaaggtttctaccttagaaatggtcttggtggacaatcataacatgattacattttggcaggaaaccattggagtattttgagttcagcaaatggtaatacaggcatcatgagctcnnnnnnnnntaaggcatggattttaaggtgaaccatatacccacacagtttctattatctcagtacaatataaacagacccactgtgctaggctctgtgctagcagtgagggtaccgagct

SEQ ID NO: 460427 - DNA, 267 bp, Homo Sapiens
ccctcaccgctatctgggtgagggattttctttatgggaagttttgtaattagcaatttgatctcttaattgctacaggtctccttacattttatatttcttcttgtatcagtttaatagtttctgtctttccaggaatttttccattatactatataatctaatttgttgtacacaaacatattccattttaatccttttaatctgtaagactggtattcatcgccctctttttgttcctgatcttagcgtgaaaggcgtggaccg

SEQ ID NO: 460428 - DNA, 421 bp, Homo Sapiens
cagaatgttctagggaaaggaaacataatgtacaaaggctctagggcaggatcaagcctgttgtgttttccagtcagtaaagcagccaggaaggccagagcctggtgatgtagaggaaaaataccatgtcctagcggtataaaagtaggctggaatgaggtatgtagagccttataggccgtggtacagcattcagattttattctgagtgctacaggaagctactggagggattggaatgaaagagtgatgtggtctgatttatgtttgcaaatgattcttctgatagctatgtgtagaagagatagtagaggggcctgagagaaatcaactcagagagtagtggtgaggtagcagttcaatagagaggaatgaatgtgtgcaatagattttacagtagagcttttagcgtgagaggcgg

SEQ ID NO: 460429 - DNA, 148 bp, Homo Sapiens
tgaaagcacacccaagggtggaactcaagttatctaatccaaggctcagaatgtattctcccatgtatctctctacttcctttaatgtggtacgttagcacagtgatcctaatgtcagtgcctgtggaggtcacctataatagtataa

SEQ ID NO: 460430 - DNA, 384 bp, Homo Sapiens
catgcacactgcagtcacgaaggcgttcattcacgttccagttctctctgggagaagcagggtaagaccacacttccctattcacttgaggtcaactgtgactgggcggcttgttttggctttagagctagggcatcatttaccaccttctttccctctagtcctggcgtgaggccaatgacacggagcacacaccaccctccctaagctgtgcatgggcgcaggagtgccacacaccctttgactgttgtcagccatgcagattgggcacggttgttattgcaacagaacctggctcatcctgagtgacacacactcaccctcctcagtttcacacacgctgtgtcaagacacgtgctgcataccctcttctgcaggatgtaa

SEQ ID NO: 460431 - DNA, 271 bp, Homo Sapiens
agacagaatcttgctctgttgcccaggctggagtgagcctctgcacctggcagaggtttcacttttaaatgatctttctgtcctttaagctggagctggggaaaatgtatttatttatttatttatttctggatgctgtgtgggtgaggtagacagctctaacctttcagctcttggggcccctggtcccctagtggtgacaccagccttgcattctcttttctcaagcccccattttgtccatcaggaaatcttactgcctctacttttg

SEQ ID NO: 460432 - DNA, 473 bp, Homo Sapiens
  misc_feature (71)..(100): n is a, c, g, or t
  misc_feature (130)..(130): n is a, c, g, or t
  misc_feature (136)..(136): n is a, c, g, or t
  misc_feature (351)..(367): n is a, c, g, or t
catggatgctctgcaccccttcctaacaccttgccctgtgcatctcctccactgggttactctcaagctgnnnnnnnnnnnnnnnnnnnnnnnnnnnnnncaaagagtttcttgcgagttctgtgagttngatagntgcaaattatcacctacaaccctcattcttggaatcacttcacaagtgcctttagtgaaccaacgttaacactttctatctagaatgtgccacattctacaaatcaactaccgtggactctcctgaaaattaatgaaatgaaatatgaaagacggcaagataataaagagacataatcaaagacactgtgtaactttgggccacagatgggattnnnnnnnnnnnnnnnnngactccgagggacaagcttaaatatggacaatacatgagatgaaactgttaggtcgctgtctattttccttgggtgtaatgatgtaaatcggtaccgagctcgatc

SEQ ID NO: 460433 - DNA, 455 bp, Homo Sapiens
aacaaccccggacaataccactgtagttatattatactcccccatcctcacctctaaaagattccctgagtgtattaatacgttcttaagtatttaggagtgaaatcccatgaggactgggcttgctttaaaatattccagggaggtagaggtagaaaaatggagaagtatagatgcaagattggcaaaatgctgttatcaaagctaggtgataggccaggtaaagtggctcacgtctttggtttttaatttcctggccacctagaaagcagctggaacaagaaagcaccaatggaactagaatgctctaacaaattaaataaatctcagatttgctaatggacaatatgaagacatatattcttccctcaaggtaaccctttttccttgagacaaggaaatgtttcattttcactgataggattaagagtacagtgggaccgagctcgatctgg

SEQ ID NO: 460434 - DNA, 120 bp, Homo Sapiens
acgaccccggaccagcctcacctgccctgctttgtgattgctctgccgcatgccttgctgttttggaatctctgtcattagatggcattctccacctttcagcaagtggcttagttttta

SEQ ID NO: 460435 - DNA, 710 bp, Homo Sapiens
gagagctcggtcccccgtacactcccactaagacaaaagaatgatccagcccaatgtcaatagctgctgaaagtgagagaccctgattccatcttagagatcatccaagcacacttggtcaaattgtttttgctactgtctcatgaagaaaaggcagactcattaccgatggcaacatcgatgggagttttgcttagctcttctttgtggactttgggatacggtgtcttaccatttgtgcaagttgtgcattgcttacctccagggggcgccacccacatatttatgaaaatgccaccccgggagttgcacagtatatagtctatatggaaataagcagttgctctggttttggggttatcctggggtgctctggaactgggaggaactttatttctggccattagaggccctgagcatgatattgagtatcctttcaagaaaggagaaatgttgaacagagaggacctcatttttataactcttgaccatcatctagttacggagcatccacttttcacccctgggccataaccatttgacgcatgaaaaatcatcaaattataatatcatggcttatacttttgatagcttctgcccggaacatggcggtaagagcttctcattttcaattgattcattgggggagaaaatatacacggctgtcctaagactttctattacataccatttgtttgtccggggttgtt

SEQ ID NO: 460436 - DNA, 271 bp, Homo Sapiens
agctcggtcaccttttttaatatgcaatttgggcatcagtttaaggccattcaatttctccccatgagattttagacaaagccatgtagcacttcatggacttccaaattatgctctgtagtttccctaagagatgtcctgcaagggctggcgattgtaagtttacagttgcctccagctgggctttcaacagcacagtgaagaggaggttgttctgtaggggctgcagtctttctgaattattcgcagatacatgcaaatgaaactggag

SEQ ID NO: 460437 - DNA, 610 bp, Homo Sapiens
gcaagagcaatttggaggttaacagcaagatggagttgattaggtcagatttctttcactgtcataattttgtcactgttatttttgcaaaggtggtttcaccacaaaaagctttcgtgatctggcccccttgcctacctgattagcttaaccttctgcttttcctcttaaactcatacaggctactgtccattggattatgaattccttgaagtcagaaatgatgtatttccaaggcctagcacagtaactcgcatatgcttgggtaaatgctacataaattaattaggcaatataaaattctaataaggtcacagtgtgagagaacactgaaaaacatgtgctagtttctcatctctctgctttccattgctaagtataaataaaaacataaataaaaaacacacactgaactaaagatcaggtcccttcttcccctagtacagattcctgatcacttagacccaacatcctgtctcagtacccaccaggaagcactctgcttctccgaactgccagtcaatgccacatttgatctctgacagtcccaggtgccatgacaggaaaggatatgcttttccttgtatgcacagagccttgtccggattga

SEQ ID NO: 460438 - DNA, 212 bp, Homo Sapiens
cttttttctatgcactacaaattgtattgttttacacgtattaaatttttatcttttggaatactaaaccactttctggacatatacaaatgcctttaatgcatatattaaattatttgagttattgtacttttaagttctcatttttttatatgtttgtttataatcggttacagtcctctaataagtttttatcttattcggtaccgact

SEQ ID NO: 460439 - DNA, 549 bp, Homo Sapiens
gccgccgcatgagtcaaatgaagaccccggacaatcccttggactccagcgccccactgatgaagaaagggaagcagagggagatccccaaggccaagaagccaacctcactgaagaagattattttgaaagaacggcaagagagaaagcagcgtctccaagaaaatgctgtgagtccagcttttaccagtgatgacacacaagatggagagagtggtggtgatgaccagtttcccgagcaggcagagctgtcagggccagaggggatggacgaactgatctccactccttcggttgaggacaagtctgaagagccaccaggcacagagctccagagggacacagaggcctcccaccttgctcccaatcacaccaccttccctaagatccacagccgcagattcagggattactgcagccagatgcttagtaaagaagtggatgcttgtgttaccgacctactcaaagaactggtccgtttccaagaccgtatgtaccagaaagatccagtcaaggccaagactaaacgtcgacttgtccggggttgtt

SEQ ID NO: 460440 - DNA, 405 bp, Homo Sapiens
aacaaccccggacaaggccaaacaagttgaactgatgagagattaccgcattaagtaccctaaagccgacatgcagattttgcctgtgtctggagagttttcaagagccctggccctggaagtaggatcctcccagtttaacaatgaatctttgctcttcttctgcgacgtcgacctcgtgtttactacagaattccttcagcgatgtcgagcaaatacagttctgggccaacaaatatattttccaatcatcttcagccagtatgacccaaagattgtttatagtgggaaagttcccagtgacaaccattttgcctttactcagaaaactggcttctggagaaactatgggtttggcatcacgtgtatttataagggagatcttgtccgagtgggtggctttga

SEQ ID NO: 460441 - DNA, 678 bp, Homo Sapiens
  misc_feature (511)..(538): n is a, c, g, or t
ttttatggaggaaaaatcactattcaaaaatagtttcaattgggcaaatgtgtgtctacaactttgttgaaatggccagagtctgtgttgatcctcatataccaataaggttgttgtaacacaagtgttattagaccatagccaccaaatatttaatgtgttgtgccttcatgatgttaccggacattctcccggtagggtagttgggggaaattaagggataaatctctgattattgctgtttaactgtttgttatcatagttggtccatgcctggccggtacccgcatattgtcacttaggtccaacccatgaagtgaccactaatgtttataagatctcagttgcacgtgcctaccaatcccaattcggacattcttaggaggtttttgttaaggcatgaccgatgatttaaaccaataaatagcatgccaccaaatgtctttattgaaagaagtggaagttatcttaatgccccggttcaccctccatttaaaagttaaataaaccnnnnnnnnnnnnnnnnnnnnnnnnnnnnggtttgctaatctgatagttaatttgttcttaccaaaaaataaaattactttgtaaatagcagttcacattggtccacagtataatggaaaataatgggtaggggtgcattgcttattgaagtacatttttgtcgtgtgt

SEQ ID NO: 460442 - DNA, 481 bp, Homo Sapiens
  misc_feature (410)..(410): n is a, c, g, or t
  misc_feature (431)..(431): n is a, c, g, or t
aattaaacgtaaaaaggcaggacattccaaggctctctaacatgagtgtctgcagccccattcgctttgagatgtgaatgtgttaacccagggtggacaatggtgttgacttcattactagataaaaatccatgttattttgtttctcgcattgaaaggctgcttggctaaggttctgtgaagatccgatgacatttccaacactttgccttgtctgctttgctctgacaaagtgcttatgactactagatcttgctcggttatgtgagattacaattcaccggtttccatcctgtatgaaacagaagttaaacagttgtaaaagcaaaattccagggtctggtggttttcctgccagggtcatgatgaaaccatcctacttctgttgaacctcgtcccaggcaggatcngggtgcgcctacagcctgtcntcccagcgctccagggctcgtgaccctcctcctcctcccacttcagattg

SEQ ID NO: 460443 - DNA, 379 bp, Homo Sapiens
ggaccaactcggacaacaggcagtggggtggggtttggcctgtaggttgtagttctctgccctgctcatgtctatttcccaaaacattttttaaaccatacaggcgtttaaaaacaaaatctacaatctgtacaacctcattttaagtgactaagctttttcagtgtatgccaatacatgcataaaacaggtagttctgtctagtagtgttctgcctttttcaatcactattgaaaggactccctgtggcagcacatagctctttggtaaccacaaagtatccagtaaatagattgccatgacttaatcacatttgaatattaaattggtaccagtttcataaatcctacaacacacatatttgaccatagcttggttg

SEQ ID NO: 460444 - DNA, 518 bp, Homo Sapiens
acaagaaatttaatagtattttagttgggcagtgaaaatgggagaatatcaatagacatttgaaaaagagggaagagcttcagcaaaggccaggggagagaaaagccagtggtgaatattaggggctggcatacaactctaattgtgggagggaagatggcagagttacagtaaatgctggggagcagtaaaacaaaaggcttgaagtaggctgtatcagaatgtggtcatccttgagagccaggaggtttgggggagtaatggacattgttgaaactttcctgatgatatgctctcatctaagctcttggaagatacctaaggcagtgacatttgggaaaggaggcatacgtatttccacttctacacactcttcctgtgtgtgattagagggatactatattgtgaaggggctatagcctcactgtcctgtagaacagctgccaaagccacagtgctctttctcacagctgtgatgcattacttcagaggcagctttctctttgtccggggttgtt

SEQ ID NO: 460445 - DNA, 301 bp, Homo Sapiens
acagagacagggcgtccatcttctgcggttcagactccgatctcatttccccaatgaaggtttcacttgacggcaggtttagtggcatggcaaacaatgcctaactctggcaagtgtaacaggtctgccttggccagtctagtcatcttctgcacaaggaacaactatcagagctctgtcaataaaaaccgtgttagttagatgctgggccacgccaacacttgatggatcacgaaacttaacataacatacttggaggaaaaagcagaggtgcgtgctccggttgttggtaccgagctcc

SEQ ID NO: 460446 - DNA, 272 bp, Homo Sapiens
tgttttcttttctttttgaatttcccacaagaggagaggaaattaataatacatctgcaaagaaatttcagagaagaaaagttgaccgcggcagattgagcgcattgattgggggagagaaaccagcagagcacagttggatttgtgcctatgttgactaaaattgacggataattgcagttggatttttcttcatcaacctcctttttcttaaattctttactccttttggtatcaagatcatgcgtgtctcttgttcataaccacctgga

SEQ ID NO: 460447 - DNA, 262 bp, Homo Sapiens
tataaatattatttacatgccctatatatttcatattgacaaaggtatcattttacatatgtatatgtatatacaatcacccacagggtcctgcctcattggactttagaattagatatcatataatacaatatgttcattttacaaaagagtaaactcaagttctcaattacctgtcatatatagttccactacctagctataaagctgcaacttaaagcactaatctcctggagctagaactcaaatttgtagtctgtac

SEQ ID NO: 460448 - DNA, 329 bp, Homo Sapiens
aacaaccccggacaacagtaagtttcatattgtgatgtgggggtgggtgttgcagtttggcttgctgaaggtgttttgggtaggggaagtttatatcatgaaacacaacctaatcgaatgttgcacatggaggtggaaagtcctttggcttctctccagcaggactttcccacaggacctctttctccacggccttcaacctcctgtcatgttgctggggcttctctctcttcttaggactgaattcacatcctccccactctccccttttactggggctctcatctcatgtctccacagaatcctttctttgtccggattgtggacca

SEQ ID NO: 460449 - DNA, 469 bp, Homo Sapiens
aacaccccggacaattttaaatgagtcatcttacccctttccactacttttatatatcaccatgtaatcattcttttatacatattgtggggccactgtaaggagtttttatacatatttttctaaagacaaacaaatctctttactgtatgtttttctgtaattctcaatcttttaaacacaccaacatttttcacctttttaatgcttaatttttctcctgattctttatattctagcaaaaattctcaaacttgtcctccatctcagtattactcatttaaaattgttgggttgattgtgattattattttgctgtttataatgcagattttaactttttgtaatggattttccaatgtctttattatctttacttactttaaatccttttatttctacttttcaggtataatctttattatttcagtctgctacttgtttattttgtgtccgcatcttgggccag

SEQ ID NO: 460450 - DNA, 104 bp, Homo Sapiens
tcatttcctgctccagccccgtcctcccataggcagcttgctgcaacctgctgtggctgatccactgggtgggcccgagcaatggctgcatttctagtaggggg

SEQ ID NO: 460451 - DNA, 276 bp, Homo Sapiens
acccacagacacgttcaaattctggatgagaattcgcttctgcaaattagaagcaattcatctaagataatgaacacagaagcgaacgagaagccattttcctacatcctttcgactgttttaactgcaaacaaagataaagaaatgcaaggtgttagcattgctttttgtggcactttccaattttctgggtgtcaagaggcaattgtgactacagcattagcagtgtaactctggcttcctgattactggattgcagcaagaggagtatattca

SEQ ID NO: 460452 - DNA, 364 bp, Homo Sapiens
  misc_feature (17)..(17): n is a, c, g, or t
  misc_feature (107)..(119): n is a, c, g, or t
gacgaaatgtagtattnaagccaatggatatttaggagaggtgtgacagagtcctcataggccttgatgtcatctctagaaggttacataaaggtcagttaaaaagnnnnnnnnnnnnngaataggcacagttctgtcccccaggagcttgattatgacttcatcaggacaagacttctctgtactcatttctatcatcaagcaagtactgccactctaggatccaagatggctcagtccatttagacttcaggaagaagagaccactgtatacttatctcattttgtttgtacttaaatttgatagggaccagattgaagactatttaactagtttctgtttcctgtggttcatgcaacgtcg

SEQ ID NO: 460453 - DNA, 547 bp, Homo Sapiens
aaagcgttggatcagtcaccccatgtggcgactgacactctgcattcgcggagcaagcccgctcccacatttgaccgcgtttaggtttggttattgagtggatgttagttcgtacaaagaccgactaaaaaacgtgacagctgctacggtcttcagtctcgtagcgtcacgactggataatgccctcacccgagacgagcacggagtatcgacagttcgcggatccaggtcaggaagtagcgctggctgtcgccctccttcacaacctggtcatagaccttgttcttgttgaccggcgaccaataggaatcgccacagccgcggctgcaatcgtcatagagatggacatcgaagcgcgtgccgacaaatgcgttcataccacctgtccataccgagtaagacggcgcacaaccggccagcaacgtgcccgataaggcgatacccataattgctttcaaagcgttctccaatgggcgaggcaattgacttgactgcgttcgctcactaggtggtcggatcgtcccaggtaggcgggatactcaagata

SEQ ID NO: 460454 - DNA, 368 bp, Homo Sapiens
  misc_feature (348)..(348): n is a, c, g, or t
ggctgcagcgcagggccatgggggcctgacgagccggcagcacgcgggcgtggagcgaggtggacatcccgtctaattccgtgtaccgctacccgcccaagtccggaagctattttgccagccacttcattatgggaggagagaagtttgactcaactcatcctgaaggttacctgtttggagagaacagcgatctgaactttctggggaacagaccagttgtggtatggctgtaatcagtttactcctacttggagcttaagtggccaattcaaaaaatgtaacaaaaataagtttgcagttgcttgttcagcagtttgtagcttggtctgagttgagagagatgcnctctgagagagacaatctgc

SEQ ID NO: 460455 - DNA, 328 bp, Homo Sapiens
  misc_feature (154)..(243): n is a, c, g, or t
tccccgtacgcccaaataaagtcaagttttggagagggttttagtcattaggatcactcacatattgctgatgggggtatcaattggtatatccactgtgaaaaaccattcactagaaaagttgggccaggcccagtggctcatgcctcttggnnnnnnnnnnnnnnnnnnnnnnnnnnnnnnnnnnnnnnnnnnnnnnnnnnnnnnnnnnnnnnnnnnnnnnnnnnnnnnnnnnnnnnnnnntttttttgaattagctgggcatggtggtgcatgcctgtggtcccagctacttggaaagctcaggtgcaaggattgcttaagccca

SEQ ID NO: 460456 - DNA, 241 bp, Homo Sapiens
tccccgtacgcccaagagttcaaggacttgctgtagtaggagcctactatgcactatacattcaatatccacgataattgggtaaaccttttctgtaagatcttatccagtcttctaatcttgttttaagagaattctcttttaaaatgtactatagcctttctagtgggaaattaacaattcacaggaaaagaatgtaaacaatttttacctgcgcagtaggctaatcaagggaactcga

SEQ ID NO: 460457 - DNA, 261 bp, Homo Sapiens
catccataagcctgccaccaatagtaacaaagtgctggatgcaccttttgtgcttatctttgtgctaaatgtgcccgagggacacctagggaagaggatgcaggtctttaagagccatcagctccagattatggccaccccatgtgcagcacttagaatggaggccaaacccactccctcggaaattgtgtttccttgccaagatagggactgcgtggttgcccttctctgagggcagcgctggattttgggcgtacgggt

SEQ ID NO: 460458 - DNA, 526 bp, Homo Sapiens
atgaaaggaaaaaataaatttccaaggtaagcaaaaaatgagttaatttgttgccagcagccctacataacaagaagccctaaaggaagttctgcaggataaagggaaggaataccagatgacaattttgatataaaagaagaaatacagggcaacagaaatggtaaatatacagtaaatgtaaaaacaacccaccactaccaaagtttgttcttcttttaatttctttaaaggacagataacagtgtaaggcaaaaataacaccactgatggtttaataacctatataccatctgtatatctttttgtacagttctgggtttgcagaagcatgttaataccctatgtatttaaaagcgaaaatcagtaaggatgaagaaaagtaggagtggggggagactaaatctgaaagcaatctgaaacaagcccagctatattttaaatgaacaccatactcaccccaaagaggaaaaacaagtctaaataatttaagaacacagtacttgagccccacgttccctcaacc

SEQ ID NO: 460459 - DNA, 579 bp, Homo Sapiens
  misc_feature (225)..(289): n is a, c, g, or t
tgtagtagtgatgggctgattacctaaccagttagggtgaaaggaggaagtatggtatagtaaaaaatagtgtaaaatacaacctttggagtcaaggtaagtaagtctgttcattaagaatctggactgagaggctttgagttagtttatccagtttctttgagccttagttatacctcagccttaagaaagggacaataatgaatcttacttcggagggttagnnnnnnnnnnnnnnnnnnnnnnnnnnnnnnnnnnnnnnnnnnnnnnnnnnnnnnnnnnnnnnnnnaaaataaggcttagaattaaaataaacagtatacatcaagggcttaattgtgcttggcacctggtaggtttgacagaagaagagcaaagtacaatttaaaaaaactgaataatggcttctgagaataaaggtgtaaaaacatttgcattgtagtgaaggacataagaaacattcacttatctattagtgcagtatttaatatgtgtaattaaaagatgaaatatttaaacagcagcttgggttaaggattgctcaggagaaaggtgtttttatagggtttgggcgcacga

SEQ ID NO: 460460 - DNA, 221 bp, Homo Sapiens
aatatatactgtaccatgggtgtgttaagaatagttatactttataataatggaacttcatattattgcaatgcatatttaaagagtacttgttgaaagcataccattcatctaaagttaaaaattctggtttctttacagctataagaagaatcatttctgggcttgtgatgttaatattgcccccctactggggttatttgtccttgggcgtgaaggga

SEQ ID NO: 460461 - DNA, 303 bp, Homo Sapiens
acacggtatgtatttctaatttaccacagatgcttctgtattttatagtaagattgtttgagagtttggcttcattagggtttagttctctgaatgccactatatgctttagctctttgaactccggactttctgtcacaagcagtttttctccttagtttttttgtgtcttctgaaatgtcattttggtggattcttttaagaaaataccaggccctatcttaaattagaaatacatcccgagtagtatgtctcccttggacagggctatatgtcatgcccccaaaccccctgctcaagggg

SEQ ID NO: 460462 - DNA, 606 bp, Homo Sapiens
  misc_feature (79)..(170): n is a, c, g, or t
cggccgccacagcttctcggccgccacagcttctccccaaccacgtaagcttgttctttttattatttcagttttccannnnnnnnnnnnnnnnnnnnnnnnnnnnnnnnnnnnnnnnnnnnnnnnnnnnnnnnnnnnnnnnnnnnnnnnnnnnnnnnnnnnnnnnnnnntcaggtcccccggtcataaccaactcactccgttctcacccaaaggaaactgtaaatagaaaaggaaaataaatctgtatgtttaaaataccctatagccaaaggatggtagagaggcacgtgggggaaactggtccccttaagcaagacacccatgtctcaaagaaggcaaagggcagaatgtcctcctgtggaaggaactgcacaggtgcccaggaactagctgcatggagcaactgtcacagctaaggtgggtgtcagggtcccgcccgtcagaggcagcccagccacagtcaaaggccccggatgtcccactggtttggggaagtcatggtgattctcaggatgtcagacccactctccctgagtggtcgttcgttggtgagcctgcagaaagggtgagtctgcgttgggcgtacggggggtaccgagctcg

SEQ ID NO: 460463 - DNA, 456 bp, Homo Sapiens
acccgtacgcccaaatgataaagagtttttgctggcctgaaagtgtctgcaaggtatgtcatcgattccctataagcgaggtggaccgtccacttggaagaaggcatttcactgtaccttacttagatgaggatgcggggacaaaagtttacacctctcttaatgagtacagccttatggacacaagacagtctggatcataacaggccactaagtaggctgtacagtcagatgcagcaggttctcaggagccagtcagccttgctgagcactggtagtggtatctactgcagtggtactctgaaacagcagtaccagaaggtactagagggagaaagcagaggcagagagtgtgcaagggccaccatcagaaatgatccaggcctcttggactgaatcctaataattcattcagtcattcagtaaatgtttgaattcctgctatatcaggccctg

SEQ ID NO: 460464 - DNA, 364 bp, Homo Sapiens
tccccgtacgcccaattttaaaatttctctcttttgtactctttccttttatttctcagaccggccgacactcagggaaaattgaaaagaacctacatgaaatattggggtgaatttcccccgatatcacatgggctcttctctcacctgtctacctgcttaactgcataggagaggcaatgcatggtgctcattaacacagcaagcattaaagtcagaccagactaacatttgactcagtcttcatattcaggtgagcttgggcacctcgctcattaaccccaagtcttcatcattttgtgcatataatggggataactgtggcacccacctgtttttttgggcgtacggggaggagatactc

SEQ ID NO: 460465 - DNA, 705 bp, Homo Sapiens
gaaagattttctgccacctgatctaacgcctcagctccaggcacaatggataagtgagcttgagaggcttcaaaaatttgtctctttaatttagttatgtccagtgataaattatcttccctacccagaagatgtcttttgaccatttcccatgaatgatcagtctcgttataggaatacggggtgatgcagaaatctcaagtgttccaatcgtactgcatttgcatgtgatgctcgagactcactacctgatctccaagccaaataacagactgtcttaaatcattaatttgatttgccaatttttgatcgatgccttgttgggaattccacatttgggtggaattggcttgccaatcattaacaaaatgagccgtttgaatggattggtgtaatgccattccggcagtggtggccagtgcagtgactgtaattaggcccatgatcacagcgattaaagtgaaaacaaatctcttagctctttttagaattcgctgtaacatttcattaattaaatgtattgaggaggaggattcccaaggtctggtcaaagctaccagaatccagattccttctcgagctcgaaccaacattacactttttgtggagtcaaaatgagagttaatacaagtgtataaatgacaattaatgcactggacagtttgtcaaaattttggtatttcccactaacagcatgtaaggagg

SEQ ID NO: 460466 - DNA, 289 bp, Homo Sapiens
cttttctgggcggattgataagctaattggccataggtgacctagagtcagacaccttcatataagagcttcagacttgggacttacttgcatggcttccaagcctgcaaatctatacccttcctttttgagccattctcagtgctctattaatcctttttgtttctccctgaagggccatgccttacctgttgattcgaaaattcaaagagatatttagaataatatatcaaggaatatattttttgggcgtaccggcagtgtatcctctagagtcagctatgacgat

SEQ ID NO: 460467 - DNA, 332 bp, Homo Sapiens
gactctagacgatcccctccccgtacgcccaaaaacgggaacttgtagcatgttcagggctgaaagatattctagacttcatttttgaacaggtaatgaagataattagatgatgactgtggacatagaactatcagagtggaacattttatgaaaggaacactataaaactttgaggagaggcacttggggaaacttactcagaaggccaggtctttcttgatgagtatttttctttgggcctcctctttagatggtgacctagttatataaaatatttctatcagaagggaactgggttgggcgtacggggaggggatactctagagcgg

SEQ ID NO: 460468 - DNA, 414 bp, Homo Sapiens
agacatcccctccccgtacgcccaaaatcagtgcttttgtgagtgcttgtcccaattaacaaatcagctatgaaaaggtcctggcagatgaggcactgtgtgccttgcgcatatctgttcaggatgccagctcagtgtgaagcagattctggaagagtcagaaccttgtgcgagcagagaaaaggatggtaagagcccctggagtgtagactactctggtcacattggctgttacatgtcacagttcttacacatttcagtaccgacagtgaagtgcgcattcatgcctttttctctactgctctcagcataaagagggaataatgaagagagagcaggcttggtagccagagaggcatgaattcttgtcctggctccactagctatgaaaccttgggcgtacggggggtaccg

SEQ ID NO: 460469 - DNA, 211 bp, Homo Sapiens
gagctcggtaccctccccgtacgcccaaaaacagttgaccttagggagtgcatatccgagaatgcagtgatcactggcttattcctgacgaacaggtagtattttgcccaattttttatattaattacctcctaacttcagaagggtggtagtatccccattacaaaaatggagaggctgggcgtggtggctcacgcctgtaatcccagca

SEQ ID NO: 460470 - DNA, 367 bp, Homo Sapiens
cgagctcggtaccccccgtacgcccaaaaggcaagggcgttgtttgtcctgctttctctgcaccccagctccagtaccgtagtctttacatttcttcagcctgactgcttccccagctgttcatattaattgctccttcacattcttcctgccccagttcaccttctcagagagacctctttaaccacagtgtccaaagtctaatgactatctatttccttcaggaccttcagttgcaagagatcaaaggtgacttcagttggttaagcagaaagagagtaataaaaagatgttttgtggtttacagaattgttgagagggctggagagctaggcttgggcgtacggggggggatgctctagagtaa

SEQ ID NO: 460471 - DNA, 289 bp, Homo Sapiens
atcctggcccttctacgtacaagcttataaagttgaagttttttactaagtttcattttcctttttgtgaaatgatgacaataataatacctacttcataaggataaaagagcaatccctgttgtgggattctgttccgaacaggacattgacaatgtcaaaacctcccaaaaggagcttcaaacttccaagcactaaccactgcatgtataagttacagcagctttctaactggtctcctttttcatctttcctcacacttgggcgtacggggaggatcctctgagtc

SEQ ID NO: 460472 - DNA, 415 bp, Homo Sapiens
  misc_feature (106)..(158): n is a, c, g, or t
actaaagctgtacattagaccatgttagacttttaaaggtcttgaaacctaggccatatcccagaccattaaatcaatatctgggaatgggacacagacattgtgnnnnnnnnnnnnnnnnnnnnnnnnnnnnnnnnnnnnnnnnnnnnnnnnnnnnnttcgtatggacttcatcactcttgtttctcgattgcatccttgagacgtggaatattggcctactttggtgacctgttgaataagctcaggagctataggctttgtcctttgctgtggtcttatctgttttctgttctgggtatctgtaacacatctcctgacatctgttctatcaagtcctctgccaagcagttgtctggggcccaagctgattaactgaaatcttagctgctgtggaagagtcagcgttagtggt

SEQ ID NO: 460473 - DNA, 318 bp, Homo Sapiens
gctcggtaccctccccgtacgcccaatctcactaacacacaagtagcaacactttttcaacttttattaagattcttgccccaaatcaatccataatgttccacagaaaaattagctatctaattcaaaggcagaatctatattggttatcctctagatatgctggtaagcataggaaattggatctttaagatactatattcaagtctgtggtccatcacttactacccgtatgacactgggcaaaagtcccttacctctgagatcagtttccttatccgttacagtcaagtaattatttttttgcgcgtacgggga

SEQ ID NO: 460474 - DNA, 297 bp, Homo Sapiens
cccgtacgcccaacgtagcaaagttctgtttccctaatgaatcccgtacacgggctcccactcctgctcctgtctgtaccactcccacgtgcctggaatccatgaaaaatcttctgagtcttaagtccttaacacaggacatgagaacatctaatgaggacaggctcaaaccgtccatcaaatgccatgttaattctggaatattggaacatcagaattggtcctggtgaggctgggtttatttagttatttatctgctcacctgtttattatttcatttgggcgtacgggcagggg

SEQ ID NO: 460475 - DNA, 380 bp, Homo Sapiens
cgcctctagagtatcccctccccgtacgcccaaatggattttcagtggcctcacttttgttgcgagctgctgcattagttcaagtccttctcggttctgtgtggcttttcctttactgattgtgcttggagaggccgtgttctgacttgcccactgtgcctagtatcaaaggactcaagttctaaatccagctcattgttcttttgcggggtctggtagagaagctgctcaggcttttggtttgctgttggcataaggagtctctcctctgttcgcatgcagaagggattagagatgtgcaaagcccactcatccggagtccaaggcctaagtgattcctcactctccagtcggttgtccgtacggggggtaccgagctc

SEQ ID NO: 460476 - DNA, 755 bp, Homo Sapiens
  misc_feature (650)..(650): n is a, c, g, or t
  misc_feature (738)..(738): n is a, c, g, or t
gagctcggtaccctcgccgtacgcccaaactatatcaccccgtccagcctccttttccttagctcccttcacattctagtttctgcctgagccatcaggccctgtggcccagaccaggcatcttgaactatatcccagaccctcctcatgaacagaatcactgctcaaaagtcctccttttttcacctgccctgtgctctagtctagattctgatttcttgtggtgagttggtgttgccttggatttcttgtgcctgctcagatctgtggatttggccctaggtcctttttctttcttcctgttggcctcctcagctccctccctcctttctgccaggtattccctgcaggcctcagcgtcagggctacctctattgacaggggatccttgggcgttcgggccatagtttttctttggtgaataaatatgtatggcttacaaaacatgtgtttctaaatttatgaaattatatgtatgtttatacattcattcgtgctttcatttagccaacatttattaagttttttacatagcagaaaccacttcataactgtgagactctgggataaatcacttaagtttcctgagtgtcattttcttctctgtggaaatgggagggtaataatgattgggctccggtgtgggtccnggcaccttggaacaaggatagtggggacttttaaaggggctttcattcaggatggccaggccccagaagggtgttccagtggggttanggaatgttcccccccga

SEQ ID NO: 460477 - DNA, 320 bp, Homo Sapiens
tccccgtacgcccaaacactgctgtcagggacaagatagatccattctaactactattattgaacagtgtcctgaaaggataatctaaccaatgcagtgaagcaggataaagagtatactactggaaagcagacaggtttgggctacaagctaagtatctacctagaaatctgaagataataaattctgaaaaatggtcagacctattaagagaaaggcacaacgatgttcactaaaagatacattttaaaactttgaaaatagcttctcagtacaggtaatagccatttgtgattgggcgtacggggagggtaccgagc

SEQ ID NO: 460478 - DNA, 436 bp, Homo Sapiens
  misc_feature (43)..(80): n is a, c, g, or t
cggtacccggctcatttcagttttgaaacgtaatcgtccagannnnnnnnnnnnnnnnnnnnnnnnnnnnnnnnnnnnnntgatgtccttttgaagttccaatgtttccatacctcctgtaaattcatctaaaggttcattgatctcgatgtctaacacttcatcagtgtaaagctgctcctcctctggctcttccacatattctatttggtcttctgtcaactcagcttcgtggccttcatactgtccttcttctgggtactcttgagtatacaattctgatccatcagatttgtgataaaccagttcatcctctccttgttcttgttcatactcagattcctgttctccagattggtcgttagtgttgtcagagagttcaaaagatgtaaccatgccagatgtagcattcagactaattgtagcgcacttaaaa

SEQ ID NO: 460479 - DNA, 489 bp, Homo Sapiens
  misc_feature (49)..(49): n is a, c, g, or t
atacaaccttgccatcgaggagcacttgtacatttggggaccccatcgnttaaggccatgtcactagaagcgcagtttaagaaaaggcatggtgacccatgaccagaggggatcctatggttatgtgttccaggctggctggcaggaactggggtggctatcaatattggatggcgaggacagcgtggtactggctgcgagtgttcctgagagttgaaagtgggatgacttatgacacttgcacagcatggctctgcctcacaatgatgcagtcagccacctggtgaagaagtgacctgcaacacaggaaacgatgggacctcagtcttcttcagcagaggacttgatattttgtatttggcaactgtgggcaataatatggcatttaagaggtgaaagagttcagacttatcaccattcttatgtcactttagaatcaagggtgggggagggagggagggagttggcagtttcaaatcgcccaagtga

SEQ ID NO: 460480 - DNA, 369 bp, Homo Sapiens
gtgaaatttgaaaggagcatattttgctcttctatataaaataaccattgcagacctaagcttcaaggtaaaggagccagggaggagagttgagatgagtgagtgactggtaatttggtggccaggtaattcttctctgattggcacagtttttactcctggcctcttgtttctgatctgaaagacgaattaaccagtttaatagttggtagttggtgaagatggcttaagtgagacctatgtggtcttgttaccagaaaaacttgctggtgaaagacagagggtggagcagctgtccacgatgtgagcccagtggtccagagataacaattcgttgaattgggcgtacggggagaggatcctcgagag

SEQ ID NO: 460481 - DNA, 278 bp, Homo Sapiens
gagctcggtaccctccccgtacgcccaaactaaccattgtgttatccttcaaaatcaagccagaattacctttctaaagggcggatccacattattttcagaggcatctgcctcgagaccccttcgtgactgcctctgtgttcgtaggatctcaggccttcctccacttgcgcacccaagtcgatccatgcaaccccaccacgcccacgtggcagtcctcactccacacacggtgggtgagttctgtggatacgcaggcatatttgggcgtacgggga

SEQ ID NO: 460482 - DNA, 457 bp, Homo Sapiens
cccgtacgcccaaattgggtcacacctggaactgagcttattgtcattcttttaagagtgaggggggcaaatggaaataggcccagaggacaataaacagaaaagttaggagattcagaatccatattatctaaagaatgattcaaagactgagactatttagcttgaaaaagagaaggtttagaagagtgccatagtcttaaaaggttgttttttggaaaaaagaacagacgcttgttagaaccaggaaatggatacttaggggaatggggaagagttcagtccaacgtataaaaacatttcttaattaatattttgctctctgcagacaggctgtcttgaaagaagggttgtcattattacagatgtggaagtagatgctggctggccactttttgttgctactgagtgggggatttttattcatcagatagaggattgggcgtacggggagagg

SEQ ID NO: 460483 - DNA, 220 bp, Homo Sapiens
gccgtctctagagcatcccctccccgtacgcccaaatggaggaaggactgaatcctcccccgaagaaggacccctctaggcggctcccctctctcccgggggctggagtaaggcgggtggtccataagtcatgaagaagggggtcgcactcgtgttgttactgaactcccgctgccctctcaggacgcaggttagcccttggctcttgggcgtacgggga

SEQ ID NO: 460484 - DNA, 349 bp, Homo Sapiens
tgatccccccgtacgcgcaatcccctaacgagtgtgtgataaaaaagaactggcaaattatagggtctatagaggattcttatggttgagaaaattggttgttctcaagggcacacacaggcctaccctttttttcatgtgtattcattacctaaatgcacctgtagctagtgcatattttacgtagcaaattccaagtatgttttaaactttaagcttttgtacttaacagcatagacttgaggcaacaggccttagttataaaatatcctcagaaaatttgaagctcatgaaaaagaaaagtcaatatgagctggtaaaccagcacttttttgggcgtacggggagg

SEQ ID NO: 460485 - DNA, 430 bp, Homo Sapiens
ctcaaaattcactcaacttttgagacagcaatggtaataggcagcagagaagctatgctgcaactgagggcacatatcattgaagatgtcacaggagtttaagagacaggctggaaaaaatctcatactaagcaaacagtagtatctcataccaagcagaaccaagtagtatctgctcagcctgccgctaacagatctcacaatcaccaactgtgctttgggactgtcaccaaagtcagattcggtgctaaccaggtggcatctatgatcaacgtcgcccctcctatttaacaaagggctctgaaggaggtgttctccaagcaacaaggagactgcttcagtacaagactttgcaccttgaattcaattgcatcaagtgtggatagcaaaataagtatcttaccatttggggcgtacggggaggggatcg

SEQ ID NO: 460486 - DNA, 143 bp, Homo Sapiens
gttggaacagtaccacttttcctttacgattctattctttagttgggaaatgttttaaggaccccaccaaagcaacttagggaaaagaaagacttttacacatacattcacaaacacattcatacagaaatacgtaggaatga

SEQ ID NO: 460487 - DNA, 202 bp, Homo Sapiens
aaaatgggactaatagtcatctttactgcacagagtaaatagttctgtataacatattacaagattacctggtatgtggtaaacattgaataagtattacttgtttttattcctgacttggaaagttggccttagagatctctctatcctgcatttccgggcctcggcctgctactgccccctggaccctcggtcgcccccg

SEQ ID NO: 460488 - DNA, 366 bp, Homo Sapiens
caactttctaacataaaagtgattggaaagagtcctttcttctgcagtgtttcaggtaatttatggattgaccaaaaaaataccatccccaccctaacatgtagcactggattcaatccccattacttagcctagagttctaagcctgtcagaagggaggggccctcgcagaggagtggggcagttctctgcagcgcagcttctctgggcctgccgagttaatgttgcctcatgtctgccaatgatgttgttgagcaggatagggttctcgttgaaccttgaagctcagtgctgaccatatcacctccttctgctctggggccttacttcaccactttaggaagcacttatacaccgctctgttca

SEQ ID NO: 460489 - DNA, 147 bp, Homo Sapiens
tagatctcaatcaggtgacactgaaaatgtttggtcataaaccacagtgaaggaaggggaggcagctgttagatcatctgccttgacccacagtcctcatccatttgcaccttggcaagccctctactacatctgatgtactcgtta

SEQ ID NO: 460490 - DNA, 217 bp, Homo Sapiens
ttcagcatattgttaagcctttataatgcaaatttgtaaacatctttatatagtagccttctgccaatggttaacccatccatcttatgctcatttcatcctataaaatacaccccccccaatctggaagtatcttattctagactcctatatgctgaactgcaaatatcaactcgcggtccagtttcactgcttcttcaacctgacttatcgtcag

SEQ ID NO: 460491 - DNA, 421 bp, Homo Sapiens
tgtagatggtatcagccgttgggaagattctgagcaaaaatggccacaagcattctattctccctacggtatccatattcctccaaaggtgactttgaagcccctctatatcaagggagtggggtctttttctccaccccttcaatgtgggctgattttgtgacttactttgagcaacagaatacagcaaaagtaaccttgtccttgcacacctgtgcctcacacactgctgctctctctcagaaacctgccaaactgccatgtaaacgagcctggactggcctgctagaggcagtgaccagccgttccggctaaggccattctaggccaggctgccctcagccaacttcagctgactgtaaatgcatgagtgacctcttggagatgagaaggactgcccagctgagcccagatcacactg

SEQ ID NO: 460492 - DNA, 557 bp, Homo Sapiens
ctcactatgggcagctttatactgggagacaagtgttccccgagcttcgggccccatggggcaaaaaagagtctaagcgcgagccattgcacatcacagagttctgatgctgtgtaggtgaaaatgggttagagataagccagccagatgattgtagagcatttcagattaaaccaagccattatggttgattagttccaaactattacatgtcacacaatgtaagactctgtgacccttagtgtccagaaagattcagcccaatctggcggtaagcatgttgccaggaaggagacaaataaagatgaatgccagctgagggtggaagaggtgacatggctaacaacgtggagctgatgcaggtcaaacaactccagatatcccctcttatggctgagaggtggtacaaatacatgggacatttctgcctgcactgtggatatctgggacattgtgtgaatcctttcagtgacaggaaactcactaagctgggaggaatgtcatcttcagcaagctttgtgagaacattgcctatggctactaataaagcatgcaaa

SEQ ID NO: 460493 - DNA, 361 bp, Homo Sapiens
tccttaacgatacatcagctatttggttgtgggttttcaggaagccaggcctttgcatagtgcagatgctgtaaaatggtatcttgaataaagaaacttaaatattgctttaacgtgagccacacctgtgtcatgcatcctttaccaggaaacctatactgctgggagtccatacaaggagtcctttcttgttgtctacttgacaagacatggctctccactaggctgcattatttaagagccaaggtaatgggatggggtttttcttctgtctttttcaaatgaaggagctcttgaagacttatgataaattatgctggaagttatcaaaatattctattccaagtgcttttagaactga

SEQ ID NO: 460494 - DNA, 541 bp, Homo Sapiens
agagagagcttttggatccatgctttggccttctaaatgcctagttgaattttccataacctgtcctattggaaaagtctgatgttaacatctcagtggtagaaggcatttaatgtttttcaaaaagtatttgtgctatccctcttggttgttacaatcatttctgtgaggtaggtaagagtttgtattctaaatacagagaaactaaggaccacagagatcacagagaaagacatctgcagaaagggagcacagcttcacaccagcgttcatcacaccgccaccaccgactacagctctgggattctggagagcttgctttatttaaaacaagttgagagttttggctcatcataagccattttggaattgcactaactatcctgagagaaatgggtttgtctaatccagaagaatgactttgcaacagggtcctttgttgcagtggtgccaggcctgggggctgaagttagggctcccgagagagagggtattaaggctgaccggctttaaaactgaactgtatcgttatgtatcctct

SEQ ID NO: 460495 - DNA, 244 bp, Homo Sapiens
taagatacattcagtcataccaccctgtcttgttccttaacattgatcagttaatcaatgaatcactcattatttggtacctactctgtgctaggcactgggttagaagcagggacagaggctgaactatgaagtaaagcagcatgttttgagccctctgtgtatcctcactctctgaatctacccctctctccttgtccccctttcttctgatctgttgttccctgcgtgtatcataaagctg

SEQ ID NO: 460496 - DNA, 179 bp, Homo Sapiens
aacgatacattcaggataaaattacgcagtcatgtaagaaattatatctattaggctaatttaatcaccgaatactttaccgatggattcgaatttagaatccgattatcttcttaccttcggactgtcagagctggtatctctcagcaggcggaggagggcaaaggtccgttgcacac

SEQ ID NO: 460497 - DNA, 466 bp, Homo Sapiens
  misc_feature (382)..(411): n is a, c, g, or t
aacgatacatcagcatacagggctcatttctctatttttgtgcatacctctgcaattaattttggttatgatttcctatggtagattggaagttgctctcatatttgccctctgttagagtaagctgtggggttgttgatcactgtgtggttacacccaggctgtggcagagattcaggtcacattagccagcctgctgccatttgagttgagtcaagatactgattctagagttgggcttaattaagtctttaaaattttttgttttgtttgggattttctattctccttaactgcattggtaccagatccaacgttgaccttatattttgaaattttggtcagtttgtttatatggtgattttgcttatacagtgttagnnnnnnnnnnnnnnnnnnnnnnnnnnnnnntcaaaatagtaagaatacataaagaatcagacagtactacaaggcttataattag

SEQ ID NO: 460498 - DNA, 469 bp, Homo Sapiens
caggtattgttcatgtatacagcttatggagcttataaggacattggacacccacatttatagccaggccctttgattctcgggagataatgggctcaggaagtgtagcagtgggtggagacattatactagaattagtctgccgctttgaatacaatctggatttcttgctatttcttgtgcaacctgtacgccatttcctctgaacttgctagtgctctggagacttggttgtttggccaaggaatatcccctagcaggagggctcactaaggaggggcagcttgacaggcagaaaagtgatgtttgtcaactaaagaagttttcttttaattaatgttagagtctcccatggttttttgtcaaataaaaaatgcgaaatcaaaatatgatctcggttctccacacccatttttacctttaagagcctctcacaccttggagagcttgccttactgaatgtatcgta

SEQ ID NO: 460499 - DNA, 333 bp, Homo Sapiens
cctttttttatcagtgggggaaaacttcaaagagaagtaatttcactcatatagagggatcatcaatagaaaataagttacacactatattactagtgctcctatacatcatcgctacaataccttttagtaagttgtataactcaaatgtttttctaaaacagggtcacagaattagatagtagttttggtttagataacttcaaatgtatcttagactgcactgtaacgtcatcagctatacttgcacatgactcagcatcaattttaaccacagtacctgttacactactccagaagtttacaatcacggagccttttatagaccctccg

SEQ ID NO: 460500 - DNA, 431 bp, Homo Sapiens
tcaacattcagttaaaaacattccatactgtaacaaaaatttcaatctttcaaaagtccaactacccttagtttgattcaagctccatcaaagatgaattggttagtttttaatctggagtttacaagtcatagttaatatttcaaaaagcctaacatagacgatatgtttgcccacaaaaggaataaaaagactaatgaaaatggtaaattatttgctttgggctggaattttagtacctaggtctgcctacatggtgccagtcagaagcatgatttgtgttgtacatgcctttatgtagcaaaatataattctttaataaatgcagtttggtagacataatcttttaagacacaggacataggggagtaaaaagaaggccttggtgattaaaaagtttgaaaccactgaattaaattaccttcaaatcc

SEQ ID NO: 460501 - DNA, 191 bp, Homo Sapiens
aattcagaggttggcaaaattctgaagctagcgaggtaaacaaaaatattaacaccatgaaaacttcaaataaattaaacctatctttctcttccccgagattagctgcaaattcagaaagttctcttagaggtgggtctgatgctgcagagtcctcagacttcagcactagatgagatgggaccgtgggg

SEQ ID NO: 460502 - DNA, 472 bp, Homo Sapiens
  misc_feature (22)..(22): n is a, c, g, or t
  misc_feature (31)..(31): n is a, c, g, or t
acacctattttttgccaacaanaaaaaaganagagagaggggaaatagaatacaatcccaccccggaaaaagtaataacaggaataataccttagccaatgtccaaacccagttgaagtgcctttcctgtggttgtaattccagggtttggggatttatgtcccatggcagcacaccttctgggaaggtacgagcaaatgtttatcacctacattcttacaagcaagtaccttttgtgggggagacgatgatgagggactcattccagtgtctgatgaagcagatgacatggaggctcccgcatgagacacttccctgtctttcttttttaatctttttctcctcctgtctatggttgcaacttcagacttcaaagacatataatattttctgatttcctgtagtttttcttggagaaatgagattctctctgtactgttcatattatctaattcattgagctgaaagctcc

SEQ ID NO: 460503 - DNA, 402 bp, Homo Sapiens
gggaaatttaagcattttctgcttttccgaagtaaattttctaatgtttttcttaaagctgaactaaattgcaaaacttgctttaataaagtgtgtatttttgcatcagttaagcccctgacctctttatgttctttaaatttgattcattagtgaaattaacaaggttctgtgtttttctcacctcattcagttttataattaaccaataaaagcttattagcttttaaggaagttttaggaacttaaattgatttatgggcaccatatggttacatcaaaggacttgtttttgttttaactggaagtggattcttaagtcctttaagatggaaatttatgttctttctattataccacagcaatactttctgatgtatcgttaggactcctctagagtcg

SEQ ID NO: 460504 - DNA, 334 bp, Homo Sapiens
ttgcccattttaccaaagtacaaaacaagatatacttaaaactcacaatgcatgaaggcatatacaactatacaattcctgaacgtaaaaagtattcacattgttgttgggtgttggtgcaagtttctcaatagtcataagttacaaatcataatgttgttcatcagcagcgaggcattaccgtggtatttgggtgaggggtgttttaaataaagaagggaggagacttaaagagttgtgagatgaagcagggaatctctaaacatggggtccagtattccgagcatagatttacgtatagagggaaataatggatgagaagcggaaggtcttg

SEQ ID NO: 460505 - DNA, 242 bp, Homo Sapiens
gatacactaacgatacattcatagctggtgtctagtatgctactcagaagggtgatggtgatataatgaagttgcagttgtagctatgagatggatcctcaccaagtggcaagtccttctggacacgacacttctccgctgatgagtttgggatcctggagacagatgtgaccttcctcctcatcttcatcctcatcttcttcctctcttgttactttggatatttgctgacatgtatcgtt

SEQ ID NO: 460506 - DNA, 205 bp, Homo Sapiens
cctgatcttcctttttgccctaatcttccttttcctactgcccttttcccccctcactcctgcttagagataacagctctgactgtccgaatgtaagaaataattggattctaaagttctaattttcatgtcaagtattcggtgatgtaaagtagcataatagatattatttgctacatgacgcgtattttactcgctgacttat

SEQ ID NO: 460507 - DNA, 338 bp, Homo Sapiens
tgtagaggcgtttagacttggatctcattccaatttaggcttttctttctcttcttccatacctagaaatacaggcaaagtgttttatttgagcatcagattaaaccacaagcagttcgtttaatctggcttgctaacacgactcacatatccactcatctgccctcacttctcccattcaccctcccgacacaccccctattccctcctagctaagaaggaaaacgatgcacaactttctccagaaacatccatcagtgacctctcttcctctacccttgccacagaatcagacacagatgtgtggacaacagcccagcgctctgaactgctctgct

SEQ ID NO: 460508 - DNA, 246 bp, Homo Sapiens
cggggtggaggctatgttgtacacggtggtcaaggaagacctctctgatttgtgacatttgagctgaggcacaaagggacagagggcttcaggctgacgacacagcccagaagaggaggccggtgaggctgctacaggctagggagagaggaggtcataaagagggctggagcacagagctacttcttcagtttctcatgaacttttaaagggaccgtttataggtcagtatagaaatatttccgt

SEQ ID NO: 460509 - DNA, 473 bp, Homo Sapiens
cgactctcgaggatcccgacagaggcgtttagaaggggtagagggtaaagaagttaggagagatgggatgaggagaattgaaaatctaagtagaaacaagagacaggaggcaggtatgaaaatggtctagatcagcggtctggtaccaagtggcagatagaccatttctgaccttacaagcagtccagagtctcaaaagagaagaaccacagctctctgtctttactccccaataagagaggaccctcccagtctccccagttccagctctctgccccctccccactcctggggcactttgcccaaccttattactatccgcttgtgtcccagctggacagacctggctatggggttgctgaccatgaaagaatgagggctgggctggtggatccgagaagctggaggagtctgtggagccaagaagcaggactgaaaggacccttcacactacgcctctgagggtcctctcg

SEQ ID NO: 460510 - DNA, 351 bp, Homo Sapiens
tgtttctttcagtaagtgagacagattatttaaaagtatactgaatttacatagctttttgtgggggagggggtaaagggattcaaatcacttcacttatatcatctcatccattcttaaaagatgagtgtgaaaacaggtgaggtgcattcatgattgttcaattcgacggccagttacaaaccatgagcattctaaatgaaattccagaggaaaggtaggcacatagacgaactcgaggactttaaggtattgtggcctaggaggttaatacctcacctgagtcactcaccttctctcacctattcatcaatactctgaacgcctatgcaggacatcctctagagatga

SEQ ID NO: 460511 - DNA, 187 bp, Homo Sapiens
  misc_feature (169)..(169): n is a, c, g, or t
gaaatactggtggagcaaaagaatgggtgaagaaatgaacaattattggaacagcttcatcagaggcaagttgcagaagttcagtggtggaggtggctattaaccaaataattatggccatcttctagatagttggagatgttctagcctctgggtaggatgtgtcttncaggctaacgcctctgaa

SEQ ID NO: 460512 - DNA, 638 bp, Homo Sapiens
  misc_feature (193)..(241): n is a, c, g, or t
tgaatattggacgtatctctgggactgacacctaggggatgagaggttcctgccttggccctgcccacaggaggctttgtggcatgtctctggcctcattacctagaaagatgtgactcttctcttctacctgcattcttcccacagagaagattgtgacatcactggatccagcaattagaaaatgtttctnnnnnnnnnnnnnnnnnnnnnnnnnnnnnnnnnnnnnnnnnnnnnnnnncagcacccaggtgatggaactctgccacctgtgccctgtctacttaggctattgtgaagctggtttcaatacccaggtgatgtaacattcctgccaggccactgccttccagggatattgttacgtacctttgtgcccatcaccaaggtgatgtgaatcttttcacctgcctagtccttgttcactaggggataatgatatctattgctggtttcagcaccaagctgatgttacttgcctcttcttcacagattctgctcacagaaaaactaacacatcactaggcccatcagcgaaattattttgcctggcctgcccttaaaagacattgtgacatactacagtgcccagcatcaatgtaatttgtctcctgcctaacgcctctgcgggatcctct

SEQ ID NO: 460513 - DNA, 388 bp, Homo Sapiens
acgcggtaaggagttgacagaaagtgtatcctcttttcctttgggattgaattagagaggtgccgctcgaaacccgctcctgggtgggagtcttggctctatcagttatgcctctattctgtatgtttaacctcgccctcgtaggggcataaaacagcatttaaacaggatcaagctttccattttaaaactccatacactcccttaatttcatctcctcctccacctactgccccatgtctctccctcttcgtggctaaacgtctcaaaaaagaggatacatgtgggtccaggtacatgctgaggttcggtggcaggagtgcgaaggaggtcccagctggatggcttctaattcctcctgtgaaataggggaagccctgtgtgcggg

SEQ ID NO: 460514 - DNA, 122 bp, Homo Sapiens
ggaaacatgaacaaatttggtattttagaacctcagtggcatggaggaggggagagattggtgacagatgacacaacatgtattccttccaattagacattcttccttccctcttgttagtg

SEQ ID NO: 460515 - DNA, 685 bp, Homo Sapiens
  misc_feature (408)..(409): n is a, c, g, or t
  misc_feature (610)..(610): n is a, c, g, or t
gggccagaccatacgaccctggtgacccataaaaaggaaaagcgctaaccttcacgggaacccctccgaagtcccagacagggtaactggcgagcccgtaagtaccctcgtgggggcggaaatattgccgcgtccctgagtcctctgggcagatgcagagccgcgtaagcctcatagaagcaaagccaggggaacagtgggagctctggcctcgcggtgcggacgctagtaatggaatcctggggaacagcgacctctggaggagcctctcatccacacagagtcaggaactagaggactggttctgagacaaagcaccctttcctcaccctactcccattccacccgcttggaaaagttatccagagacttttaacctccggactccactcttcgcttatgtttgcnnttttttttccaacctgtacccacgcttcaaaatccctgctccagtcctgcctcttccagaaagaagccttctggccagcccagttcctcttcccctcttcctgttctgagctcattctcaggccacactgcacagccaacctgcatcctgccatcatcttgacccccaagctctgctcgcctgtggatcccctccccatcntgagccaggcctgccacggaggagccaacactgccccacccctccacccgacctcaatttgggatcctagagtag

SEQ ID NO: 460516 - DNA, 520 bp, Homo Sapiens
tgcagaggcgtgtagacacaggttctaaaatagcttttgggtttaaactggcccctatatatacaactgacctttattcctagggtttataaactgaaggaatcagagaattataggatttcatagccaaaagaacttagagatcatctgccgctgtgtagatgagaaactgaggtccccagggtaaaggtcttctagccagttagtggtagaagcagaactacagtgacaagccctgttcttctccattccagaatcagaatagagtgccacaatctccaagcaccctgaaagtgcatccctctccccttcttcctttccactgcttctggtacctgtctgcccacctgtgtctaaagccaggcaattctttgtccaagaagagtaatggtattgtctctttctatgtgtctcggtaattcaggcaaaaggactggatttttaaaagcagtttgaatttctttcatatcactagtgaagcttagtatgttccagaattcaaggagcctaaattgtatgt

SEQ ID NO: 460517 - DNA, 430 bp, Homo Sapiens
tccagcttgtgagtcaggcagttatccaggcatagcggtcgacggaaacgagctcgcccatattgttgattcccagttctttaaaccgaagcatatttttgaagtccccttcttggattttgtgaatggggtttttgttgaggtctaagaatttcaaatttggaactttttgcagggcaagctgagggactttaaccagtttgttatcataaaaagacaggctctcaaggctatccagacccaccaaagcatttccaggaatatcagtgagatacattcctgccaaaactaagcttctcaaatttgcgaggggtttgaagttcatatccagaattccaatcacagggttttctccgatcatgagaatttccaggttgggtgtagaatcaaaccagcgactatcaataactttcaatttgttggagttcag

SEQ ID NO: 460518 - DNA, 490 bp, Homo Sapiens
gtaccagggagatgtggtgagaacaataacaaaggaatattatgcttgctgatcatagttattaactgggagtaaaggacagtatttcaaatgagatatagagggagagagagggcagggagaagataggtcctaagttaatttctagttttatcctttgaaccacattaagtattttacatactgcaacaaaattgcatcggcaaggatggaggaaccctaaaactgaatacaaacagacaaatgaacctgtttatcaaattgataaccacacagaatgaaaaattcaagtaacttcgtgaacattaaacagtgcatatattctaagaacaaaaagaactacaaatgaatgtggaactttatcaaaatagatgtaacaaatactcgcttgtgaccagagttctcctggtaggaaaagggacgacacgtagtctcatgtggtgacacctgtggtaacagacccgtcggggatcctgctagagtacgacca

SEQ ID NO: 460519 - DNA, 256 bp, Homo Sapiens
ttatcagccactttcaagtttgtttgcggttagtgagtccctgatttgaggctgatcatcttgaagattttggacttcttgcaaagctaaggactaaacccaggagagtacatattcacaacaacctcttttaggaaattcgtaccatcttttacaggtgctggaacttaggctcagattaactttgccaatatcatatattttgagggtacccaagttgtgcaagataagcaggagtcctggtttcctctggatt

SEQ ID NO: 460520 - DNA, 246 bp, Homo Sapiens
ctctacgagcgcaccccagaggttatacttctttcatcatggattacttgcctgttcttgaacttcatataaatgtgaatcatacagtatttatcactatacctgtgataatgcaatattgttgtagtggatatgtaggctaattattcatttatttactttttttggagacggatgttttgctactttattgcccagtgctggagatgcaactggcgctcagtaggcaggggtaccgacgctcgc

SEQ ID NO: 460521 - DNA, 579 bp, Homo Sapiens
  misc_feature (342)..(481): n is a, c, g, or t
gcccgctctagaggatccacctcccacctcgcactgcatctctctccccaaacacatgcccagagcatggcatttcaacaacacactagcactgttactttccttacggtaaagaggaaaacaaaatatttcctgcacccacgactctaaagtgggaagaggttaagctagataaagggctttgtgtttcaagaaaatgtgcctgactctgtaggcatatggcctaacatatcctggacactgaaatatgagctttgctaacattagctccattcatcccacaattctgtgaggtactttccatgatcacaattttcaggccaggcatcggtggctcacacnnnnnnnnnnnnnnnnnnnnnnnnnnnnnnnnnnnnnnnnnnnnnnnnnnnnnnnnnnnnnnnnnnnnnnnnnnnnnnnnnnnnnnnnnnnnnnnnnnnnnnnnnnnnnnnnnnnnnnnnnnnnnnnnnnnnnnnnnnnnacaggataatctgtagatagacatgtttacccagctagtattaatttgagtaagactatattcaccgttcagatataatcatgaatctcattacacta

SEQ ID NO: 460522 - DNA, 251 bp, Homo Sapiens
catgcagtggcgtgttcccaaatttgtcggcacaatcaagtctcgctgccagttctggatgtaggatctgggagcgtgtcgaatacggccatggattgcagccatgtgcagaggacttttcccttctttgctctggtagttgacgtcagccccattattaaccagtagctccaatcagagagcgccattggtcgagactgcagccacatgcagtggcgtgaagccctgtcattgggctggttgcgctcgta

SEQ ID NO: 460523 - DNA, 325 bp, Homo Sapiens
gattgagtttttactcgaccgaccagctgtattaaccacaccctccctcccttcttcgcattacaacacaatgaaacaacagaagcactcaatcagggagtaattctacaaaatgtatggcaggcctgagagaagctcaacttcccagtgttgggatccatctggatctcaattctccagcacacatttggttcttttcccaaggctctagagcctattctccggctttccttagaggctccttttctgaaccgccccacatcgctggctccatctgcctaccagagactcgctgcgctcctcagtcaggggactacctctgaac

SEQ ID NO: 460524 - DNA, 516 bp, Homo Sapiens
aagaggtgctgagaggaagggcatcagtagtctgatttgagaactagcaagtggattttgctcgacttggagaatagtggaaagtgaaactgataaggttgtggccatattgggaagagtttgtaattccatgctcatgagtgtgaactttattctataggcatttagggaccataagaggtttgagtaggacatccactatggctttttaaaaagatgacatgtaaagatttgactagagacttgtgagagtattgaattgtgatgtaaaaggacgtcgattctggggataatttttacttcacggttgtcagatttgagtgaccattgagtaaagagttaaagattatagtgtggttattgggtgatgatgatgccttttagatagggaatgtttaggaagaacagaatttgaggaggaagctaatagagtatgactccagatgtgttaagatatctgcgaatcaagaacaggtcaagtcacagtacctgggtatctgggctgcgctcgtagga

SEQ ID NO: 460525 - DNA, 115 bp, Homo Sapiens
agaggatcccctcctacgagcgcagtccctgcctctgcatgtaccttaaatcctcatggggtctggcagttaactgacataaaaggtaacatatgtacggtatttgaaggttgtg

SEQ ID NO: 460526 - DNA, 357 bp, Homo Sapiens
  misc_feature (13)..(13): n is a, c, g, or t
  misc_feature (27)..(27): n is a, c, g, or t
ttcaaggaagggnaagccccctggggncagctgaaggaagccagaccctcggctggctgaactcccacaggcactggcaggctctgtctgctccagaagtccctgttaggatccccttctaggccactccccccagcaagacgctggcatcagactctgcatccctacagctcacaaaggccagaggatgcccctctaccgcatcagggctgccagacagttctctctccatgaccctcctccccgctcagacatggagtccgacccctgttgtagtaggggaggggcggcttcagctcagagaggggaggcgactcgcccaaggtcacaaagccagctggtggccgcatctgacct

SEQ ID NO: 460527 - DNA, 543 bp, Homo Sapiens
aggttgtaggggcaaaaatgtgcttcatgcttaactgggaaagaagcaattccttgagttatgtgtcattagtgaatcctaatgtcattaggtataagaatcagaatttgcatagaaatcattgcagggaattgttccttccccataccagtattgatttctcagcaccattagctgcttaatgctactgcttttaattgattacttcaggggagtccctcaatagcaagcttcttcaattgagatggaaggacattcgctgaatgtgattcaacaaccccaattgactctggagacctctgcctatctacagcataatcatggcagcctcacacagtttaataaataacatggtccttccgaatacaatattcaggctataacctagttaaaaatatgaacttgtctggttctgtttaccctctaaaaatcaatgatcaagtcatacatttgtaaatacatgtacagttgggacgtctgggagttatttttgaacttcttgtttccatctctgattatgcgctcgtaggaggggatcctcta

SEQ ID NO: 460528 - DNA, 559 bp, Homo Sapiens
ccgctgagcgatcaagtgctaatgttttaagagagaaaacagctcatgcgggttgaaatgacccatctttaaattgcacgttttctttcttaggaaaggggggatatcatctgtagagtatccagatttattaaataggctgtaagacaagaacttatttaccattcctcttcctgctgctagatatttggtttaacatggttcattatcatggttggatcaatgtttaacatggcctgattagagctccattccatttcagttataaacatcacatctcttaacatacggccaagatgatgaagctgatggagtacgatggtgttcaaacttagataagctaattcaatagacaactagaaatgccaatgagtctatcgtaagagtttaaccagtttttattttgagagcttacttagattatgtagataaaggaaatgaccaactctaaaaatgcaatatttgtactagaattatcaagcatttataaataatgaatattaaaaaaaggtggtcttacgtttgttcgccaaccgggggattctctaaagtccgaccg

SEQ ID NO: 460529 - DNA, 376 bp, Homo Sapiens
ttcatactaaaactttataggcattttacaaatacccttttaaagttgagcaacacggaaataaacactggtttccccattacctttcttgtttctctacaggtttctactgcttttctccatgcagcaatcaacccaaagcctttattcataaactccattatccatatctctcctacattcaaaacctgtagcaaataaaaaacaaatctggacttaagaaaatagagactttatttgaaaggacttttgcaataacagggttactgcgataagggaaggggtactattgcaatagggaaaatgcttactccgtgaggtatgaaagcaattcagaggtcaggcagattagagcttttcttttacagaaaggagt

SEQ ID NO: 460530 - DNA, 392 bp, Homo Sapiens
cgctcagctcttacagccttttgtaagaccctaagattaatctgtcccccattggtctaaaagtgccacaaagatgaaactgtgtcctatattgatgcatggggattgtctttgtatctctaatggcagagtgttggcaattaattggtccttacagatatatggatatgtacatttctttaaaaaaaagaaactgatgatctacagagatgttgttctggatgcagatcagaattacctgtgagttggttgggttttgtttggttgcgtttgtttgtttttaatacacaaacctagacctaagagccaggaggatcagagtggcccacggtctatcagtgcagggtgaattgtgcatggcctagagtctgatggtcttgatcggtcagcgg

SEQ ID NO: 460531 - DNA, 531 bp, Homo Sapiens
gagccccccggctgggggatcaagtaagatgagcagagagaggcgccatgcacttagctgcgctgctcatggggtccaggatatcctccaagccactttccccagaggaatcgggtggggttggctcctggctccccagcccttttcttacattccacagcatccatgcacactggagatgtttgtttttggtctcgttttccaaagggtaggctgagagcaaatgcttgtttccaacctcgaaggatttgtaagaatgtgcaaatctagatgtgagagggagttcaaagacaaaaccataggcagaggagttgggcttaggaaattccccaatccgtgggcaaaaggaatggtagttgtggtaaggcaacgttttcccacactcgaggcattttaaaattaggtatgccaccagccctgactgtggacaagacagtggaaaaaggcttgaatcacagttaagggactgagtagggaaaaacacacataaggtgtcttcagtaagcagtttatgaagtggacaagcatgta

SEQ ID NO: 460532 - DNA, 403 bp, Homo Sapiens
gacactgtaggacttagtcgccaagattataattctaattgtaaggagtgcagcatgaaacatctgccttgaattacctgagagcacatactcaggaaaaagaaaaacgtgaaggctttcgataacaaacataacaaaatgggcaggaaaaaagaaaccacgaaaccactatgacaacttttaagaaggagtccatatcttttaatgtccttgagactatagaagttaatatagcagacactaggtagctgtgcttcaacatcagagaaaaagtgggcacagtggccactatgagccacagagactgagtactaattagagtgctttgacttaacagtcatctttaatgatggctaattaatcatgggatactaagtattggaatagattgatcgctcagcgg

SEQ ID NO: 460533 - DNA, 394 bp, Homo Sapiens
tgatgggaacctatgatgtctgtcacatattttactttctggatattatttaaatcggttactttatccccatttccactaatgcttctcaagttcaggccctcatctctattcatataatagcctccttacgagtttcagtctctagtattacttcattttaatccttcctccattctgttaccaaagtaacctttctgaaacataaccaggataaagtgtaatgcactttatgatgtggcccctggctgacagttaaaggtccatttccctcttctatataacagtctttattctcacacagtgaaattttttagccgtccaaacaggctatatcacatccccccatctttatgcatgcccatccttctgtctggagtggcattgtccagca

SEQ ID NO: 460534 - DNA, 524 bp, Homo Sapiens
gcttcattgatccaaactccagaaggaagggaggagaacagaacacacggaagtcccagataagcccaaacctcaccatggctgtgtgttccggctccttttctctttcctctccttccaaccacaaacagccaaaggcaggaaatagaagggcgggaaaggaaggaggcacagtcagccagtctagagaacagaagcaacgacaggattctcatagctatctgggacttggaaaacctcaatgacttgttctacatcaccctgtgctggattctgaacgtggagttaggaagtcacacaaacggaaatcaaaatcaatgcaaggagaggatatcctttcagcttctcggtacctgctcagcccgttacttctaagccttccaagcatttcaagcctcaggttacgaccatttttacaaggccactccctccctgaaggtttcatgaagaacacctgagggctctgtgggctaaaataggcccaatcacttctgacgggtctacaagagcgggccaggctctcc

SEQ ID NO: 460535 - DNA, 410 bp, Homo Sapiens
ccgtctggggctgccaggagcaggcagtgcttaggggacagccaggtctcaagaataaagagatggatgaggggccaggggtggtggctcacgcctgtcatcccagccctttgggaggccaagctaaggtttttctacaaagtgctagagagtaaatattttagactttggaggccatgccttctcagtcccagctacttactcactgtgacaggaaagcagccatggataatacgggtgtagctgtgtttcaggaagactctaaaaataggaggcagcctgaatttggcaaacagtcctagtttgccaaccctttgccaaagaattaaaagagtcagcttagttcgtagaagcacatctgacattctaatgatgacacaagttattttgatttgttgcccgcccagcgg

SEQ ID NO: 460536 - DNA, 349 bp, Homo Sapiens
gaagggcgagtttatatcttcacagacctagtcaggaggttcatctggggccagaatcaggtgctctggggtgagccgacctcaggcaaccggagttcccaggctagggagaagcatccagaatgtcagggcgggaaaggtccccgaaacccaactctagtgaataccatatttttccgatatggaatcaggcagcacaatctcacagaggacttgcctggttgcccaggacagtgggagaaagccaggtgggtctctagatccccaggcctgaacaacattcgagttttcccttgcttccttgattaaaggctgctagagccacatgtggaggtgaaatggggaagtg

SEQ ID NO: 460537 - DNA, 583 bp, Homo Sapiens
ggagtccctgaaggccatgattgcctgggaatggacgatagagaaggggagggtgggtgaggaggagaagacggaaaagaaaaaaacgcggaagatatcacaaagtgcccagacctatgatcctcgagaaggctacaaccctcagccccccgaccttagtgctgttaccctgtcccgggagctgcaggccatggcagaacaactggcagaaaattaccacaacacgtggggacggaagaagaagcaggagctggaagccaaaggcggtgggacccaccccctgctggtcccctacgacacgctcacggccaaggagaaggcacgagatcgagagaaggcccaggagctactgaaattcctgcagatgaatggctacgcggttacaagaggccttaaggacatggaactggactcgtcttccattgaaaagcggtttgcctttggcttcctgcagcagctgctgcgctggatggacatttctcaggagttcattgcccacctggaggctgtggtcagcagtgggcgagtggaaaagtccccacatgaacaggagattaaattctttgccaagatcctgctccct

SEQ ID NO: 460538 - DNA, 630 bp, Homo Sapiens
  misc_feature (594)..(594): n is a, c, g, or t
tagagcctgtgatgactctgaacttcaatcagatcttaaaattctttggtgagcaggacacaaaccagaaagatcccagatccaggcactcaaactgaaacgtttcttgatgtgttttccttgatgttaagaatgaagaaccaacctttttcgttttgtttttcagatcttttcctaataactactgggacaagtttgtaaagagaaaggtgatcaacaagtatggagatctctacggagcagaacgcattgctgaacttctgggtttggacaaaaatgctcttgactttagcccagtagaagagaccaaagcagaagcggcttctctggtgtcatggctaagttccatagacatgaagtaccatatctggaagcttggagttgtttttactgacaactcctttctctaccttgcctggtatacaaccatgtcagtcctgggccactacaataacttcttctttgctgctcacctattggacatcgcaatgtgcttcaagacacttgaggaccattcttgtcatctgtaactcacaatggcaaacagttggttctgactgtcggtctcctggccgtggggttttatctctatanctgtggtgctttcaacttcttccgcaagttctacaa

SEQ ID NO: 460539 - DNA, 396 bp, Homo Sapiens
ccaaacatggtcctaccgcatccaccagaacatcacttaccaggtgtgcaggcacgcccccagacacccgtccttccccaccacccagcagctgaacgtggaccgggtctttgccttgtataatgacgaagaaagagtgcttagatttgctgtgaccaatcaaattggcccggtcaaagaagattcagaccccactccggtgaatccttgctatgatgggagccacatgtgtgacacaacagcacggtgccatccagggacaggtgtagattacacctgtgagtgcgcatctgggtaccagggagatggacggaactgtgtggatgaaaatgaatgtgcaactggctttcatcgctgtggccccaactctgtatgtatcaacttgcctggaagcta

SEQ ID NO: 460540 - DNA, 336 bp, Homo Sapiens
gataaatcaagaagacttgtgcattgtttccagagatacacataagatgtgaataagtaacatggattaataagtcatatgaatcatttattttgacccatatcaaagagcaaaagaaagaagtaggcttgttacaaaagtaatgacaaacttactgcagtgtagaactaaaaactctgcgaacagaggccagtagtaactctggtgaaacttgagcaagcctgtccaactgtaacttcagttgttttctatattctacaaacatggcttcatcttcaccctatgatacaggttaaaatcctcattcaaaaaacttatgggttgatcgcccagcgt

SEQ ID NO: 460541 - DNA, 365 bp, Homo Sapiens
gcaattgggttcttgtttttcttaagactcttgccacaaagacactgcagcatgtgcgttcctttgctggaaatgttccaaagagtccacattgatttgggcgaaaagcaatccagcagcttagacaccctgagaaagaagagatccttgtggttgcataataataatttgaaatcagttctcctgaagaggggctccggttttaccataggaaaaacgataatattccggatcttctcccagttttttcccctcacgtggtatatttctttgagacttctcagtgattgtttgttttcggcccgggtgaatgatttatcccccctcgatcaccaacggattatttcaaagggttggagacagct

SEQ ID NO: 460542 - DNA, 383 bp, Homo Sapiens
gagaaatgaagagaacatgtcatgtactgatgaatatcatgcatagatcatgcgcgggctgaaactaaaaagtaaagaaagggccgcagggactttagagggcagagaagaagagttagcagaacagcactgtggggcagttccaatctctgaaaggtcagatgagtcacatttcataaggttccgacattcatccactgcatctgtgttttctcattgttttgagaatccatcagccacggatacttttcagatactatcctactgttttgaaaggattattctcacacactttttattcctctactatctacttgcttccccatacaccttactttgcaggtaatgttacctccagtgagctgtccagaggtttgatcgcc

SEQ ID NO: 460543 - DNA, 313 bp, Homo Sapiens
ggccagctctggacagaagcctgggattagtgagctgtgattacatcagtccttttctgctcctccgcctttaagagcaagcttctttatgctatccctggatggttttgttccaacccctatgctatgaggtctctcttgcccttggagatttaaagttttgtatcagaaatagatttgaagatcatcatgaccaaatgtagttagtgctatgtgagagggatatctatcacacaaaatgctttatggtcacagagagattagttctgtctgaagggaaaggggagaagatgacaaacatgccatcggggca

SEQ ID NO: 460544 - DNA, 383 bp, Homo Sapiens
gaaggcagaaccgtcttgagcatggaccatactggtgatgccagcagcttctccgcaccatctggctcagctgtaccacccagcactggggtcaccctgggcgtggcctgaaccccaggacacactcgtttgtggtgctggtgctgactgccatcctcacgtttgtctgctcagggccagagccaaggccctcaggttcttgagtaactgggctggtggctttgggagtttgtcacttgtggtgagcatttgctcttggcttctgaatatactgtggatcattgtctgggggcgttggtcaggccagggcactgctctttagtttttgaaactttccttccttttcatgtcttgaggtttggtgcttggttgatcgcccagcg

SEQ ID NO: 460545 - DNA, 510 bp, Homo Sapiens
  misc_feature (52)..(68): n is a, c, g, or t
agttgcgcccctgcaattccagcccagggacggggggaaaatttctttcccnnnnnnnnnnnnnnnnngttttatgtaacatggaagacttcagaaatgaagaccggacgacccagggaaaactgcccatttttctgcttagattcaatgaagaatggacagcaactgtagacatgtgattgggacctaaagagtttgatctcgtggtaatagaccgaggggggatccagcaatgcctgtctgttccgattacttctcggcatctgtgtgcagcattccttcttcccggatacagggcaggatgcctctggaatgaaggtcttatgacctgaacggtgattgcctcttttagatgagcaaggaactctttgttgcaggctaattagcaaccgtccttcccaggtagctgcaacgaaactggtctcttccatgctgtaagcaagctgggtctcttgtttgcagttagatcctggcttctgttcagctgaactagggtaggattattccacc

SEQ ID NO: 460546 - DNA, 460 bp, Homo Sapiens
tatccaggtggaatgtataggggttaattatacaatcctccttaggtttttgtatacttaaaactttctgtacacttaatacaaagtttaaatttaaaacatttttagaagtctgtttaagctcccaaaatccaactaaggtgaggctgtaaaactccagcaggaatgacaggctaatgactaagtataaaacctcctccagggttttgctgtctgcttttaagaacatgcaacccgaaagcagacaactatgtaagttagaacaggggatttatgagaggtgactaggcagtgcctttagcactctctagaagagaaggggtcctgacgcagctaagtggtaggtcacgattgatgcaggagattaatgcagtaccagatacccaatccactatccttttcctcaagcaagcttctgattacaatctggattccacctgcttacgggatcctctagata

SEQ ID NO: 460547 - DNA, 395 bp, Homo Sapiens
ggacctgtaacaggtggaatcaggtgggaagagcttgtgaggcttaagcctactcaccccttgccctcacccgagccctgccccaggctccaggagacacttcccagaggctgttccacgttcataccaggacccagcttcccagggagacactgggtttttccgcacggtccttgaacttcccagcctccaggaatggcaagtagcagaaacccggctcaacttggctttaagaaaagtggggattgattggctgttgtagctagaaaattacaagggggagcttcaggcacaacgggattcagggcctcaaaaatagcatcaagacgttgtttgtctctcgccatcttctgtcccttcttgcatccatgcctccctctgtcattccacctgga

SEQ ID NO: 460548 - DNA, 384 bp, Homo Sapiens
agtggtgccaggcatggtgtgtcccgcaacacctgaaacattcattgtctagcccctttacagagaaagtttgctggacccctgcttagatcaactcatttagagtttagtgattgatccatcctctttggtgtgggctccgacctcttactactgcaaacaatactatgatgaacatctgcccatggttgggaaggcctctctcgggctgcccaggagtggaactgctaggacaaggcaaagctggggccttcggctataatccatgctgaccaaccacttcccaaagtagctggaatcatcacctttcccaccaggcagaaatcagctcccgtgtccgccctttgtcagcacttggagctatccaatggtctattccaccta

SEQ ID NO: 460549 - DNA, 413 bp, Homo Sapiens
tggaatgaatccaatgatgttatgaatgggggctctcctacataacttagatcacttattgtgtggctgagggggtgtcaaaatgggatacggggaccgggtctccatttcaacctctgtggcctcagaagccctgaggcagtaagtccagtttctatttaaagagctggaaaaaaactggcttgagatggactcaaatacaagttgaagttcagtaccttcacacacctcctgttatcagggccggtgccatcattcactccccacttggagagatgggtctcaggagtttactcccttcagtgggcctcagaaaggcccgactggggacacagacgtgagagcagaagcagaggaggcaggaaagtgccggggttacagcgatgggctttgcagtgaggctgggggttggg

SEQ ID NO: 460550 - DNA, 511 bp, Homo Sapiens
ccaggtgaatgtggcgaggcagtcatggggaatgggggaaactgaggaccagatgcagttgttaccaaggatgccaagcagcctagcccaaggcagttcttggatttccctcctgcttacttctccccagcatcctctagtatccttagagtcctgctctgactgcagcccctactccttcggaactaagttactactttgtgtctagcagaccctggaaaaggtgccttcagggtctctgctagctatgtcctatcgcttcccacccagtctattacatgggtccttctgccctttgctcccacctgcctgacttgccagccttctctgtaccacacaaggagcctgagggctttgaggttttccatgccagctcccttctgttctggcttcataaaggacttggatcactgccctgagttaccgctacccagcttctccatccccctcttcctcatctgtatttgtgtgccttccctatactaggcagtgtattccacctggctaaaag

SEQ ID NO: 460551 - DNA, 385 bp, Homo Sapiens
  misc_feature (132)..(265): n is a, c, g, or t
aggatcagtagcaggtggaatgcagcggcatgatcttggcttactgcaaccatctgctcccagatttaagcaattctcatgcttcagcctaccaagtagctgggattacaggagtgcaccatcatgcccagnnnnnnnnnnnnnnnnnnnnnnnnnnnnnnnnnnnnnnnnnnnnnnnnnnnnnnnnnnnnnnnnnnnnnnnnnnnnnnnnnnnnnnnnnnnnnnnnnnnnnnnnnnnnnnnnnnnnnnnnnnnnnnnnnnnnnnccctgcagtccctttttaaagagtactgactgttttcctgcaaagtactttcaaatccataccataaaggtagaatttatctggaagaatgtgtttttttgaattccacctggcttacga

SEQ ID NO: 460552 - DNA, 340 bp, Homo Sapiens
aggaccttgtagcaggtggaatagagaccgtgggaatgtggcttgcaaatcaacttctcaactagtgaaggatgacgaggttaaaatatagagtctctttaatgaagggtttgtacagtaaaagcaaagggagcaatattcatgccttttccagaatagggtggtaaacttctctgaaccagtagtgctgtcttccttttttccttttatgacttcttccagttgttgtcatggtgattatcaactgtcatggcactggtgagagtgtcatcttgcttgggaattccagggatatcttcaaaggtcagagtccgtagtgatggtcgccagaatgcatatg

SEQ ID NO: 460553 - DNA, 333 bp, Homo Sapiens
aactgatttatgtcgtctgagtcccttcacaagggacacaatccaccttaacagtctcattactaaagcttccccattccctaactgcacattcacacccttgtatctttgtattcactctgcacagaaggtattcccattttctctggctggcaaacttcctcatgcttcaaacactgcctctctaaagtggaatgaacttcccttcctgccttactgccatattatgcaaaaggcctttggcctgctttcattccatgtttgctccttggcatcagaggctaagttcacagtcctagcccaagtatgtcagaagcgtacattcacctgcta

SEQ ID NO: 460554 - DNA, 430 bp, Homo Sapiens
  misc_feature (53)..(65): n is a, c, g, or t
gccaggtggaatgggccaacttgtagacactttggattccaaatcaaaccagnnnnnnnnnnnnnggctgcacacagttagaagaaagtgcaagcggaaaagaacccccaccaagttcaaagggacttgtgtttaatcagacaaaaacaatttttatagcctcgggagcccgtgtggtgtgtgaggaagttgtgcagcaggatggcattaggcactcaagccagcatgcttttgtgttattttcttctttctttgtttgcaaccggggttcaaagaaattcactgtgcaaaacagataccgaagtagatcatacccacgaattaacattgtcatgacaagcagctctgtgttatgagcaaaattacaagtgacccatctaaataaagcagttattgtctaagtaagagctcatttcttgcaggattccac

SEQ ID NO: 460555 - DNA, 353 bp, Homo Sapiens
cggggcaacccggctgaggtggtttatctttccctccattctccacatcttttggaacttgctgctgacttcactgaagtttaaactttcacagtcaccctcaatcctgcccactgtcattggatccatgttcaaaatctctggataagagacaaacttgtacacaaacttctgaccattcacttttttgatgatattctttacataatagtatctgagggctcggctgagtttgtcataattcatgttaggcttgttcttgcgtatcctccattctccacatctttggagctgctgctgacttcactgaagtttaaactttcacagtcaccctcaatcccgcgggggatcct

SEQ ID NO: 460556 - DNA, 424 bp, Homo Sapiens
cgcggcgtcgctcattgctatggacagtgctatcaccctgtggcagttccttcttcagttcctgcagaagcctcagaacaagcacatgatctgttggacctctaatgatgggcagtttaagcttttgcaggcagaagaggtggctcgtctctgggggattcgcaagaacaagcctaacatgaattatgacaaactcagccgagccctcagatactattatgtaaagaatatcatcaaaaaagtgaatggtcagaagtttgtgtacaagtttgtctcttatccagagattttgaacatggatccaatgacagtgggcaggattgagggtgactgtgaaagtttaaacttcacccagtcagcagcagttccaaagatgtgaaaatagagggaaagataaaccacctcagccgggtgccccgccgga

SEQ ID NO: 460557 - DNA, 485 bp, Homo Sapiens
cccccggccccaggtgagttatacctgagttaatcaaaaacttatgagctgcatcctggccttgaccttcagtggatttgaaatttatcatgtataggtcattttcaagtggatgcatgtaagaaatgcattctctttaggggtcctctcacctcctcgcaaatgcagcccacctcttgtgcttccaaagccctgggagaccaagccactcacctgggaactgatagccatagcttggagcaaatccggggtagccacggccataggtcgccacgaagttgggatatccttgaacacaaagagaaagatcagagtcctgttagtacagccgcctcaggtctggggtaaaatctcacggagggtggcaatgaggaaagcctgagttattttccttcacaccataatttgtctcccatgagggtttttttattaagggtctgggtcacctctctcctgtggccgggtgccccgcgggggatcctcta

SEQ ID NO: 460558 - DNA, 387 bp, Homo Sapiens
agtggatccccgtagccggtggaatcaccttcagccttaaaactcttcctttactctcctttatcacttaagtgataggtcacttttaatataaatgttgcaggatgagttaagtggaaccttgagaaatatgtgtagattgtttcagtgattaaagcaagtgttcttttcctggcctttaactcgctttatgctaagaagtgtaataactaaatagactcctaattgaattgacattcagatgtgtttgcagtttagggggagtttacctcttctaaattttcatttggatcccattactaaaagcagtattgcattagcatggtgcacaattatgtacaattcaatttgcaaatgaagttaatacttggagtatcttgacttcct

SEQ ID NO: 460559 - DNA, 485 bp, Homo Sapiens
taaggatttcttgggtggccccatattctccaccctgtttctctgtctttctcatcccagctagtgaattgctcaatgcatgcacctgggaaatgttcttgatcttccctttccttcttttgctaagccatcttcaaattgtgttgattccacctccaaaatataccactggtccttcctctcacatggacccttatcactctaggaaaagccacaattatttcacacaaaacctaaaattgtttagtaatgtctccatgtttccactcttgcactaggattagatatttcttacacaaagtgatgttttaaaattaatgcatgaggtcttctcactgccctgacctctaatgccatcccatggacgtcgcatactgctaaacactacccgttgtctagaggcctctgtgggtcctcatcatggtgtggtcctctttcctgctgttgtacatgctaacgcacctgtcgcggggtccactagagtc

SEQ ID NO: 460560 - DNA, 529 bp, Homo Sapiens
gatccccgcgacaggtgcgttagcacgagatttctccaaaagataagtctcaatgttggctccaacaatgtagccattgacatcaaagttgatgcgaatgaatttgccgaagcgggaggagttgtcattcttcacggtcttggcgttcccgaaggcctccaggatggggttggcctgcagcagctgccgctccagctcgccctggtccttcttgctcttgtgcgaggacgccacgtacgccagatactggatgaccttcttggtgttctccgtcttgccagctccagattcaccagtgcacaagatggattgatcttctcggtcttgcatcatactcctgtaggcggtgtctgtgatggcatagatgtgagggggcatctcgtgcctcttcttgcccttgtacatttccacaatctcttcagagtagatgggcaggttcttgtaaggattgatgaccacacagaacaggcctgaataggtgtagatgagccctgagtagtaacgcacctgtcgcggggtccactagagt

SEQ ID NO: 460561 - DNA, 462 bp, Homo Sapiens
agttatttaccaaatgtgcttacctaccccaatttgtggtccctggccccgttttccctctttgggaaaaaaaacaggggttattttgtttggtttctgttgggtaacaaagaatttatgctcaccaagttatatgatcttttctctgcctaactcttaagtgtcctacctaccatccttgtgcaggcttcctgggtgatctccccatcttcaggacattctctgagcctactccccaggtctttctacaactcgggtttttcttctgggcaccagccctgaagacctagccacttagagggcctctttttctgtctgttctcttggcctcgtaagtccatcatgtcatgacacctctttatctctaacctctgaacacccaagccaaaacctaagccatcccctactctcagtctccccttgtacacgcatagaagatcctgtagagtcaccgcagcaaga

SEQ ID NO: 460562 - DNA, 188 bp, Homo Sapiens
ccaagacggtagaaggggcaaggaacacaaattgtgtttgttagcacatttgtaataactgcaagttgggaacagttttaatctcctctgttgttattcaataatgacagtttgtatttcatgttgttattcattaatgacagcttgaatttagtgttgtacacgcataggggtcctctagtcagcct

SEQ ID NO: 460563 - DNA, 381 bp, Homo Sapiens
gctcggtacccctatgcgtgtacctacaacgtgtacaaaaatattcatagcagcattattcataatagcctgaaactgaatgtccatcaagagaatggataaatgaattgtggtatatttgtacaatggaataccatataagcaatgaaaatgaacctattcctatatacagcaacatggataaatctcataaacttaccattgatcaaaggaagccagaagcaaaagaatacatacaatacagcattatttattccaaagttcaaaaatgaaccagaccagcctacagtgttagaagtcagggtgcggttttgagcacgttgggtacttatgggcaaggagcatggaaggggctcctgggattgtacacgatatgaggtc

SEQ ID NO: 460564 - DNA, 476 bp, Homo Sapiens
  misc_feature (170)..(185): n is a, c, g, or t
cgtgtaccaaggggcagccaggtagtgaggagaggctgtggggctgcaggtggactgaggtcctgcctcccagaaggtccttctcacaccgctcacacttgctccctccaaagctgctaggtaaaaggaagtaggtcgttttgtgggtgggagaaccattctcaattatnnnnnnnnnnnnnnnntttcttctaaggttccaagaatttcagcttgtaagtcagaaatttcacaccccaaatgaaattggcaggaagcccagaactcgccattttcactttagatactaaaattctcacatggatttacttaaagagtaaccagagtattaaaatgtcttttgagcttaagatttatttgcctgtgatccattggcatgattatttatttaccaaataaattgagagttggttttgttattttgaaactgtccaggaatctcacatttatgtatttctaatacgtcctgtgatcag

SEQ ID NO: 460565 - DNA, 536 bp, Homo Sapiens
ttgatccaggattactatcgtgtacaacagacatacaatgttaattttaaaaacaggacacctaatgtattagagagatgtggggtaattgcaattccaagcaggaggagttgtgtagagcacgcgcagaactctgaattcagacatcctaggagagaagtgtataaggtaaaatgaggacaactgaggaatgggcttgagggcagtttggggctgaaaagcaacatggctttaggtacagtgctaaaaccccattccccagacccctctgctttctggtctgcttaaaagagctcttgtcctttctgtgtccttgtcctgtgtccttgtattcagctcggagagcaagtttactctgtaaatgtagccacactctaggtggcttgtccaaatcttagaagccaaaaggtttcttgcagggagcccaggagaccagcctagaagacacagtaccttgacgaggctaaagcctccaccaggatgattttgaaagtcatcagacataactaaggctccggaggcccagtagtcccttc

SEQ ID NO: 460566 - DNA, 299 bp, Homo Sapiens
gtccagcgagtagccatgaggggttcagtccaaacccaaggagtactgttgggaagctccaagtctcgtgttacatcgcatgatcgaggttgctcaagagtgcttgttacaagcttgttctcttaagccaagtgttggatgttccctccaatgaaatcctggtttactttattcttctccttggaaaagtggtgagctcagccccacttctatctcagtgatcataaaactgtattattagctgagttcatgagatcagcattaatgtataatcactgcggagaagcagtgtgccggtt

SEQ ID NO: 460567 - DNA, 550 bp, Homo Sapiens
  misc_feature (268)..(293): n is a, c, g, or t
  misc_feature (300)..(351): n is a, c, g, or t
tccctatttttaccacagatacacaggagcaaagggtgaactctgtactgagttttgtaggcagcaaggtctgaggaagcaactgcgctaaaggcagaacgtgacagtgagaattcctcttggagaacatcctatccatagactctcccggagggactgcctgcagaactgtcattggccaatttcaatgcgtgttacagattcatagctcactggatgatgagctatatttatcaggaaggaaggaagaaagagtaaagaaaaaatnnnnnnnnnnnnnnnnnnnnnnnnnnacagacnnnnnnnnnnnnnnnnnnnnnnnnnnnnnnnnnnnnnnnnnnnnnnnnnnnnacctaaaactgtgagcttcttctcagcctggtcttcatttaagaacttcaaacctggcgatgggcagatttgccctgtggtgggaaggaggcctcagttcatccagttcttgataacagttgctaagcccaagtttgggcaggactgttccagaggctgggcctagctatgtgcagggtgttgccggtgccgtaacctc

SEQ ID NO: 460568 - DNA, 508 bp, Homo Sapiens
attgatttgatggtaagggagggatgggggagcaacacggagagggtgagagaagggaggtgggtcaggctgctcctgagggccggacgagtaggcaggggcctatggaagcagctgagcctgggagatgcccggaatcactcaaggcaacctgagccactgcatgctgggagtggcaatgctgactccagccctcccccagcctcacctggatgcgagtgagaacctcctggaagagtggagacttgtcggtccaggtggccagcagctcagccgctcgctcaaagttcttgacatactcactgtacatcttcaggaagggggccagcttctggatcacgtcaccgatgcggggggttagctgtcctgcaggagggggcacagggattgccctcagcctagagacctcctctcgactctagatagggcaggtgaggccagggctgcctgaatcccccaaagcaactttccacgcaattctggtgtgccggtcacggatcctctaagt

SEQ ID NO: 460569 - DNA, 535 bp, Homo Sapiens
ggatatgagactccgccctgggccatgcccacagccacagatccccaccacacacacacagagagaatataagtgctccttgatctggaatatagagtgccacagggtctccaagaggtcatttgccgcaagcagggaaaacgaacactcagaagacttgtcttgaggaatcttctgattcatctaaaatgcttaatgacatacatgttggtgcttacactgggtgttttttccctgaactgttatttctctaagaattaatgacttataccctcctcagaggtgcacagaccatctcctctggcccccagatcacttgatacatgaagtcttggtgtaccaagccccttccagcccctcctgcaggatgaccgtgggcaccatttgctcccgctcccggggtttccctatctccgtctctgtgcgacgggaggaacgcttcccatagcagactgagcaaaaacagggctcaacatggtatagacacaacatagcttcgtttgaaaatatacatacataaggggtagaaaggatg

SEQ ID NO: 460570 - DNA, 612 bp, Homo Sapiens
gaagattgggaataaaggaactacagagctgcttgagaagctgtaagaccttttctaatatgttctcactttcgtatactctggagtggcactcacgcatgacatagtctgggtttcctgccctagaccctaacagatgtggcttttaatgcttgggacattaaagacacacccacatagggtacctaactaaagacacacccacataaacaagccacagctttcagaagagtccatgcttaggcattaacattcatgaactctgttcttctaatgtttggatataaaatattatgtcttgggaagttgatgctatgtgcaaaaagattaattatcacggtatctaagagatagccctcctctggggcatcctcaaactgaacagctaggcaattctgtagcctccataaagttcatgaatgttactcactgcccacaagcagctaacttttgtacgtagtagaactgaaagaaattcaagggccaccccaacatggcagggcactatatgcaatgaggattcctgtaccagggtagaaactgatatagttgggatgtttgtcacctccaaatctcaagttcaaatgtaattcccagtgtgccgggtccgga

SEQ ID NO: 460571 - DNA, 243 bp, Homo Sapiens
acacgttctcaggatacggctgcagggagtttcagtccgaccctttcattccttagcactggcccattactccgtcctgtaagctcgataaggtcacatcagaagcacagtaagctgctgccacgctgccgtcagctgccgcgaaggtggcagtgaccacagcctcgtgactgattcacagcctggctgcgcttggtcattgagaattttatgtgtgccgggtccggatacctctagagtacc

SEQ ID NO: 460572 - DNA, 264 bp, Homo Sapiens
ttgggtcgctctagagatcccggacccggaacacaataagtgctcaagggagatattacaaggtcctacagaaaagcagtgacagtaggaaaaaagggagagaaagagagtccacagctactgagaaggtagactccagaggacttgggtattctatgagaattaggggatgcgagaaaaggcaagacatcacagatgatgttttccatgatctctgcccaaaataacagggcagaatcttttttttcatttcctttcctttct

SEQ ID NO: 460573 - DNA, 372 bp, Homo Sapiens
accccggcaacacagtagggatacgataaatatcgttgcaaccaggaacatataggtccatctcttacaacggatttgctcaccctactttattccccaccagagaagactgcaagcttggccgaaatgcccccaacctcaaacccaggaaccagatgagatcacggtcatgtgaatttcctttctaggggagcagctctgctcttggcatcctggagacctcaagatctgctgctgcatcccaaggatgctggggtgggagtagtcatcgcttccatgctctcctcttcctccctagacgcacatgtaaaccatgtttcccaagtcttcgcctgcacctccgtgtgccgggtccgggtcctctagagtcgc

SEQ ID NO: 460574 - DNA, 221 bp, Homo Sapiens
gaggatacggacccggcaacacatttggtggggttgtatcttacaaggctaacgtagcacatcatcaacctcctgctcgtggcaggaaggtcacggagccacccccacgatgggagagggatgcgcgcaggggccacagaaccctcagtgactccctgtggccctgagcaacacacaagcgggggcctgttggggttggaggttaggaccgcttttgttct

SEQ ID NO: 460575 - DNA, 370 bp, Homo Sapiens
gaaagttttccttttcgaatgatgggcaccattgtctcgttgacccttcttttcctgggtattgttaagaagacagaagtccatttttcttgccttaagaataaggagtgctctgagaaacaccagaaaggcaggggaaagaattcccacccatttttactgccctggggtcaagacttttgacccatatgaccatattactgtttttgtagaatgatgataaatttctgaaaaatggttcagttcaaaaaaggctttcctgagacctcactggacttgaaattacagcacatccagaatgggctgggacgatcctggcccctatcttgtgacctgctctgtcctccacgaacagtggtaaggtatcggc

SEQ ID NO: 460576 - DNA, 265 bp, Homo Sapiens
  misc_feature (93)..(112): n is a, c, g, or t
tccggccgctcatactcgtggaattttaaaattttaattttaggacggagtctcacttcatgcctgggccactaagcgaggaagccgtctccnnnnnnnnnnnnnnnnnnnnttccctcgtatatccagctctgagacttttagttccccttccctggaggtaaccagccatcatttttttgttgttgtttactcttccaaagattccatgcattcataaggatgggatggatggatagacagacaaaccaaccatcatgtatac

SEQ ID NO: 460577 - DNA, 443 bp, Homo Sapiens
aatttgttgttgttattatactttaagtccaagtcctgtttttatggacgtagtctaattaatctttcatgatatcctgaattaatagaaaaggacaatggttatctcattttagaaatgaggcgacagcctaagggttgcacccaggtcacacacagagttaatggttgagtcactaacacagctcagatcttctaacattgattcaatatcaattaatattaatggagcatcctcgtgtgcatgggaggctgggttcccaagtccctcccctctgcacagggcaagtggcctgtgtagataagcaccatcgtttggggttttagagtttgacacaaaggctctaagttttagagaaggcttgtgagtagacgccaagcattgtctatggaacatcacgaacaaagcctttttatgtcttttcatgcatactcacaggcaca

SEQ ID NO: 460578 - DNA, 327 bp, Homo Sapiens
tagtagtgggcagtgctgacaggttagggcagtgcacccctgcacaaggtggaattgtgttgagcagatatgtggcctcctgtacagccagagggggtcaaatccagccgactgcagagctatagatttttgggtgttttaccccttaataggcctgcacacagggcatatgaacagtcccccagtgcttaccattgttccaaacggcagaagctgcacctgctggactaatgccacagccacagaaaagcagtatctgagctgtctctgttacctacaccacagcttacaggaatgactaatagcagtcgcgggttaccgaagctc

SEQ ID NO: 460579 - DNA, 170 bp, Homo Sapiens
atttacggatctcgagctccggtacgcgcgatctgctagtatgtggagaaatagttagctgaaggtcctcacaaaatggcagcttatgggcagccaggaaatcttcttatggccagctacaattgctcacacatctggaggatcacctaaaccacacccagtggtcatca

SEQ ID NO: 460580 - DNA, 227 bp, Homo Sapiens
cgtctgctagtagtcccacaagggcttccttctccctgaccccttacccctaaccttcagttatacatacttgtattattcaacttgaaatggtcacatttgtgaagctccagcttcttatttaaaatggtataagtcagtgagtaaactgtttttattcagttcatatatataaagttacctagttgcactgtttttcttctttatcatctgaaggcatacatcat

SEQ ID NO: 460581 - DNA, 295 bp, Homo Sapiens
  misc_feature (110)..(126): n is a, c, g, or t
aggctaaggaagaatccccttggagcctggggaaggccgcaaggctgcacggtgagcccagccaaagattgcatcactgcactccagtctggtcatgagactctgtctcnnnnnnnnnnnnnnnnngaagataagaactgaagtatcacatcagccatcaacaacaccccatctcaaaaataattcttactttttcagctatgggttaacccatcagttttttcaacttagtaaatcagtgactttattccaccgctcatatctttacccgacatgcactatacagtttagcatc

SEQ ID NO: 460582 - DNA, 529 bp, Homo Sapiens
gacctctcacttgctatctccattgatgcgccaggaatggcagggaggttcttcgtgccatcccttcccttccccctaccttccaccagacacttcccgattccatgctgagcagcgccagtggggcttccagcagccgaagctttaccccctccccccacctactctggactggactgacagatgctaggcctacttacgtttcctgtcttgtgccttcccacacaggggacagcgttgtgggtccaagtgcaggtgatattgcccaggcaccagcatcagagacacacagatgggcctgccggggagctcctgtgctcaggaaaacagagcccaaaagggtgggcactgagctgccagttaggactcagacacaaggtcagatacttcctcctgtggtgctgcagctggaaatttcggccatggctccagagcagtgtcagaaagggattggtaacaaacagtaatatgcagcctgtatgtgtgggtactttggggatgaacagccagttagaatacccacagtcac

SEQ ID NO: 460583 - DNA, 286 bp, Homo Sapiens
agctcctcatacacttgcctgagctcctggttcaagaatgaatacattatccaaattgggacaatgacaaccatttcttaagatttttagatgaatgctaggaaagaacatatttttccaggagcatcactaggctggattgacataagctcatagctttctgcaccagatctagcatctactcttcacccatctctgcaatagaagtcatcagggtagaaggcctgaggaggcagacagagggagtgacaggtgatgtgttcttggagtctctataggcacctca

SEQ ID NO: 460584 - DNA, 462 bp, Homo Sapiens
  misc_feature (260)..(260): n is a, c, g, or t
gggcttttcccttaacaaggcccatttctgtaatcaccttcaagccatttattggtcaaccccttcttagttttaatgttaacaggtttcctttagattagccaattttactggtaattccaaggtgtttcttaaagccgtgttcaatgaaatatgtaacttctggtaaatcctgttattaaacaatccgtgttcagtaatgtggctacctccaatttttttccccaggtggagtaaacaaattaggccactcaagctanggtagtggctttagccactgaggtatactgctgttttcatgttcttttgtttctgagcccaaactggttctcctacacttaaaccaataaatttttccccagctcaccattcagcattcgtaatctcttatctagcgcttccacaaaaaggattacctagctggcatgcatttctttgtctgatgtctctaaggcacctcga

SEQ ID NO: 460585 - DNA, 473 bp, Homo Sapiens
tgaactcgatggtaatgtaggcctaagtttgtcttgatggctccccatcttcctttttagcacttagggcagttcaaacttttttcaaatagagccattgtgattgagagataaatagacaggccatctcatcccactctttcatctgacagatggggaaagtggggtccagagagtaaaagtggcaacaactctgcaaaatagacatgatcacttccactttccagatgagtatgctgaggctctaaagctatgtaacccactcatggcttcagagctggtcatggatacagccagatttgattccacatctgcttgattctaaagacaaaactgtcagtgctaaacctggctgacccaaatgtgattctccccaacaccccagggaagctatgaatcacaggctgcatgaacagaggaaacagcactgggtacaccggggagcccagtctctttgcccaactccagccctt

SEQ ID NO: 460586 - DNA, 621 bp, Homo Sapiens
  misc_feature (352)..(392): n is a, c, g, or t
ctctagaggttccccgagggtgccttagacccctcccccaggtctttatgttgagctgttggaagttctggagttgggcaaagtgactggactccccggtgtacccagtgctgtttttttgttcatgcagcctgtgattcatagcttccctggggtgttggggagaatcacatttgggtcagccaggtttagcactgacagttttgtctttagaatcaagcagatgtggaatcaaatctggctgtatccatgaccagctctgaagccatgagtgggttacatagctttagagcctcagcatactcatctggaaagtggaagtgatcatgtctattttgcagagttgttgccnnnnnnnnnnnnnnnnnnnnnnnnnnnnnnnnnnnnnnnnnaaagagtgggatgagatggcctgtctatttatctctcaatcacaatggctctatttgaaaaaagtttgaactgccctaagtgctaaaaaggaagatggggagccatcaagacaaacttaggcctacattaccatcgagttcagagaatggcagaccggaagcaccagccagctccactccaggcttttcacagcagccacttctagaggctccataactctaaggcact

SEQ ID NO: 460587 - DNA, 567 bp, Homo Sapiens
  misc_feature (56)..(56): n is a, c, g, or t
gaccagaggaccccgaggtgccttagaggtatgctctacgctgcaaaaaaagctgngggaggaaagtattttaaaattattgaatgatcctgcttaaacttgcaaatttacagtggccaggagccactgtaccacaaaatcatggtaaaaaattttcctcctactagtacttttaatgaatttattacaatattatttcaagcccaactagagaactggaatagaatgatacatttcatcctgtttgctatacagccggtttttattacaagaatcttgtttttactttagtttcatttttaaggcaaatatttggcccctggttgagggagtagcgtgtcagccctcagcatttgaaaagggaattgcatgttggtggggccgtgctccctcccaagcctgtgggagaggagccttgcttgtctcatccacttctagtagccctgggcattccttgatttccagcacagaccttcagtctctgcctcttgtttacatggccatcttctctgcgtgtctgtgtcttcagacagtgtcctctctgtgtgttattttctcttctaaggg

SEQ ID NO: 460588 - DNA, 466 bp, Homo Sapiens
gtgatctacaggatcttcgaggtgccttagagtgaagccagttattttcattaaattatttctgaaaactgaatcctctgctacttgaaaatttggaaggaagaagactaattgggtaagaagcagagtttggtttcagattttggtataaggagctgttcacagcaaaagaggaataaaggaagttagtattcatcaaatatttcctatataacagggactgtactagacacatatcgtgctcaactcatttaattctcacaaccattctgagagacaggtattattaactccaactggaggatgaaactgaggctcagaaaggttaagaaacttgcccaaggaaacactggacagggcactttatccacaacacaaggatgcctcaaaaatggaaggcctagagtcttactgaaagaaatcctggctgatctctggtctccaaaccccatctcccactccattg

SEQ ID NO: 460589 - DNA, 317 bp, Homo Sapiens
gaggtgccttagaggcaatggtttgttagtttctattagacacagtgttattactacttaatacaaatcaatgtgagatggatcatataatcatataatttttttaaagataatattttagattattgtgcatatacaaaggtaagcatgcagaatgacatgattatgcttttacttctctttgtcactgaccagaaagatcttcatacttgaaggggtggaacatgaattgctattagggaagatgaagtggttttaagaccacttcagcagtgcccagttctggtctaaggcacctcggggatcctctaggtcac

SEQ ID NO: 460590 - DNA, 231 bp, Homo Sapiens
  misc_feature (59)..(75): n is a, c, g, or t
tatttcaagtctcttaaagggagaaaattttactttttaaaatccggcctttccgcccnnnnnnnnnnnnnnnnnttcatatggattccaatccatagtaacaagcacagttaaaactcctcaataatcccatttatatgaagcatgacacataaataagcagataatatttaaccaatgaaagggacttctaccttcttataattaggcccccacatgtctaagaggaat

SEQ ID NO: 460591 - DNA, 633 bp, Homo Sapiens
  misc_feature (108)..(108): n is a, c, g, or t
accattctaaaaatagtaaaattttaagtggcaaaaattgggaaagaatcttagaccataaaaatggaagaatacctgaatgaggggagaactcgaagtgtaatctanctggtaaatagtaatactaatctttgttaagcattttttactaactggtaatatttataactccaagttctatcattttcttatccactttgagagactactgcttggggggtgggatctatggattagagtaatccctcacagctggaggctttagggaagaattggtgtttaagatggccctgaaaggtgagtgggatttctaaggccagatccacaggagggcatgccaggcagaggaacactgtcacagagtatctagtgtgtttggaaatgcaatcagtcctgcttggcttgactaggatgtagggtgtttagaaatggctgggaaggtaaggtaagactgtgttgtagagagcctgggtattggataggtgaggtgagtgaactcagggcccttcagatatactattctgactgctgtgtggctggcagggagaacgtataaaggaggacgtgttacagttagactgtatggcaacagtcagaggggaggagtcacagggaagaaggtctaaggcacct

SEQ ID NO: 460592 - DNA, 323 bp, Homo Sapiens
aggtgccttagataagtcactctttcagcaacagtattgtcaacttctcagagctgagatctaattctgcttcttttaaaccccaccagtggcctagcacaagctaacactggagaaagcttaataattgcttgttgactgataggataattgttacaactgcctatgttcctgtcacaaccttcgagaggaaatagaaagatctgttagaaggctgttgacttccagagagttacttgggaactgagtagggagtttcaggttgagaatgggagacagcaggagtttattgaacactggcaagaaggtagggactagttgcc

SEQ ID NO: 460593 - DNA, 441 bp, Homo Sapiens
gtgctcaaagtggatggaagtggacaaagacttggttgtagaaggaggtagaaaggctctggaataagaaaaacttcaccacagaggagaatcagtgagttgcagaagttctaggatcttctgagaccttaaactgcaggcttcatacccctggactcaagaatctagaactgtcacctctagctttaagtgaggagctaaagaggctactcaacctgctctattcacagaggccaccttctcctacctccctcacatcctgtgttgtttattggcagtcctcacagcctcgggaagtctttcaaggattggaacactgccccaatcagggcagcatacgcttcagagaaatagtaaagtctgaccaacctggagagctcctgcatgaggcccaacccctaacccatccctctaaggcacctcggagatcctctaggtcag

SEQ ID NO: 460594 - DNA, 395 bp, Homo Sapiens
ctgtcggggtttttggcagaggacttggcacaaccggatggaagcgcctgcggcacaggggcagggctgtgcagtaggccgcttccgcccctgccgcccctcccgcagacccggaatatcacacgggggtcaggatggaggccgacaggatgttcacagccgcgggttatgttcatgaccgctgaaccccaggcacggtcgtatccaagggagggatcatggcatgggaggcgactcaaagactggcgtgtgtggagcgtggaagcaggagggcagaggctacagctgttggatacgaggccatacatgcctcctcctggtgttccatcagggagccgttcgtccagtgtctgtctgtatctctgcctctctgtctaaggcacctcgtaatcctt

SEQ ID NO: 460595 - DNA, 617 bp, Homo Sapiens
  misc_feature (175)..(175): n is a, c, g, or t
ctccagcaacaaggtttcatttttcctatatgaaagtggcatgaggccacatggccccttgagctcactggaagatagtctgggagttctgctgggcactgctgcttcttggcttatgcgtggatgctctaaatcaggcattccggcagatcttaagatctggtgtgagatagcncccaaggactggtcaacccaggaacatattacaggatggagtctacttatagtccagagatttgcctcctatgccttgatttctatcagttctccatacttgcctaaatattctttgagactgcttttaccctgtgcggccacttggggtctcacgatgtccaaaaacacttccttttaatttgctgtaaaagcactattttcctcacgaggctttaaggaaagtctgaagttccaatatccagggagacttgtgccatttctcaggtctgtcccctgtggcacaggaaacagcctcttaatattaagtttcagaaatacacacattctgaatagacccaggcagataggtgttcctgggcctcagagccctgctactcatcgttcctggcttctgaggtgtgtgatgtaagtcctagccaaatctgcatgtctgttattta

SEQ ID NO: 460596 - DNA, 523 bp, Homo Sapiens
gatgcaccgaggtgcctatagacctggagtcagtcacgcaggcccctgcgggtgtgagatgggctggaagcttgaagagaattcgacccggaggaagaagcatgccatcttattaactgcaactttacttcaagaaatcacgcatttgacctgagatcagtatgtcctgtatctggctgcaatctgcctcctcccctggagcctagggaatggctgactctcatgcttcttgcccctggatgaccaaaggcccttggctaaatattttttctgtgaagccgacagggttcacctgtgcaagagaggacagaggcatctaaagaagatttccaatcccgcctgcaacaatggcccttctcctgcctggaggccggtgtgcagcccctgcctggggggagaggaggcatcagagggatgctgaaggttcctttggctcctttgaccttttcccacatagactctttttttgataccaagactaatgatctggtacccctccagacaggcatccaggcccagggaa

SEQ ID NO: 460597 - DNA, 436 bp, Homo Sapiens
agaggacttccgaggtgccttagaggataatccttcttttaaggtttgttgctcctctgttaaagtatggctacctcagtgtagagtcgctcccctaaggatctctctgcatttataaacatactgaattcttctaccggctctctttcaaaccccaagctgggaagaaatgggccttcacatgcaaagccttgtttggtggtgagattggggtattggtgagcagtgaagagtgtgaaagagggagaaaacaaccaggatcattacaggaaagctgggcctttgaaggttgtaggtaccaagagggtacatgctgacagggacatcaagatgccaaagatgtgtttttaaaataaaaatacaggtttattaaagtacatctacatatagtaaagttcactctttcagagatactttctttttttaattctctttg

SEQ ID NO: 460598 - DNA, 157 bp, Homo Sapiens
gtttcttgctgataagtattttttaaagttagtaattggttctgttgattttataggtacagtgtagtgaatgtaagtgccagccagtactggagctaacattagaactttacccttctgactgtagtttcatgtcttcactcgataccggggcggc

SEQ ID NO: 460599 - DNA, 168 bp, Homo Sapiens
gctccggttttcgagtgaagctcagtattagccacactgaccttctcagtcatgcatgatgccaggaaaatcacaggcttccattctacagtgaagggcttggaggagcaggcaataatccttaggaaagaggctgaatccaggggctgagcaggaacagtccacagg

SEQ ID NO: 460600 - DNA, 427 bp, Homo Sapiens
agaggatccccggtttcgagtgaagagagagaaatgtcttcagtcccttgatgttcccagggttattaaagttttacctgaagataaccaagacttccagaaattacaagtcatttacttcattcactgcagctaagagaagcttgtgctgttgcctcatagaattatttctatgctgcatttaacatagcattaacaacgcatttgaaagcgagttgaatttcttctagaaaagttgagttggctatcttgagatcctatccaaaaaactttgtattttcctaatcccagttttagataaagccttctcaaaggcttttttcaggagcaagttgttacccagttgttgaggcctatatttatagatcacagaaattgaaggattagagcacaaagaagagcagggtagttatatccttcactcgaa

SEQ ID NO: 460601 - DNA, 448 bp, Homo Sapiens
gaaatgagaacagagatgggacagggatcagatcctgaaaaccatcatacctggtgaggagtttgtgttgaggatgtaactgagaaggagctgcagaaatgttggccactaccagtgacatccacggtcatcacagctccgttgatgacagaacagaactcccaagcagtgtctgtctgccgtggtgtggatgtgccagcatgaatttacagtcagctgagtgacaggagaaggaccattttataatctcatagctttgaatggggtgtgatatggtttggctctgtgtccccaccaaatcgcatgttgaactgtaattcccaatgttgcgagagggagctggtgggagatgattagatcatgggtggatttcccttttgctgttcttgtgatagtgagttttcatgagatctggttgttgaaagtgtgtagcacttctcccttcact

SEQ ID NO: 460602 - DNA, 520 bp, Homo Sapiens
  misc_feature (105)..(113): n is a, c, g, or t
caatgggaatggcttgagcggtcccattcatctccctagggaatcatggttgcatctcgtcatggggagggttttctgtttcatgtacctcctctaaaggaagannnnnnnnnctctgattgatttatctgtggacctgcttatctactgttctacctagccatagagtttttaaataaaaaagtttctggaattgcttaaaaacttgttacatgtgccttccctcacccttacctctgcagctaagaagcctgtccttacaaaaggcgaacagtccagtcgtgggcaaggtttaagtaaaagcagtcactagtagctgctgtcttctaatcctattggttacccaagagaagaagaaaaatcattatatgatggtatccaggattccaggcactagttaggaaattttcttgatttctacccataaccagctacagaagtgcttgtgacatactattgtggaggaggaagatgatccctggttgaggtgtttttctcaatagggagatcccacatgccc

SEQ ID NO: 460603 - DNA, 336 bp, Homo Sapiens
ttcgagtgaaggcgcaatggcgaggaagttatctgtaatcttgatcctgacctttgccctctctgtcacaaatccccttcatgaactaaaagcagctgctttcccccagaccactgagaaaattagtccgaattgggaatctggcattaatgttgacttggcaatttccacacggcaatatgatctacaacagcttttctaccgctatggagaaaataattctttgtcagttgaagggttcagaaaattacttcaaaatataggcatagataagattaaaagaatccatatacaccatgaccacgacatcactcagaccacgagcttcactcgaaa

SEQ ID NO: 460604 - DNA, 246 bp, Homo Sapiens
ctgactcagtctgtggcctggtatttgttatcataaaggaagatgtacacctaaggtatcaagtggttaaaacagcaaagtacaagatgcatttttgtatttattctaacttttgaacattagtgtctttcagtataaataaatgtgagcaaatatacctcagtagtaatacaggagaactaaatatcctgctataacttaatacagatacatatttcaatatgacttaacaaacacacaattttg

SEQ ID NO: 460605 - DNA, 240 bp, Homo Sapiens
ggagaaattttttttaagtgattggctcacatgattgaaggatctgtcaggttcaaaatgcacagggcaggccagcaggctggaaatcccagcaggagttaatgttgcagtcttcaggctaaagacagtctggaggcagcattccttaccctttgggggacctcagtctttttaaggcctttctttggctgattaggtgaggcacacccacatcatgaagggtagttcccttcactcgaa

SEQ ID NO: 460606 - DNA, 596 bp, Homo Sapiens
cgggagtagtcaaaaaagaaattagggcagtcccataggaggaaatgctgattttaggaattggtttagaattggtttcaaaaatcaggtgaaatactttgcctcataatgattttatgtttgtaaaatttaagaagccatgtaaatataagcatttatttctctttaagtttgagcagggtattttccttttatcccttgcaaattaggccttttcttaaatctccatatctctgcctctatctccataacaacaatgtcctctgaaaccctgatccaggttctaggaacgtgccatctaacactgatagtgttggtatgattagaatgactttttgttaggcagctggattttcgatgtttttaaaatgatctgtctcaaccagatgcaatagaagggatggcctgtggattatgtgtttgtcttcttccttttgttgctgggtcatttatatttaatattttgtttttctgataatcttaatgaacacctgtgtaatatattccacagatttcaatgggacagatgttacaagattttggaaaatttcttgggatgtttcttcttgttttgttttctttcacaattggactac

SEQ ID NO: 460607 - DNA, 135 bp, Homo Sapiens
tagtagtcaattgtattttggctcacagttaaccatgaaattaaagataaactacttagacatattatctaggaaggtaaagggtgtagaataaaactccccctggcctcaaaatatggcagcttggattgtggg

SEQ ID NO: 460608 - DNA, 671 bp, Homo Sapiens
atagtccaaggaagtgcttatcctctcagtatttaactaaggcttactatatttagatacaattaagaggcatttattattatccattaatgatctcatgttaattaaagtatcccaagcattttatgctaggttactgatcactgaagctttagtacaaagaacatagcaattggtgctttgtgtatctaatactttcagtgacatacaagggaaagattaatatctgtgtcggtgctgaacgcaggcttctactgctgagtgaaaggtacttatctttgtatctgattatcagggcaggacagcataaagcaatttcctactggcttcacccaggccagtggttttcaaaccacgttccacgaagccctggattattttttgaggattatttattgagacagctcatcctgatactagaaaaaggtctccaagaatatccagggcctccttgggtttggttaagagaggctgagtgagcagagcagaagccctaaatagcttccatcagagcaagtctattttacttgcttttgagtggtattctactaatgatttcatttttaaaaagagttctgctactaaaatatgttagaattgtgtgactggctcctttatttctttaattcttcaggtctcagctttaataccatttcttttggacctactca

SEQ ID NO: 460609 - DNA, 392 bp, Homo Sapiens
tagtagtccaacagttaaatacattcatttgatataaaatgcatatttctagtaattgcttaaatgagtagtttctagtgccaagtaaaataaagaatacttattttaaatcaataatgaaaaccatggtttgagttttttggcttagaaataaatatatatggccatgtttgatttgtaaactcatcaaattaatgtggttcattcacttttcagttaacattccagtttaggattctgtgtaccactgttggaaactgagactaccagatattaccaagttgggggtggaaggtaggagggatcaccgagattaaagctccctccctccccactccctacctttcttaaaataaatctgtcttctcaaagagagctgtgaccttggaact

SEQ ID NO: 460610 - DNA, 514 bp, Homo Sapiens
tactgtgtgtggtatcagcaagaaataaattgcatccagcagctgatctgtaaccacgggctggggtttactctgatcacaggaattactcccataatgaagagtacctcctggcgtccttgtccttcatgaaggagagaaaaagttacaaagacagtcttaccgcacacgaaactctctggtggcacagagtaaatgctctgacccttcagtgattctgggtgggcacaggtggctgtcacaaaggcctgcagcatcctgccaattagccacgggggcagccacttcagctggcagtcacacaggaagctgtcgctgctgatatggctgatagagacacaacagtggatgcttcaggtgcagccgcaaaggagggacactcccttcacacacacactgatcagtcgcctccaatcagcttctcaagtgaacatcagcaagctggaagggggaaatggtttttctcacacttcctctccaatttcccagggcagtgcatataacccacctgaga

SEQ ID NO: 460611 - DNA, 395 bp, Homo Sapiens
cttgattactgtacagtaagtgttaaaattagatcgagtgattcttccaactttattattcttttcaaaattgtttaaccgttttagttcttttgcattccccatagaaattttatttttaatttaaaaaaataatttcaactttccctataaattttagaatcagcttgtctatatccaaaagaatcctgccaggaatgttttaggaattacattaaatatacagatcaacagtctggatagaacaaatatttttaatatgtcttttctaatccgtgagcatactgcctctccattacttaggtcttttttaattagcattttgcagttttcaatatacagatcttgtgcatgttctgttggatttatgcccaagtgtttcttttggacttagt

SEQ ID NO: 460612 - DNA, 270 bp, Homo Sapiens
gtccaaggtcattcaggatcagaagcaagcaatgaatggtcaaactgctaacagaattttgaatatgggaagagcttatttaggaggcagaagaaggtaatgtgcccagtttagtacattttcttttcaacaagtcagtaagtagggacctggactttagggaaacgtaaaggctcaggttatggatttgaggttcatctgcctagaggcctgaagccttgggaatacagagctcagtgcagggaatgcatagaactccttctcttacag

SEQ ID NO: 460613 - DNA, 404 bp, Homo Sapiens
gagtttgtagcaaaatctgaaatgtttattctaaaatggctctggaaaagtaaagaacctcctgatatagccagcttctgaagagcaagtacaaggaggaccggtttgtcccatcagatataaagacttattataaagctacagtaattaagactgtgtatcagtacaaggataattatgggttcccccacccccttgatcttcaaagtggattatctcagcagggcttatttcaggatttatctttttggagtagccctttcactaacccaataacccagaaattctagctctaaatataagccaagcatctcctgcatgtagacaggaaaagacgtttgcaaggatgttcctaccctcacattcactagagcactaatgatccatggattggactactcccg

SEQ ID NO: 460614 - DNA, 186 bp, Homo Sapiens
cgtgagtaagtccaactattagcactattaattttgttttcttgtgtggccatagactgcattcataaaaaccaacttgctgagcaaaagtaattgattatcacaaatctattactcttattggcaaagcaattaaaaaatctatgactcttgaagaaatagaatagggtccagttcacaaaaata

SEQ ID NO: 460615 - DNA, 418 bp, Homo Sapiens
  misc_feature (47)..(106): n is a, c, g, or t
gtagtccaagctacttgggaggctgaagtgggaggattacttgagcnnnnnnnnnnnnnnnnnnnnnnnnnnnnnnnnnnnnnnnnnnnnnnnnnnnnnnnnnnnngatagagaccctgcctgaaaataaatcgataaataaactcaacctaaacaggtgtgaatatatgtaagttgaaaacccgaagttttgagaaacatcctttgtaaatttcatcctatgaattgggtcattcatgtcctacccagctaaaacaggggccaggagccagggaggaaaagcagtcaggccacacaacattgtttccgaaatggacttctctgcaagcctgactcctgagactgtgcattgtagcctgaaaccagctttatccatagcttctgcgataaatggctgtaagtcttggactactccacg

SEQ ID NO: 460616 - DNA, 257 bp, Homo Sapiens
gaatccttgtcattgtgaataagatgttatagagagtattgattctattgtcttcttatgaagaaaaacaattcttatgtaagcacataaaaaaattactgactgatctccttgaccatgagttagcttacagatacacctctgtgattgtaggttcatacaaaaatctaagatttgtcataagcccctctacttggaaggaagacttccaaactctatggatctaatcagggcttggacttactacgggggatccc

SEQ ID NO: 460617 - DNA, 415 bp, Homo Sapiens
cccttaactaaacaggcagagaagttttcaaaactgctacatcagctatgtccactgtgagacagaactggaactggaatcggcagaagcggaagtggccggcactctccagtgtctccatacaaggagtagggcagtatcgcccacttgtcaccatctgctgtcttactccatcacagcatttcaaagggttgcttctcattcattcatgatgttttgattgtttgataatgggcccagagtgatctgggaaaataaatgcagatactttataaagtatctaatgatattactaataaatcacaggaaatgagcttttctcttctctggaaaacagcagcacacattacaaatattgatgaattcttaatccaaaaagacttgcaactgccacagaactactttaatgatgctg

SEQ ID NO: 460618 - DNA, 359 bp, Homo Sapiens
agtaagtccaacgcagaaagtaaccttctgtcagcatcctttttatttgttaggaagcacacttcacctttttaaaaacagcagaaatgacagctgactccctacctttccaaaaacttagccccagggaaaagcagagttgatgtgactaaatgctctaaatttggaaatgtttaggcttaacatttttcagctgaattgaagatacctaaactatatatagctatgtataatacacatgaatatagaaatatatttggtggtttttagaaagattagcaagaatgaaaacagtatcaatgatcaactgagtatgaagatcttatgttaacatgcatttttttcttcaagagttcctt

SEQ ID NO: 460619 - DNA, 482 bp, Homo Sapiens
aagagagttggtggatagaattttctgactattaatttttcttccatgaaattttattatgcctttggcactgttctgccactcttacgggcgatatcacaagatatctgtttagcagaagattatgtagttactttaattttaatataaaagtagcttgtgatacattatccaagagatctctgattctttagtaagtttgagaacacctattctacagagatgataggtacttagaaatgaagacttttaagtacattttaatctaatataggcctagtctattgggggtaggggctttgagctgtacaattttaagatgacttttgaggtttgtatttctttatcatttaaaaatatcctaaagtcagtcatttataatgaaggacactcattcattattgaaggtattaaaaatagccatcatctgtattaggtcgcagttttggaggatcatctttttcttttgctataaagcccta

SEQ ID NO: 460620 - DNA, 184 bp, Homo Sapiens
aaataataatatttaattttggtactttactataaccccattcctagtaaactggaaatccacaccgcctacttttgccaaatatacacatatacatgtatgactctttcaaaaagaactaaatacacaattattcaaaataagtcatttttaaaaatcataccttcatgcccgctaggggaca

SEQ ID NO: 460621 - DNA, 435 bp, Homo Sapiens
agacggtatatgaaatattgctggaccagcactcgtgatatgactcttctcttttgcctgggcattgcatacatgtgtattgtaatatatcgctatgttagacacctgggtgatgtgactttccatgcataagctctgtccataggcatatgatggtatctcattttgttcatcacctaggtgatgcgactctactcttttcctgagccctgcaaaaagaagagattgtgatatatcactgaactgagcaccttggtgatgtgactatcctctcttgctcaagtgtcacatattattggtattgtgacatacctctgtgaccaacacctataggtaggaaaacttccacccagactcagcccaaggggccctcatgactttcttaaaagatatgtgacttgaaaaatgtgactgtcttctgcctataccctgccc

SEQ ID NO: 460622 - DNA, 214 bp, Homo Sapiens
ttccctagcggggggattgagctgaattgctcagtttaatataagacacttatttatagtgcttatttatgagattcctcaataattgatagcttgctattagttttgagtatttgaggtactcaataattggtaactgctatttgtaataatttcccttaataacgatcatgatgccaagagatatcttaatatttttcagtttaagccgaat

SEQ ID NO: 460623 - DNA, 183 bp, Homo Sapiens
tgaaccactgcgcctgactgataatcaggttataaaagaaaagagaccacagcagttccatgggtgcagaatatttataccctacccagtttgatcctggaaccttttccacaacttgtcttaacaatatggtcccatctccatttatttttccaagtagatcgctggattcctgtataatta

SEQ ID NO: 460624 - DNA, 388 bp, Homo Sapiens
agagtgagagtgtggcccaggctctccaggagctcaggctctcagcacagtatttgcacctgtctaggctgctgccttggagagtgtggtggggagcaggccctactctgtatccagggtactaccgctgccttttgttttccttcagatgttgctatgcaggccctgtgaaactgtctctttctgctcagtagtttatggatagaattttaccagaatacacatagtacaagatgtggttgtcactgatttttggaatatcttgaggggaaaggcaatgaacattaagaggctcctgtttctgtgtgtttcatagaatagactgagaaactgaagcttgttttgttcctcagtaacctcaaacacactcttggtcacacatttctcc

SEQ ID NO: 460625 - DNA, 390 bp, Homo Sapiens
  misc_feature (260)..(329): n is a, c, g, or t
ctgcaataattgtgatgccagacagttaatttaaattccacacagaataacagatagagttccagtgataagtaattatgtaagttatttaattactccaagatggtataactgtaggagttcttctccttccttctctgaactgattgtataaagcaattcatattgaacaatatgtatctaattacattgttcggtttataacatacagaaataaaatatatttggaaaaacagcagtccctccatatcaggagggannnnnnnnnnnnnnnnnnnnnnnnnnnnnnnnnnnnnnnnnnnnnnnnnnnnnnnnnnnnnnnnnnnnnnaaaaaaagatgtgataaacaagatgcctactaagtaactaatgggtggtaacagaacgtcg

SEQ ID NO: 460626 - DNA, 379 bp, Homo Sapiens
tccaatatctagatcatcgatgggtgtgcttggatcatttttctttctctttattgtcagtcatattttcctacctttgtacatatctagtaatggttattatatgttggaaattgtcatgaaagaaccacagaggttccatatgatgttatcttccattagagagggttgcccatttcctttgttagactaatgtaagaaggaactgatgatcacaactaattagagactgaacagttttgggatttggtaatagttttgctaagcctctgtttacatctgattaattcctactcctcagtcatggtgtcctgggctttttacaaatggtttttaccaagtactcttctcttcaattctgaaagggtaacagacgtcg

SEQ ID NO: 460627 - DNA, 467 bp, Homo Sapiens
gaatccaacaggttcagatatgcgaaggatttttttgtagtttatttagcatttatatatgaactaatgtgaattcatttggcagctatatctgacatacagtgctgtaaaactgtttgtagtcttaatttcatcttaaaagtgctcatatttttgtgttttgtgggagaaatgtttatgtgtttgattatagcatcttgccccagacacccctaggatagtgtctaggtagtatttggtaaatacacgctatttccttttcaatatctgaaaatttttgaactaggaaacacatcctgttcctaggatcttaaagaagttggagatttatgatatattccctttcagggattagtatagtggtttttggacaacatgagtgtatctgagtcttgaagatgcatagtcagctggaggtggtattgtacctgttttagttttctagggccccggtaacagaccgtacg

SEQ ID NO: 460628 - DNA, 350 bp, Homo Sapiens
cgagctcggtaccccgacggtctgtacccctagaattctaccacaggggagcaaaacaaaagaggtaagtcaattttgccttattcagtatgtactcagtagtagccaaggaactggagttaaggagttcaagacctagcttaatcccatcacagaatgactagcagtaagaaagctgtggtagttacgaaagctaatcagttgtgcaaaggagtctgctagcatcagtgttaatccaggctgtacaggggaagagctggcatgcaagcatttgagtctactgtgctccaagctgcagatacagtgaatacggcagacacgctctggtaacagacctacggggatcctca

SEQ ID NO: 460629 - DNA, 443 bp, Homo Sapiens
caagagattagaaaaattttattcatcatcccaaactggattatatattacaaattctgatgaaaataatattaaaggtattttcaagtagtaccacaaactatctgtacctagaagataaaaccacacagtaaactggtaagtacacattgaatcaattcatctttaaaatatacactttgtttagaaattcatatatatttttattgtagtatatgaagtgggagggacacacaaatagctacataagattttcatttaacaaacatatgaactattccccatgctttgaatgaatcatcagaaggctgtaaaatcctgttattttttatcaaaggtgcatgaaacaatatttcatttccaatagcaaaaatacagtacttctaattttccttatattctctttcaaccctactgtggagagctgcttataattatatagg

SEQ ID NO: 460630 - DNA, 492 bp, Homo Sapiens
  misc_feature (452)..(452): n is a, c, g, or t
gtttcagctctgtaccctctatagctgtttcctctgagggacaactcttgagaccagactgtggagctctggagtcagaggaaatgggtgtcttcagcacaaagctgctgcttttacttcagccacttctgacatttttacataccgagcctgagattgtgtgattatctcaaatcaaatcactttgatggagataaataatcaaaactgttttatagtcattgatttggtgagaacagtaatggaaaatggtgttgaaggacttctcatttttggagctttccttccagagtcctgggctgattggtgttcgctgttcatctgagcccccaaaagcattattactgatacttgcacacagtcaaaagcgcagactgggatgggatgggtcttttataagggcatttaaggggtacacttacttgtgtttccactggaccatacatttttcnttaggccccttcaagtaatataggcacagggttatggaat

SEQ ID NO: 460631 - DNA, 502 bp, Homo Sapiens
  misc_feature (471)..(471): n is a, c, g, or t
attctgccccatgtttattattgtgctgtatcggacattttagattggaaaatgtgctacaacagatcagtaatagtcacagatctacacacaacaaatgtaggtccactaggaaaataattcctcctcacaactttaaccgtatttgacatttctactaacaacataactttatttcctaccctttgccttaaggattacctttctgaaaccagtatcaggatctctaaaatagcctgggtacttcctctaaaatccttcactaggttcatagggcaggtcaggatctttctaacattccttttttccccattttctaagggaaaatctggaactgtaggatttttaaaaacaaaaacaaacactttttttggcctgtaacccacaataaggaatatgttttacaaggtaatctaacacatatacacatgaacaaatgtttacttaaaaacacatacccttaccatctgngatgtacgcttttattttctattcttttctc

SEQ ID NO: 460632 - DNA, 496 bp, Homo Sapiens
tttttttcgtgagtgtccttaacttttacaaaaatttcataatcatgtttttcctctgaagaagactctgaagctctttctggcatactacttacaaccgggctggcagcagatctgtcacgtccaacatcacttgcaagtaaaggtccttcaatgccagctctaaggcttgtaagacgttccatgtccttaggaagtaacggtctcactaaatctgcttcattaatatcctcaatattggcagaaaatcctgaatcaggcagtgtctctttaggagggggaggtacttctttttctcctccactactttctttagggctgagcagagctgctaatgtctggtcactctcttttacaggtaatggttcttctgtatccttactaacaaggttattattagatggtaaatcaagatgaatatctttagcaggcaaaggcccttcaatgtcagcttcactaccaccactaggactggtggatagtaccatgtaaagat

SEQ ID NO: 460633 - DNA, 372 bp, Homo Sapiens
atctctaccattatcaccctaaataccaccatattcttatggtgacaatatggtgtcatcatttttgatgacaataaaaaatgcctttagacactgccaactatcccccagggaccagtggtcatgctgttatttttacgtccactgaaagaaggtaaactagcacagtgagataaattaaaactttgaaatctgaagtctgctaaaaaattaagctatcacttacatgaaaatattgcacatgaaaatgaatatgagataacgtattttttactagtctcactatttccacagtctctgcctgagccagtactaattatcgggcaagtgagcagcaaacaagtgctaagcgccctcttgggtaacagacgt

SEQ ID NO: 460634 - DNA, 426 bp, Homo Sapiens
ttttagtaatctgatcaattggttgccccaggggcccttaatcagtgtttgtagatggatgaacccaaaagatgtagttaataaaattctaaaagcaaaaatcttgctgtagacagcactcctttgccagagctagaacctggtgatgaagtgcacattctgcctaatgtacttaataaaccacttaatagttgtgggactggaactagctgtacaagtttcagacagattcttggagaataaagaatacaacctctaaggaacattgtttttctctgagcatgagatgatataggtgggagctaaaggcaaataagacaattgtagaaagaatctaaggggaacggtggtgagatatagctgggattgatattgacatttcaatagtaagaggatactcagatgtcccacatgggtaacagacct

SEQ ID NO: 460635 - DNA, 515 bp, Homo Sapiens
cgacggtctgtacctttggacaataaaagggatggtggtccttgtccagtgacatgataaatgtacagtttaaaccagacagagctgacttctgggatagctggtccaatatgctgaggggtgcagctgctgacaggccggatttcattggtgaggggagccatggaatacaagcagcgtgtaatttttgtttagaactctgctgcaagttgcagggtccaaaccaagaaggctttcacagcgtaagagatccagaggaaaacctgagttatgatcaagcacacacagagaataaaagactgagagtgtgaaacaaaaatgttgaagatgcaatattgataactgacttaagattttaaattttctttttaaggtaaagtaactctattaagaagtaccaaatttcctaggagaccaccaagacactttgagatgcaaagctgaaatgttttattctctggtctagactagataattatctacttctaggttactttttacggtaacagacgtcg

SEQ ID NO: 460636 - DNA, 403 bp, Homo Sapiens
agttggaacctcttcagacagcacctacgagattcacaacaggaaattagttcaatgcaaataaactgatgagaaatgaaagattatggaaactcataatagtcagttaaattggtgcagtagcccacacagcattcttgtaaacggagctacagattattgcagcctcagcaccagcagcagtgaaacagccaaccttaatgaacatgttgaaggccagagcaacctagagtctgagcccatacaccaggaatctccagcaagaagtcgtcctgaactactgccttctggtgtgactgatgaaaatgaggtgactacagctgttactgaaaaagtttgttctgaactcgacaataatagacattcaaaagaggaagatccattcaatgtagactcaagttcg

SEQ ID NO: 460637 - DNA, 407 bp, Homo Sapiens
cacccgagattgcttttaccgcagaaataatttattttacaaatttgtgtttctattatcaaggccatctacgagcaatttcttcttccctttgaagaaaattgcagcccaatctgagcaacaatttgataaaaggatggcgagaactccattaaataattcccaaccgttgtggaaaagcctcaccccaccctttggaaatgagggtctccagagtgtgcttaaggggtcattctcattctttgtgctgtttagtgtgttttgtttctcattcctttcaatgcagaatggctgggctgtgcgtttggaatgcagagatgggaggaagagagcagccaccaggtcagggtcccccctaattttttgtatgcctaacctcggacacaataccgggatcctcttagtag

SEQ ID NO: 460638 - DNA, 414 bp, Homo Sapiens
  misc_feature (176)..(185): n is a, c, g, or t
ttggtaaatccagtttacgtaagacttaaaactgctagctatgtatacaaaaccattaactatcagaaaagtggccaaaaattaagtaattatttcaactttttatgacatcactttggaaaataacctattcccttttaacttgagtagttaaagaagttctaacctgtttatgnnnnnnnnnncagagttaatgtgatatatatttgatgctacttagcaaaaaattttggtagtccgacaagtataatttatatattggaacaaacaaaactctggaatacacaatctattacaagccaatttactacagagaaggtatccataaattatttcatgccaaagggtctaatgtcagataaatttttgttttgtttcgttttgagacagggactcatgtgtcggacacaatac

SEQ ID NO: 460639 - DNA, 222 bp, Homo Sapiens
atagaggacgaagaagttgcacagtagtctcgcactcctgtttacatttgtatagtttaaacttgtttacctatacgtagtcatatatagcttgtgtgcaccctaagaaaatagtctgtgataacacatttcaatctattagacatcggttttgtctgctgtaggaggaaaaaaggggggcttctcacattttactccatttaattctatgttgtttggttt

SEQ ID NO: 460640 - DNA, 446 bp, Homo Sapiens
accctacattagcaggagaagagttacttttgtatacttttatatacttactgtgcctacaacctatataaaaagtagccattgtgtcatgatttttaaaattttctagtcactggtatcttcacataactaaaagtaatcttaaaatatcttttattggggaaaaattaggttattttaaggttaatagactcaattcttgtattgtttgctattaacaacctataaaacagtaacataatgagaattattttttaaagttctattgtgtatccctttcaatggtatctccccttcatagacgggattctccaaggaaaaatcagattgtttttgacaacaggtcctatgattcattacacaggtatcatcctgctgtgacgttgtgatttgagacttttaaataacatgttcaggatagggctgagctttttctacctggattg

SEQ ID NO: 460641 - DNA, 283 bp, Homo Sapiens
ggtttcttattgactagatgacatagaagttcgttttgtgttgaacgattgggaagcaaaaggcatcttttcacaagctgatgtacaccgtcaagtagccattgttttcaaaactccaccatattgcaaagctatcacagaacccgtaacagtaaaaaatgcagttgcggagaccttctgaccaggaagttagtgaatctatggattttagatatctgccagatgaaaaaggtatgacattttgctggtaataatttatatatttcttgaagtgtccgcaaat

SEQ ID NO: 460642 - DNA, 289 bp, Homo Sapiens
  misc_feature (119)..(143): n is a, c, g, or t
agaggctgaggccagaaaagatcaaattgagaccccagggaaccgggggttgcaatgggccggggatcacagcccttgcacattgtgcctggggtgacagaagaggagaacccgtttcnnnnnnnnnnnnnnnnnnnnnnnnntctagaaacagaagaactaataaaatacaaagcaaccagaagaaagaaaataaagatcagaaggaaatctattaaaactcttctagacactgaaaagatagaaacatttcctaccccattttatgtcctgcatgatgggtgccggc

SEQ ID NO: 460643 - DNA, 533 bp, Homo Sapiens
tagcaggaacagaagactacaggaatgtttccacaagaaacaagtaccaaaacaaggatgtgaccatacagtccaataatcccagatagtgagattattaaagactttcaaagcaattatggctcaacttattatcctccttctgaatatcagtacaggtatataggctttatgttgttggggtcatatttatattcagtattgttatatttcatgatatgttccctattaattgcggccttttaaaaaactttattttttaagcattttttgtcaagtatcataactgcaccctatcttatactccactgatacatcttagtcttctttctcatttaagtctttcctgttgattttaaatgtatttgcaccaagcagaataccaatttatctttcactttaaactctcaatttttgaaattcatacttttttatttatgccttttacaaaattttatatgtggtgtgtaatattctattcctgaattatcaaagatagcgtaacaaatcacatatagatattataatcctcc

SEQ ID NO: 460644 - DNA, 223 bp, Homo Sapiens
cggagacaatcttacggcaaaatgtagttttgcttgtttctggaaattttccaaaagatttctggggattcgtgaatccctagactaagaatccctggctaaaccctttgttacaaatttgtattttaaaagttgggaaaatatcaatattgtttgtggtaagaagatggaacacattctaaaaagttagtttagtatcgtaagtgtctccggggatcctcta

SEQ ID NO: 460645 - DNA, 479 bp, Homo Sapiens
tcgagctcggcacccgtaaacacttacgctacttgaaaagaatgtatatttgtatttgtcagttgtagcattttgtatatgacaagagggtcatactgattaatgatattgtctgggtatttcagatactgagagtcatgttagaatttcccactattgtggatttgtctgtttatccttgttctgtagtttttgttttgtgtatttttaggctaagtatataatgtttagaattgttctgtcttcctagtaaattagaccttttcttgttaagaaatattccttgttatctctagtaatgctttttgttgtaggtctctttcgtgtgatattaactataactgttttcttttaattaatgtctgcatggtattatcttttttgatcctttcacttgtggccttcctggctccttatagttaatgtgtgtcttccgtaagtgtctccggggatccgtgcagagacgaccaacaagcata

SEQ ID NO: 460646 - DNA, 295 bp, Homo Sapiens
  misc_feature (139)..(237): n is a, c, g, or t
tcacatatacagattctccctcactaaacgtagtgtctccgcggaacaacttacggttggcaagaatatggaataactagaactccataaatttctaataaaagtataaatggtttaactactttggaagcactctttnnnnnnnnnnnnnnnnnnnnnnnnnnnnnnnnnnnnnnnnnnnnnnnnnnnnnnnnnnnnnnnnnnnnnnnnnnnnnnnnnnnnnnnnnnnnnnnnnnngcaaagtgcgatatagtcacgcaattgaataccatctggcaatcaaaaaacactgtag

SEQ ID NO: 460647 - DNA, 414 bp, Homo Sapiens
ggtatgtagtatgtatcgccatctgtgtttaaaaataaaagagcatatggggaaactgtatatgcatgtgctttatctaaacctaatgtatttctgaaaggaggtctaagaaactgctaagatcaaacttccagggagaggaattcaatggctggaaaaggaaggtgggagatgtttgggtctatccttgttttgtacgttttgaatattgaaacatatgactgtattacctattttaaaaattaaagaatacagttacagtttggaaataactgaaatagttcatcacacacagagttggctgaactgacagaagcctgctacgtagacttgctgagtactctccctttccctcaccgcagttgataccttgtggattttgtatgttagtcgtaagttgtctcagggggatcc

SEQ ID NO: 460648 - DNA, 358 bp, Homo Sapiens
cctcgcccccgtaacacttacgatagtaaaatacaattaatagtcaatctcacaatatttggaaagatgaaaagtcagtagattcctttgaggccttatagtaatcctgtgaaatggttaaagtagagctattattatctttgtttcacagcataggaaaactgggacagaaatcagaaaaaagccaggactgaaaccttgtttttccttatttaaaatgcataaggtgtaactttctagataagatgaataattcaccatcaacgccctgcaactcgacaaataagagataagatagtaagttagattcttctaaggatcaaggatgaaatagatgatgatccattcgtaagtgtct

SEQ ID NO: 460649 - DNA, 194 bp, Homo Sapiens
cggagacacttacgcaaggaagagactcttcagatggaaggtcacatcagctagaaacattaatatgactggatgggctcaaaccactgacttttcagtcaacatccgacagcactaacccagtgttccagagacactgcttgttaaacagtgaaagctgttgctcaattgtgtcatccgtaatgtctacgggt

SEQ ID NO: 460650 - DNA, 206 bp, Homo Sapiens
aagaggaataccaagcttcatctatgtaactttgcttatttttacagagacaagactttccatctgattgtgcttaatggattttctgcttcctcagaaaaacttgaatttttaagaaacgtaattgtctccgtaaaaataagctaagttacatagataaagcttggtattcctcctaacattatcgaatcgtaagcttctctccg

SEQ ID NO: 460651 - DNA, 357 bp, Homo Sapiens
  misc_feature (18)..(18): n is a, c, g, or t
gagctcggctcccggtanacacttacgaattactgctggacttttccatttactatttttggactgtagtggatatgggtagatgaaacctcggatacgtgggagctaccgtgggtgtattaggctctctgatgttggatgaacagggacctgggttaatcttgccctactctctctaattcaggtaccagccagacgagaatttcagcaagaacgagaagccgaaggaggaagtagttgagatgaattctgtacccaaagcagaatccccagcatgtgttcctgaagcgtccagtactccggcgagtctgtggagccctgtcagcaccatccccaccccgtaagtgtttacgggtg

SEQ ID NO: 460652 - DNA, 344 bp, Homo Sapiens
aaaattttattaccatatactaacaatgaacaactggaaatcgaaatttataaaaataaaatttacaaaaacatcaaacatatgaaataggaataaatctgaccaagagtgcaagacctatatatcaaaaactacaaaacagtgctataagaagaattaacgaagacctaaataattgggaagatatattcatgaattggaagactcaatattgttaagatgtcacgtcctcccaaatctatttataaatacaatacgatcgaaatcccaagtggcatttcatttgtagaaatgagaacagaattatgaaatacagtacaattcactcttttggtagtaattta

SEQ ID NO: 460653 - DNA, 647 bp, Homo Sapiens
ggatttccagttcagtcgcattgccatatattattgcacttttagaaagcgccttattatcatcacccaacacagatgtggtatatgtaaattcagctacagagacaggtgaagaaatgttaagggctgtcagcccatctgtgtcaggtaaaagaaattcactatcagaagaggctccagaccattccccatcaccagagagggcatgagtaggctgcagtaatgatgcagttggggttattaacgaagacttaggtattggtatatgagaggggattgggagggtcttactgaagatgaagttgttcttgttttgaggcagtttatagactttggaaataatacaaggttgaatttacataaaaattttgacttccaaagaaatattgccacagaagtaccaactacaaggtctttaagaattgccaagttcaggcagacaaaggcttcctttcctagggaggcacaaacaagattagaaaggaggtggaaggggaatgtcaaatgcagggtgaaaaaatcagattttagatcagagaatttttcacaactgaagtcagcctgttctttggagttacataaaatgggtttgtaaagttcagagcttggggaaagagacaacttaagtaagtttcataagagtattc

SEQ ID NO: 460654 - DNA, 504 bp, Homo Sapiens
  misc_feature (383)..(395): n is a, c, g, or t
  misc_feature (415)..(415): n is a, c, g, or t
  misc_feature (441)..(441): n is a, c, g, or t
tgcattttcagtttataggggaaaaaatattttctctaagatagaagaagttatttcagtattagctataggtgctacctacctcttggggaacatggtccctgtttgcgctaaccattacaatgatcttttagaactctgtatccaaagagctacttcgtgacactggccatctgagtcacagatgtgaagtcgatttcactttataactaaccagtcctacatattaagacttctaagtgtccatatgcctcttttttggtataatatataaagtcagcagggactcccctttcccttagggcatactactgtcagtcagaactgcaagatgtgaatgaagctcttaacggcttggagtgtctttctgggaggaattgccnnnnnnnnnnnnncatgttagcaggtaaaaaancattcacccaatttgaagcatagaanaaaatagttgctgaggttttttaataaccattcctactatctgtgttcccttagatactcctg

SEQ ID NO: 460655 - DNA, 321 bp, Homo Sapiens
gctgctgcccctggctctccatcagcgcggcccgcagccgttccagctcattgtccttttgctctgcctcccgctccatagcctgcagcgctgtctgtgtgctgcagaactggcgtccctgttgctcttccagccactcgggctgtctgtctcctgccctcgcaggctccttgactaactcccgggaggctgtttcctgctgctcacctgccttgcgcaccaaggtctccaagcgggccacctctttgctggtggcagccatcttttcctgcagagtggagaggtcatctgcaagcttctgggccctgacttccttctctt

SEQ ID NO: 460656 - DNA, 344 bp, Homo Sapiens
ccttatcgctcgcaaaatgctgggaattgcaggcgtgagctaacgtgcccagcctgtcctctcttaattaatatgctcattctgtatgtctaagcctctttcctgcgtctaagccgaattaactgctcacccatctgttactatagcacttctcacattctatatttatctttcatgatagactaactctttgagggcaagggctatatacagtaatatgcccaaagttacagcaaacaagatttagatttaaatatgagctaatcaagtaaactagcttgtggtctaaagacccagatttgaatctggccactagtccaagtcacctaattttttttttcttt

SEQ ID NO: 460657 - DNA, 270 bp, Homo Sapiens
tactttttttaatgccaatgtgacctcatttgtcctcattagctggtgaagccttttgatgtaaacctaactggcacatgacttccttggatatacagggtgttccttctgctttcttagaagacaggcaaatgagcagatcccaagagcccagatcaccttgttctagtagccccggccctaggccagcattgagcctttcttcagcgatgacaaccgtatagccatgttgagtcagaatgtgctggtgtagctgaagctctgttttga

SEQ ID NO: 460658 - DNA, 231 bp, Homo Sapiens
aacgatcgcaaaatgctgagattacaggcatgagccacagggcctagcttatgttctagatcacaagaaaatttgtatttactatttattatggtaattagtgaacttatccaaaaaaatatactccccagcctcaaaaaatatattcttggtatacaggcttatattttccagattagaaaataggtccactgtgcaagcaatggggtcccaaggctaaatgttgaaggt

SEQ ID NO: 460659 - DNA, 221 bp, Homo Sapiens
tcctcatgactgaggtggtcgaaagggagtatttaagtttaaatcaggcattccgttttgaccaaattaagctggagatgcctgtggaacattccagccaggctgcatcacgtcacactgaccttcagcattgcccacagtccatcttcccccaggacctgaggattttgcgtccggctccctcctcgcccaggacccccaagctcccagcacgcttctga

SEQ ID NO: 460660 - DNA, 306 bp, Homo Sapiens
gttagttgtgctcaagatggttttgctgggtacaggttactatgaatgcctgtaggcctgcatttaaaaattaggaacccgtagcagttctacgcagaaaaagaaaaagttctgtgaaaacaaagcaggttccatttgttgagggattacgaatgttgcaaagggctgaggaaatccgtttaccgtgggtacagcaaagttgtttcccatcgttgagcacaccacgaaagaagactgattcaggttctaagacgctgggaaatgctctcttgtcctcagtcggtgtgttcttttaccttcagtttg

SEQ ID NO: 460661 - DNA, 319 bp, Homo Sapiens
tatcgctcgcaaaagatagttatttatgatatcctcactctgagctgtttgcatgaaaatattgtagtggcttccctccacggtaatgtaatctacttataaacacctttcccatctgctatgattttaccctatttgcaaatgcttcctgccaatatcaggctgtataactcatcgtgcataatgtttgcccgcacaatcaataacaagaaccttactagcacacccaaacaaatgtttgggttttatttgtttgtttgtttaacttttattttaagttcatgggtacatgtgcagatttgttattgattttgcgagc

SEQ ID NO: 460662 - DNA, 277 bp, Homo Sapiens
ttagtttttggcttttttcttcatttattgtccacgctagaaacatttatattaagagaagagcaaacgagcttcatctaattttgcattttgattaccaatcagtactagtcacagcaccagcaatactgtatgttttagactgacaaggtcagccaggaaatggcatttttttaaatgcagaaatgtgtttgtttcctctactctaacacgtcctttctcctcgtggtgtcctgtcaccccccatgcagcaccacttttgcgagcgatgtgtacc

SEQ ID NO: 460663 - DNA, 154 bp, Homo Sapiens
tttaacaattggggcaaatggccctagtttaaaatgaattatgatcccactgaaaaataatgtaaaatatgttttatataaatgaaaacagttcctatgtgataagagccaagaaacaggccaggcacggtggctcacgcctgtaatcccagca

SEQ ID NO: 460664 - DNA, 233 bp, Homo Sapiens
caaaagtttcttctccactggagagacccaacgttacttctcccttcttttacacgtactgttttatattgacttcccttaacgagcggggaggcttgtctcattcatcttcatgacaccccatcccaagccaggatctagaatatgtatgttggtagagaagcactggctcgaaacttttgtgaacatttttctccattcctcatcttgttgttttgcgagcgatcgcggaa

SEQ ID NO: 460665 - DNA, 142 bp, Homo Sapiens
gggcacttttgaatcagttcttttaagtttttggggaaggagatttggtttcattttcattactttcaattatctccattatccttctgcaaatccatgtgcctcaattcagggcattgtgcatacgtaagaacagagttag

SEQ ID NO: 460666 - DNA, 109 bp, Homo Sapiens
taagaaggctcttgcaaaacctaacaaccaaatatgtttagccccaaatgaaaaccaccacctcctcgaacctcagaggtctgggggcgtccggctggaactggggttt

SEQ ID NO: 460667 - DNA, 339 bp, Homo Sapiens
tatcgctcgcagaatagattatcaaagaagaagtgtcgtaggcactacctacatcacactaagcagttcattaggaacagacgcacacagcattcgcataaggacacttctgatatcccacgttaaatgcaaataatgactgggtatctagggtcatgccaagattaactaacctgttgttctcatcttcatactttagaagccctcacaagagcttcacaagttggataaccggacacgttgatcaaaggagagaatcataaaacacctattaccatagtgctgcagaatgaatgtagatttttacatcaggctagaaatatacttctgcgagcgata

SEQ ID NO: 460668 - DNA, 269 bp, Homo Sapiens
tacttgactttcttggaccccaagattttacttagagttatatttttgtcctccctgctagtgtccctcatgtgctgtaatttctagtttcatactcccctggttgcaaggtaatattcagtgccgaccacagtatttcagatgttatccgacagtgcagatgagcaggggccatgtgttgtcttgatttttctcactgtcatttctattgatgcagtgtagactttgaatcatactttgacctttcttgagccttattgcgagcgata

SEQ ID NO: 460669 - DNA, 518 bp, Homo Sapiens
aatctgtgccatgtacatgtattatacagtatattcacaaaaagaggggggaaattccatttttaacaattaaatacataattattaagttttaaaaattctcctttgtgtaccactccaaaatcctctcctgcacatactatttttttggaaacacctagtcgtctcatcgttatcacaccggttgtaactatgtacctacgtgtctaccttccccatcagactcgggaacaaggagtcgggtttgagtcccactgtcccaagcacagaacgctggactcccagtagaccatgtgttgcaaataaagaccttcgtccctttcaactcaggccgtccacgagcccaggagttccaacaaaatgatgtacagcaaccttttccaggcctttatgttgcctcaatatttctcacctgcaaaatgggaatgatccgtacctgcctcgctgtgctgtcggaaggagtcagacgatgggtgtgaaagtattgtaacactatagaaattaattcactcatccat

SEQ ID NO: 460670 - DNA, 259 bp, Homo Sapiens
tctcttttttcttaatggctagatgattatttctcacagcagtgctttagaggccaggagattttgcaagttctgtgaagttctgtgtccttcagttctaaccttaaatgttgtaagagggatggaggagaatctttcaagttgaacaaactgccgcttgtctgtctagcgttaggagacatttgtccactgtctcatcccattgtcttcaaattgaaggctgtatatttaactgtctttttgtagcactcatattctg

SEQ ID NO: 460671 - DNA, 239 bp, Homo Sapiens
ttgcatcgctcgcaaaaggagccattttccaatctcttatcttgttggggtgtgttagtaaaatataccagtgcaagaacctgtaagcctggggttcattaacctgcttaaaaccagttttacttcaaataggtgatctttagtgtcaaccgttgtacttttgtctgcagggaacaactcaagtttcgtcctgtcctcagtaagcagatgagaggtagggttgacgttagaagccaagt

SEQ ID NO: 460672 - DNA, 217 bp, Homo Sapiens
gtttgagtatgaacttgacattttctatcttgtgtagttttaatcagacttggtatagattgatggcagtagaaaacttgtgttttggatgctgggtaataggcaatatttgtgatttttagaataatttgtttcgtggcacagaaattgtattttattgctctgagctggtgttatgtattttagcaattctagctagttggctagcaaataattg

SEQ ID NO: 460673 - DNA, 399 bp, Homo Sapiens
aaaatcaatgtttgaaagtttgtttcaaacgtagttcactttttcataggctctttttcaaagagctgattaaaataagtttgacatatgtaagatgggacttcaggactgggtttgggagtgctttattcttgtttataaagtcttagctgatttgtgtgagagcagatggtattttcagtaagctggaactcagcagctgtttcaaaccttagaaggagataaatccttgtggctgtgtataggtacttttaaatagaaatagaaaaaacagtttaatagaatatatgttatggattgcctggactctagaccaagttcattttatagatgagcagtagaaatacagtaacaaaatggcttctgcgagcgatacgaggctcctctagagtccggcgg

SEQ ID NO: 460674 - DNA, 262 bp, Homo Sapiens
cgatcgctccgcaaaagtgttatacaatgcaaaaccacatagttataaatgtcaaataagcatagcagggagatttaagaatgccacaaataaaatgtaagcctgacttgtacatgcatgaatttgagcagagaaacatgttactgactactaattcactattatttccaagctacctaagggatcttagttcaaaagcaaatgaaatgtgttaaaaagaggactgtggtggtaggtagatatatttccattatgcatgtgg

SEQ ID NO: 460675 - DNA, 472 bp, Homo Sapiens
  misc_feature (11)..(11): n is a, c, g, or t
  misc_feature (28)..(28): n is a, c, g, or t
  misc_feature (35)..(35): n is a, c, g, or t
  misc_feature (47)..(47): n is a, c, g, or t
ttgaagaaaancttggcctccatatgtnccataangtaaaggatttnaagtattgtacccagtggatctggacaggtgaaaatgttgctgtagtgtttccagtattaatggttcctaatctataagcccactggatctgtaggatgaaaaatatttagtaaccggttacaaatctctctaggcaaaatatggtcttgacttccagtatttccctgggcggatgccacgcaacgccaagaaaactgctaatggggatcccatacagaagaaattctcaaccttaaattttaaggcaggtgtttgtgtcatagatgatgctttcaatccgtgaagccgttcttctatttccttcagccgtcgttttgttatctagagttcatcaagaagatgtcgttcttcatagctcatccatcgttcatcaggcaactcttcttccttttgcagcaactgttcatacagccgaactggattc

SEQ ID NO: 460676 - DNA, 399 bp, Homo Sapiens
tcgttgaagtaacttgtttttataaaaattttatagactgtcaaaaatgttttatatttcttatcatattttgctctcataaacactctgcagcaagctcattgatagaccagagctctgagtacttaattatcattgaaaagaaagctagatattgactctaagagccctggctcctactttgaggacctggtccccttggcacaatggctgtaatggctgtgccccaatagctacacaatatcaataggcaaacaatgtgaatgtaagaatgacaagttcacttccgaggaaggaaagaggtccaatgaaagtgtatagttggggatttaacttcactcctacaattgcagtttaccctgataatggctttataattattagaacactttgagctct

SEQ ID NO: 460677 - DNA, 305 bp, Homo Sapiens
acacccatagaatgtagaacccacatgtagggagggccgactatgctcatgagtaagtagttggataggaatatggggttcagggaaagacctggtatggaggtattaatttgggagttactggcatttagatggggtttattagtgaactggtggatcccttactcatttcaagggcccttgcttctcagtctgcttcttctctgctaatttctgctcgtttgcctttaaacaagtttggttttctctatagcagagtcttttctcagtcttgttcttttttgtctctctatggttgtcgggta

SEQ ID NO: 460678 - DNA, 278 bp, Homo Sapiens
catgaagattaccttgaatttctgaaagtacatcataggagtatatcttgtttaatgactcatagcaaaatgagaattacagagtgttaacattaatgataattagtttaggtagtattattttgagttctgaattagtttatagatttatataataccagacatcttagtatagaggtgaattgagtaaatttttcagatgtttctgctatgatgtactttcagaaattcaaggtaatcttcatgtcgatattcacggtatgtatgcaaacaatgaa

SEQ ID NO: 460679 - DNA, 407 bp, Homo Sapiens
ctcagcctaccactagtggtctctacctccccagtgttaacaggtaggctttggtggtcctcactgtgcctgctgtggcagaagccctgttaccccaaatcagctgcttttctagcagctgcatagagaagccaagtaacaaacccaaaagtatagaataattaagatccttcaggcaactctgaccagtaagagacaggatatgagagggagccaacaaataaatctctcagccatcctccctcaaacctgtccccagaagtattctgagaggtgccatgattctccagagatttccaacatgactgagcagccagctaaggttcttatgatgctgtagcctgctggataacgtagcactctgtatttgctttccctcctttcctgtctcactttctattttcccc

SEQ ID NO: 460680 - DNA, 421 bp, Homo Sapiens
atgctaatgtcctgttcctctacttggggtgggagatcgtgcttctagatacactgcatgagtttcgatgctggtcctgacatcacatgtagattgttggcctctggaatccattaaaagtacaagtagcagcaacagtgtcagcgcccatgtttttaaagagcatccaattacctacatatattttgggcagatcacagtgctcaacaatctgatcaaggccatcacatgttcttcccatatactggatgaataatacttctcactgatctaggtctcttttgcagacaggggctttacatgtgcatgatcataaaggattgattaaatgatccatatacttcatcattcatgtaatacataaagctccacaggcttgactcatctctgcgcgccaagctccaggcttatacatcatagg

SEQ ID NO: 460681 - DNA, 425 bp, Homo Sapiens
cggcttcctttcattcctgttccttctcttctcgcttttcgaacagtttcctaaatatactcactagctacgtcatttgccagccaggtcccggtgaacagtagagaacaaggagcttgctaagaattaattttgctgtttttcaccccattcaaacagagctgccctgttccctgatggagttccattcctgccagggcacggctgagtaacacgaagccattcaagaaaggcgggtgtgaaatcactgccaccccatggacagacccctcactcttccttcttagccgcagcgctacttcataaatatatttatactttgaaattatgataaccgatttgtcccatgcggcatcctaagggcacttgccagctcttatccggacagtcagcactgttgttggacaccgaccaaaggtttacca

SEQ ID NO: 460682 - DNA, 298 bp, Homo Sapiens
aggtcatgacatgacagcccaaaatatgtctgtaggacagcagtatatgccattccaaatatgcctctttggcacaggattactttaaactgattattttgggaaacagacacaggagaagctctgaaaacagtaaaagttgtatttttgtaagagaaatttattttataaagaatatctacatttgtaagagtgtcttcctttctgtaccaggaagagaaggatgactaaatcactggaaacttttatttatttgtttgagacaggatctggctctgttgcccaggctggagtgcat

SEQ ID NO: 460683 - DNA, 224 bp, Homo Sapiens
aagaagcagttttataagcagaaagaccaatttgaatttttgggaaaaaagttatttgactctcactcgtctttgacatacagagaaaatgttaagtatttcacttatttactaagtgttcttatgttcacaaggccaaatgctagtcactgagctatcttaagtatgtttttattgttatatttgaatgtctttttattattaagggtatctgttgttttgtg

SEQ ID NO: 460684 - DNA, 265 bp, Homo Sapiens
ggtgacttgtgccttcactgtaagcacctggccacactctaggtctttattcatctttgctacattttcttacaggcccagagctgtgccaaacaccgaacagataccccaggtaggtttgctaagctaggcctcttagagatggtgtcaagggacttataagcttgggctggccccagggctagggatgggaaggacacaggacttgctgaatggaagtgctggagaatggggttcataaatctactcacagtgctagttcctg

SEQ ID NO: 460685 - DNA, 294 bp, Homo Sapiens
  misc_feature (81)..(158): n is a, c, g, or t
tcagatagtcaacagagctttatttttcaatccatctagtacatcccaagtataaaaagctaaaaaccttgtgctccaagnnnnnnnnnnnnnnnnnnnnnnnnnnnnnnnnnnnnnnnnnnnnnnnnnnnnnnnnnnnnnnnnnnnnnnnnnnnnnnatgccttaaaatgagtactttgttcaaaaactaaccgatacagctggctgtcctacttcgtttgttttatacgccccttgagcctttttggttcttcataaaccacagtgtattaatgccttgagttcagaactag

SEQ ID NO: 460686 - DNA, 279 bp, Homo Sapiens
gagctcggtacccaagtacgtggacttgaacggcccagtggagggtctgtatgagaggtatccgcatagggcaatacacggtgtgagagaagaactgcagcttcagaagggctaggaggccaggttctcaccagctagttagtgcccccagcagggatacagagatggtttagtcacagtccctgcttgcaaggagctcacagtctagtgaggacatcacacaaagaaatggacagtgacgaccacacgagagactcctccagtgatgggtgcacgata

SEQ ID NO: 460687 - DNA, 161 bp, Homo Sapiens
gtcagtacatctctgaggtgtctgcttaagatcaaatctgtcatcagagaaacgcctcgttagagcagcaagcatttgctgagttcttgctatatgccaggcactgtactaggcacttttcatgcattagctcgcttagtcctcacaaactctgaggtcga

SEQ ID NO: 460688 - DNA, 241 bp, Homo Sapiens
gtattattgtggctgtcactcaggttttctgctcattggtagacaatgggtgaggaggtgactgaaattggaacagtggaaggacccttcaccaaaacctggaacttcagaagaatggcagggctgaaaatgattagtgttaattcattccagttgtgttaccctacccataagactgcctgaaggagcctgaacttccacgtgctgtcttccatatagtgtgatctgagggggtaccgag

SEQ ID NO: 460689 - DNA, 220 bp, Homo Sapiens
gatatacaatttttttgttagaatatatagattatcagtaagttcttttttaaaaaatctgttcggaaatatgagcagtattgaattttaaattacacattgttatttatgaaggaagaggtggcataaaaatgagtaaagagaggcactgcagtatctgaggtgagagataagtccatgaatcaggttagcagtcattgtcatggtgaagtgtggatag

SEQ ID NO: 460690 - DNA, 420 bp, Homo Sapiens
  misc_feature (17)..(17): n is a, c, g, or t
  misc_feature (65)..(65): n is a, c, g, or t
ttaaaaatgctaaaganaataattcaaacacgttttttgtttgctacttttttctgaattctaanagactgatacataagtccctggtgtagcgaaaataatgacttcctcaaaatgcacttcaagaatgtgacctcaatggatgtaacagaaagaacctgctcttggtgtttgggaaagaaaaggtgttaggcccgccacaattccttctcctcccaggtgattcagagtcctggaggacagaataccttgggaacttgagtgaactcctttcaccagcccagccttgactcagattccagctcatatagctcacaagctccactgcccaggcccaaacccctcaaatgcttaggttttgtttgtttatttgaaagagttttgctcttgttgcccaggctggagtaagactccatctcc

SEQ ID NO: 460691 - DNA, 402 bp, Homo Sapiens
cttcagctcggacccactttcagagtagacatcgagaggagttggaaataagaaacgtaaaattcagtctgggtttccttcttttttagctttgtacctctacccctaggaaatgtctcattttaccacttatcacttccctgccttcaaaagtacaggcatcatggtattaacctagtcccacaatttgtgtcatacattttatttctggaattcctcaaaacatcttttaaaggaagggtaggtcgaaaagtgtttgagtgggtacacagttggggaatcatcaccaggtattagaacttacctgtggcaaagaggtattactatactatgggtagtctatgacagaaaacattttctgtgctatcagaaagataattaaacctttttggtttgcaatta

SEQ ID NO: 460692 - DNA, 193 bp, Homo Sapiens
caagagtaattttttaaatacgattgtgtaaatatgcaaagatagaaagttaggctagcccttattttaatatatgagaaattaacctctaacaccaactcataaggagatagcaaattctgaactggatatatgtagataacctattgtttccattgtattttgtttttagctctggtttgtcaggctggca

SEQ ID NO: 460693 - DNA, 288 bp, Homo Sapiens
cactttccagagtgcatgttctggcccgcttttatgggctgcatttcaatgtaaatttagttttcagagcctttgcagtgcttttctagtcggcctcgcttgggtgttacctagaagccaatctgaaacctgaactatagccattcacagttcattttgctgtgttgaattatggtcggtgtgatgcatggtctactagagggtctgcccaggacttcctgcaaagatttaaagaatcaatttctgtggctccctttcctcttcagtcatacttcaatctcttctgta

SEQ ID NO: 460694 - DNA, 285 bp, Homo Sapiens
  misc_feature (122)..(130): n is a, c, g, or t
ttggtctgggccccactttttacagaggttctagtaggtcatattttcaggggaaccaatatttgttatctggtatctaaagcccagctattatttatgaagtttctgcttttctattaagnnnnnnnnngagcccattcccaacacacggtaatatatgtattcttttaatccccataatcacttgtgtagcacaaatggacagggtcaatatttaaattttgctcacactcctcaaggcccagttatctctttcatggggcttgaatgactactcgcctctgt

SEQ ID NO: 460695 - DNA, 304 bp, Homo Sapiens
gaattctagggtgacacttttttttccttcctgtattttaaagatactgttatactgtctacaatttgtattatttccagtgagagatcagctatcactacggtggtttttcagtatcctccagctcctctgcagataccaaaatccacaggtaattaagtccctcatattaaatgcctagtagttgtatgtagtctatgcatataggtgcatactcctgtataccttaaatcatctctagattacttatacctaatgaaatataaatgttatatggcattctttatttgtattatttttattg

SEQ ID NO: 460696 - DNA, 210 bp, Homo Sapiens
ctaattgttgcttaggcttattcctttgggagttattctttccagatttaggtataatcatttctaaattttcagtaagaagttggcctggccctttgtggtggctttggctgtgcacttcatttgtattttgtaattcattttcttttggatgtaaaatttttaagcttagttttatgttatttttcaaccgtcttttctgtttttctt

SEQ ID NO: 460697 - DNA, 482 bp, Homo Sapiens
tagcacaaacaatattagagttgggggattagagaaaccatctaataaggcagtataatggtgatcctcaactttggtaggacagcaacatcactcatgaacttttacaaatatgtatttttaggcttcacttctggactttagaatcagaatccctaggggtggactaatggcatgtagacgtttagaaaactctgcaggtaatttggctgcagggttgagaaccactgatagaggaagagcaggttaacgggaggtccagccaagaagtgcccagtatactaatctagaaggtgagctgaaaaataatggaaataaatagaagtgtagtgctaggttattccagtttttaattgagtagcttgtgaaagaaattgtcgccatacctgtggaagaagacagcatcctctagcaaatataagatcactccttaccaacatggccccccctaacaaactattatacttctctggaaactactc

SEQ ID NO: 460698 - DNA, 251 bp, Homo Sapiens
atttaaagaaaaatttaaaattaaattcctgtgatttatatcttatttgatttttcatcctaacttcattttctccacttttctttcctttacttctcttgttaatacaaaaaaagaaataaaggaataagataaaatgtttgctctcctaagtaaatctcagttcttttgtttgcagttcccactcaaacttttcttcttagatacagtttcacttgtgtgatcacctggaatatttgcatgctactctg

SEQ ID NO: 460699 - DNA, 299 bp, Homo Sapiens
gacccactttcagagtagctagcccagcttcttgcccaaagagggagctcagtaaatgttgaattactttggagaatttgtttgaaaatatcttcctgatttttacctctaatgcctacttctcctttaagtgaatacccctctttctccttggtcttttgtgtgtgagctggctaagtgggaacttaatctgtggtgtctgatgcctcactgatcctcaaaaaaacagtagcttctcagtgccatcctctataatcatatgatatcttcagtgaattaaaggtttattcattagacat

SEQ ID NO: 460700 - DNA, 316 bp, Homo Sapiens
gaacgtaatgccgtatcgagggtcccagtcaagcaggtaacagcagactgttgtgcatgatttgcatcctgaatgggacccaaccacagcaaaaaagaaaatcctactttaacacaaactgagttctgagcaaattgctgctagtctaatgtaatgatattcacaaataagcctctagagaaaaatgcccatgcacaggtacattctaagcacatttacatacacgatctcatttaatcaacaaatactggccaggtgcagtggctcacgccttttttaaaaaagatgtgatcaaatagattctggaactgaataa

SEQ ID NO: 460701 - DNA, 357 bp, Homo Sapiens
actgatgagaaaaacacatgccattttgcacgtgttttattgaaccatcatattgcaatgacatttctgaatcttgataatctattatttttcttcaatacattgggattcaggtaatgttgtgaaattactacataggtgaggggagataaagtggtctcctactctggagtgggtttgctctattccaggatagactgatgagaagaccacatgccattttgcacgtgttttattgcaccatcatattgcaatgacatttctgaatcttgataatctattatttttcttcaatacattgggattcaggtaatgttgtgaaattactacataggtgaggggagataaagtggtctc

SEQ ID NO: 460702 - DNA, 308 bp, Homo Sapiens
ttatcatttccctgtttcacagaggaggaagtgggcttagagagcttaagcaacttgctctctcacattcctatgagccttgatccataaaacatcactatggactcccacaactttaacatcccccactgtgtttcttttcatccttaactgctgtggcagtttatactgtgtcaacctggttacatccaaactacatttcccagaatcctctttccatagggtaggtggcccaaagagcaaaagactttctgaagagtatggttagatagagctgcagtctactctggaagtgctactctggaaag

SEQ ID NO: 460703 - DNA, 207 bp, Homo Sapiens
cactttccagagtgtgtaaagtaatttttcacacaatccctgccaggagatgcctgaacataaggatagttctcaacagtggcaaatgcgcgcggatgcccacctctacatttatgctaaaaggaatactctacaaaggcacaagactatgttagggagtcttcaaactttctggttattcctcaaactgtaccttctactctggaa

SEQ ID NO: 460704 - DNA, 463 bp, Homo Sapiens
gttatgtatgaaaggcaagcctggtgaggaaatgatgaaaattctaaattcagtaaatgaaagatactacaatttgttctacccaaggccatggtgtgaagaaggggcttaactaccatgcttttaaatattacagattctgcataaatcccaaaatactgcaacttccaattcacatggcagttactagggaaattcagctaggagctaatatatcatgcatgtctgaagggtcccacattgctaattccataggacctacaccgacagtcagaaatttttggactgtgctaatttctggacacctcctactactttacaaaatatttacacccctgtgtcaaatgccaatctgttgaccttcccagcttagtttacatggtccatagtgattgacaatccctcctttgcacacatcctcaataaccttgcaccctctcccttcatcatacctactctggaa

SEQ ID NO: 460705 - DNA, 481 bp, Homo Sapiens
aaggtaggtagtgatggggttatttgcctctggttttgttgctagccaacccagcgtttggacgcagcttgagttaaactgccctatcctggctactgccctgcaaggccttataggaagtggaaaagactagctgtgtgaccccaggcaggttacttaacctctctgtatctgtttctttgtccatacggtggggacaattaatagttcctaccttgtggggttgttgtaaagattaaatgagctaacaactggcaatatttagtttgtagaactcagtcctggaaaatggtggggagaagtagtgaagaaaaaaaggcacaaattgggcttcctggtaggtttggtggctctgtggttttagagttttttatttgtttgttcttgccatttctctactcttcagtgcctgtgtgacctcagatgtgccactgaggtggggatctgagcatggacaccagagacgccctacatctgcgtc

SEQ ID NO: 460706 - DNA, 314 bp, Homo Sapiens
gctcgtacccactttcagagtagagagagtcatgcaaatacttagctattttccactgattagcacctgtagtaacagcttgttgtcattgataagtcagccagaaggatcttgaattaaaccctgacctttaccccattcttgttcctcttcagtatacccaggttctgtcattaccatggctgagggcactaacatgctgacaggtccaactagctcctttaatgctgctgtcttagcagctgcatctgcaaaggagtttcccttagccgcactagagtctcctttctgatgtcctctgcaatggattatag

SEQ ID NO: 460707 - DNA, 182 bp, Homo Sapiens
tgtcttcaggtcccacgggacagcgcagtcaagccatataggatagtgtcgtgaggttctgtaggttgcacggaggccacacaccacctcgtcctgctttcaaacccagctcctggagacccagagtcaagaggcttcctttacagtcaatcatgctactctgaaaggggtaccgagctaga

SEQ ID NO: 460708 - DNA, 202 bp, Homo Sapiens
ctttccagagtagtataatttattggaaattcatgactttgtgacactttgaaatctgtattaaaaataattaaattggaaagagaaaaaaggtgtctagccgtcataaatattcaagttttgatgtttcaaattcatattagcattaagaaggtggatttacagttcttgcttatgtcttctttttcaaaaaataataatt

SEQ ID NO: 460709 - DNA, 338 bp, Homo Sapiens
  misc_feature (185)..(197): n is a, c, g, or t
agtagagacaaggtcttgccacgttaccaggctggtcagggtttctatttctccagttgctaagtaaatttatttttacagttggctggttcaggccaatatctaaacttataaaacatataaaccaaatgcaatgctccacatgttgcattttgttgaggtcttttaagttcctctctctctcnnnnnnnnnnnnnctgtttggccattccaattagtcttaagtctcatctactctgtggttgcccttttctgttttgtttgttacagtttctttgttgaagaaataaagtcctttgtcctatggagtttcctacactctggaactactctggaaa

SEQ ID NO: 460710 - DNA, 179 bp, Homo Sapiens
ctttccagagtagtctcctgtgtgtctaaagggattgaagtgctttcacccaaagacaagtagctatcttcacccggaagtatgtaagacagataggttttctgtttcctggtgtctatcacccttccctgcaaagccccattccaggcccttctactctgaaagtgggtccgagctga

SEQ ID NO: 460711 - DNA, 317 bp, Homo Sapiens
ctttccagagtagtttgaaagacaaaatacctaccccatgtttaaccccattttcttatgggaaggactatcaataaacagccaggacaatcgctgaggaaagagtccaatgaaaatccataaaggaagactatttccttgaggagggggaagggagagaggggaaatccatggcttctgtgccgggaagccagcttaggaatgtgaaagttaaaaaacgatttcattgagaacttgggcctgtgagccagagaaactattcttctgggagcagaaattcagtatttcttctgaacttcagtctagtctggaaagtg

SEQ ID NO: 460712 - DNA, 504 bp, Homo Sapiens
  misc_feature (125)..(125): n is a, c, g, or t
  misc_feature (153)..(153): n is a, c, g, or t
ttgcaggagagagcatctccccctggtcatgccctccgtgcagaagggagctgatccctcccttcctttctcttactgcataggaaattattttaggggttggaggtgggacaagcaggcttgtntccaccaatagtgccaaaaagatattgnctaatgtgcacctgtgaggtgtaaccccccgctttggagacgagatggctcttgttcagtcaagaccccagactctgttcacaaaaatgccataatgcctgttggtatttggcaaagcactgacccgtgtcctccgttgctcgcactggggtctctggtgtgaacacccccgacagcagccctccgcccactctgccccctgggagccctctctggatcgtctcgtctcctgcagcagcactggcaggcgagggctctcgttcatattctcaggccgcaagtgcaatgcctgaggggataggcttttctactccaggcaaatttacttctcctactatgttcttcttccta

SEQ ID NO: 460713 - DNA, 320 bp, Homo Sapiens
cactttccacagtagtaagagtgcaatggttacacaaacaatagtgcattcaatgtattatgtagccgttatagtatttataagaaaaatgcttatgttaaataaaaatacagaatcgtatatagaccaaaacatttacagaaaaaagagatgaaccaaaatgttagcgatggctttctctggaagtgggactataaataaaaagtaaggaggagtggggattactctagtctgaaatttccatgtaactaacaggaaaagatatgctaagaatgaggtataaattagccacacgtggtggtgcatgcctgtagtcacag

SEQ ID NO: 460714 - DNA, 233 bp, Homo Sapiens
gactttattttatacaagaagcctcaagaatttcatggacagtggctagcataatgttggcttatctccatgcctgttttcatgatctcctatgcgggttctgccataagctcagattctataatctcaaagcactcctttaaaaaaaattacttaaattggacggtggtctgtgatgtacaaggctggtattggggctactgactgctactctgaaagtgggtccgagccga

SEQ ID NO: 460715 - DNA, 189 bp, Homo Sapiens
gcagatagtacctattgttttataccagacctacttcaagcttttctattaaccgattgctttcccaggaatttggggtttatccccttttttaaaaaaatctggtcatttatcagctttccataatgtaagtccttaaaccttgattatttattttacatgtttcatagccgactttctgttgtaata

SEQ ID NO: 460716 - DNA, 197 bp, Homo Sapiens
ctcttttccaatgcaggaagtaattgttgaacaagttaacaaaagtaacttatttatgatgctaaattgtatctccaatcatcatgcaattaattatgcactattcgtattgggccccctggttgatccctcaaatggatccaaagaattcaactaactctctactctgaaaggctactctgaaagtgggtccaggt

SEQ ID NO: 460717 - DNA, 270 bp, Homo Sapiens
ccctttccagagtagcagagtagaaaaagtcagtggtgaatttaggataggctctcccaagacaggattcactagacaattaatcacggtccaaaagtaccaatcccagcagctctagcttttcatccttagggcatcagggggtagcttagagaacagggaaagaaaaatgagggtacagaaatcttttctcttgactatctatatttcccccatgatgtcctgaaaactattccttctctttgcccttaagttaaatcacgaatttgc

SEQ ID NO: 460718 - DNA, 222 bp, Homo Sapiens
tttccagagtagttccagagtgttatctatctctcaagaaagatcaggtacttctcagtagtttaaaatttttcacaagaaatatcattgttctcatttttcttaaatcacccaatactctctatgaagatgccatttggaaagctgtattatagaaataattttaaaaccaagggctgcattacttaaatcttaaatcacccaatactctctatgaagatg

SEQ ID NO: 460719 - DNA, 249 bp, Homo Sapiens
tcagctcggacccactttcagagtgcagagtagaaagatcacaagaatttagtgtggtaggtgggaacagaaaatgggtgtataaattttattgatgtgggagtactggatattgtagagacatatcatcagggcaaggagattaaagatttttgcattgacggtttgacactatattgtggtaataacactgtatgtgttgggagatagaacaggaaacatctactctgaaagtgggtccgagctgaa

SEQ ID NO: 460720 - DNA, 396 bp, Homo Sapiens
agggagagaaaatgggaattagtgtttattaggtacagagtttaagtctgggaagattaaaaaacttgtagagatggatagtgataatggttgcacaacaatgtgagtgtacttaatgtcactgaactgtacacttaaaaatggttaaaatgggacattttcttatgtatattttatcgcaattaaaaataatgttaccagtggttatctcagtgataagcccatggatgatggtattctttccacctctagactttaaatttcatgatgagcatagttgcttttataaatgacaaggtcaatttaaccttaaaacaaaaagaaaaacccttttaagtcactttagagaccctataaaagtgtcatgcacttgtatcccagctactttggaaagtg

SEQ ID NO: 460721 - DNA, 503 bp, Homo Sapiens
actttcagagtagaattttaataaataatgccatttgtttcactaattttaaaagctaaatacagaagatacatcattttgccccaggcaaaaataatatggagcctacatgattactgggatttttctagacaccatccggcagcactgcaaaagagctcctgtcctgctggtctgctttctatttgtacaaattaattcacaatgtttctatccttgttctccttcccttttttgtcttcaagcagataaattatttttactttcacagtcttgtcataaacttgttaacacaaaagagcttagttaacatatgaatgctgtgaagagatagtggtaaacaaaattgcatatctaaataatagaagttaataaataccccaaggctaaattcactctttctgtcatataattaatctagttactactcttggttcagatgatggccttcaaagtaccctgcaattcacagccaccattaagtaagaaagaaaaatatattt

SEQ ID NO: 460722 - DNA, 271 bp, Homo Sapiens
gctcgtacccactttcagagtaggaaggaacaggtaaacattgaactaaaagcagtccctgcccaagaagttaaaatggttgtccctgaagatcagtccaaaaaggatgggcagccttcggatcctaacaaacttcccagtgtcgaagagaacaaaaatttggtgtctcctgctatgagggaagcaccaacatcgttaagtcaacttcttgacaactctggagctcccaatgtgacaattaaaccccctgggcttacagatctggaaagtg

SEQ ID NO: 460723 - DNA, 264 bp, Homo Sapiens
  misc_feature (26)..(26): n is a, c, g, or t
tgtgtcatgcatgcagttgttgaacngttttctgtgggatcctatctttatgacaagggaatgatgtagatttatgacctcaaagagtagagcattccttttcctattttcccagctgctaaaatatgactgtctcctttagaatttagaatccgtcttaagcttagagatggtaagagctgactggatgagtctaattctatgatttgtgagacatgcattaaaaccgtcagcagaacattctgatgatccacctacactctg

SEQ ID NO: 460724 - DNA, 381 bp, Homo Sapiens
acattcagctcggacccactttcagagtaggtgcatttatttttatatgcaaatatatcacccttcaatgcatatacaatagttataaggtctgaaaactaagtctatcagagagaattgcaatcccttgactcatatgtgttcatccttccatggagagcctcattatttcatacaataaacatgccagaaaaggattctggggaaaaaacctgtatcagctcaaaaggagaggttttcttaaactgtctggggttactgaggtcaaacaagatgactgcatctgttttacaggaaaaatcaaatccaaagtactaatcgtaacaaggactaggctagttctgatgtttactttcctacctacagctactctgaaaagtg

SEQ ID NO: 460725 - DNA, 304 bp, Homo Sapiens
aagttttattgatcaaataaatttctgattttacgaatggggagattatcttctttccattatcatccaataccatagtctagtacattccatgcacaaagagctcctaagtaaaaacatgtttgaatacccaaataatgggaatagttttcttaaacaaatgaactatcatactgttagaaagagaagaactacactttggagatgttttcgattttaagtgttctaaaattaatttagattatttcaataataaacatgaagcagacagattttcatagaatggtgcctactctggaaagag

SEQ ID NO: 460726 - DNA, 690 bp, Homo Sapiens
  misc_feature (76)..(135): n is a, c, g, or t
atgtgttctaatagaattatcttaataaaaagggaagggactataaataaccaattacaaatccagtaagtgcttnnnnnnnnnnnnnnnnnnnnnnnnnnnnnnnnnnnnnnnnnnnnnnnnnnnnnnnnnnnnggtagaaccaggactgattcctgaacctgacttctagtctgtgctctttgaacacttctttgttttctcatgttataactgaatccttctatgtgctaaattttaatttggaaaattatcaagtaataaaactgcttttctctccagcccaactctctggtttttcttaaatgagtattacaagaataggatacagttcataactttacaacactctcataggttcattaagatgagaactttatacaggaaacagttcactttacatgtagtttggtttggctggaaaaagcttatttaacagccatagttttaaaacctagttattctatatcatagtgacttcatatgttgtaaaatggttttctataatcttgacgttttcttcagatagccagttttcctgctttagctgccttataagagcttccaaagacttcaatctacctagagtttgttgctcttttaactctagaagagttatctttgaatgtagcttagagactttctgccaaagatgttccttatttatatcttgtctgctactctggaaag

SEQ ID NO: 460727 - DNA, 336 bp, Homo Sapiens
  misc_feature (95)..(116): n is a, c, g, or t
ccacagccatggactccagatttccagattttcaagacctggacctggaacccgaaagagcttgtcacgatgcggcaggaacactggaggtagannnnnnnnnnnnnnnnnnnnnngggactgttgaccttgctgtgagaaaagagacaacgactgagcaagcactaccaccagcactgttactgggaattagaagacctgagtttctgtccagaccctcagtgcaaactgaggatgctccatccaaagtgaattatggtacttgccattttccgaaatgccttatcctttaccatctctgcacttttgttcatactctcattctactctggaaag

SEQ ID NO: 460728 - DNA, 626 bp, Homo Sapiens
  misc_feature (44)..(44): n is a, c, g, or t
  misc_feature (98)..(98): n is a, c, g, or t
  misc_feature (121)..(121): n is a, c, g, or t
  misc_feature (131)..(132): n is a, c, g, or t
gccagtcagacaaaattcttgaactgtatattcgggtacatatnataaggtcatctttgatatatgccctgtttacaagatccatttctaattattanagtgaatatcaaacacacatctntgcatcttannacataaataaactgctaatgtttataagccacaaatctggtcactgacatgagtggcctgcaattcttcagtgatgagcacacggcgatacagacaagatcagattacccaggtaggcaggcagcaggcacctgtaattcacccgctgactgtgctgttgtggcagtgacccttcttgtgaaaaaagagttatgtgcagacaaaagtgtggacatatgtcaacgtggagaggcatttcacagaatgcaaacaccattcaggtgaattagtagactccagaatgaatgaaagcttcatgaatgcaaacctgttgtttacaatactgggcattgtggcaccttttcactggacagtttaataaatatctattaaagaaagtaaggataagagaagaagctgaagcagtcgtcttggtgcacaacatattttcaagattgggctttaggttgtgagtttcagagataccattgtttgtttcttcagagtaaatcatt

SEQ ID NO: 460729 - DNA, 386 bp, Homo Sapiens
gctcggacccactttcagagtagatatgtggtttttggaaggatggaggaaagatggatgaaataactcccattctgtgggtcagactggtgtctagcaccaacccacactatagggagaaaaccaaaaaacgagtgtcaatggaggtgaagaactaatttaaaaagcaagtggaaatatatcctacccagctacctacaatgcagcagacaggaataaattccccaagtgagataaagctaaacaaacagttgagcattgtagtgaattcatgctttgtaaatagtactggtcatagccacgatggctgtcagcccacaaacatctaactcatgtttgacctctaatgttcaccatcactgactgctttgctactctgaaaagtg

SEQ ID NO: 460730 - DNA, 430 bp, Homo Sapiens
  misc_feature (25)..(25): n is a, c, g, or t
  misc_feature (46)..(46): n is a, c, g, or t
aaccaacagacttctggatgtcatnaataatctattttgagacacnaaaagactggtgcagacacaacagtatttgagttaagccccagaagatctgtccataccattagtcctggacaaaatgaacaccagcttcatagagtggagtgtcaccttttctgcaaagaaggcgcttgagtagtttgaagtttctgtttatatttctgcatctgctttgaccgtgaatgcagtttgttgaaaagttcacggaatttatactgtggaaataaggtttctaaaaagccttccaagaagacataaaccattctcctatttaattggttgtgctgaaacatttcaaaaacacgaagaatacctttccgtgttgtctcagccccaataatgtgcttcagctcatctggcataattgcaagtaatttcgtttttcctg

SEQ ID NO: 460731 - DNA, 294 bp, Homo Sapiens
  misc_feature (21)..(21): n is a, c, g, or t
agttcgacggagactctcagntgtagtttatcaaatcatacttcgtttaaccactcatttggagttattatgaatgccatttcttccaatgtataactttattcatctttttaaaaattctaggtaattttttcatccaaaaaatattcactaggtatttttgcactgttctatactaggggaggttgagtagcaagtaaaacaaagttcctgcactaaacttagtgcttatactatagaaagggatctatacaggtttgtaggcagtaaataaagatatgtcaggtggttaag

SEQ ID NO: 460732 - DNA, 175 bp, Homo Sapiens
agtaacaaatccaagagtagtttattatgaaaatggcacctgcggatgaaaaaattaagttacataaagacaaccatgtatgtgacatgtatgagaatctacaaaagtataaaaagaaccctgttgtaaatgaagtatgtacatttctgatttgcagcattatcaatggtcaatg

SEQ ID NO: 460733 - DNA, 562 bp, Homo Sapiens
cccacaaaaacagaacccacaaataggagcaaagaacagttttctagcatctctgggatacacagggcaccatatcttatagaaacatagctagtacaagaacaaagtgtactaattaacattaccccttgcttccccagtcaaaaaaggctatagagaaaaacactttaaattgtactctaatacaaatttgttgcacaattaaacttcaacttactcaaagagttattgtattgtaaactgcagaaaatagaataggcattcaataaatctgctcacaattaacaattaagcaatagacacttgaataaatatagcatgtattacttatttgttaagccttacacttacgatgagcagatggtttatcactatatagtaacagattttttttacactttaggagataccatatccaataacggaagtagaagtactttaacgaaaactgattttagaaaaatatctccttgggtctgagctactatggtatttattacatatttgggtcagtttcaccagtttaaaaatataggtactaacaaactgaattctttcatgg

SEQ ID NO: 460734 - DNA, 211 bp, Homo Sapiens
cacttttcagagtagcagcagtgtattacttcaaaaaatgctggcaaataggcaaaacatttttaaaacaagaaaacactgtccatctgcattaagaataaatattttcttatgctgttttgcccatctctactttttcaagtcatattctaaagctctaatttgacggtctttacttgtggttttctttttgcgttaggaacctctgtct

SEQ ID NO: 460735 - DNA, 410 bp, Homo Sapiens
tctttttcttttgccattaaatactctcctatccaaacacatgtattttaatctgtagcttcccccatttttattttttcccttgcagtttgttgaagaaacaagtcatttgcatctgtgtggcgttgttgaacatggtcctctctcctggccactacatcacattcagagttgattctcccctccctgttcagagactggtggtgggtgttctttatccggcatctctctgtgacagcagcagcatttgtggccataattggcctaaaattcatgaactcattagagagtgcagaaaggtcacagcctggataacatttcatggaggatggcaatttcatttaaaggaggcaactttttccccaggcaactttttggggtttgacttcgtgggtattcatcttgttaaa

SEQ ID NO: 460736 - DNA, 362 bp, Homo Sapiens
cttaagaggaccaaggtttcagtaaaactcagcctactgtggttgatcttaacatggttatcaggagtttccttgaatttaatctagcccttatctaaacttcagtttactttaatagaaaagaaaaatggtctggatgtcacttgggcccaaaatcttttggtacattttagtgccctttcttcacccattcagaagtacttctgcagctggaatggtccttcagagaacactcagttcttctagaaaggagacacttaaaatataattgcctctccctcccatccctaactcatacagccagaaagtcaggttgaaggattgtggaggactctactctgaaaggggggtaccgagctcgg

SEQ ID NO: 460737 - DNA, 475 bp, Homo Sapiens
acttttcagagtagcacagcctggattgagaatttttataagattggcaatggaaaaacatttattcttttaaataataatttttttaaaacccaagaggtcaggggattttataaaccaatagccaagtgttctttaaataggaggcacccttcccattgtgccaaaatcatcttttcatttattttgaaatttgtatgattattttatacttgtatgttgcctttcttcgaaggcgcctgaagcactttataaacacaaatcctcacaatacctctgtgaggtaggtaaatagtacttttctatgtagtaaacctggaatatggagaatttcataacagttcattctacttaataatgcaataatggagctccaagttgtcttggacttctacaccacactcagacttctggaaagttttctgtacctcattctttagtccctgtcaaggttagtaaataaaataagtgacat

SEQ ID NO: 460738 - DNA, 417 bp, Homo Sapiens
  misc_feature (380)..(380): n is a, c, g, or t
  misc_feature (396)..(396): n is a, c, g, or t
tggtttaggcatattttatatgtacatgtcagcatgtctaatcagtacatctgcacctttattataagtagaagagttaatttgctattttaggcacatcataccaactcttaaattggtcagatgaccccttgggaaatgtcctgaatccctcatttaagttttactttccaagttaggtgtttagttcattcttcttatgtgatagtgaaagtaaaagctttcctgactcttaaggctgacattttcttgttagggaaagagactcgatagcagggtagactaacagtatttcccaaataaaggcacacaggagaaaataatgaatcaataggaatctaattaaaattactaccccggggaataggagtattgagggnttattttattttgganttgggtttaggttggggttat

SEQ ID NO: 460739 - DNA, 624 bp, Homo Sapiens
  misc_feature (465)..(545): n is a, c, g, or t
gactttaggcttctctatagcaatactttaatattccaaagaaaaatatgaactgagaattgtattatctagccaaattgtttttactgtgtaaaggctacagataaacatatttgacatggcaaaaatttagggaaattgttccatgagtcttttttaaggaaactattaaatcattaatttcagctgaccaagagattaatgggaatgttttgagtttcaaatacatttaaactgtggaactaagaaatgtgaggatgacaacagaatgtaaatattatatgtcctcacaaggtaggaatgatacaacaaaaattgagagaaaaggaaaagaaagtggaagttcactgatacaataatagttgggcaccagagtgtatcagctaaagctaagctgacaagtcaaagagaagtataatcacattttaacatacaaaagtaggtcaggtgtggtggattatgctnnnnnnnnnnnnnnnnnnnnnnnnnnnnnnnnnnnnnnnnnnnnnnnnnnnnnnnnnnnnnnnnnnnnnnnnnnnnnnnnntcgccttcaccaaaaacacaaaaattagcccgacatggtggcgcatgcctgtaatcccagctactctgaaagtgggtcc

SEQ ID NO: 460740 - DNA, 585 bp, Homo Sapiens
  misc_feature (478)..(478): n is a, c, g, or t
  misc_feature (499)..(499): n is a, c, g, or t
  misc_feature (536)..(536): n is a, c, g, or t
  misc_feature (541)..(541): n is a, c, g, or t
  misc_feature (555)..(555): n is a, c, g, or t
tagggttttgtgtttctagttcccaagtgcacagcaggagtagtgatgtcctcactggcttctcatttgcattaagctgtgagcttctttagcgtggggacaggaccctgctcccattgcattgtcagcacctcaccacacactccttgtttgaggccactccagacagcatgtgctgaaggatgccttgtggtcagaaacaagttcattaactttctctttgaagtgttttcgtccctgtttcctagcgttctgggaattttacacatccttcctataaaaccaagtatcaggtgagatccttaggatcaggaccatgaatcaagtggtgtgagggcaacacagcaaacttacccttttgaggccgtttcctttttctgccctcaatctctgtgaactgaaccttgttaaagtcagtcaacaccagggtgggatggtttgccgttgtcacctattttcaggacataacatcctgaanttagggagccattccgatcanttcttaatttcaataggatgcggcccagcatttcagntttgnctttttcagggtcntttaaagttcggtggacaaggagtttccag

SEQ ID NO: 460741 - DNA, 345 bp, Homo Sapiens
  misc_feature (47)..(47): n is a, c, g, or t
aaagattacaaaacctgttctatgacaggaatacaagcaatattgtnccaggattattcatggatacatctgaagagcttagattacacattaatagtatgatttgaaaacttcccagattagactcttaagtaaaacaatttaaagtatttaggtgatatttgatcctttacaagcattttataattatgggagcaatgccaagcatttgatgcgatttaaccaccaacaaaaggtacaatatgtaagaattcatgatatggtatcttgggcttctggcatgccttactagagagaaactagtataaaggaagatcatatataacagtagaaaaatatttgtga

SEQ ID NO: 460742 - DNA, 509 bp, Homo Sapiens
agagtagcatctcataaaaaaacaactatttttcacataatcaaactcaccttgtctcatgacttttggttaagggggttttcccatagtttatttttctctcagtgcatcttgctatgaggtttgcttgttacccttttggtttttgaattgttgattttgttcacaacctcttttaaatctaacaagtcctgttctgtttagtgaaggcccaaagactcctctaagactttgtatatttgttacataaaaccaagttttactaaatactttaaaatttgtcctacattcgaaaaatagaaattgtaaatcagaggttatctgtctgcattttaaactgccaaattaccttatagtaagtttctattttatgactttgggccaagaattaagtattttcctaagcacaaatctttttctatattctcattttaatatcttatgctattattctgtaaacattttaattttagtttcatgagtctttattttttgttaccttgcagtta

SEQ ID NO: 460743 - DNA, 330 bp, Homo Sapiens
cactttccagagtaggaaggaaggtatgattccagttagtaaatatgactagtcctccacttctacctcagtttttctaaagtggggtgataaagcaggatatcataaatcagctttttatatcttgtttcagagaagggagcagggccaaccccaggcaaaaacaaaaaacgaagtggatattggtgacagtctgtactcctttctgcctatgtgccattttctgttatttcccagtcattcttgttcttcttttggtgctcactcccaaatcttcacaggggtactccttgggtaccttttggctcttatttagctactcttccccac

SEQ ID NO: 460744 - DNA, 369 bp, Homo Sapiens
gctggacccactttccgagtagggatagctaccaggcttctttttcttatgcttgtaagaatatacgacaggattctcctccctttatgctgaatattacctgttttgacatattccaaattttacttttctttccactgtttgaggcaataatttttaaaaaatgatgatgatgattcctgggcccacttaaatatagccgttagttatttttctgccatggcctgttccaagctttcgtgttgttataatccatcctcatctgtgcgtcttgtaaaaagtcatgattttcttcctggctcctttcaacatcatccccctctttctttagaaattaactttacctatttagagttacacacatagaag

SEQ ID NO: 460745 - DNA, 844 bp, Homo Sapiens
  misc_feature (326)..(326): n is a, c, g, or t
atttttatataatctttattttgtgacagaaaattagaattcccattttcttacttttatgacaatatgggtaaaccataagtgataataactgaaattcttggcaaagattttttctcttcctcatgtatatttaattcttcccccctatagtacctacccaacaaattgtacaagtagacaattagaatgtgtgtttggtttgtcattactctgaaactgttatcaaaatgttttctttttaaaaattggacactacaaatgaagtgttccacagaaagaaagagcatacaggtacactttaatccaaaaaatacaagaaaatngtagatgagtaaattaaaatgtacaaaatcacttaaattgtctttcatattcgtttaaaattagataagcaagaactaacacttccagcaaaaggtcttaaaatgcataagtgagaactaacatctccagcaaaaggcagtattattattagcactgtccatgacagtagaataagtcgggctgactacagcacattgccacaggttagagaataaacccaaaactcagcagagcaggagttcagcccctagctgttgcaaggatgggcagcagctctgtctgaatgcttttacacacagagaagagttctatgactctgaatttccaaaaaaaatgcagacattaaaagtaggtcagagacaaaaagaatcctttgaacaaagctgtggaaaattttcagaaaaacttttacctaaaacaaaactaattcatggctattaagaccatgtgagagaagcaacttatgttattaatgtttaaatgtttaaaactcaattcagtatattattattattat

SEQ ID NO: 460746 - DNA, 194 bp, Homo Sapiens
actgtgttatgtttaatttttccctcttcctaaaatattatttccttaagttacttcaacgattcactaagtctaatagacttatactatcttatgtggtgaaggtgtggagaatgaggggataaagaattaaagaaaaatgtgccttgcctcacatttactcttttgctacacccatcgcagggaataatatc

SEQ ID NO: 460747 - DNA, 221 bp, Homo Sapiens
  misc_feature (63)..(74): n is a, c, g, or t
cacagggcttcccatacagtgcataagctgcaaaaagcaatatcttcatatatgtattctttnnnnnnnnnnnngaatgttttatggtatgtggaaggtttgcatgtgaaaatagctggatgaatcaaaatgacagttttaaaatgtccattcagaactctttagattaataatgggaaactgtgctgctttccagaccaaatctttcctactctggaaag

SEQ ID NO: 460748 - DNA, 272 bp, Homo Sapiens
gtctgtgtctcaaaaaatagaatttttggactattggaactacacagcctgctttccatatcagaccattcaatccaatgggattcactgccatcatctccatgttatgattttaagccaggcctctcttcacctttcctattccttacatttaaagactccaaagcttgtttactgagcacagatcttggaaaacaggatcttcagacttgggaaagcatgacagttgatgatggaaaggtaaagactcacactagcatctagtagtctcg

SEQ ID NO: 460749 - DNA, 219 bp, Homo Sapiens
agtagaaagaaactaaaaatcattagtaatccctttccagagtaggcttgttgacattttggtattatttgctgctagcgtttttttctatttttagcctatttgatcattctatagaattttatgtattttcctctgtgagcagtttcttaggtcattaaaaacaattgtctatggctgcaaaatactcccttttatggatgtttgatatatctccta

SEQ ID NO: 460750 - DNA, 782 bp, Homo Sapiens
  misc_feature (474)..(489): n is a, c, g, or t
ggctgtgttttataaaataagaatggtttataataaaataaaaacagtgtagctcacagcagctttttgtcattcaaaatgtatagaaaaaaagacaccaacttatacaaaacttcatttgggttcttttaaagttttgttgttgctgttgttgttaaatggtaggccttttgagatagatttattggaaagtcatatgggtgtagttcttgggacagatgatttctccattcagcatttagagttataacttttgcactctagtgattcttgaagtagttttgaatatggaaatgtgaatagttttacctccatcactctggatattatcccatgttctaaaatcattacataaaaatataaactcactattgtccttgtaggcttatcatgtacttatgggctcatcaatgccaatgtccattgagggaactgagaagagggggcatatacaggtaatgatgtcttctcatnnnnnnnnnnnnnnnnggaaatgttttggcttttctttagtaacatataatttgtaatgttctttgcctcattcacaatcctgtccgtgtataaacagtaatttgctcttgtaaacacatactgtagttagagttctattgggagcaattggtgttctttatctgtgacatcatgagcatttaaaaaacaataattataaatatcctccagggtgaaaaaatagtaaaaagaatcagaggatctgtctagagactttagtggttgtttcttactgtcctgtctttgagtatcctccctctaccccatct

SEQ ID NO: 460751 - DNA, 256 bp, Homo Sapiens
tacatatgcctacatgaccaggcactgctacccgcttttggtagcaaacattaattttaagttcagcttttagggaaggcaattttaaacatataaagcaagcaaaggagaaatcattgcagtacactgactttgaagcaaaataaagtgagaaaatgttgtgagtggtccacagctgagtatggcccactcctagggagactggcttgctagcatttctggactgcagctactcggaaagtgggtaccgagctga

SEQ ID NO: 460752 - DNA, 278 bp, Homo Sapiens
gaaggctgtaaattctacctttttttcccttacatacacatatatatgtagatatccccccaataagcctaactagaccttacgattcataaattatgttgccacaacagctcagtttagacaaatttataacaaatttgtgaaattaacagaactttgagacccctgtctttcacaggacctgcagtcgcctgggaaccaccctaccagaagtgaaggtgacactctcttgcttctgttccaagttctgttgccattgcttggagcagtttgattct

SEQ ID NO: 460753 - DNA, 170 bp, Homo Sapiens
ctcggacccactttcagagtaggggccatttccttgattccaaatatttaaagatcctatcaactatcctgatattttattccttcaatttccttcctctcaataggatttacaacaatttgcagttcctccctgtcttgccagctgtcaaatattacctgttttcaact

SEQ ID NO: 460754 - DNA, 275 bp, Homo Sapiens
tagactgtactataatactgctcttctgaaataaattgaatatttttaccttgccaaaactatcattgaaggctggaattttaggtacagtatttttctgtgaatgattttatgttgttaaatattcttttaaaaattcatatctgtaattgttactgtagaaaaccaaatacaaagaattctaaaacctttgtaccgtctctatgtatttgagattacttaaaatatctttttttctgttccaagttctactctgaaagtgggtaccgagctga

SEQ ID NO: 460755 - DNA, 174 bp, Homo Sapiens
actcggacccactttcagagtagtctctcacctcagctccgattttgtgttctagcacccaaccctaatggtaaagacatcgaatttatccactccagtaagtctgtttctttgctaatgactttatgatcttcctgtctatccagtgttccagctaatccactctggaaagtg

SEQ ID NO: 460756 - DNA, 557 bp, Homo Sapiens
  misc_feature (157)..(220): n is a, c, g, or t
taatgcaccaagtaaaggacctctccaccttcgacatcagaatctttaatactagcttcatacattttttatttttccctcgtccataccgcacttggactttcatgcccggtggatagcactcaaactcctcttcctcattggtggcatcatcatnnnnnnnnnnnnnnnnnnnnnnnnnnnnnnnnnnnnnnnnnnnnnnnnnnnnnnnnnnnnnnnnttctttattcgtttcatctccagattttgctttttcttcctcagcttctacctttatgttgagggattcatctaccctagttgtgtcatcatctttgtcatccagattttcattgtcttctggttttttaatgttaacttctttttcctgatcagaatgtgtaggtatagattctaataaattctttttacttcccagagagggcttaatattttcttttctttcaatttcatccacaataggcttttcttctcttggtattatattcctctcctcctccatctttatttctttgatctctgtttcattttcctccttaacttttatttcttttaca

SEQ ID NO: 460757 - DNA, 317 bp, Homo Sapiens
caaatggcctgaggcctaaaaggcaaatcattacaaaaccagagtgactgagaggctagcctgacttgattttaaacaagggtgagactgtgctatcctgagggctcagctttctcaaggtttgccttcttctcctagttgctgggccatgttaagttccaattctgggtagctcactgaggttcctgatataaaatgtattggaactctagaccagtgacaactacaatccctactaggtaaaactcatggagacaaaagcctttgatttttggaaagggcaaaaaggggagagaggttttgaggagtcaaatcca

SEQ ID NO: 460758 - DNA, 466 bp, Homo Sapiens
gactctataggatacccgacccactactgggcaccgtagccgcctccgtagctccactcagctgttgggtgggtgggcccccgtagctggactggtttgctgttaagttgagaaaacattataaccttttttcttatgtgatgtggtacctggtggtaccgggcttgtaattctatagctatcattttccagtcttgatcttacattactgtaaccctctggctccttctggctactgtctataaccaggccacccttctatccattatttgagccagtcaaatattgataaaccaaagtgctaacggtacacacatcagcaggactaaaatcaacatgaattccgtaagtagaggcattttgtgaagatcttatgaaactgcttgactggatttagtgggttccccctcagtttgatacatcaaaggcatgttaatacacctaattatgcccacatttatcttat

SEQ ID NO: 460759 - DNA, 193 bp, Homo Sapiens
agatttcaattcaacccaagcaaatgcatagtatatgtgtgcttatatatatgtaaaaatctgaagcctctgagacaaaagtcttaagacaatgtagcaggtgtcaattttttaccaagataatgatgagaaccctaaatcagaatgttacatacttaaaaccaatttgtttcagtggcatatactcaagtgt

SEQ ID NO: 460760 - DNA, 314 bp, Homo Sapiens
gtgtgtgtgtgtttgaagaacaatgcaagtagaggctattgtttccattcaggaacaataaccacaacatgataaactgcagtgcaaagcttgcctaagtttgaaatgtggccaaaaaaagagggggagattaatcacacagggagggctggtatctcaggggcagattaagacaaggagctggcaattttgagtctgattagaaactcctaaaatcagaacttccagttagggactatattaaagcagccctctttttcgaggaggggggacatgggagcagggagagaggttgatttaagttaattaaacct

SEQ ID NO: 460761 - DNA, 424 bp, Homo Sapiens
acccactactggctctggctgatgccatacctaggaccatggccattgtgcaccttgttttttgtctatatctaggagagattattaccagttcctaggatcagcttgggcttttcctctgctaggtttctgttcgttatctctatttgtacctcatacttctcttggctgaaatcttactctttttcagatttcatcttttaaaagaaatctctgctttcattttcacaaatgaatctctcccttatctgtttttcatggacctctttattattcagttgtataatagactcttaagatggaaaataactcgtgactattttaacaagtggttgcttactcatctgtttatcttttgagagccctttcaggattgaaactgtccatttaatctccttcctcccattatcagccagtagtgggt

SEQ ID NO: 460762 - DNA, 266 bp, Homo Sapiens
caaagaatttgttaaataactatttcaatggtaaccactaaaaaagtagaaagtataaaatttctaaccatcagaaaggaaaaaataatcagtctccataactatgttatttttgttttatgagatagcatcaagtagcagaccagactaaatttatattaaacatagcttaataaaattatcccaaaggaaataattcttcaggtttgaagtgtgaactaactgtatacaaagaagagacatgtcacatgtcactcaccttacgt

SEQ ID NO: 460763 - DNA, 123 bp, Homo Sapiens
acccactactggcaaagaatgaggttatttttatagataacaataaaaatttatagagggaactagccttctacaatccctattttgcattatttcttcaaggatattgggattaataaacca

SEQ ID NO: 460764 - DNA, 258 bp, Homo Sapiens
acagctcctgactgatatagcctgagcggcaaagatgcctcctattcagccttgggcagtctctgccatgctgggacttcacactacactggccggccattgacttccctgatagaaaaagcgcaaccatacaagtcctcgctggggctggtctgccaaacacagaatacagagggaaggggagggggctgtcttggggtcagaagtgagcaggttttccagggtgagaatgaagattgagaataggggtatggctgc

SEQ ID NO: 460765 - DNA, 245 bp, Homo Sapiens
cactactggcctatttcttcttctcaactgatttaaaaaacaactgtatagaataatatgtataaaattatattttaggcctataacctgtagaagtatatttgataattatagcataaaggagatagatgggatcaaagttgtgttagaataagaaaatgataccagatcacaactcaaacctacaggaacaaatgagggaagccagtagtgggttgggggttctttaaagtggacctgcaggc

SEQ ID NO: 460766 - DNA, 229 bp, Homo Sapiens
gtggccctcttcctgggtgatttctttcctgtcagtctttaaggacatctcccttacgtacataaactcttctatccccttgagtatactcttctcattttcttatattatttaacagttaccactaatcatccggtagagtagttcttaaccctgtcttctcttttcttctgttcaacataattcagatttagataacatccttctccttttcgggtatcctatagtg

SEQ ID NO: 460767 - DNA, 302 bp, Homo Sapiens
tctataggatccccgacccactactggctattgtgagaaagttattaaactttcctgagtgttggattctttatctctagtgataattcttaattcattgagttgtgactagggtaggtaaatatatggcacacagtggttgccgaaccaatattaacttttcctttccaatacccctcttcccattattcaagtgaattttggatcctttgtcttgaagaaatcttggttttccaagttccttagaaattccaaatggaaactgtcatatattttgcagctttcatgagtgtggccagtag

SEQ ID NO: 460768 - DNA, 346 bp, Homo Sapiens
acccactactggctccactatcagagttgtaaacagttggcaatcttgttcccacaaccagtcgagccttgttgagcccagtttttgaacatcttcatgtgccccatggtctccatccccatgggtaacaccatttcagtctccttgatctgttggtgccctctccagacagttttcagccaggacccagattcttctttccaaaaaacaaatccctgcccttgagctgccagccatttccttctgcagtcacagccactctccatgcgagctttgaatgcaccacacttgctctcggttctttttttgtgggaagtcctaccacccactcgtggccagtagtggg

SEQ ID NO: 460769 - DNA, 302 bp, Homo Sapiens
acccactactggctctgtcaagtgtctcttgccaatcaattgtccttctaatcttttgaggggcagattctgtcagattgtaccaagtcactgtcatccccaaacttttcaatgattccaggcctttaacaactcccctccacctccaaaccctctctcaccagattgtgtaatttctttgtttactgctggcttcatcatgcacttttccttcatagcctattttaagaagttgatttgctgaactgctttttagccaagctatttgtaaatcaagctacacaaagtatgtggccagtagt

SEQ ID NO: 460770 - DNA, 360 bp, Homo Sapiens
gggacatgggctgtagctaattagtctagtccttgaagtagctctaggcataaaccaaaactggctgaactgtgacacacaagaacactgggaataaatgaacatcagatactagacactctaaacagtggtcagtcacttagtagggctcaagtctctgaggttgctcttaagctatgctaacataagccttttctaatccaaagaccagaagagacttttaaggtcaagtgttctgttgctgcaggctggaaagcatccctgccccctggcagcaaggccctacaaaggggccagtaaagaactgctgggtcaggtcctcctggctgctggctcagagatccagggagggaggtacca

SEQ ID NO: 460771 - DNA, 363 bp, Homo Sapiens
  misc_feature (180)..(180): n is a, c, g, or t
  misc_feature (265)..(265): n is a, c, g, or t
aagataacgcacttctaactagaaatctgccaattttttaaaaaagtaagtaccactcaggccaacaagccaacgacaaagccaaactctgccagccacatccaaccccccacctgccatttgcaccctccgccttcactccggtgtgcctgcagccccgcgcctccttccttgctgtcntaggccacaccatctcctttcagggaatttcaggaactagagatgactgagtcctcgtagccatctctctactcctacctcagcntaggccctcctcctcccccagaggggtgggttcctcttccccactccccaccttcaattcctgggccccaaacgggctgccctgccactttggtacat

SEQ ID NO: 460772 - DNA, 580 bp, Homo Sapiens
ctggcccatggcaatctggggctttctctttatagaactggagtttctcggaagagttcatgtgggtgtctgccaggggacacttcagtggggcttctgctcgagaccgcttcccatagaagcgctgagctgctgctctaggctccgaggtctcccgtggcttcacagcttccgcagtcacacgctcccactgcagaacgatctggtcagcccagccctctgtcttgcagttactatgatcaaattccttcaaaggcactttggagtgaacaaggcctatgtgggtctggagcttgtgcttgacggttttgatgtccttgagccctgtcccagagatatctaagcagtttagtttcctaaaagaaaagaggtatccaatgcctgcatctgtgatctcagggttacatgataagtctaataatgttagattctcaaggcctcttttcatcactcgaactggtgctgtcatcttccgcaccccagcatcagataaacaattatccttcaggtggagctgagttacactagacagggcttcattggtgagatgttctagaagttcatgctcatctccaagctt

SEQ ID NO: 460773 - DNA, 291 bp, Homo Sapiens
acccactactggctagctggaaagaaaacagaagggttaataagctgggctgagttaccttgctgatggccctcccatggtcaggagaagctgtgttggtgatgcagctattcattaggaactaagggatctgctgtcccaaggatatcctttccaggcagcaggtccctaaaatagctctctggctccaaaataaaaatgcttattgaccaaattttctattttaaggttaactcaccacccaactatctataaacctagccatggccagtagtgggggatcctatagag

SEQ ID NO: 460774 - DNA, 208 bp, Homo Sapiens
cagaacagtataccatattagattggtcagtacccagtataatgctatttttaagactatacagtatgtacgtgcacacacacacactgtcatgtgcacagaaacatacaatgtgtattcttatcatcaatggtccaatttaatgaatcacacagattgaaagggttcaagtcttaaagatagcattatcctagccagtagtgggggt

SEQ ID NO: 460775 - DNA, 277 bp, Homo Sapiens
tcaaactgttgactcactgcagggaccctgctcaggccacctgcctggctcctgccccaagtgccttgcttttacagtggacagcctcttctcgtttcggcctcagtattatgtagggaccttatgcaatttctttttcttttgaaaagttatctactgcccttcttggaagtttgcaggattggatgggaacaaattcagaggatcttaggtgctggcttgtgtagacaaaaggagggaaatgggtagagcctgtttgtcttgcttccccagagat

SEQ ID NO: 460776 - DNA, 220 bp, Homo Sapiens
cgattcgagctggaccctttgccaccaggcggaaaaggtgggtctagagtaatagattagtcacttgagagatttggaacatgctgtggacccagggttgttggtcatctccgcaacaggatggggatggcagatgtttgagcaaaatctatattaacatgctagcaaggactagttctagtttagctgtgtttcactcattttacacagaattagaatt

SEQ ID NO: 460777 - DNA, 203 bp, Homo Sapiens
cagaacagttgccatgattcgattggtcggacccgatactctgaaatcatactatgctttgctgccagagagctgactagagaatagcccaggagcctaccaggagaatcaacacgaaaaaaacacacattttccgtggtgtttctcagactggctctttgcttttttctctttcagcaacctagcattctctttttattttt

SEQ ID NO: 460778 - DNA, 310 bp, Homo Sapiens
atccactactggctgacccactactgtgttctcaactacagacttcttaagaccaggcagccctgtgctgccagggaaagacaggctcctcccacccttatgttctggctaatttgtggagagccacagtggtgtctcttagtgcatttgtcatcacagctcttcctcgttcaaaattgtatccgtgaatgataccacgaacaaccacaactgcaagcagcaaataaacaactgccgaatgcacaaaaacaatggcaaattgctcctaaaataaaatgaacaaacttgttttaattggccagtagtgggt

SEQ ID NO: 460779 - DNA, 150 bp, Homo Sapiens
tgtcttttttttcagtctatgaaacttattgtttcattgtgcttccatacacacacttacacgtacaatcaatctgatgccttcttttttttatattaaatggcagtgagccatgaaagactacagagaattataagcagagtctgcctt

SEQ ID NO: 460780 - DNA, 366 bp, Homo Sapiens
cccggaggcagagggtcaggcgtgtgcagggtcatgtacacatgccttaagtgctctaccatgagggctgtgtgccatgggccggcttcccaaactgagcagaagttcctattggaatcaagagtcacatagcccatctttgcttagtcacctctagaaacgagagcacagtaattccccaggttgccttcaggtttttgaaggaggcccttatgttcctgtgactttctctcctctagcccagcatcctcaggggtctttcccatgtgttggcctccagagccccccctcatcctggccaccctcttctgacactggctaattagtgccctggacatcccatgaccccgatgggccttggtcagg

SEQ ID NO: 460781 - DNA, 485 bp, Homo Sapiens
  misc_feature (472)..(472): n is a, c, g, or t
cctgggagctctggagtcctcacagcctagtcacactgcttcctctcttcattgcagctcctgaaggtgcggcactcgccttgaggcactttcttctgagctgtgagctatgggcaagcagtggagggggaagagagcagctgaagcagatgccggttcaacttacttaaagatgtgggacaagctctgaggaagcccccaagacaatgatgtctggttgtgcaccattgaagcaagaacagaaaccatcccagagtggaggacatggcccatgtggtcctcctgttctgagtggctatgagatggagttctgtgtgagctctctacagaaaaagccctgtctccaggcaatcagtggagatctgttaaacgagttgaaacaaaagaggacaaggaattgctgtggctttagacgttgccaggacatgtagaaactcactcaggatttactactgcatccactgtcacttangccagtagtgggt

SEQ ID NO: 460782 - DNA, 428 bp, Homo Sapiens
atcttcgcatagttttctttaaataattggcatagattctatattcttggctggttcctgactaactccactatttatttgtcttcattcatttaatatttattgagtacctatagtggcaggtatcattttagttgctagagacagagcattgaacaaagcaagcaatatctctgttctcttaaaactttataagtttcaggaagataaagaatcaaaaaatgcaaaataatggtaataactgtaatgcagaaaattttaaagctaggtgatatgagggtgaaaaagtgagcactactttaaattcaagcatcagggaatgtctcattgagctgagatgtgaaagactagaaggaatcagctatgtgacggaagaggaaagaatatttcaggcagagacagagaaacttgaaccggaagtatgtagt

SEQ ID NO: 460783 - DNA, 902 bp, Homo Sapiens
  misc_feature (855)..(855): n is a, c, g, or t
ctttgagtcaataattttattactattatttttcacactgaggagacttagttacataaagtgatattctatgaattgattatcagtagtagaagcacaaaggtatggacagtgaaacaagaagaaacaccctttatcagaatgaagtccatgtgacagaagtacatacttcagacagcctatgtacaaataagtagagcttcctgtctatgtacagacatattcacagagaataaactgacatagtatcaccatgtatctcatcatccagtgaaaattacgcataataaacacaacacatacaaaatgacagaagtaatttggaagtgcatccactggatttttgtagggatgaggataggggttacaatgctcctttaaaacggaggcgaacaaaggaagcatgagaccacgtctatcctaaaaaagatcctttacaaaaatggcattctgatatttttaacataacctgtctaaaagacagtttatatgttatagagcaaatgtctatgttggcgtcaacgttgacaacatttcctttgttttaaccgtatctgaagaacaaaagtataatttctcttgcttttagtgctagcagcaacttcactgaatcaggaaggtagcttttgctattcttagctttgatggctttttaagtatgtggattgcttgaaggtggaagctgttgcttccggagttttttgacttgagcagaagaaatatcaaggctagatgcagggtatatatgtgtactttgtgttcagggttcaatagcgcaattcagtaactgaggctccctcttccgaatagagtctcagccctttagagaaactcttcagaccacaaaacagcctntaacagaggaatatcactggcccttggttcagataccctttctttag

SEQ ID NO: 460784 - DNA, 265 bp, Homo Sapiens
aacactcatgattgctctctattgttaaggtatgcgtgtatatatatgtactgctttccaggcggagcaggcaggtactgctatgaacatcagcgttccccaggtgcagctgatcaacccagagaaccaaattgtggagccggatgggacactgaatttggacagtgatgagggtgaagagccttcccctgaagcattggtgcgctatttgtcaatgaggaggcacacagtgggtgtggctgacccacgcacggaagtatgtagt

SEQ ID NO: 460785 - DNA, 223 bp, Homo Sapiens
actacatacttccgatggagagaaaaaaagagaaggtgtcactccctgggcatcattcaaaaagatggtgacgcccaagaagcgtgttagacggccttcggaaagtgataaagaagatgagctggacaaggtcaagagcgctaccttgtcttccaccgagagcacagcctctgaaatgcaagaagaaatgaaagggagcgtggaagagcctaagccgtaagta

SEQ ID NO: 460786 - DNA, 523 bp, Homo Sapiens
actacatacttccgtgatagtaagagcttctttctaagaggattacagtataactctacaatatcaaacacagatgattaaagactcaaacagttaacactcaaagtgtcaagcattccagcatgaattatattggaaatccagacacttttggggggagatttattatattatgaagagaagcacaactgaaacctacttaaatgtggacatctaggcctaagaaacaaaatgtgataaaacactataacatagtttagaaaaacaattttgtgttttaccaactttcatgcatcaacataacatgtgactttataaatgtggtcaccagtactgtgattcaggttataagtggggagaacatggtactacaatactttcaagacttccccatgtcggcagtatcaatttatcatataatgcatatagtgaaaggccaacaatgaagttggaattatcacaataatacatgttcaatctcattcatcggagataaccattgacctgattcctgccggaagta

SEQ ID NO: 460787 - DNA, 177 bp, Homo Sapiens
gtaccgactacttacttccgggagtgtagtttcagcagcagacagtctcccaggttttgatccccgtggagagtgaaggagcaagctttccaagggaagtggggaggaacagccatccaaaggagctctctgtcaggcctcatatttctcatgttcctgtattcggaagtatgtagt

SEQ ID NO: 460788 - DNA, 413 bp, Homo Sapiens
tatatagacttgtcgtaacagttctttatcaaatgtgtcttttcgaatattttctcccagtatagtgactatgtcatctcatttctctcagaagctaaactactcatccagaaaaaataatttaaaaaaattacatagacctggtaagtctcctatttagcaatcttgctttatactatgtctcaactactgcctcatgagaactttaccaatctgttgaggaatattccaagcaggtgaatttttaaaattacaatctttggctgtcgtctcagacagaaaacaaattgcttaatgtttatacttatacccatccattcaatatcgcatcgtctatgagaccttaccaccctcaggtgtttaagcttattatacaaccccttttttttgagatcctctttattttcccccca

SEQ ID NO: 460789 - DNA, 563 bp, Homo Sapiens
tggtcagagtgggttttccccttaataaccatcacagtgagggggaggaatgtacacatgaagcaagagcactacatgaagggctctgacggcgccccggacactgggtacctgtggcatgttccattgacattcatcaccagcaaatccgacatggtccatcgatttttgctaaaaacaaaaacagatgggctcatcctcccagaagaggtggaatggatcaaatttaatgtgggcatgaatggctattacattgtgcattacgaggatgatggatgggactcttcgactggccttttaaaaggaacacacacagcagtcagcagtaatgatcgggcaagtctcattaacaatgcatttcagctcgtcagcattgggaggctgtccattgaaaaggccttggatttatccctgtacttgaaacatgaaactgaaattatgcccgtgtttcaaggtttgaatgagctgattcctatgtataagttaatggagaaaagagatatgaatgaagtggaaactcaattcaaggccttcctcatcaggctgctaagggacctcattga

SEQ ID NO: 460790 - DNA, 325 bp, Homo Sapiens
gtcaggtaacatgtcaggccactcttcaatatggaagataaggttggtgaatggcactggtagtcactggactgtttactttcaaatggctgttaaccacagggaattgtataagattcttggttagcatgtatgagtatcaaactagacagcaaacaaacatttttccccacttcctctgaagtattttatgcagctcatgaagttggtggtgccaggatttatcagcttttccacaatgttcctcttcagagactttttaaactgtaagccagcagtcattttaattcccacatgcgcccctgtataggaccatgtacgagaa

SEQ ID NO: 460791 - DNA, 493 bp, Homo Sapiens
atgacagaagagtcaacattgtgctgtaaaactgtaaaatagttttttaaaaatagcagagtaagtgaagattgctaggtatgaacagccttaaaaagtgagttggacacaacgatatagaagctcaatattaaagccgctagtgataagtcgctttgagaagtgttcaggctactaagagtacactgcttcaacctttatcgtaaaaaagaaggcatagcactaactgatacatggccttttcctagaacagctaactgctcagttatgctacagtaatgaaaaagagcagtgacaattgtgtaaatagtgaataattccaaaattaatgttgagaagtgccctatttctgtgttgatgtgagagacactgatatccgggaacttacagcactgatctacgtgtgtggaactccccctggcttcccccttcttccctcctcctcagtgggagaggacaaaatcgtactactgataagcctaaaatatatact

SEQ ID NO: 460792 - DNA, 356 bp, Homo Sapiens
gtgctctcgaggatctccagaaacaggaacctgctctttagggccccacccttcccccacatatacacaccttgggggtgaaagcatcctctggccccaaggaaagtatctacttcctgccctcacaggggaaggcctcaggaaacttgctctccacccctcccacctaggggagggacaggtgggaccagggccaggagaccaaagacttaaaggctattggtgacaatctgcctgccaagagccccacccccactacacacacaccccagtcagaagcctgtgactgtcccacctccaagctgctcttcaaggagcaaaccaagcaagctggactctccctgcaggtgggtact

SEQ ID NO: 460793 - DNA, 237 bp, Homo Sapiens
tgatctagaggatcccaagtaccacctgcatggtacccacctgcaagctgaactttgaaatttcttcatgtgccttccctacaggcctttcactgtggtctgggaaagaatcagtaagcatgacagggctgacttcattagatgaggagcgtttctatccagtttcctggaggaataaggacactgccttttcagattaaagattgtctgatttagagaccatggaggtgggtactt

SEQ ID NO: 460794 - DNA, 155 bp, Homo Sapiens
cagttttagttgtttttagtgagcatgttgtagtcatgactgcaaagagagagaataaactgcccgctcagaagatatgtaatttgtattgttgtatagttttattgatacactgatttattctaccctatttatcatgcagtgggatcctcaga

SEQ ID NO: 460795 - DNA, 277 bp, Homo Sapiens
atcagaggatccaagtaccacctgcagtgagaaagtaaagacagttaatgtccactggtttagaaatagtttccttactcctttgataaatatttctataaatagaggataaaataatctttttatcttaattatggtgactgcatttaacagaagccaacatagggagtccaaaggtagtaaattcattcccaaacccagtgtttatgccacacaaaaagttaacttaaggcttatttaggtacctgttattttgtgcaccctggaattgcaggtg

SEQ ID NO: 460796 - DNA, 277 bp, Homo Sapiens
cccacctgccttgccatcctcagagggaccaccagatgtgatttgtatctggttctgggctccatgaggacttgtgctgtaaattcctcaagtcctggttcccaaccttctcaacatcatgagcccttttattatttcattttcttggatgaattccttgtgaaaaattttgtccagcaagctgtattaaataagcattaaattactcctattaaaaaaaattaaccagatacatcaatctcctaatcatgcaggtggtacttacatcctgggagca

SEQ ID NO: 460797 - DNA, 254 bp, Homo Sapiens
acctggcacgctgcccttccagccccatcagattctgagccatgcgacaggccacacaccacgcctcctggcaggcctcaagagggtacacgatgcttttgcttacctgaaaccattattttttgcagtaagcttcatttcctccaaccacctgactctaacttgtgcaaaatagctccgagcagtcagcacccatcacggtgacgctttcctttggcagaaccctcactgtgtttatatgcagcgttccacaa

SEQ ID NO: 460798 - DNA, 164 bp, Homo Sapiens
tgtcacctgtagaaactgtaggacaaaggtaaggtcctcccagctgagcggtggccctgctcagaggaaggataataaagtcatgcggcagcgcttcctgtttcctcatgccattatatggacaagattggcttttcttacgatgttctggcagcgttccacaa

SEQ ID NO: 460799 - DNA, 165 bp, Homo Sapiens
ttgtgtaacctgtagaaacctgtaggaacaaaggtaaggtcctcccagctgtacggtggccctgctcagaggaaggataataaagtcatgctgcagcgcttcctgtttccgtcatgtacattatatgacaagaatgcttttctacgatattctgtatcctgcgca

SEQ ID NO: 460800 - DNA, 578 bp, Homo Sapiens
ttgtggaacgctgcatgaggttaagagaacgggccgcctgggtccacaaactgctgtgcctcaacccactcatctgtgaaaggggaggacgggtgggtctgagggttgaacgaattggtaccttgcaagcacttagggcagtgtctggcacttggttcacactcaatagacaccagctgttgttactattattagtattcacctcacacccctaagatcagctgtttcagggaagggcatgcccccagcgctgggcctagcattactggggtgcagccgcatccccagcgagccccacaccccactcagccctcagagcctagaccttgttccagggccaggatgggggactgggccgggtagaatggacagcagcaggtcgtgtggcaccccagccgcccagagcctgaggcggtgcacctgccttctagagccacgcagagccgctatttatagcaccaggaactcggctggtttatttcaagcttcagcagatctcagaggagaataggctccaagctgggagaggtccggcagcccctccgtctatgtccatttgcaatactgcgcttccatgt

SEQ ID NO: 460801 - DNA, 185 bp, Homo Sapiens
actctagacgatcccttcattgtcacaccgttgagagtccagatcttcatcatgtttcctctgcatctgactggtgagcctcccagtatcagcagcccacaaggcgatcgggtcagggctgagtagctggcactacaggcaggtgcaccacatgtagttaattaactttttaatttttttgtaga

SEQ ID NO: 460802 - DNA, 211 bp, Homo Sapiens
tgtggtacgctgtttactgatacctttttccgtgggttccctcatgtaccaggcactatgtgttgtatcactaaacttttccacttcaggcatatttttcagtaatatgttccaaatatggaagctcatgatgaatgattgcttgacctctctacaccaaaaagttctctaacccgatgtgatttatctgatgtcacacacagtctctggt

SEQ ID NO: 460803 - DNA, 159 bp, Homo Sapiens
cgggaactgattcagcagagaaacctgcaaaatatgaccaggattctagggttgccccaggaacattttcctaggatgctatttgtgctacataagcagtgctgagcaagtaggggcttgctccccagatccccatgccacccatgtaggtttctcaat

SEQ ID NO: 460804 - DNA, 259 bp, Homo Sapiens
gagcgtctccgcctggctgctgaggatgctggagaagcggatggaccgagcggagcacaagggtgcgcttcagtacagacacgatgatgagggcagctgccaaggatgtgcacaggctccaaggccagagctgtaaggaacccccagaagttcagtctttcagggagaagatggcatttttcacccgagcctcggaattaatatcccaggctctctctgcatgcattccacaaccgggtaccgacggctcgaacttcga

SEQ ID NO: 460805 - DNA, 474 bp, Homo Sapiens
  misc_feature (35)..(35): n is a, c, g, or t
  misc_feature (43)..(43): n is a, c, g, or t
  misc_feature (107)..(107): n is a, c, g, or t
  misc_feature (136)..(136): n is a, c, g, or t
ccaaatccttttggtggccacgggggttactcaangaaactgnactccgaaaatacggattccatcaaaagggaaaggggttaaaatccataaaaagatatgcccancagaagaagtcccacagatcagactgcangatctcggtttcatcccatggcaatggcccaaaggaatgaatgtctgacgaggttcaaactagtcaaattagctttgataatctggatacagtttacaatttcatctctgtatccctcagccagtcaaactgcaatggccttcctgggaaacaaataaatatactctgctttgttagggtatcaagctgtgagtctgaaagacctgtcccatttccaaagcctatccccctaagtccctggaaaagtatgcctttccctactcagtttcagacgtagctttaggcaatagcaggaagtttcaggaagcagtgtttcacaacaagctctccttttctga

SEQ ID NO: 460806 - DNA, 684 bp, Homo Sapiens
gggagagggagtgagaaccctgggacctgctgaaaagcctcctctgaggaggtcacacagcaggacagagaagcaggaggaggacagggccacagaggaagccaagagcggtgaaaaggccaggcggagttcagaggaggtggacggccaggcacccggcccaagaggaggtcccggaatcgccccagacctctggcccagaggcagaaaataggtgtgggagccccagggaggaaaagccagctggagaggaagcagagatggaaaaggctacagaggtgaagggggagagggtgcaaaatgaagaggtgggacctgaacatgacagccaagaaacaaagaagctggaggagggagctgcagtgaaggagaccccccacagtccccctggaggagtgaagggcggagatgtccccaagcacggcaaaaggcaaggaaaaacaacaggagggggcagtgctcgagccaggctgcagcccccagaccggccctgcccagctggagaccagcagtgaggtccagagcgagccagcagtccccaagccggaggatgacactcctgtccaggacactcaaatgtgaagaacagctcattgtgccccagtgatgaagttgctggacacatctctttgcaggtagcagcaccagttgtagcagcagcgttccactccgggatcctctaga

SEQ ID NO: 460807 - DNA, 458 bp, Homo Sapiens
acccgttttctggttaccgtggaggaagaatactgtgaaagtttgagactgatggtggcgaatggcaattttattgtctgctgcattggcctgtaagccagttacctgtcaaaattttctaattacctcaattagattagtattgattgcactaaagagaatcatgtaatgggccttccatagaaaaaacaaaatcgtgcatattggcttcccatgccaaatcgatagagaggaaggtggttttaagagtggaacagagtcaaccaggcctgcccagctctcctgaaggcttgcccacccaccgcgtgtggtcttagttggcatcatgcatgtgtgaggtctttgtgaatttcacatcacagttagcatgtgtgtgtggcaccatctttacatctggcgaggcacgtaatggtggcacacacaatgtcccctagcatgatgctagggacaccgaccat

SEQ ID NO: 460808 - DNA, 585 bp, Homo Sapiens
agtgtcagatttcccatgtattactcattatctgtgcgcgtctttgtattcttttatgtcataccttccatctgggattattttgcttcctaaagtatatcctttagaatttctgtttttttgtctgaaaatatctttatttggcattcattgagtttgaatggctattgacttctgcattgaaagttattttttcttagcacattgaaaaattattctgtgatcttctagatttacactgttgctgttcaggagttagctgatagtctaattgccattcttctgcaggtgatctcttgtttctcttttaatgtcttcttttttgtctttggtattcaatttcattaccatatgtggtttctatttatcctgcttgacatttgtttagcttactggatatgcggtttggtattctttcaatggttctgaaaacataccagccaaaggcaggcatagaataatactccatcctctcttatttaattactgaacttcagttacaagattagatatatgttagaccctcttactctatcatccacgtctcttaaactctgattttttcatatctttagttcttggtca

SEQ ID NO: 460809 - DNA, 423 bp, Homo Sapiens
  misc_feature (264)..(264): n is a, c, g, or t
agatttttcttgaccatgaatcaccatgtttgggagtacagtagggttaggaattacaatttactgatcccctatcatgtgccagacacaattatcaggtaaggaacttcaaaccctgcattctttttttataaaactatactccaaaaaagtgattgcttggtcatttctgcagattcaattagacattatacacacaaacacacccatgagaccgcatggcactgggaagattacccactatttcccactgtattaagatcntggatcatattttctcaatgctctgaagatacgttccctttgagtaggagtatcctccagtgacataaatacatccattcatgatgacggcaccgctactccatcctcctttccatcatgggagctatctctctcctttcattttgttcagggtcatag

SEQ ID NO: 460810 - DNA, 241 bp, Homo Sapiens
cgcggtcccatcagctacatggtacaggctgttgtctgcttgctgcactgcaaaactagtccatttcctgtgtgatggtccaggcacgtcatgtcagtcgcggcacagtcatgtcagtcggggcacagtcatgtcagtccggcacagtcatcatcagtccacggcacagtcatgtcagtccgggcacagtcatgtcagtccagggcgcatcctctcagcagtcgcacctagccaggccatg

SEQ ID NO: 460811 - DNA, 321 bp, Homo Sapiens
agggaggacacaagaaagagaatactcgaacatgcccatgggtgagcagaattgaacagcacgaactgtatgcaagactatttatcactgcgtaactaggacatgcctctccactactcacaaatcatgttgcccaactttttcaaaacccttttggctctcactttaattatcatgtttaatctcttgaggtactgatacctgaaaacagatgtcattaatttcccttataatcttgacctccctattgttactgaaagtactaccattcttagggaggcgtaggtgatgcattcctctctctacattctatgctcgtcg

SEQ ID NO: 460812 - DNA, 242 bp, Homo Sapiens
catagaatgtataacatttgtaagagccaaatgcatgctaacagtaaccaaaagatggggaggagagggaatgaagaaatactattgtaagattcttggactttgtttgaagtggtctcatatcacctgcctgaagatgaactgcagtagtccattaaccctaaagctgccactcaaattttaaaaagaattacagttaattagctgactacatacttccgaagaacctccatactgttctc

SEQ ID NO: 460813 - DNA, 202 bp, Homo Sapiens
tattttcaatatactgatcttatttcctgtggtataaatacccagtagtaggattgctggatcagatgggtagttctagctttagtttttttgaggaacctccatattcttctctataacggctatactaatttaattcccaccaacagtgtataagagttcccttttctccacatcctcaccagcattcattagtgcctgt

SEQ ID NO: 460814 - DNA, 206 bp, Homo Sapiens
aaaaaaagaatctaacaatctgatcaaacaatgggtgaaagatttgaatatgcatttctcaaaagaagatatacaaatgtcaaacacacatatgaaaaggtgaaaaggtgctcaacatcattgaccatcagagaaatgcaaaccaaaactaaaatgagatagatatcatctcaacccccggaagtatgtagtcttctactgtgtcg

SEQ ID NO: 460815 - DNA, 393 bp, Homo Sapiens
cttttttggtttaaaaaactctagtttcttaaactactagtttttagtgtcttgctaaaactatgtgctcttgaataggctacaacttatttcacactatctcattgaactctcctggtatgtgatagtgttataatgaaaaattgcataccaggacagctaagtctattttgcaaccatacagcgtttcataatttagcatttaaaatacagacagtccccgacttttggtggtttgatgtgggatttttggtggaaaagcagtatacattcagaatgcacctctacttatgatggggctacttcctggtaaacccattgtaatgtgcaaattactggtttatcaggaggtgaccccatcggtaatggagaagtgctgcgagtaaatattag

SEQ ID NO: 460816 - DNA, 269 bp, Homo Sapiens
tgcccaagagggatgcgtagacaaagctggtttatctcagcatatcgtgtgcttcctgcacaaagaccctaacagttaattgctgtgattaggcagggctgcgccatctccttgttggtggtgactagttggtgatgactggcgaggagatgtgggagctttcacaggtctgttcccaagccacaaggagtccaggcccagttctagcacacctgtgccggcctcttctatttagcttggctggttcctggggctgcggaagtatgtag

SEQ ID NO: 460817 - DNA, 214 bp, Homo Sapiens
ggagaaaatatttgcaaactccccctccccgggtacagtatgaagcttgcactgcctctgctgtcttcccataattagaatctctaatgtgtgtgtgcacgaaggtcgggtgtggatacacatacctacattctgagatttcctatgtgcaggggacataggagctgatctagcttctcatgttctgccagagtatatgtcagtccattattat

SEQ ID NO: 460818 - DNA, 383 bp, Homo Sapiens
agggatcagctgcggcagcctcctactgtcctttggtgacaaggctttaatgactccataaatgtatgctgcccagctgctgcccgcttaattagacgatgatttccacttgattgaacctgcccagcagccagttgtcacctaacattcacaggagaccacactggtctctttcagaactaccaggatcaaacagtcacacgagttctatggttcctacaacatggcagtatcctgtttgatttaggacttgaatcatatttctccctttttaagaatatacccttctctgccagaaggttgttacttctcagattaaagatgtgaaaggaaaccttcgcaggctcatcttaattggacatatacatcatcactctagtata

SEQ ID NO: 460819 - DNA, 346 bp, Homo Sapiens
catggtcagtttaataaagcacttttgtttacataaacaggatcttagcttatctagccttgaaggaatttgaagaggaggatttttaagtcaaattaattaccttctgccccagggaaagggaaccaataaatatgcagagatatcatcctttgagttttgtaggttcaaaggtgatagagcagctggtgttctcttggtgcgagctggaggaaggtggtatagatgatggactgtgatacggaagttatttgttactttgtttgaaatactatcattataaacttccatgaatactttaaatgttcccgtgtgcttaatgtacactcactgagaaccaaatgta

SEQ ID NO: 460820 - DNA, 354 bp, Homo Sapiens
gaaaacctttgtacaaacagaataaatgtgtatacaacattacaagctgtttattgatcctcagaaatgaaacctatatccactgtttgtcagtgattttcccaggctgttgagttctgatttaggcaatagggcaaaaccatgtatgactgtaagggaagtgagaactcagtaaattcgttataagcacacaagcagatttcaattaaatcacagatattagggtgcggcgatattcttaataatcacagccagtaactacagagtacataatatatgtcaggcactattctatatctgtgtccatttactcatctaatactcaccatgaccatgtacgagacttctatgtgt

SEQ ID NO: 460821 - DNA, 411 bp, Homo Sapiens
tccgacaaccactagagatagagactatgagattcagcaagcattctatctggtgctgccgaaccgggcttctttgatcaaagcgggaaaaaacccagcgtgcatcacctattttcggcagggctcagtctgctggtaccaccaggaaagaacaccaactcgttaaagcataactcatggccacagaggaacaagcattccccaaaaccaggaaggtacaatgtataagctagagcctgggatctccagactagactcttggctctgtgagacttgggtgaggccactgatctttgtgctatggcaggcatgaaggaaaggccactctgacctaccgagagccaaaagaatgttaggtataattaggtgactcagaatatccctgaccttgcattctatgtgtcgtacgcc

SEQ ID NO: 460822 - DNA, 370 bp, Homo Sapiens
gaaacaagaagcttggttcatcaggttttttaaagactttaaaggtttttttgtatgctataatatatgcttatgatttctaaaaattatgcagtatacacaaagggcataaagtcaaaaagtgtgtctccctctgtgactttattctcataccccagaggtatataatttcttgtattcttgtgtagtctttaagaaatgttatcgtttattttatatatggctctctctctgtatgcctcttcctgttcttattttaaatgttcaagtttgtgacttggttcttgtttaacttggttgtctttccatattgccaccttccagctctaacattaatgtctccagattccttcatgtgtcggacgagctg

SEQ ID NO: 460823 - DNA, 415 bp, Homo Sapiens
gcgacacatgaaggagcttcatcaatgtgaagagatggaaatatgacaatgaacaagacctgagatgacttggaaaaaaatactgttcaactcatgtaaattgctatacttatttttagcacaaattgttactttttcatggttgacatccttttttttttcttgttcaatctagaaggcaaaaacatgcacaaaaatataaggctgccttacctaggtccaaccaactcctcttgtcttgatcttccctgaggtctctgtagcctccttggagccctgcaaagtgcctcaaacaacagcttttcctcccattcagccaacactgatctctagatcagcacaaccattgctttccactctgcctaaggctggccacttttttcttttttccatacattctatgtttcggaccgcc

SEQ ID NO: 460824 - DNA, 441 bp, Homo Sapiens
aaaatcatgtattagttaagggaggaatttgtatttagaatatgtaaagaactgttacaataataattaaaaggcatataattcaatttttaaaaatcaacaagagatctgaattaacagttctccaaagaagatacacaaaaggccaataagcacatgaaaaggttctcaacatcactagccatcagggaaatgcaaatgagatctacaatgagatatcacttaacactcactggaatagatatataatcaaagtgataatatcaagtgttggtgaggatgcagagaaattggaaccctcatgcactgttggtggatacccacgtgatataaaaacaaatgtctacacataaacttgtgcacagatgttctttgcagcattatttataatagccccaaattgtacagccctatttctatcaactaatcagtgtataaact

SEQ ID NO: 460825 - DNA, 210 bp, Homo Sapiens
tgtgcggcgtgtgtgtctaggcactccctgtgcagtctgtgggtctgggtctttgttcagccagtgagtctgggtctctgtgcagcctgtgagtctaggtctctgtgcagcctgtgggtctaggtctccctgtgcagcctgtgggtctgggtctctgttcagcctgtgggtctagactcacaggctgcactgggagacctagccacacag

SEQ ID NO: 460826 - DNA, 643 bp, Homo Sapiens
ttaggagtacggaattatccagcgtgaagatttgggaacggcgtccagacaaagggaacagcatgtgcaaaggtccagagacaagacgaaccagagtgctttcgtggagactgattgtcctgaaatactattttactatcacagacttccatatctcttcaggaccttgagcactgccctgtctttttgcagctcccaggagaccttatctgtcattttcctggtcatctttgctggggctcctgctgtttgttccatattaattgtacacaaaggatctcatgatcctcttagggccatcatgggccaagggctcagattttgtccatggaaggctctgctatgggaggaaggtgacctttgttttagttctaactctatcattagctccctgtgtgtccttggagaagtcactgccctctctgggcctccttgagaggaggagaatagacagataggacctggctcactgtcactcttccctcagttacttttgttgtaattcttgggggtttgcaacatgcactgttagctcgcacatgcctgatgtgtagcatgtgtgcttaatgcatcttgctgtgtgaatgagcgacgtctcacatgcgtgctccttctggccgtgttgttgtctgctcttatctac

SEQ ID NO: 460827 - DNA, 539 bp, Homo Sapiens
ttttagtattctttatcaggactactgattgatgcattcacttatatgattagaaactggaaacacaatgtcctacaaatgaaataatttgttcatctatgtcagaaatgactgtgcatatgtattattaagaatactcagcctggctagaccaggggactgaggtttagagtggagacttggagattccttggaggtctagagataaggagtgactttgttccataggcaccgggctcctggagtctgagccataggaaactggtattcagtactagagctaggattgaagaaggggcctgttcacaaggaattcagtagcagcccaggtcctacgtggtaccacagtcagagtggaaccagcagcccagactgctgtgccatcgacctgaaggcccttcatgtatctggggagctgggactaagtggtctgtgctgtgagggttgggcagccacagcaccaggagtctggacattcactgctggtaacggtagttggcagccttctttcttgtcttttctctagatcaagcttagaa

SEQ ID NO: 460828 - DNA, 114 bp, Homo Sapiens
tcagagtcagccatatacaggctttagtcactcaactgatttgctcctaccacttactctatccctaagactgtctccaaagtgatactggtttctgcattagcccattatata

SEQ ID NO: 460829 - DNA, 354 bp, Homo Sapiens
ggaaattttttctagtaactataatacctgcagtatttttagctataagatcaaagaactttaagagtcttcaaattatgaatcatttaataccatatattaatagaaatctttcaacacatttaggagcacctagctgtaatgtggatgaaaaactgaagatatttttaaaatgcagtatttccagctataaaatcttaagcaacaaaaacatgactagccatatctttcaatggaaatttctcattttcagaaagacctaaaatctcattcaatgattatttactttttaatatcactacaagcagcttaataagcgctatggtctgtttccttgacaaaactgttgccaca

SEQ ID NO: 460830 - DNA, 190 bp, Homo Sapiens
ccagaagtaagtccccgcttaggtagtacgaggtagtcctgggtctagccagagccagagagatgtccaagtctagcaaaccgagttctccaaggcttttcaagaactgggatttgcttgcaagatgaatgagggaggaggtcccatggtcttctaagaagatcaacccagagtcttccaactactcact

SEQ ID NO: 460831 - DNA, 472 bp, Homo Sapiens
  misc_feature (20)..(20): n is a, c, g, or t
  misc_feature (89)..(89): n is a, c, g, or t
  misc_feature (105)..(105): n is a, c, g, or t
  misc_feature (137)..(137): n is a, c, g, or t
  misc_feature (154)..(154): n is a, c, g, or t
  misc_feature (159)..(159): n is a, c, g, or t
  misc_feature (176)..(176): n is a, c, g, or t
  misc_feature (296)..(296): n is a, c, g, or t
cttgcaaaggtggccccccnaggaggaagcccaattgagctcatggcgaatgaatggtgatgaggatgggatcccagggtgtacagccnagctcttttctttgtnggtcgaagggggcgccaagaccctgaggttgnagaagaagaattgctcnagtcnacctcgtattcatcatnaatttcatcttcatatccttctctctcatgtatttctgggatgtccactgcaaaagccgagatgggttccatgcagttctccagtgggacatcagtgcttatccgaatgtcatcaatggnaatctctccggaacgtcctttcatctattactccctcgaatacaatctggtactccatgtcgtagctgggcaggatgatcccgcccgtgcttccactcgccgccctggtcctcacggattacccacagcaacttgctctcctgacaggcttcccgcaccacctgcagcgccacccc

SEQ ID NO: 460832 - DNA, 401 bp, Homo Sapiens
cataaataaatagtcctgatgaagaatactaaaaattagagacccggccgccacttctaattccagtctcctcttccaagtttccagaaatgtctttggtttacagcttttcagaccttttcctgtgcatatgtatacatgtgtttgtgtgtatatatgtgtactttgtagaaaattttaaaatctcacctgagtattactttgtttctaattgttttgttggcattctccttctttctgatgactcttagcttcctatgctgcctagagagagttaaaagaagaaaatgttttgaaataatttcctttatcagatctcagtcacctgaacattaatttcaaaccaaaagagagttacagaaagagataattaaatgtttgccagtgacttgtaattgcct

SEQ ID NO: 460833 - DNA, 317 bp, Homo Sapiens
gaaaatggtttggagaagaatgagacgtaaagtgaggagaaaagttagaagcctagtttaatagtccagtcaagagataatacacatttgaactaagggtgcatttggacaaggatggaaatatggatgtggattttatttgaaagaagtttacaaggcaaaattgacaggatctagtaactcactgagtgattgggggaatgttaatggaacaggaatagtcttgtttctgacttgattgtctttagtcaggatagagaatgtaggagaagctcttcaggatggagagaggagtggcataatacgattatcctttg

SEQ ID NO: 460834 - DNA, 369 bp, Homo Sapiens
acagagagggaaggaagaaagtgtttttcctaattaattggctctaaaagtggagaggaaccaagttgggttattatagaagcatcagcgtccgacacaggtcttcaactgccatgcaaataccccctactctgcaccatgcagttcccatggtttactttgttgtgatgtaactgtgcatgtttctacctgaacccattgaacacggctttgtgcttgaaccttgaacaatgcctgggacacagttggtgctcaaataaataatgatgggataaatgaatgagggatccccattctcctacctaccttggccttgtcatcatctctcacttttgcgactgccagataacacttagctctatcattcta

SEQ ID NO: 460835 - DNA, 501 bp, Homo Sapiens
gaaggagacaagcagacacaatctaatatagtatcttatccaatctgtcgtgtatacctggtcacgagctccgtagaatgaaaggagatttcacagtagcacctcaaagctctgaagcacaaccaaaacacagcatcatttcagaccgaagcagtaaccaaacattcctactttgatatggttcaaggatgctatcatcaatattgaatcatctgctcacttatccaggaagaaggggggcttagttactactgtactatgattgtgctcaatcaacacgttacaaaaatcaagctgccataataataataataaaggctcctatacacaggaccaattatcttcagttcttcacctccaagcatccagtgtttacttccacatgtgctcaatgtttagctaagacatataagtgaaatatgtggtatttggttttctgttcctccattagttcatgttgccacaagggaagtgatttcattctcttttatggctgcatag

SEQ ID NO: 460836 - DNA, 301 bp, Homo Sapiens
accctgctgcattcggtggcactgcagtgtcatctcatctgaggcgtcctcacgatccacgaactggttgcagcggctggagttcccgatgcaggtcccgtcccggcagcggaactcgcccacaccacaggctgtcttgttgcaagggatctcgtcagagccatccccacagtcgtcgggccccgttgcaccacagcatgtttggacacactatgcgcccattgctgcactgccggtatatgcttgttttgcagctttccacaacacttgatattatgcactttgatgtgatatatgctag

SEQ ID NO: 460837 - DNA, 502 bp, Homo Sapiens
tagggttccacgggcggatcgtttaaaatcagggaacaaggattcaccggaacttgcgggatctcctcactctcgtttggcctcaaggtagtggaacgctgctgctgtgtcctggaagcctcagaggtggctgcagctgcagagagctgggctgaggctggggctggggttggacaagcaggagttgtgagtccccagagagtgagggctttacctctcctggttcagtgaccattgactcaggggtagttcctattgctaacggccctccctgatgtgtagagggcccctcagtggcctctgaagaaacggctgggtctacggtgttttgttccttgcccgtcaggaggagggttggacccagggctccagggctagaaaagtgttgaagaggctttgctggcatgccagggccaagtgccacttgctgctgcttgttgtggaacgctgcgttgtggaacgtgcacttgaaattaaagctgcttgttccacaacagcgtgg

SEQ ID NO: 460838 - DNA, 387 bp, Homo Sapiens
  misc_feature (19)..(19): n is a, c, g, or t
tctccggacctagtttccncatcagataaaagatggggttggactacaccagggctggccaataggtttccttttggggctatctccattgtttggtagtggcagcttgaagaactatgatgaaaattgaccaggcttgtccactgtctgtaggaaagtgttctgtgattgattagtgaagtctgctatgggcatagaaggctgtcgtcatagtaggaatgtcctacatttgacatcctatatactaagattctataaaactgtaaaatcatctgtacacttcttgaggaataacagttgtccctggcaaaactctaaagacactggtcctagaactgcgggaatattcccagcctgcttcagattagattcacgctgcctttccag

SEQ ID NO: 460839 - DNA, 221 bp, Homo Sapiens
catgctgcacacttggagagttctcgttttctcttgtgaatgggcagggcgccctggaatgggttcgccccagagagatggggcccagtgccattggaaacgcgtcacaggttccaggcggccgtcacagctgagctcatcagctggcacccctgaaaatcacgggggagacgggtgtaaatctcagcacccgggccagtacccatatccccagcagctca

SEQ ID NO: 460840 - DNA, 124 bp, Homo Sapiens
ctcgctcctattctaggagggagacttgagtctggtgcagagggtagacacccctcagctccctttcccccagttcaccggagcagccgcagctcatttgaaatctggttccctctccacgtgc

SEQ ID NO: 460841 - DNA, 188 bp, Homo Sapiens
cctgctccctcgttttcctggaagaaatgcctacctaagacacagacacctgcatcccacgctttgtcacccaatgcctgtttccttaaggagaaaaaatgggcgccagaaaacttctaggtctagatcctggctctgttgctcgctagttgtggaacttgggacaggcgacctcacccttctgattt

SEQ ID NO: 460842 - DNA, 238 bp, Homo Sapiens
catacctggaccttctctgggcaggggatgccacataggcttgtcatggaagcttgcggggaggggagggctgactttgaggagcaccactagaaaggtaggtggggtcagattctagaaagccagggatgtcaggccagatcgctttcattgtctttcatgaaggaagtcattgaaggtttttgagcaagagaggctacgacacaaagctgttgtatagccagaaggtccaggtatg

SEQ ID NO: 460843 - DNA, 237 bp, Homo Sapiens
ggctttgggggaagaaagcactaagcagttgagatggtctgagtttcttgtctcacatccggcttgcatggagaacagaaagtgagtgccatgagcaagactgggcctgcagcccttggagagaatcccagcaccatgggcccagccaggaaggactgatcccaccgaaagcatctctggcccctcctggctctcagcctgggtagtgcctacccctcacagaagtccaggaaagcc

SEQ ID NO: 460844 - DNA, 208 bp, Homo Sapiens
tgcatacctggaccttctggctcagcccatgacctcaaagagccgtccattaaaccctggcgtgcccatcaacaggccttttctcacacgcgctgtccttccctacaaagtcctgtttccagccccaggccactttctccttaaagggtgacacctgtgggcgggcacccagggagcttggcatgcaggctgaggcagggatgaaacg

SEQ ID NO: 460845 - DNA, 502 bp, Homo Sapiens
gcagcgtgagcttcgggtcaggcgcgtgcttgtaggtggtggcactgagcgcctgtgggacatcaggaaggggttccaccatccaggattcgcgtcaccttcttcgtgcctgtcccgaacttgtcatccaccagctcagacagggatttcctcagctcatcctcatcaatggcccattccagcttttcattcttgatggagttgtaaagggtcttcagcaggtctttggcaaagtcttggccatcattcagctggtccaagttggcaatgaattgctgacaggacatctttttgccaatgttcacgtggccgtgcaggtccgtgttgagcagcatcagggcacaggtgagcgtgtgggatcccatcttccgaagtgctgtcatcaggggtttgcactggcagtaccggcgggagaagtgtgtgaggacccgctcacgctcttgtgtctcccccatcagcgggaaggccttcaagaatgttctgagtgctccgtccaggtatg

SEQ ID NO: 460846 - DNA, 163 bp, Homo Sapiens
  misc_feature (12)..(12): n is a, c, g, or t
acatacctgganccttctttctgaggtctgatgataaatgactgcgaggttccattcaccagccggcagtacccatctattaggtcagccatattctccgcaatggttagggatggtgccgtcactgtcagaggctcgggtgcacctgctatttttagtatag

SEQ ID NO: 460847 - DNA, 768 bp, Homo Sapiens
catactggaccttctaatgaaggtctggtgtttgtgggtgtcctcctcccttccgtacacacccgccggcccactttccctctcttttccccttccctctgtggcctggccacctgggctttcgcagaatatgtagacaggacacgagggagaagtgaaggacaagagggcaagggtcttcaggcctcaggtttgcagtgggtctacctctctcccccttcctcatttcccatatcctcgttgctaggactgctgattttaaggaatgttttccaaggaactgtcgaggcaggaaggcagctatgacagacatgtactaagtgtgtgaccagggcacagggttcgcgtctgggtttgtttcggaggatgcattgatttgcaagacctgctgggatctgctgtcctcagagagctgactgtatagacaagtgattggacaactaccacacagtgacacaaacacagtgacagatgcctcagcaccttacctaacccacctaacagtcagggaaggcttcctggaagaagcggtatccacactgagtcccaaaggataggcatgagttagtctggtgaagaggcaggaaaatgagtgtttaaggctgaaagaatagaatgtgcaggggctcacaggcaagagaatacatggttgaaaaaatatacttgggttgagaacctgatcgggggaggaatgtatagcggggctggcgggtgctgcgcagggaggccgcggaggctttcgtaagagacttgaacttgagagagtca

SEQ ID NO: 460848 - DNA, 245 bp, Homo Sapiens
catacctggaccttctgcttttgctcaattcaactccagaaacatcagccttcttgaaatccttgatgcacaaagttcattcttgcttaaggactttcatacttattcttccctctgcctggaatactcttctcccagatattcataaggcttgatgcctcacttaattgaaatccatgctcagatgttaccttctcaaagacgccgcctttgagaaggtccagtatgccggggatcctctatgg

SEQ ID NO: 460849 - DNA, 608 bp, Homo Sapiens
ctggacttctccctgaggctccctgatgctgacaagctgggatctgcacatggggtgagtgggtagcaggcagctctttaacatggcattatggggttaaatttctcctagcacaaattctgggtcagattgagcccctggtgattgtctctttccagttggtaggctcggatgctgtggagtggtccagtgtggggtttactctcagttttgctttgctaagggaaatctgggacttgttattctgcggttacatcattaattagtgatacttgcagcagtaaacatcatgtcagctaaaattagtaattctgccacctcttctgctgaagctaaatgggagggagagctggatctggtgggatgtgcgcccaacattcccaaaccaaaggcaaaaggacgttcagcaaggtttagcagggaagaaggactgtgctcaggtgcgcatgtaaactgggcaggagagctcttgaaacaggaaaaagacaacttgttcatgttgctcaatgtttttcctggtaatccttgacaaattcatgcagttcatctatccatacaccaaggagtgcctgctatatatcgggagtaatacagaaggtccaggtatg

SEQ ID NO: 460850 - DNA, 297 bp, Homo Sapiens
tggagtggatacggtggctgtaaccaaagtctgctgtcaggaaaaagacaacaagggaagatttctggaaggcagataaagccaggactcaacactagggcctttgggtttaagagagagggctgcttccctcaccccttgttcctaaatctagaaccctctggtaccagatagcattccctggggtcctgctctgggaaagtatgactaagctgagatgtgagtgttgattaagtgggtggaatcctgcagcctaaggttgtataggagcagaagctgtatgggatcagcttcagt

SEQ ID NO: 460851 - DNA, 415 bp, Homo Sapiens
ggaggatgatgggcaagcctgaaccctggtgccatatctgcaggcacctggaaggtgccctgccatagtggttcagagagagtgtggactggagtgtgctagatctgaggggaggagtggggagaagtggtctcagccagaaaactgttgggtgggttggctgtgacagagcatgtagtgccagcccctgggtgggcgaggctgggggctgctgtaactgccacagcccagagcccctcaggctctctccctagagatggcttctccatcagttcaggtagcttttggctttgatttaacaggggtgggggcagatgaggaagttcaggcaacacagggcctgggtttcctgagttgttctgaattgtttgcccttttgtggaagctcaggtcttcagacccacttcctcttgtc

SEQ ID NO: 460852 - DNA, 452 bp, Homo Sapiens
acttcgtatgttcctttttctatgaacaattacatttgaaatcataacattactcactgatgagggaaggaaacgggcttctgtatctacttgaagccggggaagctaaaggtctccttctcaaaggagagccggaatcagaggtgagaaatgtcggtacttgaagagttaggctgctttgcatctacccagcgtctagaaccaattccagcttcataactcggctgtgaacgaactcccttaggcatttggtagccacgtagccagtagttcaagactagaaaacccatgaaacgggtgaaagtgcagactgttatctagagatgtaagtgtatgttctggagggagaacgggtctcattctgggcactgggaggcacactttaagcaatcccaaatcaaaatagtgtcatcatgggagctgctgatgatatgaactcgtcacactggaga

SEQ ID NO: 460853 - DNA, 639 bp, Homo Sapiens
caggatccccggcgatactggtaccttctattactctatctgtagagtaattgttattttagcgatgcaatgtttcctaatgagaccaagcattgggagaaagggaggaagggagggacctgaaacccaaacccagccccaggtacaagctagcacaattagcagccagtgtactggcttctcgaatgctgatatggaatagctcaggaaactcaatcccaccagggacctgcttactgtccacagatgtcatcacagtcatcggtcaagctgagagaggctagcgcaaacaggcgatggggccgctctatctctcctcctccatcaaatcacaaaatgccatgacaacacccaagccagggcctctgaggacacatgaaaggaaatccaacttcatgcaacagggactcaaggtatggcccttttcggccaaaaggcagtgtgggctggagagagagataaacacaagaggctggaaacacagacagggtgagtgggaaagcttagaaggcacttagcaggtaaggctggcatcgggagggagctggctggaccctaattcctgaaacctctctccctgaaacctctcttcaaagagatctacactttctaaatcctgcctccagaagtccagtagcc

SEQ ID NO: 460854 - DNA, 457 bp, Homo Sapiens
tggtgatctagaggatcccgcacccaggcgcacttctggaacctacctggatgggcgtggcctacaggttggtctgagaccatatagaggctcatccccagacttaccatcaagcacaaggctcgtccgagctctgaggccttttctggctctggcattctgaagtgacatggagcacgacaggcagagagcaaggattttagtccaagaaaggcactatcaacacatcccaaagcagggctgagccaggccaagtgactgaaccaagccattctgtaatgtgctaagctctctgggccctctgctgaaggacaagggaaacacacacagattcagtctctgccaggctgggcaaccacagggccttcctagtgtcagtctcacctctggctaggggtggagggagattcagacccagtatctcttggttataccctgactacagcaggcagtttcg

SEQ ID NO: 460855 - DNA, 497 bp, Homo Sapiens
cacccaggcgcacttctggggcagggaagtgaaatgtggctcacccagcccgccaagccttaagatcctagttcagatcccagttctcattttcataagaccagagcggggcttcactgggcggggctggatctgctctcagctgtcaagaacggatgcagtgggactctgcacctgcaagggctggcatggcatctctcccaggtggcctccgaacacagatgggcagcaaccctggcattggagctcctgcctctttgcagctgcagtggggacagaaaccatggaaaccacagattgggcagtgcctctcccttggtctctaggggcctcctcctgttccccagtgccatcaccccagggcggtcatttctcactgatttcttgagggaggaaatggctagtttgagagctgagtttttaaatggttcccaggtggctcctggtactggaagcccggtcctgcaggtgtgcagctcagcagccagaaggggcca

SEQ ID NO: 460856 - DNA, 493 bp, Homo Sapiens
acaaagtcttcttgatcaagtcacagcttacatctccctgtagtttccattaagcacaatgctttgtatacagaagatgctcgactgaaggaaggagatagaagggaggaaaaacctcccattctctttgcagccatgttgggcccagcttataccttcaagccatctgtcccctaggcagcagagatggaaggtggtcaactcttttgtcacccttccctcctctctctctctcctaaagccattgttgcatttcaaggtagcacatggcagacaggtgcacaggtaggcacagactcaaacagatgcaggaatgagcatctgggtctccagagcataggtctctggagcatagggtctccagtagaactagcatcaggaattcagtatgttaaagatgactgaaaagtggtgtgggagccacggacatgctgagctgtgggttgggaggtggaggaggtggtgactcagatgtgcgcctgagcggggagcc

SEQ ID NO: 460857 - DNA, 659 bp, Homo Sapiens
aaggatcccgcgaccaggcgcacttctgactcccaggtcacgcttcatctcgatgatgtagcccctagttacaatacattgtgattgtcgttgattaccagtctcagacctggtcagttgggctggtgttcactcaacacccaagtcattggccatcggtgctcggtaaccccatgcccttcgtaatcgtggatcatacccttgtgccctgtttgacacaggcgcacttctcaccgcagtttctaatttttctaacgatggaacaggctgttctttttatgtaaaggggaatcctacttatctgatcacagctttctcctggtgaagatggatgtgctagaaagctatcgacattctctgattggtgcctccctgaactcacggacaaaaatcagggtactgatgaggtagaaggtgtcctggggtcatggagcaggttaaaactaaatggcctgcagaaatactaagcccctaatgctgacctaattgccccaggattccagccaaatgaacaaactgcccacctgccttaacagacacaaaatacacccacatctaactaaaatacacttggagtaagtagggtccatgtaactatagttatgtttaatggttcctcttacatttccttattactcattaaattcttgttacttttc

SEQ ID NO: 460858 - DNA, 736 bp, Homo Sapiens
  misc_feature (32)..(32): n is a, c, g, or t
gcagagactggaccatggcgtcccgccccagnctcgctcgtgtccaaagccaactccaagctgtgaacactgtaagcgctcgagtcctcctgggcagtgcagcaccgcggcccccgcccgcaagcctgcttggcgcagcgccttgctggcagccggcgcctcctagcccgccctctctgggctggcttgggcttcctcgcttactctactctcctccgctctcggtcaaggtcggcggccttggatgctcgttcgcttctctttttaaaatgtctttttgtccctccccacctctttcctgtgatcatttattcactcggcccccgcccgccaacacacacatttatgaacccccacttttttttccttctccttttcccttcccctcctcagggagcctcctccttcagtcagtccatttgtcccttgatctggccttgctgtcctcagtccccacggctcctctcacagatgataaatttcgcccgtagtatccatattggggaaacagatttgctctgtttccaacacgctcttccttcctctaaacataggaccccgctctgcgccgctggcgaccccactcttccccctccagactctggcccgccccagcctagctgtgtaattgtacggcctctgcaatgccagaagtgcgcctgggtgcgcacccaggcgcacttctctgatctctccagggaagccacagtatgaaagatattcactggctaccaca

SEQ ID NO: 460859 - DNA, 427 bp, Homo Sapiens
  misc_feature (129)..(184): n is a, c, g, or t
tacaagaaggcactctgaccttttgggttttcagcattgcttcattgattctttcttgatttcgtgagtttgtctagttttggtctttgaggctgctgacccttggatggagtttttgtggatactttnnnnnnnnnnnnnnnnnnnnnnnnnnnnnnnnnnnnnnnnnnnnnnnnnnnnnnnncaatggttaggtccctcttctgtagggctgctgcattttgctgggggttcacttcaggacctatttatctgattcgctgctgtgcctggagatgtcactcaaagaggctggagaacagcaaagatgagtgcctgcttcttcttctgggacttctgaccttgaggggcaccagcctgatgccagtaggagcactcctgtatagggtgtctgacacctctattggaggtctcacccagaagtgcg

SEQ ID NO: 460860 - DNA, 722 bp, Homo Sapiens
ctctatatgatcctcgtacccaggcgcatttctggtaatctatcctaaggaaataatcataagagtagaatggacaataaaagggcttcctgagaatagatattgtcatgaatcattatttacaagggttacattactgactatggttacagtgaagggccagattaagcaaactctggaacttctgctcaatggaatactataggctttacaaggaatctattatcattgctgaagctactgagcaagcgtggagcaatatgggggctaatagtataatgcctatggaagaaaactggatacccaattcttgttcgccaattatgtaaatttcccaaatgcatattgcttcagatcaaaagaaagggtacacaacgtgaaagtcttgactgggttagggatagcgatgagaggagaagggattatgttgaattattttcctacctccccctcatcttctagaacactctttcctgaagtgttggcagttagtggtagatgagacaattgtaaggggtggttgagaagtttcaacaatagttctgcctattaattttctttgtgatatttttaggtgtgatgacattatggtgaatgtttttaaaagagttatttttcagagatacattattaaaatattgatggctgaaatgataggatgtctgggattgacttcaaactgatccgggagaagtgcgcctgggtcgcggggatcctctagg

SEQ ID NO: 460861 - DNA, 524 bp, Homo Sapiens
  misc_feature (384)..(427): n is a, c, g, or t
tactgagccactcatatatgccagacactgtgctaggagtgtgtgaaagccagagaaatactcattagaggaaaattgctgacctgaagccataccatatgaccttattagcacaactcagtgtattcgataatggaaatgttcactgactttgattttggaaatcctccctacagagtagcatatacgagacattgatattgtctcttttctcatttaaaagctatgcctttaaagggcacccatgttgctgtatatacttggaatgtgtttccacattttaccagtccgcttctccagcgataggaacctagaatgcttctaattcctgtaatcacagatgtagcttcagggtatatcttcatacatgttgttcatacgggnnnnnnnnnnnnnnnnnnnnnnnnnnnnnnnnnnnnnnnnnnnngagatgtgcaaatagtttgcctaagtagtgctgccggactgttcttccgtacagttactccactctgcaatcccaccagaagtgcgcctgatgcggg

SEQ ID NO: 460862 - DNA, 404 bp, Homo Sapiens
ataaaaagtcttttcagtcttcatcaaccaccatctgactggcgtgaatttcaacacagtttataagggaataggcattaagagtttggaggatagaaccatccttgaaacagtacataagtaaaaagctcatatgattctatagagtcttctgaactgtctttgctcactggagttgtacctaacagtgacttcgaggctgttccacaggtcccaccacagacatcctgatactcagacaaaaaaagctggctatagactgctgcattagcttttctcactagtggaagttcttccactgccatttatgccgtttattagtggaaagtaattttttaaaagagcccttctttaagtgtatgacgtaagatcatgtccttgcactacatggatgtagctgagca

SEQ ID NO: 460863 - DNA, 597 bp, Homo Sapiens
ttagcccaagaatagtaatacccatgtaatggttatttctaagaacaaaaattgaaataatcatatcaattatttgagcatgaaggtcaaaggataagaagtttatattgataatagacttcttgatagccacattttatacaggatgataatccagaaatggtttaatgattatgacacagataacacagtagtgagatgagattttattcatcctaactatgaatcatgtctaaggaatgtagaacactcatgcatatttatgattttaaaaaaccttgttcctgcgatggcttttttagacatgtcctacttactgcacagtaagaccaacatcatgtgaggcttctggataaggactaaatatgtttaattttataattaagaacaagtaatggggattccagtgacaaaacatgatgctatttagtgtgttaaccacgaagaaataatgcaactcaacgcacaaacagagcaaaggagaagacaaagcaagtagacgaatcttactgactatctcaggagtatctaactgccattaaaaaaatatggaaactaaagtaaatgttaagcaaaagtagagctctccgtcgtcct

SEQ ID NO: 460864 - DNA, 614 bp, Homo Sapiens
tgggtcgactagaggacccccatgtgcactgagcatgcactgtgagctaagccctttgccaggtttgcaagaaatcataaaggcagtattagatatggcctctgcccttccagagcttacagtatgagagggaagataaatatctactcctccgaccctcatctcccacacatgatgaaaagtgagtgactaacttctgctatctcatttacattgacctcagatggtgaatcagagtctagacaagaaaatcacacatgttccttggggaactgagggaagtttaatggacaggataatttgttaagattggacagagtttagagggacccagaagagatggtgtaagcgtcccaggacttaacaatagcaggaagtccttacacccgaagggctgaaagagcaagaagagggagtatttatcagaggccagagagagagctgaaactgcaagagatgggctctctcaggaaggaataaagctaggtcctctctgtagcctacaggaagtgagtcaggggcgtttagtaccctaacctctgtcttcagtagcctaacctctctcttcactttctctctgatctctccctgtaggggacagagagtctccctcg

SEQ ID NO: 460865 - DNA, 399 bp, Homo Sapiens
agttcgacggagactctcaatcgccttccatcatggcgcagaattgagagtcgagcacgtcgcttgttttctgccaaacttagccaagctccggtcttaaaatcttttcgttcctagcgtgaggctttctgtctttgttgcaaatattgaaacctgccacgtcacctcttgcactatttgtttagttctttaagaaatgaaaccttaatccatgtacaatttctaaaagcctttatttcaatattttaagaagttatttcccctggcaaagaagccgccctgttgcccggtgtggagctcgatgacaaagctcatcagcctgagtggaagctcattcattatcgctgcgttttcgctcttccaggagagaacggagagtctgcgtcgaactgggtaccg

SEQ ID NO: 460866 - DNA, 348 bp, Homo Sapiens
aagaacccatggggaaacattttctctggcactcctgccctggtgtttaaataccttgcttcttcatcagcaatgcattcctagttttcccatgtgttaaaaaagcattgtgcaacaggatattgtttaggtgtgctcacacttggtaccacaacactggttctatctcccattctaatcttcccacaaaaaatgccaagggcaccaccaaggccaccagcctcaggaccaagggtggatggggaactaccctgaaccagtcaacgtagcaggctacaattaactccagttaattgctcgggagtactgctttgtgggtgggaagatgatgagagtctccgtcgaact

SEQ ID NO: 460867 - DNA, 561 bp, Homo Sapiens
  misc_feature (116)..(200): n is a, c, g, or t
  misc_feature (219)..(289): n is a, c, g, or t
  misc_feature (296)..(319): n is a, c, g, or t
  misc_feature (338)..(338): n is a, c, g, or t
  misc_feature (536)..(536): n is a, c, g, or t
agttcgacggagactctcactatgttatttttcaacaaggatttaaatttactagctgacattttcttgtattttcaatgaattactcatttattgtcagtctgacaaacttgtcnnnnnnnnnnnnnnnnnnnnnnnnnnnnnnnnnnnnnnnnnnnnnnnnnnnnnnnnnnnnnnnnnnnnnnnnnnnnnnnnnnnnngtaataaggcataatgagnnnnnnnnnnnnnnnnnnnnnnnnnnnnnnnnnnnnnnnnnnnnnnnnnnnnnnnnnnnnnnnnnnnnnnnctgtctnnnnnnnnnnnnnnnnnnnnnnnntaaagcaattatatttatngtaatttatccagcatctaattggactgtaatgggacagtctggtaacagcatctaataatactggaagcaaaggtccttccctccctttttcattttctacttaactatgtgccctgaatggcaactgtgacagcataggagagacgggcagctccaggcccactccttaacaggtacatcctaagcattcaccccntcatcctctgcccactggctccccc

SEQ ID NO: 460868 - DNA, 573 bp, Homo Sapiens
tacccagttcgacggagactctcaatagctatatcagtatttggcttgattcatgttcaatattgacaacagcatgtctagttaaatactgctcgcagctggccatgggacatattatgaatacctttgcttcccagatacatttataattgtttagtttttcatttgcttacttctctgggccataattcaaccccaaattatttgccatttgtccagatctctccacatcctgatggatcaggttgtggagagtctccgtcgaacttcatttcaatcttcatatatcttcctcctgtggttagacttaaattgagggctgtgggctcagccacagaacatcatggcctctgttaccctaagtttcttcctgttcttgaaattgtgacggtttggaaagagatggggagaatattgttacccacgtgacaggctgcagcaaccttgaccactaaggtcaaataagcagcattgatgaattttagcatgtgggcacccctggagggggcgaggcaagtctttctgttacaaagatgcagatttcagtgcaactgaaggcagaactttctaatg

SEQ ID NO: 460869 - DNA, 611 bp, Homo Sapiens
tgctgaatgcacagagctacctgtgcagcactgcgagcttctgataatgcccttctccataccctgagccctggagcaatatcctcttcgattcccggtcacccatcaccactcacggatggtgcaggagcagggacagtcactgtgcccacattatccacgtttgatctgaactggtggtacttaaggggctcttcagataccttctttccatgttccgctcccaatcagccagcctggttacagctatactctagggggttgtcactcttccgttctagtgcactgtgccctgctttcgtcttcgcccgtaaattctccatcatgctccttggcacattttagttcatgatttactgttcatcagtattcccgagtcctccctttctgatgctggctctggacacatccaacccttcacttgcaaacttgctgatgcaactctcctttctagatcttctaccttgttgaaggacactcaaatccattctccattgcttgttcttctactgacacagttctccactatatctcgagttacttggttttcttcattttcattcagctcaataatagcaacatccatattctggagagttctccgtcgaact

SEQ ID NO: 460870 - DNA, 680 bp, Homo Sapiens
  misc_feature (398)..(398): n is a, c, g, or t
  misc_feature (435)..(435): n is a, c, g, or t
acagttcgacggggctctcactggtctcccagcactgaactttcaatgtttagagaccagtgagagaaagaaccagccacagagactcagaactatatcatattctgctgataagcccataagatgataatgataactaagaattgacattggctttagtgatgtagacataattggggaccttgacaagcgcagtttactggggttggttgagttgccactttgattgtttcaagagagaatggaatgagtggaaagatagtttgtgagtgctagccattattcagagaatttctgctactaaatgggagcaggaggatgtatcaggagctaatgggagacaatgaggtcaaccttatttccctgtgtagctttcgtcttatgcctccaatgtccanctggatagcactccacttgctggttacttcctggttntgggatgtatacggtgaagtgaatagttttcggatcctgcctttacttacctgttttatcttgcataatctggacacataacacgatactgttgttaccaacatcttagtacgattactcgtgacgatctttaaattcacattctcagacattcactttgtttcaggaaataactcgcatgaaagcacattgtctcctgttctttttttccccctacgtgcagccatgagagtactcctcgaact

SEQ ID NO: 460871 - DNA, 401 bp, Homo Sapiens
cggtacccagttcgacggagactctcctccaggcgctgacggcagcaggtcatgtgcaggatggtctccaggccacagtagttcacggcggtgctggcgatcatcatggaggaggtctccttgtctgagccagggtcacctgctgggtgccaggtcacgtctatgtagagggggccacctgctgccatccggtcaaaccttgagatgagattgacagctccctcagcagttcgaggagggaagaattccagggagaaccacttgtcaccagattccaatcgccgcctcatcttctcccggagtctctcatgccgctcggggtccaggcccggggtggaacatctcgaactatctttggagctctcactgccactgctgcactgagagtcgtccgtcgaact

SEQ ID NO: 460872 - DNA, 336 bp, Homo Sapiens
agttcgacggagactctctcacttctggatcttgctctttagtcccacattgcgttcctgtagttcaaagctcttttctaagcagcaacagcatgaaaccttgtccagcttcacttctagagggttgagaagaaaaattatctgcattttaagacaccaagtaccagacacagagacaattactgttgctaatgattaactgaggaacccataggctaagactggcggtttaaaaccctaagctaaatattaaactattcttcaaatgactctcaaatttcctgctagaagaatttaatctggtaatttgagagtctccgtcgaactggggttacg

SEQ ID NO: 460873 - DNA, 462 bp, Homo Sapiens
agttcgacggagactctccagtctccgtctgaggggtagaagcctggctaccagtgtcttaggaaacagctggaagaattactatgtagacatagaaatgaatgaatcaccaagtagacattcattgaaccttttaacctttaaccttctgctggggtgagggagagccagagtgaagaggaagctctttataaagactttcaaccaagtcttgtttctggttctatcctgaccctccagcttcagaagtaactggatgcatccagttttgagcattacaagatttctgcagcatgaatcagctggcttcttatggttctctacccagcctgattttctgcagtccctaggtttgttaccagctgacctttgctttctaaaatcttgatttcattatttgtctactgttgcttcctctctaactctctgtgtgtgtgtatgtgtgggcacacagagagtctc

SEQ ID NO: 460874 - DNA, 419 bp, Homo Sapiens
ctcagcttagtggcttgtcagcacaatcaggttggaggagtggaagaacctttgattcaactctttgggataaagactttagaatacatctagctaaaataatgagcaggaataactacttgactaaccatatgctatcttgcattatatgtagaagtgtctcaattaggttacatgttcctctagagcagagatgacctcttacactgtttatctggccaaaaacagcttatttttccaactgcaaagcgagtattcagcagtcacttgggacttaaaatattgcagcccaaccacgggaggtcccactttatctttactagtgaagtcatctgtcgtttaataaaattcagctaacagcttatctcctgactctccttcccttaggttagctactgaaggagagtctccgtcgaact

SEQ ID NO: 460875 - DNA, 479 bp, Homo Sapiens
acttcgacggagactctcctccattggagagactaattcccacagttcccttgagactcaactatattcactgggtagaagatctgatcggtcaccaggattctgacaaaagtactctccgaagaggaattgacataggtacccaaggacgtgcttgtccagtagcactggagccaggataccctcgggcaaaaatggcacgggggcatcttgcatctaccccttacttggagcaaccttgaatggctggtatttcctcgcaacagaagtggatgatatgtgtttcaactatgcaaagaaaaatgtggaacagaataacttatctgatctcataaaagggagtaaactcacgaaatcctcgaagacctccgcctagttctgttaatacaggaggcatcacagagatcatggcagaaggaggtgaattagagtttgttaaaaggatcatccatgacagtctacaacttaaaaaaagatta

SEQ ID NO: 460876 - DNA, 591 bp, Homo Sapiens
agttcgacggagactctcatagacgtatgatcatttcttcctaaattaaatgtcctataagcaatcttacaacattaaaatcaatgactggcaatggctttgactacaagtgacgttttccaattttgtaaaagtagatttttcaaaggccttggcaacaggtaaagtaacatgtttctgtgtattacctaccctggaatgaagaatgtaattcatggagggggtatctccacactacctggtttgagattcagttactttctagtccaaatatactacagcctttcactagttctccctgaacagactgcaaacaagatgcaaagtatcttactaggaggatttcaaacttttgtggctccatgacgaaacagtttaaacaatcccaggggtagcgattaacaatgtgtaaaatgtgttacggtgatccaaaattccttaaaagatggtcgttgacatttatacttacttcacttgaagagctactatttaattccacataatagtttaatgtgtataccatatcaagatgtccactgtaaaatcatgccgtaccatatagttcaagggatttaaattacagtacataat

SEQ ID NO: 460877 - DNA, 366 bp, Homo Sapiens
cagttcgacggagactctccttttgctttctgggtctcgccgtctaacgtaaggaggttggagaagtggatggaagtctaggtaagcaagcttgcaaactcaaaatcaactgcctgagttaaataaaactgtttttccaaccagaaattccaattccacattttcttctgggtcgcctcttaagtggctcctgaaggagtgagcagtgagccagggaaagagaaaagaaatccagtattatttcaagccgtacagcccttccatcagcaaaagagaaacatccacccttctttcccgtcctcttcttggagtctctcttctggtttccctgtccagaagagagtctccgtcgaactgggtaccgag

SEQ ID NO: 460878 - DNA, 359 bp, Homo Sapiens
  misc_feature (164)..(225): n is a, c, g, or t
tcgacggagactctcatatatcatcatccagtggatctccatggtctatatgggatgaatctggatgatgatatatgagagggtggatgtgtctgcatggggctgtgagagtggggctgtatttggagtgtgcgtgtgctgtaagagtggggctgtatttggannnnnnnnnnnnnnnnnnnnnnnnnnnnnnnnnnnnnnnnnnnnnnnnnnnnnnnnnnnnnngatgtatttggcttgggaatttgtgagtgtgagtaattggatggggtgtgggtaagtgtagtgcctttggaaggtatgtgtgtcattgtgggtgtgtcttaatactgtgtgtgagagagagtctccgtcgaact

SEQ ID NO: 460879 - DNA, 544 bp, Homo Sapiens
  misc_feature (521)..(521): n is a, c, g, or t
agtcgacggagaactctccttggaatatatcattataattccaaggagagcacttaagatttttatttcaattagtaatctttctagatgaggtgattattttaggtaagaaatgctgtgtgttttatcaattgggtttattgagtcaaatattgaaaagaagagggtttgggttattcttgtagttaatgttactgttgatttaaacattaatgaacgtaaaaggacaatcaggctggagataaaattatttcttaataactgattttaaatcaacttgaatgagttaaaattcacactcaacaaaatgcacccattaaaaacttttatttctagataattttagacaacaaagttgcaaaaatagtacagagaattttcatgtatcctttattttactttccctagtgttaaaaacttacaataccatggcaggggtgagctcctgcacctggcctgtatccccgtttctaatgctgtagcagaaggatactgtcatccctgtgcacgtgctgtgtgtngccgggaatgccctcccagagag

SEQ ID NO: 460880 - DNA, 498 bp, Homo Sapiens
  misc_feature (22)..(22): n is a, c, g, or t
  misc_feature (66)..(66): n is a, c, g, or t
  misc_feature (79)..(79): n is a, c, g, or t
atacataactccttcgggcccnggagaaccacccaagcggttacctgtgaacatctcttcccttcnggactgcaaaaanggtaaaaacgcctaaaatgaaatttgccctctgaaagacttacacataactcaaatgtctagagaattttgcaaaaccaaagttctgtcctacccatgagtcctccacaataagccctttaaatctgctgcttctgtctcctctccaagaatttagggtactctctgggtcagattcttctacttctaagctcaaactgttcagcttctactacatctgggcaacagtggatggagtttggatttttataactgactttctccctcttcaaatgttagtatattagcattctggcctatctgtgcatactatgtggagtggaactcattagaccagcactgtccagtggaaaaggcaaaaatcttaaaactcctggaggacaataagaatatcttcatgacttcaggatagagaaacat

SEQ ID NO: 460881 - DNA, 452 bp, Homo Sapiens
agttcgacggagactctcaaaaagttttatttcctctgtatccatttttatgaaggtactgagagatgtgcatcaaccaaataagtgagtaaactaagaaagaagaatgtactggactcttataaaaaaggaccaacaaagaaaaatattttttaaagtcctagggtgacagcctatagagcaaccagtatgaatgaagtagagatctgggtgcaagatcaccaagaaataaacataattgacaggtatctgatatatttgaatattttgagaagaaagtgattcaaattagagaatgtaaagaaactaatattagtaaatggaaaattatgtaagtacaaaacaattttcagttctaggaaaaatgtttctcaagaaaggaaatttaatcacactacactaatgtgtattttgaagaaagcttagcaatatggacactattagtttaactt

SEQ ID NO: 460882 - DNA, 437 bp, Homo Sapiens
gctcgtgactctaaggatcccagtcgacggagactctcttttgttgcagtgttgttcttatgcccttcagaaaatgacaacgtggtcagttttcctcttcccctggtgactaagctgttcctttagagcccaaagatttttttccagacccatgagcaaatcttcacaccccatcccccggcgcgatggcttgcatacctgtcattcatttctgcctgtgctaacaagtttctgcgcgctgccctccagctgacaaactggattgccacaaacagccgggagcaaagtgctttttaatctggagacttccgggggtacaggagcctgccaggtgcctctgagcacagtgtccaagttgaactgctgggaagggcacactgttccatgcggggctggttcctctcagcacccccgagagtctccgtcgaactgggtac

SEQ ID NO: 460883 - DNA, 411 bp, Homo Sapiens
  misc_feature (20)..(20): n is a, c, g, or t
agttcgacggagactctctnatcatatgttagcaaaaccaacctagcttaaatcctattctctgcctcctccacccacctgaacagccgaacaggctggagaaaagcatacaatggtgctgtctggtctcatttaaatttatgaccttaactaacaagagagttcttagttctgtttgaaatctgactgtatttttctagctgattcactcctcagacaactatgtacagcttctcctctattcacaaacctccagagtccttccctccctcctcatttttcatcagataacttagatcctcatttcactaagaaactaaaagcaatcataagataacttctgtaatcagacggtgaatcatagctgaatctgctctcactggggacaccagtgagagtctccgtcgaact

SEQ ID NO: 460884 - DNA, 647 bp, Homo Sapiens
  misc_feature (51)..(51): n is a, c, g, or t
  misc_feature (78)..(78): n is a, c, g, or t
cccaaccagatctgagtcaattagtacttgttctctatataagaacccaanccaaaaactcctatctggctagtatanccaatgccataagagctgagatgaactctgtaaccccaaagatgcttaagtaaggaaatattttcatcaatgatgaccatggattttggcaagacaagggttgattcttctctcctttctctcatataatacttatttataatataaatgaatcctgaattgattttagtctctttaagatgtttactttttaaatgtgctaattctttatgatgtacaaaccgaagttcatcaccacacaaagtctgactgctactccttgcagcaagagcttcagtgaggatgcagcattttttatgtcctgaggacgtatgtgttgagtaagtgtttgtcaagtgaattcaggtaaagtcaatcttgcttcacctctgtcttttcttatgaaatgtaggaaagggatatatttactctggaaaagtatccccaagtagacataactgagttggttttggaaaggaagcggccagatggtggccagcaccctggcctttagtcctgtacttactaggtcagcagccctgcgccccggggtgtattttcagtcctgccaatgtcgagggtctccgtct

SEQ ID NO: 460885 - DNA, 611 bp, Homo Sapiens
aatatttgctactaccaccaaatcgcacctgcggggttctaccctgagggagctgcatgatgggatctagtatgcctgggctgagccattctgctcttcctcagggcccatgagggctctggcgcaggtggtatgaattcccctggtaggctggggcttctcagtcctgctttccaaagtgacccctgtgctatgagcaactctgttaccactcgggaccaggcaactgtaagcatagaaggtagccctgtcccaacccacttgaaagtcttgatatcctcccttccccagagtagcccctagaatagatgctgaactaggtgacctggatttaaatctgactaccgcagtcaagccaggtgactctgggcaagtcattaaacacactgaacttcatttcttcataggtaaattggggttcaactgtttattgagtgcccacttcatgagagatgctgagtatacactggtgaatgtcagcccggtgtttagtccctgcttcatgagacaactggaagaaacattaaacattgtccaaataataattatggctgtgaaaggtgctgctagtcagaaaacttgcagcctgcatagagagtctccgtcgaact

SEQ ID NO: 460886 - DNA, 199 bp, Homo Sapiens
  misc_feature (138)..(138): n is a, c, g, or t
  misc_feature (162)..(162): n is a, c, g, or t
  misc_feature (172)..(172): n is a, c, g, or t
  misc_feature (189)..(189): n is a, c, g, or t
agttcgacggagaactctcctagagttcaacttggatattcaacaggtatcacaaacttaacttatctaaaactaagcaccacattctttctctccacctccaggaagttgattttccatagaatttcgtctggcctncaaaaaatgataactccagcccanaaactcctgngaggtggagagtctccngtcgaactgg

SEQ ID NO: 460887 - DNA, 347 bp, Homo Sapiens
  misc_feature (312)..(312): n is a, c, g, or t
agttcgagggagactctctccaagagggtttatatgcagcataatctcctgtataaggtgttatggctgaattttcctaagttacccccctacacaacaccctaaagacccagttctcctgtaagagcttcatacgacctaaccccacaagataatagctggaggtttcccctgggctacctcatccatggaggcttcattcaaagtaagatatgggaagaaaagggaactatcacccagacttctgaaaatggaaactatcacccagagttctcctaggatctctcccagtgttctggatgacaacgcacntgggagagtctccgtcgactgggatctcagatgac

SEQ ID NO: 460888 - DNA, 282 bp, Homo Sapiens
agttcgacggagactctcacgaagcagcacctgggaatgctgcctcgtgggagtcccatgcgtgagtgtggtggtgtgaccttcagtgctgcacagaggcaaggacccagatgtggcagcatgggcgtcatgctccgttgcacagcccagggcctgttttggagggaccaggtcactgcccctggtctctctaggaggagtggactgaatggatcgttgcagagaagactcacccagacctggccagggaatgatgtatctggggagagtctccgtcgaact

SEQ ID NO: 460889 - DNA, 487 bp, Homo Sapiens
ccagaaggataaactgaaattaattaaaaatgattacctatgagagacagagaatgggataagaaataggaagaattttaatagttttctagttaatttttacgtttaaatcaaattcaaaagataaaactgagcaaaaatgagtatttctaactttttaatatttatattttgcgtggactctcactttggttgttattcaaagtgagagtctccgtcgaactagttcgacggagactctctcaggagactcatgtgggctactggcatgcctacatttcttgtatcctctagtttagccatcttaaagtttcttgatccactcttgcaagaaggtatataaaacacatcttctgcttgttcatttcctatatttttttcttttccgtctgcagccccagctaaaggatcaacatacttctgtggaaaattctcagagatactctcagaatcccaaggtgattctgagagtctccgtcgaactggg

SEQ ID NO: 460890 - DNA, 511 bp, Homo Sapiens
ggcctcagctcacccacaggtgaccactggaaaaaggtatcacaatattttacgttgccgattgctaaaattaatttaacttcaaaggaaactaattacaaatataaccccaaatgttcctccaagttctccctccctgtatatagctattagccagagagcaccagggttcaagctacaatttggccttccctctaaatagctttaaaattggaaggaaaaaaatagccctcgcctatatggagctggaatataattcacacacaattatacaacatagtcagggcacaacgttacctctgattaaaacaacagaaactcacctacaggagaaggtgatcttgtaatgaaatgatcaggatgcttcggctgggagctgaagctccccaccctcatctcagagctctctacctggctccctcctaggctaatttaaaaaatactacttcctcttaccctagggaaaaagccgcagccacaggggtgagccgtagagagtctccgtcgaact

SEQ ID NO: 460891 - DNA, 573 bp, Homo Sapiens
atgagccaccatgcctggctttgagcacttactttaaatctctcaagaaaattaaattaaatgaacaactgaagcagtaaatgttagttcacctgagtcaacccaaagaacttttagttaataaactttgcctggccagtcacctatgagttagccagcatccaggatggctcctcacctcctagcactcacaccctcaggtggtccccttgcatgtggtcccagggttggtctgtatgactgtcgagtgcagcagaggagatggcccatcatgtctgagatgagatcatgaaagactccagggcttctgtttggctgtctccctctctcacgactcactgtggggaagctgactgccacagttcaaggacactcagcagccctgggagaggcccatgtggagaaaaactgaaaactccagccaagcgtccggtggcaatcttctctgaagcagctcttccagctccagggaaggtttcacttggcggccacctcatgacagaccctgagccagaactaccctattaagcccctcctggatttctgatcctcagagagagtctccgtcgaact

SEQ ID NO: 460892 - DNA, 508 bp, Homo Sapiens
  misc_feature (21)..(21): n is a, c, g, or t
  misc_feature (31)..(31): n is a, c, g, or t
  misc_feature (197)..(197): n is a, c, g, or t
  misc_feature (347)..(347): n is a, c, g, or t
agttcgacggagactctccangctgctcaangcaacctacaatcccaggaagagaggggcacatgtgccaggcacttctgcgccaggcagagaagcccaggccaatgcaggagcttgccatctggcactggttgcacatggtgcttcctcagcaaagatccatcgccccagcaccaactctcctctctcagaagccntaggtttgtctccgaagagttctccagcccttcagtcgctcctgtcctcctccttccctcctctactgggactccagtgaaatctttctaaaatatgtaaccaatcatgtcattcctctgcttcagaccttttcacttgctcccggctgncctgggcatgatatctcaaattgctaatatggcattctttcatgaacctatactgcttcacttgcaccatatcaacttccataccactagattgaacaatctgagatttctggaataaactatgagtttatttgtctatctcgctctcaaagtattcattc

SEQ ID NO: 460893 - DNA, 484 bp, Homo Sapiens
ttaaccatgactttactttcatttgattagtaacaactttcatgttacatgtctccatatagagaacagaagagtactaatgaaacaaatttttttataaccaattacttttcttattgactactttcctacgcattaaaatgtatagctaatagcctatccaaattcaaaatacatataaacacttgattcagcagtcccactgaaaagaatttctctaagttttttaaaaagacccctaaagaggaaactgcttagaaagtcaccatacctcaaaatagatctgtatgtctaagtcaaagtttgcaaatacgatttcctattcagttttaataccatatctgatactcaggtatatataatttatcctactagcaatcctttcactagctatcacctagggacagcagtagccaaaagcagagaagcactgcctcagtgtttttcacaaaacacgactcactaggagagtctccgtcgaact

SEQ ID NO: 460894 - DNA, 601 bp, Homo Sapiens
  misc_feature (537)..(537): n is a, c, g, or t
  misc_feature (582)..(582): n is a, c, g, or t
ctctgtgatacttgctgatactgctggaaaggaatcatcaagttatccatccattcttgagcctgtcctgggtcctgttcaacaatgtcctgaacttcagaatccagctcatttagtttggaatgccatagatctaactcgtcccacattttcttttgaatttcttgagctttctcaatatttttgcttttctgctgcaacatcttttcaacattatgaagcccattgttaatttcttctatttttctcctcattgcatatgatggtgagctttttaagacttcattgctaatcttctcatctatgtcttctaaagcttttctgcattcttccacctgggattcaatctctgcagggactatggtgtacatttcggaatacttgattcgcagtttttccataatattctcaaaagttagtttccctttcttaaggatgctttgaagctcctcaaattgttctgacttttctgggtgatcctggaatgccatattttggaatgaagttgtggtctgttgaaagaaattcttcaaagcnattatctcttttgtgaaggaatgtctttcttggatttctctgcanccagtgtctttatttttcg

SEQ ID NO: 460895 - DNA, 643 bp, Homo Sapiens
aacgtaatttggtttccaagtcacataactgatgctttatttctgtttgcagaaattcgtgcaagagattcaatttctccttcacacattccttgtctgttaagctgtctctttccaaatctttgagccgcctgcggacatcgtcgggcagcgagatggccgggacggccaggaactccaccacaatcttgctgatgtagatcttctcctgcatcagcccaaatatgggcgcatactcgggtctgggatccatcagaatgtattcggcaaatgaggtgctgaagccgatgagggccttttcacctccatcaaagccagtgatccaccattcatttatggggccaagatttttgccattaacaccaccttcaagagacgggtcatcatcatagattggttttgctgaaccagaaaagaagagttcgatatttcttctcgatgagcgccggtgtcgatgggacacaggtgaccgtgcttacagtacacactgaagcaggtcagtttgtgctggggaagcgcctcataactctcaagccagactcgttggcatcaaagatggacagcttctcatttgtcagcatctgtggctcatccaccgcgtctgcttgagagtctccgtcgaactggggaacctctagagtct

SEQ ID NO: 460896 - DNA, 187 bp, Homo Sapiens
cacccaggcgcacttctggacagtcctgcaaaatcttttcagcatttgagtgaaatgcaatagccatttccaatctatgtactctctcttcagatgctattgtaaattgtttccatactctgttcagtcgaggaagtgtatccccaagatgaccgagaagtgcgcctgggtacggggatactctaga

SEQ ID NO: 460897 - DNA, 634 bp, Homo Sapiens
tccccgccccaggcgcacttctccaccagatgcagtcatctctgcgtcacacgtactgcaccgaatccacctcctctgctgtccatgctcacgatccagtggccaaggctatgggacttttccagcacaccacaaccctgactcccagaagccttcccgatacctttcacacccttctctctcacaccatgtgaaaacattctggggagcctctgcctctgaatcccctgcagaagtgcgcctgggtgcgcacccaggcgcacttctcacgcacgactcgctgctcgaggtgtgcgatgactacagcctcgacgacaacgagtacttctttgaccgccacccgggcgccttcacctccatcctcaacttctaccgcactgggcgactgcacatgatggaggagatgtgcgcgctcagcttcagccaagagctcgactactggggcatcgacgagatctacctggagtcctgctgccaggcccgctaccaccagaagaaagagcagatgaacgaggagctcaagcgtgaggccgagaccctacgggagcgggaaggcgaggagttcgataacacgtgctgcgcagagaagaggaaaaaactctgggacctactggagaagcccaattcctctgtg

SEQ ID NO: 460898 - DNA, 296 bp, Homo Sapiens
cacccaggcgcacttctggggccaccgaagtgaacaacctgcttccccagcctctatgcctagtcttctcttctcagagactgaaggcctccaggttgtggtactgactcaagctggccatttaatccttgagagtcctggagctgtctagatacctctcatgagtacgtgcacacaatattcaggtgtggcctgaataatgcagaatatcatgtctaggggtagcactctctatcccctccccaattgctggagaagtgcgcctagggtagcggggatactctctagagtctgac

SEQ ID NO: 460899 - DNA, 437 bp, Homo Sapiens
aaatcagaactcggggagcgagaacaatattcccaggctccccaaagacagggaaccaaatgagactgatggagcatcgtttgcagacaaattgaagctcttccccaacggcatagcacaaatgctgagagtctaccttgtgccattgctggttgcagatggaggttcaggtcccttgggctaacagattggactttaagagtcgccactgtgtaaggagctgctgctggaagcctcaggtgctggccaaagccactggtctgcaactcctctttcccatgagggttttgaagggctgatggggtggtgtccagagtgaaggatacaggaaggtcaaagacagaaccatccagggattctgctgttccactcccaggagataagatttgacttccagagttccggacacagaagtgcgcctgggtgcggggatcctt

SEQ ID NO: 460900 - DNA, 660 bp, Homo Sapiens
caacctactctctctctcctcggaatctgacctcaacgcacccctttctgttccacttcacttctcctcaattcgtacagcttgcagtgaccttccctagctacaaagagaaaactgtgttgggtttcatttgcaaaattctcaagtagaatccatcacaccttcagtcctgttctctaagggcccttttagcagtcacattattgccctcttattattggcagagagagtctgagtgaccttggatgaatctcaactgctttttgagcttaaccttgacagcccctcggtttcattacctaatgatttaggaatatcagactatctagaaaatcttttaagattacttccatttctaataacctgctcatattccttatctcagtgaaatgaccctaccaggtacttaaatcccaaaagtcacatggaaatcctctctctcactcatcctcatattcaaatgcacaaatgagttcctatgtaaccacgactgttgtctcatagtcctcctaatgtcccgttaaacctcagctctgtgaggcggagatcacttcacctacgttcaagttgcttccgggttaagcactttcagtagactttcacagagacttccggcattttactactgagtgtggattaacgtgggtgcctccatgaggt

SEQ ID NO: 460901 - DNA, 489 bp, Homo Sapiens
agttcgacggaggaactctctattaacttaaagatggcatatatacatgtaacttaacagatcagacaacaaacgtcaagctcattgttgctcaaactgccagttacacaaaattctttttatgtaattcatatccctattgattcaacatatccacacaggtttacgtgactttaggatgaaatatgtgtaactgccgagttgaataatgcatgcaaagaacacaggtagtttcgttaggtaggtatagacatgcagtctcttcattttccttctctatacaaatcatcatcacattgtcaatatttttgccagtcatcttactcaattctgtgttatcacctgacctcacctcgggatggtgtacatttctcattgtttcatcttttgagtccttgattattataagttaaatattttacttcacctctcaacatgaatgagttcaaatcacattcatgttgagagtctccgtcgaactgggtaccg

SEQ ID NO: 460902 - DNA, 345 bp, Homo Sapiens
caaaggagaaggagaagatagagagtgacctttctaggttttatggtttgctttagccaggagggtttctaggttctatgacccatcttgaggaagataaattctggtttctgtgactcactttggaggatgaaggcgagcagaagagagggtatgaggagaaggttggaaagaccttgcttctgagttccttccaatgtccttcagttcaaaatactcgggctgaggcactcatgctttggggtgtcatgttctaagccccgacagcataagggcagcgttgagacagccagttcggactctcgcttggtgtcccaggcgagagtctccgtcgaactgggtacc

SEQ ID NO: 460903 - DNA, 261 bp, Homo Sapiens
  misc_feature (65)..(77): n is a, c, g, or t
aaaggttcattattgctttctacctgctttgtcttaagcaggtagaaagccataatgaacctttnnnnnnnnnnnnngtttgagaggaaaatgtttcaaacttcgtctgaaagtcactttgtctgtgtccaagtaacaattgacgtcacgaagcacatacgtcttatgttgcctgcaggaccgtttgcaccttttctggccttttatccatttaataatccaaagaacagactttaagaaaagtagacttcaacgaatatt

SEQ ID NO: 460904 - DNA, 699 bp, Homo Sapiens
  misc_feature (322)..(432): n is a, c, g, or t
  misc_feature (447)..(557): n is a, c, g, or t
  misc_feature (580)..(580): n is a, c, g, or t
  misc_feature (594)..(594): n is a, c, g, or t
caaccatcaacgtccattcttggcccctttggtaagttcctctagagttctattaatcattaagtgcttgagtcacagaactatgcttttggcccaatgaaattcataaatgagcattaaagctgtcacatgatttgtgttgctggagtcacaacttccacctttggactgccaataaatgctatggtgctttcttcccaagtaaacaatgtattagtaacagcatattaagacaaataccagcttgtggacccgccccccgaccaatggcttgtgtacgatgcatcaaaagaggtagacgaggccaggcgcggtggctcannnnnnnnnnnnnnnnnnnnnnnnnnnnnnnnnnnnnnnnnnnnnnnnnnnnnnnnnnnnnnnnnnnnnnnnnnnnnnnnnnnnnnnnnnnnnnnnnnnnnnnnnnnnnnnattggctgggcgtgnnnnnnnnnnnnnnnnnnnnnnnnnnnnnnnnnnnnnnnnnnnnnnnnnnnnnnnnnnnnnnnnnnnnnnnnnnnnnnnnnnnnnnnnnnnnnnnnnnnnnnnnnnnnnnnagacacagctgagactccgtctncaaacatacaaacnaaaaagaggtagaggagacctagacccattacacagggtctgcagggcctcttcagctactgcccgtgctacggacaggcctgtgacgagagtctccgtcgaact

SEQ ID NO: 460905 - DNA, 561 bp, Homo Sapiens
atgagaacccgcagacgccagctttgcagtacctccacagcactgccggtctgggaacaggcccagtgcttgcaccagcgctggaggggcccaccgcagagtaaagacagagtctgccatgcaggagtgcttcgcaggtcaggcactgctctgagtgctttgtgttaacctgcctcccgccccctaacttgggaaaggtgttaaagaaggagagaacgccctcaatggtgtgtcctttgcatacacacctttgcatgcatctgatgtgcccaggctgtgttttattgttctagcaatttattgttacaaaacagattgctgccatcaatttgtctcaggtccttctagcacatctgacagggactagtgtctagagccatgaggacagagaccagaagggacaagaaggagtgggcggagggaatggaaggtagagttaggcccagagagccccaggctgctgcccagacctccacgcctgtgccggatgtggtgttggcatccatagcgtctcgcaaagttgttctcattttccaaataaggatctgagcccggagatct

SEQ ID NO: 460906 - DNA, 513 bp, Homo Sapiens
agttcgacggagactctctgagattggctcctcatcctcctgctgacagccaggtctcagagaggcaagtcccacacttcccaaactctggatccgagctctgccgccgccggaggaaaggcttctaactggttaggaagcacagaacttgcctggccttcaccagcattatcagatctgtcattctctttaggaactggctctgctctaggccttgttctttgctccagaggtaacaattgccatttttctttggtatttctgctgtagtgatcgtacttgcccttctcataggaaaccatgggaatcagcccaagtcacagctggcttccagatggctcttgatcctgtgacaccaccaacattccaatgctgatttgcttgggaggttcaaacttggcttgccggggcaccatgcttctggaaccccaccctgggagatttataggcagggcttggagagtctccgtcgaactagttcgaaggagactctcggatgaccatgttgtagct

SEQ ID NO: 460907 - DNA, 415 bp, Homo Sapiens
  misc_feature (294)..(294): n is a, c, g, or t
ccagttcgacggagactctcttaacattccctacattaagaaagggaatgttaagagagaatggaattgggtgggaaagatcataaatctggctatagttttccaagtgaagatgtcaagtagggaggtggggatgtatgtatgagccatacatatgaaataggtcacctaagggatgttacatagacaaaataataagatggcctgcaaccaagcttattatttaatagctagtaggaaggggtaaacctgcaaaggggacagagaagaaataggtgaaaaggaagaaaaccnataaggttttcagtgttttggaagccacagtaagagagtgtttcaagaaggggagggaatggtcaaatgccaatactgctaagaaagagatactgaccagatgagagttctccgtcgaact

SEQ ID NO: 460908 - DNA, 488 bp, Homo Sapiens
agttcgacggagactctctccattctttctagtagttgggaaaggttctgttggaattatatgcaaatgaagggggcgagctgtgagctgactgaaagctggagtcagttcaaaccagttttggaagagggatactctggcgaagatataaagtccaagtctggctcctagacatggcccactacccaagcgacggacatcccctcagatggcccactgcccctggttcgtaccagagaaagaagaatatagtcattctgttgaccttgaaatctatcaacagttgtcaccttgtttggtcttccaatcaatggattgtttccacatcgtctattgatgatgtcgcgaataagatgcttttggccattatatgttgttagaatactgattttgtcagcagggtaaccaagtaaacacatgtacataaaaagtgctactacatattctgcctctccaagattctgatagaagtaaggattaggttcaga

SEQ ID NO: 460909 - DNA, 592 bp, Homo Sapiens
agagggaagagaaagtctttattcacagcttcatggagacctgctcaggtgaggtctcagttttaccactctaattctaccgtaatataaataataatgtgtttgtgcttacaactgcttaaggttttaaaacggaatgaggaagacagtattcgggctagaataatagtgattgacaaagaaaacatcaaatacagaaggttaactctcagaatacaaaatctgctgacagacaataataatgtttttgtacccagttagagaactagttatcaacatctattgtttgaattcaaatgccgatatttacagaatatctaacactccaaaagtaaaataggattaacgagaacaaagaaaggcgccacaaatccttgaggttttcatctttaaagtgatgtatcctgttacttataaatgtaatttgtgaggctttttaacttcccattgttttagatgtcaaaatgtgaaatgactaacttcctaatcaagcagacattttccaagtcgttaaaagaagaatcccagtgattgagctctcaagaagaacctgaaaccgaaaggcttcttcttgagagtcctccgtcgaact

SEQ ID NO: 460910 - DNA, 377 bp, Homo Sapiens
gctgtcgcattgcacctggcagaatgttcctgttgttggagaaagttccatcggacaacgtgggccagggcagtgggcgtgtgtattttacttgactttggccttaggacctttggcagtattatagtagaaaaatgaagtgctgtgcggtgcttacagacgcatgcgcgtgatttctactctttttcccacaaagtgtagagtccaggagacttgaatatggaagccagtttggagcctctcctcactcctggccttcctatggaaggagcttattcaagggaaagagcttattcaagctgctctttccccacccccaggtgtgacccacagagtgaggagagtctccgtcgaactggggatcctcagagtcatcc

SEQ ID NO: 460911 - DNA, 400 bp, Homo Sapiens
agttcgacggagactctctatggggtctgtttttcagatcccatagagagtttcttcctgagctggactctttcttttggtcaaacaaaacgttctttgggaccaaagagaatgctttctaccctggaaaattagggggagcactgaggaactcttatcctgatgacctctcagccaggagaaaatctcatagtgaacctatgattcagagattcacatgtaaaaggaaccttcataatatggaccccattggttcaaagtttgagtttgaattgaaagccaggcttacactgatgcccaacctgtttatacaattagtgttgcccagcctgggcaatgtagcaagaccctgtttctttaaaaacattttaaaaaattagggccgggtgcggtggctcat

SEQ ID NO: 460912 - DNA, 569 bp, Homo Sapiens
  misc_feature (296)..(306): n is a, c, g, or t
  misc_feature (466)..(467): n is a, c, g, or t
  misc_feature (479)..(479): n is a, c, g, or t
ctagaggatccccagttcgacggagactctctaaggaaatagaggcaccagcactctctgtaatttttagtaaaagactcctatctgagggaatctgggattccccccaaaaggatctcagtttgatcaccctaccatgaaggtccaccagtcctaccccagaattccaaacacctgtccgtctttagttccctagtcttgaagtttgagcagagtcacatattacccgagaattcgaggatagtatctccgagaagccgggaaaaaactcagttaagagagaagggatgcttttnnnnnnnnnnnggaggtcttagacgtaaatttctcttacctgaaagtcatgagcttcgagactgaaaaggcctagcaagtgtccaggacagtggatcaaagtggacctataccatgatacatctcagtgaagtttcaggacacttgaaagaaagaaaaggtaaagcttccnntgccaaaagcanaaacatgttttgtataaaagatttaagaatcagaatggcatcagactctccaactgcaaagacgagcagtggagagtcctccgtcgaact

SEQ ID NO: 460913 - DNA, 557 bp, Homo Sapiens
  misc_feature (14)..(14): n is a, c, g, or t
  misc_feature (34)..(34): n is a, c, g, or t
  misc_feature (485)..(485): n is a, c, g, or t
agttcgacggaganctctcagaagagcgtagcanggaagagctctggtcagatggcaggacgggccagtgcaatgattgcgagggccccaacaatcaagaccaggaggttctgctgtgtggtgagcacattgtcagcctgaacggggagtgggacagaggtgtatgggggtacagggtagatgagtgtcccctccctgcagcagggctctgtttgtcctaccattgaacaactcggtgggttttccccactctgatcagcccaggactctgcttgctagctgggttgcaaaagctcctggacccttttcttctcaaaccaattatctcttcctgggctttgcgtttgctctagggctcttctcattcttggatgctctagctgtgctctgtccctggaggcttcccgagactcatgagtatcagctcctgacatgattctccttcactgtcttttttattagggtttcatgcagactctcatgcnacctgccgtcggaagatctgaactttcttctaggacacctaatatccacagtactccaggtgggtcctaagg

SEQ ID NO: 460914 - DNA, 535 bp, Homo Sapiens
  misc_feature (162)..(174): n is a, c, g, or t
acggttggctcccccaactaagaacggccatgcacccatagtcccagatactcaggagtatgagaaggaggattctcttaagacccggagtttgactctgccgtgagctatgattgctcccctgcactcccgtctgggtgacgaagcccgaccccatctccnnnnnnnnnnnnnttctttgagaaccaaagtatctgtattattgaaaataaaggctattgttggtcccattaacccatgagctgaacatatgaacatgtattgatatacctcaaaatacacacagtaggactctttttttcctgttttgcaacagaataacatttcagtcactaggactcttgattcccactcttcttaatcatcatttccatctactgtctgcattttctctatcccttgtccatcctgcctttgcatacacataggcaagagcagggattttctcactgaatccctctcaatcttatttactacttaggtgaggaataccagtcataataggacctcaggaaccagccaaccgtggactagt

SEQ ID NO: 460915 - DNA, 249 bp, Homo Sapiens
  misc_feature (221)..(221): n is a, c, g, or t
tcggtacccactagtccacggttggctgcctgggcagagaaccaagtaggtcattgtatatcatatgactctgctgaggcttagtgccttgggagtagatgctgccacagaactgattctctgggaaggtggggtttctctgaagctcagacataaaaacaggggccgtggtcctctggaatagcggtggctagaagctttgctggctagagggaaacgcnaggagctgtctagccaaccgtgactagt

SEQ ID NO: 460916 - DNA, 374 bp, Homo Sapiens
taccccctagtccccggttggctaattgttttttgagattgtatcccggcttcagtcagattgctgcaccctcctcacttccaccttagcctgcacatccaagccgtcccccctagtaaaattcttttagaaataggcatgacctttttccttctcagaccttttttgaaagcttcttcctaagcccacacctgaggccttcttctcatctggacccacacctgttacacttttgatatttttgactcatagttatttttgagaagccagattcttacactcctgttgtttccctgacccttccccaatctgctgcacgccggactaaggtggcttttcccaactcctgcccaactagccaacacgtgactagt

SEQ ID NO: 460917 - DNA, 110 bp, Homo Sapiens
aaggaaatttctaggagagcaactaccgaacgtttaaaaattatcttgctatctattgccagattgttttgcaaagactgtctgtttatactagccaaccgtggactagt

SEQ ID NO: 460918 - DNA, 197 bp, Homo Sapiens
cttattcttacagacgagaaaagggagatggtacctttagagctgtgtactttaagattctgtctctaaaatgtactgtgcttgcatcatttatttagcagagtatatccaatggaatttcatgtctggccttatcagtatagtccatgtactgataagccaaccgtggactagtggggatcctcagatcgacctct

SEQ ID NO: 460919 - DNA, 935 bp, Homo Sapiens
  misc_feature (694)..(837): n is a, c, g, or t
cagcaggtatagcccatagcctgaatgtcttcctggtccctccctatccttgttgggggaaaactaagcattagtcttgctcgactcaaggacttgcttcacacaggtgtaggtagagacttcataagaacacataaactcaaagcctccagattcaagcaagccaaattcaaacacttgaaggaaaatatgttaaccagctagctgtggaggaatacaagccctatgtgaaaccaagaaaggaaagatatatcttatttaaaaggaatcaacctgttagaaaaagcagaatacaaccaagcccggtaagcaagacctctagctctacagagaagtcctcagccctaagggcaatgtggacagaatggtgcagatctacagacctggtgctttcactgtggaaatgcctcacacgctgcctggtggtggagtcctggataaggactctggggcagatcacattcctgacacagaaatgaaacacagtagtactgcttggtgtcatgtcccctatccaccagaaatctcaggcagatacaaacagattcgtgaatgaatattaaagttctagagataatatcaacatccagaagagaaaaagcagctcagaacacaagactgagcctaattagcagagaaccagtcagcaaaatgaaaccatggctaaaatttatataatgtgggcttttgattnnnnnnnnnnnnnnnnnnnnnnnnnnnnnnnnnnnnnnnnnnnnnnnnnnnnnnnnnnnnnnnnnnnnnnnnnnnnnnnnnnnnnnnnnnnnnnnnnnnnnnnnnnnnnnnnnnnnnnnnnnnnnnnnnnnnnnnnnnnnnnnnaccaggaatccacccgttcccacgtccatgttcttaaccctaagctctactttccctgacagaaccttgtatgacaggtagagctgtggcaatcgata

SEQ ID NO: 460920 - DNA, 528 bp, Homo Sapiens
  misc_feature (141)..(182): n is a, c, g, or t
gggtttatcgatgccacctattgctttgaaacctagaacaggtgtgctaaaaagacaggtatagtgtccaggtttcaatggactgggaaaggaagcctttggcaaggcccctggttagatcaagaacagcacaaaatcacnnnnnnnnnnnnnnnnnnnnnnnnnnnnnnnnnnnnnnnnnntgtgtgtgtgtgtctgtgtgtgtctgtgaagagagaggggttaacaaaggcagagggacagatataccaagaaggggctgagagaaaagtgctcaagaaagaggttggggtctctgaggaccgaatcaatatcccatttgctacactatgtgtataccacctatgccaccatttcaatacacatctggcaatagagtgtgtgttaatattatcagacattagtaaacttttcaaagcttcccaaattatctaattggattagcctataaactaaacaaaattggctcaagatgtaattgtttcgaaaggagtgagatgagtgaattaaagtgagatcgataaacag

SEQ ID NO: 460921 - DNA, 323 bp, Homo Sapiens
tgcttatcgatgccaccggctatagatattggtgaaaatcagaacatgggtgatagagaagcagtcccatcacaagggatgccacacagtggtagctacagccatctcccaccctctctgccttcctaacacaatttattctctcatcatcgctgtgagtctcccactgcaggaggaagcttcagggagttatgggaaagattgtatgagttatagaagggttttaagtggagccagaaatctatcaagtttagaataacatttttgctctgttttatctttaggctggagatggagtgttctagtggcttcgataagagact

SEQ ID NO: 460922 - DNA, 233 bp, Homo Sapiens
  misc_feature (83)..(100): n is a, c, g, or t
aacccgggaggccgaggttaccgtgagcccagatggggcccccgcactcccgactgggccaccaaagcggaaccctatttccnnnnnnnnnnnnnnnnnngctttgagtgctctgcatgcatatcatggttcgtggtgattagacaagcatatgcagaatcagacacttaacctggtgtgctatttactccccaccatcatgttgatcgcatgattggtggcatcgataaaca

SEQ ID NO: 460923 - DNA, 570 bp, Homo Sapiens
agctttaaaattttattgaaattcaagtttagaatttaacaaattaatacaatattacactgaatactttctaaccagtagtttagctttacataatttctaggcataacttttaagaactgatactttctggttaattttccatgatatgccaattatacattcattaaaatttcagatgctacctgaattattcttatctcaatgacagaatttaaaaaaataagttcaaatactgaaaatctaagacattaacactggggcccttgtaatatagaaaagaagaaaaattgtacaatcttaactgtttaaaactcttaacgtttactgtagtaacagaatatgaatttgtaacataaccatatgaatttctcaagttatttcctactgatgcatgtctgaagttataaaaatctcttttaaacgaacctatactgaattactccaaaaataacagtgatattttaggggccttgcaaatttattctagtgcatattttaagtacctaaagtacagcctgtgcactagcaggttactgaaaagaataagtgtggcttcctagtgccgaa

SEQ ID NO: 460924 - DNA, 480 bp, Homo Sapiens
  misc_feature (262)..(262): n is a, c, g, or t
gtgtttatcgatgccacagttcccttttaacaagatcctcaggtggtttgcatgcatgttaaagtttgaggagcattggtagagggaactgtggctatttattttattggccatgtgcagacaagggagaaggcgcccatcctataagcccaaggagagaggcctcagaatgcgatcgaccctgcccagcaccttgatcttggactcccatctccccgaactgtcgaggaaatacatttctgttatttaagcccactcagtnccgtggtactttgttatggcaacccgagcaaaccactatagtgacctgaaatggttttgaatatgctcagtaaaagcaagccaaaagcctagttgatttcatctgccaaaccaacgggctagataaacactttttataagacaggaagaatgttgtcgaatcatatctggcattgcgtggaggtgtgaggaaatggtgtcatgactcttcacatcaca

SEQ ID NO: 460925 - DNA, 360 bp, Homo Sapiens
tcggtacccggtgtttatcgatgccccctcccaccttctgggctcctgggcaggggtggggagtggctttcttgagcagctgggatcattcattgactgatttttggataaatgaggtgttagtggaccttgattcggaagattgtgaaagaggataatgggaaggcctggcaccccacggtcctcagatgtcagtgtttgccagccccgcagaaagggcaaggtgggcgagagggccttccattacccagcgagggctgcgcctgagccccgcgagttcccctggcttggattagggggagcccaaagtgttctcactctcaccaccaagtgctttgtgcctgtggcatcgataaaccc

SEQ ID NO: 460926 - DNA, 119 bp, Homo Sapiens
atagagaccggatttcactccacaggtattgacttagtgtattacatgaccataggcactaactgctggccactcctgtcaacctcaagtgaggtatcaggagtggcatcgataaaccc

SEQ ID NO: 460927 - DNA, 262 bp, Homo Sapiens
agctcggtacccggtgtttatcgatgccacatgtgcaaatatcctaagaggaaatgcacatgtggcatatcaggaaagccacaaggagactggtgcagctggactcaattcatatcccctcacctctaaccgctgtttaaaatatgtagcttttaaacttcagcttctgatttacctagctcttctactgttctaggcagagtctcttattcatgccacatttttcagcttttacaccttttatattcagtggcatcgataa

SEQ ID NO: 460928 - DNA, 402 bp, Homo Sapiens
  misc_feature (307)..(341): n is a, c, g, or t
attcggcactagggaaaatttcactctgtactagaaaatgtagatgatgtgagtcaaagttcattaatatttacctgaaaatttgtgtataaaggtaaccttggggcagtttattttgcttagacccctcagcttcttgatagagtgaggtgagggcatatgtaagtcagtaaactattctgttagtaaagtcaaaggcgtaatctaaattaattatgcttttaactaacacagaagaaatcatgtgacctcattctcaaagctcgtaacatccacctggccaatcttaagatgtggatagagttcnnnnnnnnnnnnnnnnnnnnnnnnnnnnnnnnnnngacacattgaagctgtgcatgtttatggggggcacaattttgatgtttccaatacatgtat

SEQ ID NO: 460929 - DNA, 383 bp, Homo Sapiens
tgtttatcgatgccacccaataaagttcaccatttttattcatttaatccaacttcccaatcatccaaaacaattttaacagataccgtgttagatggtagaccgcatttgaaatcctgatcctaaagttcaccgaatgtgctttggatgaaaatagaaccgttttaacagccacatgtaaaaagtcatcccacgaggtccaatccgtgactaagccatctaaatacatctatccgttttctcatctaaatgggataccatttaagaactactgcatgttcaaggaatagtttcctgccacaaagaactgttagtagaacaatattatgctagaaaaagaattttttaatttaatgtaagttctttgtggcatcgatagaccc

SEQ ID NO: 460930 - DNA, 573 bp, Homo Sapiens
  misc_feature (32)..(32): n is a, c, g, or t
ctctagaatggtttattcctttattatcactncaatagagagtccctgagtcactggaggttctctctgtgtgcgagtgtataaataaagatttaattttgttttgctcttttgttttcccctcggaatagtttatccgatgaggaatttcttgatccctggggagaaatatcttaccattctgaaaacacactgtcaaaatgcttttcataaaatgtagcacattttagggtttctcccttgtgtggaaatgttagtgtctataaaggtctgaactaagaaagcttctctcaagccacaacacatgtgaggttcctctgctgaatgaatcttttggtgctcagtaagttgtgatttccaagcaaagtgtttttcaccctgagaaattggtgaggtatctttctctcagagtcttttttatgaagtctgatgttgagaggttcttcccggttggagttctcaggtctgtcttccttgtagattatccgagtgggtcgataatctaccagctttgctaaacctacctgtagctcttctggggcagcggtcatgtggtggtggcatcgatgaccc

SEQ ID NO: 460931 - DNA, 476 bp, Homo Sapiens
gccccattgtgtaactggggaccttaatggtttagtttctgtactccttcagtgttactgtaaaacttcccagcctttgttgagacactacatagctaggtcttgttgctttaccaccttgggatgtagccgtccaccttcagcataggtccaaattcttaggccgggttgtatagggtaattaccccggaggctttctaaagctgaagtctgtattaccctccacctcccgtgtagtctatccgtataaagagtgtagtttatcacatattataaacttgatatttatatccagtattataaacttgataacttcagttcctaaagtattccaaatattttttgattagttgaccaccgttaagaactctgagtatgcttgtacacattgtgaatatacttaatgccactgaattatacacttaaaaatggttagaaagaggaattttatgttctgtaattcagtggcatcgata

SEQ ID NO: 460932 - DNA, 1116 bp, Homo Sapiens
  misc_feature (1081)..(1081): n is a, c, g, or t
  misc_feature (1085)..(1085): n is a, c, g, or t
ggttatcgatgccacctaacagtatcaaaatcccctcttccctggaacagcctctgaattgcctacacacattccagaactatgacttggtcacacccactcccaggaccagtcaagagtcttgggaacctctctgctacaccgataaatccatggcttccccacttgagagggctcccagtgggtcactgcccaagataaactcagcttccagcatagagaaataaaagctgactcattggttgtgatgtctcctgataccatgtgtaggaagtgaactgtctgaccaggcagttctggactcctccagaacccgcttcctgcaaccacacatcacgcaggtaacattatcccgtgtgacccacgcccacaggcaggcccggatgcaggcacagctaagactggccataacctatcgagagtcctggccaatcagctgtgacctgctgtccaagtgcattgtgaccccaggtcggaatgagttctttatgcagacataatgagcagtcctggctggagcctcctgtgcccccaccacaccaagcacttctgcgaggcccgcccatgtcttctggctgcctcctgagtgtgcttcacccaccctggcctggtcttcccttccacctccacctttcctttgcttcttttcccccccagggtcagagcctctaagcctccccccaatcatttggtcaaatgttaggctcccaaagagggttaccctaaagagggcaagactccagccccacagaactgggctccgagcccctggccaagaagccagaaggcacataacccctctgtccattcacttccacccaggctccactcagggttccccttcttgtcctgggcctccaggatggtcacaggctggcctgcctgcaggctcacttcatggctgcttctggccacaaaagggtacgcggctatgacctggttcacggtgggaatagagggcactagagctgggctgggcttccggtgttagacatcgggggtctttgttcagccccgcctgccttctgagctcctctgcactggggaccacatggtacagctgcagtttcccagccggcanatanccacgatgtcccccggtgtccagccagccag

SEQ ID NO: 460933 - DNA, 207 bp, Homo Sapiens
  misc_feature (189)..(189): n is a, c, g, or t
gaggatacgagtgtcggtgagatacgatgtcggtgaggatcaggatgtcggtgaggatcacgatgtccgtgaggatcacgatgtccgtgaggatcacgatgtccgtgaggatcacgatgtccgtgaggatcacgatgtccgtgaggaaaaattacctgtcttgactgccatgtgttcatctctaagtanttgtaagctgctatgtat

SEQ ID NO: 460934 - DNA, 998 bp, Homo Sapiens
  misc_feature (14)..(14): n is a, c, g, or t
tggcatgtgaatgnccagcatttgctgctaaattgaagtagtcaaatgctctctgatgattctgttctactccacgccctccgtgcaggtgcagttgtccaagaccaacctgtgcttgtacatcacctttttcagctaggaactggtaatattgaatcaaatcttcttctagcattccactgttcattcctggattttccacttcatcaggcagccgtattctctgtactactgagcctcctgttagcgagatatcactagcaacatgattggcaacaagacgatagtgagtcagggcagattcacaactctggaggacgccgatgccagcccagtatctgtaacccaaaaccatgtgggctattagattgcccccaagagctccaaatgtattatatacaagagcctttgcctgacttgaattaacaccaagtccagaggcatacagaaagccaagagcagtctgtcccttgggagagccttcctcagtcagcttctccaacatctctctcgctgcctggatattctgtggcaagtaatcaccagataaaagagcatatgacactctctccagggctttggtatggttcatgcttgctgccttttggagataccgatatgcttctcttttttggcttttcttattgcttccattaaggattttcattccagtttgatacatcatttctgcttcctgcatctgccgtctcttagcagcctcttcttcagtttcaccaaagccccccttttcatctgctttgtagtcataggttgtagcacaccacagtctgccatcttccctcccatctgatgtacattcatcatactccttatctaggaaaagaaaagggaagtggcagggctccccatgtgctgtgccttcaatggcggtcaaagctggtttccgtactttctttggctcttcatagtccttgttttctgatttggagacttctagaaagtacggacatcgtgatcctcgggatcctctagatcga

SEQ ID NO: 460935 - DNA, 166 bp, Homo Sapiens
aaccctttctcttggaatgggtgaggagatggggtgagggtagcacctcagagattttccaagtaactacaggagttgtgattcattttctctcatgggaatgacacatgtctcggttcctccttctttcttctcaagaaacaacatcaaacttctgggtacttgc

SEQ ID NO: 460936 - DNA, 638 bp, Homo Sapiens
  misc_feature (560)..(581): n is a, c, g, or t
tcgtgaacgtgtatcccgccgcttcttcccgggagtccggtggcctccaggagggaaaaagggggggtgttaagacgagatttggttagactcagattctggtggtctgaaagtccgaaggatcgttgtgttttcttggtatcgtttagtcttttctgttagtttgtggttgtgttttagagaggtgtgaaaaaatgcatacttaggcaaaacccgcgtggtgaaacatcttcgatttgaattcactttctgccgggaaagctgctgcataggcaaagtgtcctttccaacgcttagggccttgggccccaagaccccgaagtcaaagcgatcccggctgtgttgggataatttgttccacattttatccgggggcagtccccagcagaccccatccccgacctgcactagtcctgcgctctgatgcttcttcactgtccacccttgaggtttattttgaagccaaaagaaaaagacagctgggcatgttgatgtctgctgactatgccacaggttgaggggagaggcgatctcaacactccccccgcaacaacatcaannnnnnnnnnnnnnnnnnnnnnaacgtttgagtggggccagaggggcctggcgccaggggtgaacgcgatccaacagag

SEQ ID NO: 460937 - DNA, 717 bp, Homo Sapiens
ctccctcgtcttacgcgccagtccaacttcagcctcagtcactttagagatcccctcgcgaacgtgttatcttgagagactttctccaagataatctctcaaggataacctattttccatcattataattagtaaaaattagaaattttagaaagtcaattggaagccctgtcctgccagtttcttaaatcacaatgtggcctttgtacgattttacttggattttctttttggaatctgttgactgcttggatataaaatgtggggttttgacaaatttttgcaagttttcagctattagttgttacttttgcaccccatttaatttttctgtcccttcactctttctaggacacaatctgcccacagattgtaagactctgttcattttcttcaaactttttgactctttttttccagattgaataatttcaattgttctgtctttttctaatctatgaatcaacctaaaagtactatttaaaatttcattatctttctatttggttctttttaataatgtgcatttctctgctgagattccacatgtattcattcattatgagaattttttttcttcaccccatgactatagttttaatagctgctctcaaatacttgactgctgataacaacatcttggacattttggggatagcttttaatgcctatgttttatcttgtgtatggatacacgtccgaggtaccggctcgatc

SEQ ID NO: 460938 - DNA, 368 bp, Homo Sapiens
gtcgcgaacgtgttatccagggggtagggagcagatgacaaggagaagcttctctaaagcaatagcatggctcttaagctgggctcacaactgacacactcacttctgcccacatataattggccaaaacaagtcacatggccaagtccaaagtcaaagcataagaaagtacccttcacccataatgagtccatggtaagaagatagatgcagggaagactgaaaacactgaggcataaaattaaactaccataatgtctactacagcaaacgtcacacattcaatagagattcatgggatgaatgaataaatagaacccaaaacattcagagtaaatctcaaagttggtggaaataaaatatgcctt

SEQ ID NO: 460939 - DNA, 450 bp, Homo Sapiens
cgacgtgtttccgcactgatgaccaatatccaagtagctacttcacatcgtgtcggaagctgtgtcatcagtgaggaaaacatctgcttaaattacaggaatttttgtcttatacagctctgaaaattctgccatttccttattaactagcagctttagtttgtagtttatgaaatcttgaggggctcttttactgggatttcttattttttggttttttcccgcttaatttggtgggaggtcaaattgaatataacccaataaaggcttcttaatgacaaaattggcatgtttgcatgatgaaatggaaatgaacagtattgcaatgtccggtatacaaaataacattaattcaatgtagatcaaattacactagtttaaaatatgtgcattcacttgtatttgttagtgttttagtctttttcgaccgatgtgctctgttaatgttgc

SEQ ID NO: 460940 - DNA, 311 bp, Homo Sapiens
  misc_feature (55)..(67): n is a, c, g, or t
gttggcccccttcccgaatacccttagagtccaaaatttaaaccgggggcacacnnnnnnnnnnnnngaaagacaagctagagatacacactgagccctagagcaccactgcctcctaggaagggaactcaagggagactccagagtttggtcacgtctccagtctgccactgactagctgttttgactccctctgagcaccagatttctcagctttaaaaatgcaggattaaattagttgttatccttaggtaccttcctatttttaaattacgcatggtaacctaaggatacacgtccgcgagggtccg

SEQ ID NO: 460941 - DNA, 624 bp, Homo Sapiens
acaaacactggtgtccttaggcttgtagagattttctatttgctaaagttgatactctttttttgaagaacctagtctttattcagccaactacacacagctcttattaaaggttctgaattatgctgtaagaatgttggttttgagggcaggatggattggaatgagagaaaattccttctgtgggccatactttgcttcacttccccatgcctaactcccccaaatctaagaccactcctttaaggatgggcctgagagtgtaacccccagttttattctttcacccactcttcagctagcatcatacagggccaatttttccacgatatgagaaatattttcccatagttggaggaacgctcaccatgttgtaattttcgtctaaaaatacaaattcttactccacagacctgtttcaaagccctgttcttctcccttctctgcctagctaggggagggatggagctctcaagaggtactgctcactctggtccaccagccagtgctgatgaggtcaatgtagagttcagagtcaccctttggactgttatatcatgtgatagtatctgttgaatctaatggaacctacgatgcatattttgtagtcgtgtaaagtgtgtg

SEQ ID NO: 460942 - DNA, 804 bp, Homo Sapiens
  misc_feature (653)..(750): n is a, c, g, or t
ttttcagataactagtacagtggaagaactaggataacagtgacttacatttattaagaggttctaagaacttaccatatttaaatctcataatggctgtgaagtaggtgggattattagtttccatattacagatgaggctgttttctagctgtcattctacttcctctgtctatgatgttcttctcccttttatctttccctgcttggaggcttttataaagatattctcctgagtcttcttaatagctttaaagttttaaagtatttcagaagtgggtcttgggtatatctggaattaattttatatatagtataagataggaatctagttctatttttccccatatatggaaagacatttatttcaacacttaatttttggtcatttctattcttctgcaacttctgcagctatgagatttgtttcagattctctgttttctttgagttctgcttccctgaagcaatatggctgttttgtgtttgagactggggtttctttctctctgtcacctaggctcgagtgcagggcatgatcacggctcactgctgctcgacctctcaggctcaagtgatcttcccacctcagcctcccaagtagctgggaccgcaggtgcacaccatcatgcctggctaatttttaaattttnnnnnnnnnnnnnnnnnnnnnnnnnnnnnnnnnnnnnnnnnnnnnnnnnnnnnnnnnnnnnnnnnnnnnnnnnnnnnnnnnnnnnnnnnnnnnnnnnntgagccaccacaccatgattgcattcctggataacacgttcgcgagggggatcc

SEQ ID NO: 460943 - DNA, 513 bp, Homo Sapiens
acagtaattaagaggttctaagaacttaccagtatttggatctcataattgctgtgaagtaggtgggattattagtttccatattacagatgaggctgttttctagctgtcattctacttcctctgtctatgatgttcttctcccttttatctttccctgctttgaggcttttataaagatattctcctgagtcttcttaatagctttaaagttttaaagtatttcagaagtgggtctttggtatatctggaattaattttatatatagtataagataggaatctagttctatttttccccatatatggaaagacatttatttcaacacttaattttttgtcatttctattcttctgcaacttctgcagctatgagatttgtttcagattctctgttttctttgagttctgcttccctgaaccaatatggctgttttgtttcgtatcgtttcgtttttgagactggggtttctttctctctgtcagctaggctcgaagtgcaggggaatgatc

SEQ ID NO: 460944 - DNA, 522 bp, Homo Sapiens
atgatagaatcgagctcggtacctggaacgtgttatccaaagcccaaggacaagattttcaccaggactgggcttggatacatatacgttccataacaatacctcgaaggaggcatgtgtttacatggcctagtgattttctctggttgcttttgtggaattcagatgctgattttatcagtgactaaccatgacatgtggggacattgtaagataattggtaagttttggaaaatctcacagtggctgggtaattcgatttcctttttgtgcaggatttggggatgagaatggcattcttttcttcttcttctaaaagctggaatcttgctatgttgccctggctggactcgaactcctgtgctcaagcagtcttcctgccttggcctctgagtagctagaactataggagcataccactgctcctggtgaaagtggccaggagttgaaataacagaaattttgttggcagagtgatttgtgctgtctctagcaggataacacgttcgcgagggggatcct

SEQ ID NO: 460945 - DNA, 309 bp, Homo Sapiens
  misc_feature (45)..(45): n is a, c, g, or t
ccccctcgcgaacgtgttatccatgatgccaggtactgtcctagncattatggatataaacagtaatgtgctgtgttggaaattagtggatggagaaccagagagatgccaggagaccagttagttgggagatgactgtagttagagatggtggtagcttcaaaggtagtggaatgagataagtggaaataattgagtagctggagtcaactggactggagatggattggaaatggagggcatgagaaggggtgaagttaaggatcacacttcagctgggcacagtggctcatgcctgtaatcccagca

SEQ ID NO: 460946 - DNA, 654 bp, Homo Sapiens
ccgagctggtaccctcgcgaacgtgtatccagctggccatagcggccggtgtcagaaattatatttcctctaattggctaaagggaccattttcttaatagtttctttcttttatagggccacgtgctatattccatttatatacacattctggaacacagtattccagagcatgttaattgttcagagataatggacctaacaaatagaatggtgcggttaaggagaaatccagttgcatggaggtcctttgtctttggtgtggcttgaagaggttgaggatgctgatgtgttctttgggaagagattcacagttgacaggaaacatctgctttaatttgctccaacatcaacaagatcgatgtggtaggaaacctgttgttactatgtgagttccatttatcaaggcagggcttggcctgaaatcagggctatttggacaggtaccacaatgggtcaaaatatggacataacaaagcagcattacttgagagtatcgtgtggctgtttctctatttaaagggagtcatgttccttctatacctgtctggctatcttcatttctttctatgtctttctcgttatgtttttctttctcagcacatttccattcagggcctcaattacgagtgtcacagttctcaccctaaattt

SEQ ID NO: 460947 - DNA, 651 bp, Homo Sapiens
  misc_feature (147)..(150): n is a, c, g, or t
tcgcgacgtgtatccattaaatcatatttgaacagaagtataattaggtatcctctagtttttactgccccttttagataaaagcaggttatttttgttttgattctagtcatgtgaatgaaagttccctcacttaaatatgtaatnnnnacacacacacacagagtactagactaggggtacagtggtgaacagacaaataaggtccttgttttcatatggttctcagaagggaagtgtaaacaactactctgtagaaaagggttttcaggcacttagagcttcaatcttcttgtctggtcgtaaaaatcagacaatctgtaataatgtggattgtttaaccttacgagtcttctaacaagtaatcagagtacccaaacaggcttataaatgtaaaaaacaatcaaactaaccaaaaagagtacattacaaatgaggccatttcattccttccttcattctaagttcgaatgaatttatcagctaacaatcctccgtttctaggaaccttccaagatttgtcttaatagccaaagaacaacattgattttcccttaacccttttgtcccaattgtccacagacagaactgaagtccttcctagggacctacttctcagttacccccaggatccctgggggatacactccc

SEQ ID NO: 460948 - DNA, 496 bp, Homo Sapiens
atcatattccaaaggttaccctctggcataaggattctcacgcttcgaacagaggagaaatttcccatgtacattacactcagcagggtaccttacaaaggagcttctattactaataataaattctgaaatattatccaaattcattccagatgcgtcacagttgccaggtatattgcttgatcgaacggggttagtgtcaagagaaaatgtttcacctaatacaccatttctgtccatagtcagtgtcctattgttgacaaaatcatgttgctgcagatgctgctcgttgattttcctgtctcttctccatcaggtcatcatctatgcagcagtctaggtgggctctgacttggggactcttcctctaatatgcacagcacctgtccatgctccaacttgcaaaccacctctggtttggtaatgcaatatccccctgagaggaggaggctgtgttctccagcatcatgtctctgtacgggtcctctcactggga

SEQ ID NO: 460949 - DNA, 262 bp, Homo Sapiens
cattctacgccatcttgcatgaagccaagcacacatatgaccagtgtttctgcaaggtgtacactaaaatcataagcaagctcttataacaacaaaaatatgttgggctggcaatgttcactttacaaacttccccagataattccaatgtataaccatgaactcagtactcagagtagaaacaagtgttcagagaaaatagcccatagattcttgtctgaggactcctggcgaagacaagggtaggagccgaagggggact

SEQ ID NO: 460950 - DNA, 542 bp, Homo Sapiens
attacaagtttgatatatcatgcccaagtgaaatttattattgtaacgaacggatactccactgaccaatcaaggttatatattatattaacagaatggaaaaaaagttatcttctcaattgacacagcaaagcatttgaccaaattcaatatcctttcataagaaaaatattcaacaaactgggaatagaagtaaactatctcaacatagccaaagccacagatggaaacccacagagaaaatcatactacaaaagaccaaaataaaagtaggggcattactaacaattctacagaaattaaaaagatttaagagagtactatgagcaagtgtgtggccaaaaattcgataacccagatgacagggaaattttcaagaaacacaaaatgcaccaagactaaaccacaaataaaaaatctgaatatgctatgaatactaagaagattgaatcagtatccgaaatctgagtaagaaaaaatctggaaccatgcttcactagtaattctaccaacattgatacatccactaccaccatatcctc

SEQ ID NO: 460951 - DNA, 487 bp, Homo Sapiens
caattgagctcatcaatggatacaggcttctttagtttttaatttcaaagaccctatcacattggacaatgtcttccactcaaaaggaattcagtaaatagttgttgaagtaatgtacttacgacaattattaagatcagaggaatattgtttatcattcaatgtttatagttaaatatttgatttttgataaccatttactgaataattcacctaacaccccataaactaattaacaaagagtgtcttcataaatggtgttgatatcacatcaagatgctaacagtgtaaaattaggattttaaaaatatgtatgtacctttaaggcttctgtgacttttaggtttctctaaagtttatttaactttaatccacttaaatttctttaaaagttaaccattatacatgaaggtaatctgactccaatttctgattattatataattccaagataggtacaggatacacgtcgcgaggtaccggctga

SEQ ID NO: 460952 - DNA, 601 bp, Homo Sapiens
ctccagatatctcatctcctgacctagtgatgagccactcggctcccaaagtgctgggattacaggcgtgagccacacacctggctaaaggtattattcttgctttgataactgcagctttactttttattgtttagcattttgtcactagcgagaacatagctatggcttctggttaaaaaacaaactattgaggggtaatggaaactaaatgttcaatttcaaattgacaaataaatattgagccaatgatgaattttaataaccagaaacagggaaaatgtcttagttgtctgagcaagaagggactcagagatactcagagattcttcaggctctaactccactttttctttcaagccaaatatctctgtcttgatcactgtttgggaattgaaggcacgattgatgatataggaggtaatctgaggaatagtacattggtttttaaagcctcaaccctgacaatcataccagcccagatggggatacctacagaccccctgtagacattatcccattctaatcctttaatccctaacagcctgacagtacaacctgcttagtgcattaaagattcgaatgggatacacgtccgcgc

SEQ ID NO: 460953 - DNA, 564 bp, Homo Sapiens
ccctcgcgaacgtgtagtccgcaatcatttcttacatagctttatgattgaggatacacattagtatgcacataccacattacacacgatagcaaagcttagaataacattttaattatgttttcgtgtatgtgaaataatttgtttttctcaattatattccttgggtcacggcctagaacatttatttgaaccagctatatatcttattttcataaggttctcaggaggcggtagtcatattttgttacttcagccctccacaaaggcaatacagtacagagtctctggtactgtaaacgagcacaaggaccagtcacaattgtcggtgtcttgttacattgataagactccttcaggtaagagattaaaacatgcctttattattataagggttagtgaccattttagtggattaaaaagattattcctgttgcattggagataggaaatttgggatgtgaatgtatgaggtaggtgtgttttctctcttgtgcctgtatggttcaaaagctcttagagattagaaaaaggttagctctataatcttcatattaatattta

SEQ ID NO: 460954 - DNA, 564 bp, Homo Sapiens
  misc_feature (350)..(521): n is a, c, g, or t
tcagccggaccctcgcgacgtgtatccgtgtcagatctgaagatgacaggagcactgaaggaggtgaaataactgattgctgtcctgaagtgatttttgtagaaatctagtctaactgctctagaagggactgtagatcccaaatagagagactattttgtttgcagatttggggagcaccttgctgcactttgtcatacaattgtgggttgtggctggaatcctgagaagaaaggtttttctctcaagtgaagcctggtgggcactttgtatataacgtccagtacttctaaacagtgcatggaaaatatgactaaaagaaaaattttcagccaggcacggtggctcannnnnnnnnnnnnnnnnnnnnnnnnnnnnnnnnnnnnnnnnnnnnnnnnnnnnnnnnnnnnnnnnnnnnnnnnnnnnnnnnnnnnnnnnnnnnnnnnnnnnnnnnnnnnnnnnnnnnnnnnnnnnnnnnnnnnnnnnnnnnnnnnnnnnnnnnnnnnnnnnnnnnnnnnnnncagcttgggatacacattcgcgacggtaccagctcgagttcta

SEQ ID NO: 460955 - DNA, 516 bp, Homo Sapiens
ctcgcgaacgtgttatcccaggactgagtgtccctagccactctcctctgggataacgcggacgtcattagtttgcgaagtgggtggggagaacaggaggattgactctaatttggtgtgtagtgggggccttgatgtccttctgcctctgtccacatttccccatgtgactcattgcaccctgcattgctcacagggatcattagttctcccggtagacagagcacctctgcagcctctgctctgctgccttgtgaatttcctacacagacttggttagttacaatttggaaacagttttgccgggtttgtctcctttgtgttaatcttctcacaatgaagctgctattggtgacagggacaggggagcaggaagccaacccagggaaacatgcgagtttcctgcacaccacttagtcacctgccctcactggtcaaccccctactgctgttcccagtcagtctggtttttagaggcatcgtggcaatagaatagctggataacacgttcgcgag

SEQ ID NO: 460956 - DNA, 446 bp, Homo Sapiens
  misc_feature (34)..(34): n is a, c, g, or t
ggatccccctccccgaacgtgttatcccatacangcctttatttgaaaatgttagctgttaattgaatgacactgattctaaaagggttaaccctatcataatttatatcaagtggactataatcactcattttttggaagagcatcgtatactaaggtgatatttgtaaacctacatgaattgtgctttgaaagaactaatttatttttaagagggcagtcctcaaatattgatcttaactattggtagtgatgttgagaatgtataaaagcagatggatttattatgtaagtcggaaaaagctaaaagtctcaatgattgtttggatgtggacattgagagacagatattaaggattgcacctgtatttctgatgtgggcatctgtgtacatgatggtactatttgctaagaacagggatacacgtcgcgagggtccggctcga

SEQ ID NO: 460957 - DNA, 558 bp, Homo Sapiens
gcctctttatggaaaaagtttgtcattccctagtctaaggtttagattctgagcttgtcattttagcctacacccccttaccagtgactagctcaaaacaagtctgtgattccattctgactgttctactgagggaattcccccttcttctcatgtggagctgatgagggtaagttgtattaataggacatatgctcaggttttctgaaaaatacttttatctagaaatgcataggaatatgctagtgcctgaagattgtctcacctgcctccagagctagtgcccacacttactactgagaggcctgaggaaacgcctgcctacccaccaccagaacctgcatacgtcacatggagaactagagatcagcctgccacacacaccaccaaggagcccagtggcgaacctgcccacctggcccagtgctgccactgccagcaaccaaagaagccacatggaggcccagggattggcccacgcagacaggctatcatcagtgcccacaaacactgcccatggtccctagtactgacacacctcgtccacaaccactacca

SEQ ID NO: 460958 - DNA, 435 bp, Homo Sapiens
  misc_feature (325)..(380): n is a, c, g, or t
ttaccctcgcgaacgtgttatccttatgtcctactagtatcatttctttcttgaaggacataaggataacagttatttattaggatgtgacaccagagaggagtaatttaactgattaggttttctttattttctgtttctgtgaaataaaagcaaagctaagaaagatggaattcatgtggaaaaatcctttgcttctttctagctgttaatgctagttttcaattttcaccatagatgtcaccaaagcatagaaagtagttcagagttagaaataagacaattgtttttagatttttttataaagacagggtcttgctctctnnnnnnnnnnnnnnnnnnnnnnnnnnnnnnnnnnnnnnnnnnnnnnnnnnnnnnnnggtcaagcaggtcctcctacctcaggctcccaagtagctgggataacacgttcgg

SEQ ID NO: 460959 - DNA, 419 bp, Homo Sapiens
gaggatccccgattacgctcctagacggcagctctagcaatatgtttgctcacattccttcactcttctgctcacccccctctacaccaaactttctgccttgtgagcagaagtttggctgctgttagcaggatttccacagtggataaccaggcccttcccttcctaagcctaaacccattgtgactgcctgtctctcctgtctctgacttctcaggcagcctcctgagtgcactgagttgtatccgagagggtgggaacagcagcatcccctacttgcagtacacggttccttttccgcccgccaccctgcctttccttgggggcagctgtctctctgtacatgagcataatgggctaaaacagtccccaaacccagcacccccctctctctggctgcagcccacactgtacaccac

SEQ ID NO: 460960 - DNA, 455 bp, Homo Sapiens
  misc_feature (318)..(328): n is a, c, g, or t
  misc_feature (352)..(412): n is a, c, g, or t
ctcgcgaacgtgttatccttaatgattctgtgtttagtaatgctttttcagaatcattaaggataacccttagaatatcattcccacaatactattactccattttcaatcactgagtaaggtacatatttttttaagaccaaatcacattcttgtacttaaaaatataatttccacccttattcgttgtatacaaatttctcttctgccaaatacctgaaacaatgatgaactaactgaaaaggatgggcttttcctcttagcatagccattctaacagtaactaattcactttcaaatacttgtatattaaaagtnnnnnnnnnnntgggggccaggcacggtggctcannnnnnnnnnnnnnnnnnnnnnnnnnnnnnnnnnnnnnnnnnnnnnnnnnnnnnnnnnnnnaccatcctggataacacgtcgcgaggtaccggctcgattgcga

SEQ ID NO: 460961 - DNA, 108 bp, Homo Sapiens
cgatccgatgggcgtcatcatccagaaaaaggatggcggctatctctacaccaccaccgatatcgccgcgccgtaccgcgtacgaaaccgtgcgccagtcggtaccag

SEQ ID NO: 460962 - DNA, 667 bp, Homo Sapiens
tctagagatccccctcgcgaacgtgttatcccacaaacacgcactccctcctcagagtgtacatattcttccctctgcctagaactctcttctccaagacacctgcaagatgccctcctttccttccttcaggttttttgtatgcctcttaagtgaggcttttccaggacccactacataaaatggcaacctaccctttgaaatatccctattctacccttatcctgctttatttttttctcttagcacttgtcactctctgaaattctatattctacttgcagagagaaaaaacaaacaagttgacaaacaaatatagagaacgtcagatagtttgctaaatgtttccctctttggtttagctcgctagctaacagggccttatgattaaagggacttgatctcttaactgttatattcaaaacactagagcacctgatatgaaatagatagagaatgtagacttcatgtgtatttctgtcaaagcatgtttccttaaatataaattatttgtaaaggataagaacttcaagtacagatatgatactcaaaatatttattctctgactgacataataactgcaggtaattttcataggactagttcctactgaacagtactctccggataacacttcgcgagggtccggctcgatcgtatcatgca

SEQ ID NO: 460963 - DNA, 841 bp, Homo Sapiens
  misc_feature (185)..(215): n is a, c, g, or t
tcgcgaccgtgtatccactaaatttattaagtgttcatcttaattttcaataaaaatgctaaactcaggctcaggaatgacaccagcagaagcaccacggtttatgttatctcttgcctcactcatcacaaggagactgatgttgtgccttccaaaggtcatttgattatgttattgttatgttnnnnnnnnnnnnnnnnnnnnnnnnnnnnnnntatgtttattcattgccttatggttaataccttgatcccactccttatacctacctctgcctgtcaaaacttcacccattcttcatgattcctctcaagtgtaaaccttttcataaaatccatcctgacttccccttcccataggggcactctctctcttctgaatgccaaagcatgtgtctgttgcatagacttcagcaaatagtttatccctatgtatcccggattaaaccgcaagcttccccagagaaagacatcccactctcttctcttctaggcacttagaactgaactcaacaactattaggaattaatacactgtgataggatatcagccaatatgcaaaccatcactgacacagagagtagggcaacctgcttattttagtggtcacatggattctatatctctgtctaaacggttatagtaatagctatctttatcaggagactgtcctgcctggtcctttacatacagtacttctattctcatatgtatcccgcaagccaattgcaactgtccacattttccattttacaactgcgaacatcaattccaatccagctccatctcactctgaggcactatgttccatccacaccatgtgtccataaccataatctct

SEQ ID NO: 460964 - DNA, 613 bp, Homo Sapiens
ctagtaggatataagttggttcaaccactgttgacaactatttagacagaatttactgaagctgaacagtgtcaaaccttatgactcatcagttccactcctaggcacagactcaacaagaaatgcctacatatagtcacccaaaggcatgttcatagtagcgttattcatggtagtcaaaaactgaaaaccacccgaatgtccattaaaaaaggatggatgaataaatcaagtgtatggataaaatttacacgatggagccctataccaccatggaaaagaaagtgctaccactgtcaaccatatggaggaatctcacaggcagaatatcaatccaaagaagccaagctcaaaagaatgaaaccatgcagttacatttatacatagttttgaaacagcccaaaattaatctattgtgagaaaagtcaggatactggctaacgttgaaggaagtaatgcttatgaggaggcatgaggcagcatactgagtgcttgccatgttcatatctatagttaggtggaatatagacaagtatgttgactctgtaataattcatcatgtgtgtgcagtgatacacgttcgcgagggtaccggctcgattcgtatctgtct

SEQ ID NO: 460965 - DNA, 490 bp, Homo Sapiens
  misc_feature (44)..(117): n is a, c, g, or t
ctcgcgaacgtgttatccagacatattaagaattcttaatatgnnnnnnnnnnnnnnnnnnnnnnnnnnnnnnnnnnnnnnnnnnnnnnnnnnnnnnnnnnnnnnnnnnnnnnnnnncttaatagtcctttgatgtataagaatctctaaaatttaggacagcagagtaaaatggaagatacagaataactgaattttatacagatgagaaccaattctgtgtatggtcttatactatatatataagaagcaggtgattattttttcttacctcttgaacattgaaccttagggatctccttcatataagtaggctataatgtcaataaagtataaaaagtccagttgtaagacaagtgtgccactccgatagccccaagtggccgggattttacaagtgggtacccacggcactgacttctgtgaagaaagctgaagaatacagataattaggatacaccgttcggtccggctcgatctatcatgtctt

SEQ ID NO: 460966 - DNA, 540 bp, Homo Sapiens
atttctgtctgaaattgtgttctattcctgtgatcattcttctgtttttatgtattgttcatctgctgttttcttacattctttgtatttcccacgctacacagatgtgttttatacactcattatttcatcagtttatacatcatttaattaattggtaccataataatagtggtgcagttgtataaatagttttgggaacaaacccaactgacccatggtaagcataggaacagaaatgcctggtgactgaaggagtagctggcctgtgacgtggagagaagtcagtatgatagatctggggattagggagtagagatggatgagtcatttaggtggaggctaattgagcttctgcagttcagtatggtgtctcgacatattctccccatttggtggagattttactgtatttagcagatattaaaataaggttttttaaaacccattatcagccaaattagataatttcctcggctttatgaccatttcctaattttttgatgatgtttctaatttttttaaaaatattactcagga

SEQ ID NO: 460967 - DNA, 301 bp, Homo Sapiens
ccaattggccaccaatctgcaggagagcgtggcctgtagaggaatggggagaggggtctctgcatctggagagcatctggggctgtatgagacccacaccaggtcttggactgcttgcttttgctttggcaatgacctaagattgaaaatggatgagtggcaatttgggagtctacgcgaagatgcgtttgcaaatgaacacattgccgcagggcacccgttttcacgcagtcgaagccaggaataattttctatctcatgctacctaactcctggaagttatcatgagaccctagcgttg

SEQ ID NO: 460968 - DNA, 447 bp, Homo Sapiens
gaaagtttaaagatcaggagattttatttaaaagctcagatgttcaatttctcatgagaaatccagaagatctggtgtctctgggcccacattctgcctgtccgctgtggactggagtggaggacagctgcccttccagcggggcccatccaggtgtttgacccaggtgctatacccgccagtccctgacagcagttggctttttgctcttagtacctgtatctgcatcctaaatttgccacgagaaactaccacaaacttaaaacagcagaagtgtattctctcctggttctcaaggccagaagttagaaattaaggtgtcggcagggtcacgcttcctccaaaggctctagagagaatcagtccttgacccgtcccagtttctggagtcgctaggcattcggtggcttgtggcagcataactccagcctctgcctccatctgcat

SEQ ID NO: 460969 - DNA, 591 bp, Homo Sapiens
  misc_feature (52)..(180): n is a, c, g, or t
ctcgcgaacgtgtgatccagacaagtccaggactagtctggataacatggcnnnnnnnnnnnnnnnnnnnnnnnnnnnnnnnnnnnnnnnnnnnnnnnnnnnnnnnnnnnnnnnnnnnnnnnnnnnnnnnnnnnnnnnnnnnnnnnnnnnnnnnnnnnnnnnnnnnnnnnnnnnnnnnnnacgtgactgagtgagaccctgtctcaagaaaaaatggaatttgggcaaaaacattaaggatgggtaagaatttagtaagagcgtatgtttgggtagggtaggtatgtattgaggagcagaagcaattctaggacatattcacatatttaaaaaagtgtcgaactctgtgagctttcttttttctgtgtaaagctgtaaagaggctcaagatatttttggaagataatgaattaacccagtttgactagagcggagggttgacattacataatgttttataattatatataaacatatacatatgtataagtatagacgtggaaaaggctaacacaattataaaattgattatgatgtttaaaatgtcataaggaatgcggccataggaaatcctctttactcggaggacac

SEQ ID NO: 460970 - DNA, 491 bp, Homo Sapiens
gtgtccatcgtctcggaccccggagcacactgcaacaccaggagagctggcatctgacgatgtctgtgggacacagtgcataggtagattttaacacactgagattgctatttggtataatgacatgtttatcctgaagaaatgaagttaggaattttctgagctacagaatgaattttttggttctcatcgaaaggtctgttgctcttggaactcaattctcaaaggtctgtttcacaaataatcatcctcgttctgatgtttattcaaatctttgcccaccctcgagtctccttaaattcctcatattccacaaatgatgtgtgttatctgaatccagaaaaccctcatgggtttgcagatataactgccaataactgatatagaaatagagagtgtagaaaatatttcttggacaataaaagtcagaaggaagattcgagttatcctatccccatgaaaggaaggtacatcggaggacacgttcgcga

SEQ ID NO: 460971 - DNA, 130 bp, Homo Sapiens
ctcccgagaagcttggactaaagtcatgcagcaccatagtcacctaattttcgtatcttttgtaaagaccggttttgccatgttatccagactagtcctggacttgtctggattacacgttcgcgagggg

SEQ ID NO: 460972 - DNA, 565 bp, Homo Sapiens
ctcgcgaacgtgttatcctggtccatgcctacttactcttttttcatccacgagacaaatgtcggctctattttctttatctttcctcagaaactgcctaggcagttaatttttcttacatctgttcccatgagactttatacataactttattatagtatactctccaccatgttataattgtttcgctacagaaatactacaatagagtgtgagatccaagaaatcatcaatgtaaggtgatttttacaaaggaaaatgcttttccttgggaaagcagacaaattacatcttataatctttagaggaacaaatgctgcccttaaaaatatgttttcaaaatctttacaataaagtaatataaaatattatgataaaatatttgcaggtgacatgatgaatggatatacaagtttaaaaagttaataaaggcccttttgcagtgataaagcgaaaggtatgagaattcttcagcgtctagagctataggtactgagggcagaactttatctgtctctccaaaactcttccactctccttatcatacgcgatcgacgacacactt

SEQ ID NO: 460973 - DNA, 326 bp, Homo Sapiens
  misc_feature (294)..(294): n is a, c, g, or t
  misc_feature (301)..(301): n is a, c, g, or t
tagtattttaacatttattttaatcctgaagacacttttttgattgtgtttcgtaagagacaacatggcctcctaaggtgcaatcctgccgctatagtgagctaatgtcctgaatccaaaggcttcagaaaattgcttttgcctttttcatgaatgttaagcagcagcattgtgagatcgatctgtcctggcagttaacacgatgtgcaacagtgtgttagcatggaacagaaccgcttttcacaaaacaaaggactgttttacaaatgattattcccgacagtgtgtcgacantaaaccnttttaccaactgcacaagcagccca

SEQ ID NO: 460974 - DNA, 618 bp, Homo Sapiens
ggtcatgaatgtgatgcatttggaaaaaattcaatctgaacatgaactttgttcctttaaggaaatcaaacagtgaaggtgacttagatggattgattttaaaacatcatttagatttgcttattcccaaaggagattatggaaaagcagaatcagatgactttaatgtgtttgataatttttttctccattccaagcctgaggatactgatacctggttaaaatactatgactgtgataaatataaagagagctataaaaagtcacagattatcatatatcatagaaatcgtttaggggagaaactctatgaatgcagtgaatgtaggaagcgcttcagtaagaaaccaagtctcattaaacatcagagcagacatataagagacatagcctttggctgtggtaattgtggcaaaacctttccccagaagtctcagtttattacacatcacagaactcatacaggagaaaaaccttataattgtagccagtgtgggaaagccttctccctaaagtcacagctcacatcccatcagcggacacatacacggagagaaaccttatgagtgtggtgaatctgaaagccttctcccggaacgcacatctcatatcgccctg

SEQ ID NO: 460975 - DNA, 668 bp, Homo Sapiens
  misc_feature (61)..(80): n is a, c, g, or t
ctcttttgagacggatttccctcttgttgccaggctggagtgagccaaactgtctcaaatnnnnnnnnnnnnnnnnnnnngaattttaactacggagaccttagatagtagtttgtccttttatgacaggaaaactgagaaggagaaagggagagtgtcttacttaccccatggtcacacaatgcactctgccttttcctattttattcaaattcaaaaataacatgttgtgctttaagctgatttcgtagctcactcactcatcagcgacagccagccatatgaagactgtgagatagagaacttgggctagctgcactcacggcatttgcttgaggtgatccaacttataggaataaagtatctaggaaaacggaggaaccactttcatctcccattcccccttcaaatgatgcctgtgagactaagtccgaaggggactgatataaaatgcttctgcccagcatggttgcgcagtttgttcactgcacaagggcacttggccaagggagtgagtgggactgaaaatcctgcccctgctccatgctgagccacatacaaagtccccccagtatattgtggggcccttctgggcagacatggagagcttctgaaagtcccacatgcatggaattattttcaagatcccgggtatgtgctctgtggtg

SEQ ID NO: 460976 - DNA, 429 bp, Homo Sapiens
ctcggctctaccttgtctaaagagattatgttggtcttgatcactgtagcatcattatagtaggtgttcaataaacgtttactaaacccatgcctccctctgtgtcatgttttgaaatcagtgtctggtactacttagtagagtctggtaaatgtttgttaaactgcactgactgctcatcccactggagaacataaatgccgctaaagagggccaggtggctaggctatccttgatggttcaccttcctatctccagcatcttccctaggtcaccatcacgcattaataaggggaagacatatacatccaccttgtaatgcccactgtgtaagtctgagacccagctacttgtctaatacctaaatacctcaacagacaacccaccttgtctgtggacacacagacaaggtagaccgagggtaccgag

SEQ ID NO: 460977 - DNA, 454 bp, Homo Sapiens
tgacaagccaggtgtcattgagttcttccttgaaggtcactttggagatatcatgggaaggtgtacttccggtgatgcctagaggtcacgtcctgtgatgtcattaggctgaagcatgtacttcctgtataggacagtgaccagtctctgacctgccttctccctccagagccttctttggtgggtgttggcctgggggtcttcctaggaagaaaataaggcacgggacttggatccactctggaggactctaccggaaagaaagcaatattgtcagggtcatctccattcaaacacgtcacgtctgcgaactcgccctggagggaggggtgggagatggacctagtgcaaactagtgttaaagacctcccttcccagcgctgccttttgtgtgcatgcctgtgtttgcgtggatatggttcattgaatcgggtgagcgacgtgtgtgggggat

SEQ ID NO: 460978 - DNA, 550 bp, Homo Sapiens
gtccttgccttcgtcgcagatactgtttcaccagctaagtctcttgcgatacttcccccctcttctctcacctcatttttctcttttaagaccaaacttagagttttgggtcttccctgaacctcttcatggaggttctgcccctcagctttcttatctgtaatatgtaggtaataatagtattacctctaagttgtgactgagttcatgaactaagtacatgaactggctcatggtaagtatcatagatttagccgtttagtgtgtgatactacctgtgcctatttaagtaattttaatcatgactttgatttttcattcattttattaagcattttctccttcttgatgacttttaaaaagctaagagtattccgtcacctaaggttaaattataagttgttgtgtactggaaagtatactgcatgctagggttccaggttatggcagagtctctgcactctatagagttacagtgtagtttagcgagacaccagactaagctcactacagagcgtgcaaagtaatgacaggtccacactgcatgacg

SEQ ID NO: 460979 - DNA, 466 bp, Homo Sapiens
gtgtctaactggcccacgtttacctcttcgggcaattccatggggacgagataaagtcggaaaatgacacaaggcatagaatcgtctatacacgcctaatcattagttgagacaaagcgacttggttcaagcagtaagtcctctcaatgaacataagaaggaactattacttttgttatggtttttgaaacggatgttgcagatatgtttcttgaagtagcacttctggaggttaagttttactattcaggatggacgaagcaaggggcaatgtctccagccattaacttagcaatgatagttccattgcaacagttctttggagtgattgggctgtttaccctagcatcattcaagcctgcttatctagctctctgaaatattctgtaagctacctaaaagtttaaataaagtatctgtctgttaaactaactagggtgggtttaacagacaaggtagagccgag

SEQ ID NO: 460980 - DNA, 250 bp, Homo Sapiens
ctagtctttcaaaagcagttacagcacagccaggagagccgtgtgcatgcacctcccctaccatttcaaacacatgccttggaaacttcgccctgcttttccgagtatcaagtccatcaaataacaaatgatagtgtaaagacagggcacttaatcacgttatgtggcatgattagtagccgtctccagaattcaggcaacttataaaccacacccttgtctcatcttaatgagacaaggtagagccgcg

SEQ ID NO: 460981 - DNA, 297 bp, Homo Sapiens
ctcggctctaccttgtctccactctctctttccctgagtttgggaaagggagagtggggataaggcagagtaggctgggctaaagagaggggatctcatgcagaggcagggggatggcccacataactgctgggagcaggcttctagcaacagatagggaggtggcattgtagaacaggttttaaattgtgtgttgtcctggggctgagaacatagattcttggattcagggaggagaggcaaggccactgagccatgcatgacatcacttctgttatttcattaatctgtcaacta

SEQ ID NO: 460982 - DNA, 358 bp, Homo Sapiens
ctggctgcttccttccactcatggcagaaagggaagaggggttgaagtcagctatgacctccatattgctaaactcaggcttctgccctcatcattccaccgatattacccttgctatagtcaccgatgacttccatattgctaaatccaaggacagttttcagtgtcttgccacgatctcttatcttgatttcctaatgtcctggttttcctccttaagaataaggtctttaaaacctagttccctgcttcctttgaaaatcttggccgggcacactgactaagtcctgtaatcccagcactctgggagcccagtgcagatctcgtcaggtcaggagctcagaccgccgccagacgt

SEQ ID NO: 460983 - DNA, 462 bp, Homo Sapiens
  misc_feature (382)..(382): n is a, c, g, or t
  misc_feature (400)..(400): n is a, c, g, or t
  misc_feature (422)..(422): n is a, c, g, or t
  misc_feature (450)..(450): n is a, c, g, or t
catcttttaactgtttattgtataatataaaactacaaaagtaagactgctcatttccatgtacatttaatctgtccaattgtttagattacagcccaaacctacatgtgaatacagccatctgggttccgatgtaacgtctgtaatattgcatagaaaaggcacagctctcaggtctgtgggggaaaggttatacctcctttttgacaaaagccctcctcaaaaaccatggcaccaaacatgtcactatgtacatcttttttcaaaatctcgggtcatgcggcacatatgggcctgcatttctcttccaaaacttgttatccccaaaggaggtccaactttttattgggctttgtctgcaataggcatttgatccgggggntaatttttcaagggaccntttcaggacttcttcttagggnaaccactgggaaaacatttgtaacatanggccggggttgg

SEQ ID NO: 460984 - DNA, 229 bp, Homo Sapiens
atagtaattcactgcatttcccttctctaacttctctcttcacaccaattccttttctttcctttaagatgggtttcatcctgttgacaaaagatttggttttatttgtacagtaaagcagataatatcctgattgaagtattcaatgatttagttgaggatgcttggggatcaaactttgtaaaaaggtcaattaagctagttagcagagactatcagtgggttgcag

SEQ ID NO: 460985 - DNA, 615 bp, Homo Sapiens
agttagcacaagtatgtttatttccatataataatttagatcaaattattcttaagaaatggatctttcttcaattatcaccaattccctgatgcaattactagaaaagtattatgatttttaaaagattgtcagttttagactcttaagaaaaacaacagggcttcttctcaggggtcctaatttataaattcactaaagaattatatatgttaacaaaattcaacttgttttgagaaaaatatatgtcaattgctacccaaaatcaaaacccaacatatatgttccatataaagtctagtcttgcatttgaaatctgacttttcagagtatgtgatgtgtttaaaatttttttggaggaggggctagaaattaaaaaattctagcccttcagattaaatcatgtaaaggtcagattttttttctgtgtgggaaaatgaattatcttccatctaagattgaaaaggctctacttttatctaggcaatgaccatgaaaagatcatattcacttcagaaagggaagaagcagcagggaacatagttcctttcagaagattttaaaaatatatgtatacagagaaataggttataaattcagtttcagaaaaaaacc

SEQ ID NO: 460986 - DNA, 526 bp, Homo Sapiens
acacctgctccatcaaccatcacccttctgctgccccacccaccactggagacatcttgacctaatggctcctagattctaaggcctggtttctcctggctgaagtcacatttggtccaggcatagcagcacttaaagattggtcaagtgcaaagtggctcttgatcagctaacttcagtgaaacacttcagttaaaccatgtatgtgagttggcactacctgccctaaagtacacaagattttattagcttgcttgtatcaggacaagggataagctactatgttttgcttttgattatctttttttgggaaaggggaaggtatacctggaatctcttttgtttcacccagtagattgggcattagtactgagactttcctttgaaaaaatttcaaaaattagaatgtaattcctttgaccatataattttataagccatttatatgcattatttaatttaacccttccacgcctacataggcaaagtttcttttgtaactgagacacagatgaggtacatagtt

SEQ ID NO: 460987 - DNA, 579 bp, Homo Sapiens
  misc_feature (241)..(291): n is a, c, g, or t
atccccctcggctctaccttgtctttagaaaggcaagttcttgggccccaccccacatatactgaatcagagaccctgggagtgggacccagcaatctgtcttaatagaccttctaggagattctggcactaaggaaagagaccacaggtcttgtctatctctgtagttggctgcgtctgggccagagtaactgcttgttgaaatgatcagagatctcaaatgaggtcatgcatgttgggnnnnnnnnnnnnnnnnnnnnnnnnnnnnnnnnnnnnnnnnnnnnnnnnnnnttggtctagggtccagcacatagtaggtgttcactcttgggggtgggaataatcactctaatgtccgtgtttgaggactgcattgctggtgaccgctgagcctgcagaggaggaagagagcagggcagaagattcaggagggggtgcatggcaacttctgatgtcacagtgccccccttcactcctgacttctggctcatgggtcactttggggcaggggcaagaggatggttagctgcagcaaagagaagcacaagagcaagtgcgattgagagcacaggcccctcc

SEQ ID NO: 460988 - DNA, 705 bp, Homo Sapiens
taatctgccaaagattacagatgttaggagagatggggagaacacactaagatatgtccttgtgagtttagttaactaaaagactgggggaaagaaagggaagtaagaaaataaagtgaaaaggtggaagaaggcagagtgtaaaagagggagataaggaaagtacaaaagatagagatgtctgctgcaatttctcagtactcttcagatacatcctggccaggtttactttcttaggggcagggtagattgtgagggtgtggaaaatggtattttttcaaagagagtcacaatagtattgccatctcacatgctgttatacaatgtgatcttgccgtttctctaccaagataaatgcagtctagtttctctccctttaaatctgagctggccgtaagacttgcatgaacaataaaatgtggtggaagctattccaagtgacttctgaggcttggtcagaagcagcttccccttagttactttgagacatttgttctgagggaagccaatctgactacctgaggccattgtgctggagaagccacacattggcattcctgttgacatcctagctgaaccctgccttcttatcatttccctcaaggccttatccaataagctgaactgaagactatcttggactctccgtaccagcccatccctcagccagatttactcatccggtacacgagctcgattcgtatc

SEQ ID NO: 460989 - DNA, 589 bp, Homo Sapiens
  misc_feature (391)..(391): n is a, c, g, or t
ctagaggatccccgagtgagtaaatcttggccaattaagcactctgacctgataattctaggcatctcaatatagtgaatcatgatcttttgggaatagagagtgagagaaaaagtgacctcagagaagtaaagtataaacattcattttacgcagatggctataggttttgctctggacatttaatatcttattccaaatataaaccaaagctagaaacaatactgtgctatgttttactgcctcacttgcagaaaggcttattgaaaacacactgaaacttcatagagatgctagtgtgggtacagaatgtagtgtttaattgcaagactacagaataaaacagttgattgaaagcattctcagtggatcattctagcctcttctcacnattctcgcctgaagccccttgataaaatttgttataagcttaaggaataaagctatattaatgattttctgaatatatctaatttaaaaagtacagctgtttctcaaaatcatgaaactaactttaaagccaaatacacgtggtttgagttaacttactattttcattatctattcttcctcttctctatcataagaa

SEQ ID NO: 460990 - DNA, 644 bp, Homo Sapiens
cccagtgattctaatgtgggagtagggttcagaaatacaaggaaatgaatacatgacattaatatatatattaatcaaggattgagatacatgctttccaaactgcccctaaaaaataggtaatatcataatagaatgaatgatgagaagagatgcactgacgaaatccacttataaaactaagaagtaactcaacatcgaagaggaaactaaaaagaaatgaaattagctaggaggctgcatttattggagatatagttatccattaatactttgcaatagtaatgagaaatactgttagtggaaaagatatagttaaagttttgttttaacttaggtagaaagcagtcaacaaatcattttccatgtgtctgagcaaggctataagaccacagtgattagtgggaagtactcctgacgtgggaaaggaagtatgctactttgggaaataaggatgttgtagaaattaatattttaaagtctttggagaattcccatggaggactgatgtcattttccaaagttctttgattgtcgatgagatatcggagcattattttctaagtgccatttcgtgcacatcagcatatccatgccacgatttactcatcgccagatttactcatcggcccagatttactcat

SEQ ID NO: 460991 - DNA, 614 bp, Homo Sapiens
gactctagaggagcccccgatggagtaaatcgtggccaggcttgagccaccacgcctggcccatatgttgtaagtaatgtagataagttctgtaattggacagaatttctcgcatatctgcaccgttataccatcttaacagtcttcctagtcagaggtagtaagtaatatttagccctcttataaagatgaacaatgtcaagtgattaaggtataaaaatcagcaatgcctttcctcattagtgattccatttaatgattttctgtcatgcgttatgatacactaatttgagaagctgatcatttagcagtcttgtgttaaaggagagtattaaaaacctgattgttaaaagattaccacacaagaatagctttttctgaactctgagcacatggcagatttttgggttttatgtagccaaagggccatagagattaatccatttatttataatgaatatgagtatttcacacacacggtaaattctgaaagttaactgacacaggcaacatttatcatactgccaagatttactcatcgagccaagatttactcatcgagccaagatatactcatcgggccaagatttactcatcgagccaagattactcat

SEQ ID NO: 460992 - DNA, 627 bp, Homo Sapiens
agcgggaaatcacttagcggggaacaatcacttagacggggaactatcacttttattattttattttgattgttctcatttttacatcgtgcctgtgttacctcatccatacccattgcttgagctataagcaatatgataaaatctccctaagctatagccaagacctgtcttccagctcaacccattttatacctgcttgtctgccaggattaagtaagtgcaaaactgaactcattttctttctaaccaagcctgttctgcacttcccatcttggtgaatggtaccatgagccacctagccacccaccccagaactccacgttatcttacataggtccctcattcctctgttccattacacaatcatgtatacagggctgatgagtctgtcttcttaatagttctcaaatctgctcttgcctctcaaattccactaccgtggtcttaaaggtcctcatcacttcttgctgtccgccctctacaatgaactaaggtttttttccaaaacacaaataatcctatttctctcttgcactcgtcacttaagagagaggttggattcctcagcacagcacagaggacagcaagaagtgattgttccccgctggggtcctctagagtcgc

SEQ ID NO: 460993 - DNA, 582 bp, Homo Sapiens
cgtttcgtctaaggatcccagcggggaacaatcacttttaacatgtgtatgatgccgttccactgcagggcttaccaagcacaccaccaagttaagctggaatacacgtggaagaaacgttaactgagaagctacacactgactttatggtgagattagtgcttggaatgacctacagcagaattccagaaactatctggacaccatcagtcatgggtggatggcgaccactctcaaatcccaagtccactgagcgataccagataccacgggtctaacaacatatttactgctggtttggaagtgaacggtcaaatcatacctttccttcttcaccaagtctccttccatcaccgccatgctagcaggccgcttcctctccagggtccccgagtcagagtcgtttccagtgtggaatgagtgattagaactcggggtggtgagaggtacaaatgcttctgatacattaaattccacctcttcagggaagaaccagtcggcatgctgaatgatgggttcaatcactgcaaccacatggacggatgtggctgaagtgattgttccccgctggggatcctctag

SEQ ID NO: 460994 - DNA, 286 bp, Homo Sapiens
  misc_feature (217)..(232): n is a, c, g, or t
cgatacccaggggacaatcacttctattttatatttaatgcctttatttaaatttggctcaaaaatataaaatagaagtgatttttcttttctttcatatctaaagatttactgttgtaaaaaggcccctccagaagtgtaagtccaggggatttggaacacatccatccagttgccgatcccatcggtgtgtcttctggatctattcttttgttgnnnnnnnnnnnnnnnnaaaattccggaataaggggtctaaggcatgtgtggccagtgttttttctcaaaa

SEQ ID NO: 460995 - DNA, 423 bp, Homo Sapiens
tgcacacagtgcatatcagacagcaggacgcagagcgcttcacactgtgtatttcagacaccaggacgcagagagcttgacacggtgcatttcagacaccaggatgcagagcgcttgacacggtgcatttcagacaccaggatgcagagcgcttcacacggtgcatatcaggcaccagcacgcagagagcttcacacggtgcatatcagacaccaggatgcgcagtgcttcacacggtgtatatcagacaccaggcaggcagagagcttcacacggtgcgtgtcagacaccaggacgcagagagcttcacacggtgcgtgtcagacaccagtatgcagagcgcttcacacggtgcatctcagagacccggacgcagagagcttacacgtgcacgtcaacaccagacgcagacgcgcttatagc

SEQ ID NO: 460996 - DNA, 360 bp, Homo Sapiens
agcggggaacaatcacttggtgtgggcactaggtaagtgggtggcaaccggctctttgggaccattggtgctgacctttgcctggtcacctgcctgtgcctaggccaagtgaatgttacatcttggaacctgagccatggaggtggcgccacctccctgaggagaaaggtgtggccaaaggaaactcctgcatggctcctgctccttccccttccctacatttcacttgggctaatgatgtaagccccccttgaggttggggatggtgtggagatagctgcagacactctctgtcacagacatccaggaagaattagggagtgtggggtaattatagttccacgatctagggtgagtgca

SEQ ID NO: 460997 - DNA, 582 bp, Homo Sapiens
tcacacttcagtaaattacaattccatcattccagttgctcaagccaaaaatcttgaagtaatccatgattctatcccacatccgaaccatcaacagatctcattggctgtaccttcaaaatatatccagaatccaactacttcccatcacctccactgccaccaccctggtctgtgctgaaacatttggctcttagcctttgtgcaaggcagaaacagttgaaggtttttcaggactgaacagagaagtgatgcagagttacaggtgtgttggatccaactggtaagttttggagaatgttgcaagacagttgacatcatttgacttgcgcatcatgggagtatttataccacaggcattggcaaacattacagatcagggcttccctcccacacccatagagatctgggggtccaacacttaccagcacacaactgcaggtacaaatctgcattatggaaagataactctggcaggtgtcatgtaattctttacaggtgtgtatatttgtgaatacatgagaatcacccaaggaactttttgcattctatatttgcctgcctccactcagctaaggacca

SEQ ID NO: 460998 - DNA, 425 bp, Homo Sapiens
ctgaataggtttttaatgtggacaaaagggccttattctggaaaaaatgccacaaggaacattaattagtaatgaagcaagccccaggatttaaggcaagaagggatagaaggatagaattgtaccattgtgtgcaaatgcagtttgggtttatgattaggactgcccttatctataaagctgctaacccctgagccttggaaggaaaagataaacaccagctgccagtcttttcattttacaaaagaaagtctggacaatgagaaccctttatcttgattggttccatcaatgctttgttccctaaggaagtaccttgccaataagggactgcctctcaaagttcttttggtattagacaatgccgtgatcccccatagcccaatgagttcaacactaaaggtgttgaagtgattgtccccgct

SEQ ID NO: 460999 - DNA, 430 bp, Homo Sapiens
agcggggaacaatcacttgtttttgcactggggcactggagcctgagtgaggtcagtcacaggggcactgcctgcgtatgtgactggccccccaccaaatctctagactcgaggctcaggtgcgctggcctggttaaccattcttcacacatgatgtgacactattgctgggagagctaagcacatccacgtgacgccactggggagagacacccaagcgtgtgcctagtttcctctggacttccctccatgcacccttccctctgctaattttaatctgtatcctttttgcagtaaaaacacagctgtgactataacagctcttctgagtccttttagtgaatcatcaagcctgagagaaggctcggggatccctgacacagccacaggaatattaatcacttaatcttttcaagttacttaatttccc

SEQ ID NO: 461000 - DNA, 401 bp, Homo Sapiens
ccggtacagcggtacatcactttgatctggaaatttttatccttttaaaaaattgtctctacatactcagcacacaggtgcccaataaacgctggctgaataaatatttggttgaaaggaagggagcaccctgggaccctgtggaccagaaatggacctctagatcccccaccatgctgacttttacccaagccaggccatgcaattcagggtatctctgcagaagattcatccatgctctgtgctcatctcctcatatggatggggtaagtctccagatgttcaggcaagcaagcataggctgctaggcaatgacaatgaaaaaccatggactgctcaatgttaacgtgttttctgagaaaaacatggcagccatgcctaagacccttaattcaggattt

SEQ ID NO: 461001 - DNA, 217 bp, Homo Sapiens
ccaccatgcctggccaaaacagatttttaaatgtgcatgctttgagccccagtgtttcccttctagggacatgtgaacaaggatgtatgatcaggatattcactgaagcgcagaataattcatttttaattgtaaaaagtcaaaagcaacctaagtgttcacatgtccctagtagggaaacactggggctcaaagcatgcacatttaaaaatctgtt

SEQ ID NO: 461002 - DNA, 560 bp, Homo Sapiens
tcaaaccccattttcccgtacagccatgacccatggggagcccgttgctcaggcttcaaagcaaggcaaagacaggctcaagtttccttgaggatggagggttgggggtcatggacccagggaagaaaataatgtgggatgagggagacggtggagaagtctaagtagcctggtcagtctaccctcatctcacctccaccctcaacctccctcaccaaaactgctgcctctccagctcctgatttcctgtgagtcaacagccctgagaaaggccaataaatataaatacagatacatatgacatacctatgtatatttatttacccaggggtagactcctccattccacattcgaaaccacctctgagggagagacaaaatggccacagccaccccctgtccaagtccttaggtcagttctcccctggatgttttcaccaagtcccaccaaccctggctgcttaaagggctctgtgatgagagctcatctgaagtcacggcagtttccattatggtgaggctctgtgatgagactcacctagtgattgttcacccgctgc

SEQ ID NO: 461003 - DNA, 207 bp, Homo Sapiens
agcggggaacaatcacttaattgcagacttgtgaaaggggtaaattacatgataagtgaactacatttaataaagctattaaaaaatacaatttaaaaaagttgagcaggcgggtgtggtgactcacgcctgtaatcccaagcactttgggaggctgaggagggtggatcacttgaactcaggagttcaagtgatgcacccgctgtt

SEQ ID NO: 461004 - DNA, 270 bp, Homo Sapiens
cttgcaatcctaaagtaaaactgttcatagggcactattttttctcataactggattagttttgctagaaattttatttagaagatttgcatacagatgagttttctttaaaatatcattacctaggactaatttaatcttactaagtaccactaaatcttgtcttatcatatttgagtagatgcattcacttatttgattcttacaataccaaatcaggcagcttattataaaattcatccacagtttacagaagatcagactgagatg

SEQ ID NO: 461005 - DNA, 727 bp, Homo Sapiens
tccccatggcacctacccccaagccactgcaacccctggtgggacaaagacttagacgagggccccaaacagaccataagcggcctttgcaatacagccccttgtgcttcccgagagccctaagaaaacccgatgtagaaaaatactttacaaggaatgtgttctaatctcagccagagaaaaatacagctttgggggagagggcaggtggaaggggacatgtcacaggggctgttcccaaaatgcataggcaggcagggcgctctctggggaaaggtgtcaggaaatttcaagtcggggatgaaccatccccatgagaagccagaagaaatattgcatatgaggaggccggcatggctgggaggcccaccgcgggcctgattgcatacttttgggagaatggcagaggcctcagcccgaggagggagagggggtattagttagagtcgggtgcatcttccctcgcctggagtcctggagtcaatgcagttttcccaagccgagaggccctgagagtgtgtcctgtccagccctgttgcttagcagaggtccagagaggctgagccacctgtccaaggtcacacagctatggctgcttgcatccagaagccacacctctgctgtgctgtccctcaccctcaaaagtgagggctcttggctttcacttggtgccctgtgacaggtagacagtgccctttcactctgggctgccccacagagagagcgt

SEQ ID NO: 461006 - DNA, 477 bp, Homo Sapiens
  misc_feature (309)..(309): n is a, c, g, or t
  misc_feature (316)..(316): n is a, c, g, or t
  misc_feature (386)..(386): n is a, c, g, or t
  misc_feature (409)..(409): n is a, c, g, or t
  misc_feature (448)..(448): n is a, c, g, or t
ggatttaaataattttattttaaaaaatcatccccatggcacctacccccaagccactgcaacccctggtgggacaaagacttagacgagggccccaaacagaccataagcggcctttgcaatacagccccttgtgcttcccgagagccctaagaaaacccgatgtagaaaaatactttacaagggaatgtgttctaatctcagccaggggaaaaatacagctttgggggagagggcaggtggaaggggacatgtcacaggggctgttcccaaaatgcatagggcagggcagggcgcttcactgggggnaaaggtnttcagggaaattttcaagttcgggggatggaaccatccccatggaggaaggccaggaaggaaatatttgncattattgagggagggccgggcntggcttgggggagggcccacccgcgggcttgttttggcnaatttttggggagtttgggcagaggtctt

SEQ ID NO: 461007 - DNA, 707 bp, Homo Sapiens
  misc_feature (37)..(38): n is a, c, g, or t
  misc_feature (47)..(48): n is a, c, g, or t
  misc_feature (75)..(76): n is a, c, g, or t
  misc_feature (86)..(87): n is a, c, g, or t
  misc_feature (145)..(146): n is a, c, g, or t
  misc_feature (692)..(692): n is a, c, g, or t
ggacactgcttttctgactgcccgcccaaacgtgctnnggctggcanngtgccctgaatgcccaaagtgtgccannagcctgcagnngaaaccctgggaatgactctaagattgtttgctattgctgagacgttgtgacaaaggnnataccagtactcttctgccgtaaaaccagcccatggaggaacagccgtgctcactgcttggaagtgcaaggcgtgccgggtgtgccgggcctgtggggcgggctcagcagaactgaatcccaactcggagtggtttgagaactactctctctgtcaccgctgtcacaacgcccaggtaggtcagactatccgctccgttgctgagcagcataccccggtgtgtagcagattttcacccccagagcctggcgatacccccactgacgagcccgatgctctgtacgttgcatgccaagggcagccaaagggtgggcacgtgacctctatgcaacccaaggaaccaggtcccctgcaatgtgaagccaaaccactagggaaagcaggggtccaacttgagccccagttggaggcccccctaaacgaggagatgccactgctgcccccacctgaggagtcacccctgttcccagcagctgaggaatcacccacgtccccagcatctgaggcatcacgcctgtcaccatcacctgaggaattgcccgcatncccacttcctgaggc

SEQ ID NO: 461008 - DNA, 811 bp, Homo Sapiens
  misc_feature (68)..(154): n is a, c, g, or t
ttccaaagccagtggccttaatatccattaccaaggccgataagtgccctggaagatatatgggaggnnnnnnnnnnnnnnnnnnnnnnnnnnnnnnnnnnnnnnnnnnnnnnnnnnnnnnnnnnnnnnnnnnnnnnnnnnnnnnnnnnnnnnntcactcaggctcctcctaattctcaagcccatgcctgtagtcttgatactacaagatgaccacacctctcaccaaaatcagcctcagggaggggagggtagcctcaccttgaacctttatctaaatctctgtggggacaaaggtgctccttcacattccatgagctgctgatttccttgctctacaagtgtcacaatcgccagcgcggttacaagtggggctgtggctgagcaaggtgtcctagcagtcctgtccctgctaccccctcccctccacagcgacagggctaaagactgggggaaattcagactgtccctccctgtgtagcacttgaggcaggtcaccctggtgagtttcccactgatgaaatgacttgcatcctggtgaaatctgagagagatggtttaaaatagtgcaggtgatcgccccgtcaaggtagctgtgcaggagactgtgaggaacagaacatcgtctcggggacaataaccattcagagcagtggttctcaactgcccaccagggaacatctgtaatctctggagacatctgtggttgtcacaacttgacgggggggtgctcctggcatccagtgggtagaagccaggatgctaaacatcctaccaggctcagaccgcccccacagagagagcgtcgtac

SEQ ID NO: 461009 - DNA, 444 bp, Homo Sapiens
gctgattctggcacacagcgcttacaacagcagccactgagagctaaattgagacttcgtgaagggatgacagtatattaagaagcagttgactgtaaaaaatgttttttatgctgctagtctcatgactaatcagaatataaccactaaatatccttaaactaaataatagtgcaaatagtactaagttctaatgtaaagttttaataggaggtaggataaagattgtcatggaaaatttttcaagtgatgttatagttttgtaaaataaaggcacagggaacaaatcatggttattgagtatttgcaagggagagattaattttagtgtgaactggacctcagatgtaggttcacaaccttgttgatcaataggaattaaccaagtagagctcaggaggattggtaagagtaaagaagttgggaaagtgattgttccccgct

SEQ ID NO: 461010 - DNA, 450 bp, Homo Sapiens
  misc_feature (71)..(179): n is a, c, g, or t
  misc_feature (196)..(329): n is a, c, g, or t
ggttcagagatatcctgcctcagactcccagtagctgggattacaggcagctgccaccacgcccagctaannnnnnnnnnnnnnnnnnnnnnnnnnnnnnnnnnnnnnnnnnnnnnnnnnnnnnnnnnnnnnnnnnnnnnnnnnnnnnnnnnnnnnnnnnnnnnnnnnnnnnnnnnnnngtgtgagccaccacgcnnnnnnnnnnnnnnnnnnnnnnnnnnnnnnnnnnnnnnnnnnnnnnnnnnnnnnnnnnnnnnnnnnnnnnnnnnnnnnnnnnnnnnnnnnnnnnnnnnnnnnnnnnnnnnnnnnnnnnnnnnnnnnnnnnnnnngcccagcctcatccttaataaattgaggttttaatttgcatttctctaacagccaatgctattaagcatctttccatgtgggtatttgttatctattttgatgaagtgattgttccccgct

SEQ ID NO: 461011 - DNA, 307 bp, Homo Sapiens
  misc_feature (13)..(13): n is a, c, g, or t
  misc_feature (56)..(56): n is a, c, g, or t
cacgggtgagggntgtgagacatagcagggcgcttcagcccgagggttctgggtgncgtgagcgcttggctttggatcggcagtggtgtcggcggcttgggggtgcggggccgtggtggcagcctgtggggagagactagggttagcaaggacctcaacctggggttagtacccctgctacccacactgccctgacacgctgaccagggagaggacaggccaaggtcccagagagagcttctcaacccacacagaacgggggactcaggaggtggggcaccttcagggaagaatcacaggagccagg

SEQ ID NO: 461012 - DNA, 288 bp, Homo Sapiens
  misc_feature (263)..(263): n is a, c, g, or t
ggagttccttccttcaaaggcatcctggatacagaggcccagcctcagtccaatcaccttagactgttgccctatttgagacctgagcttaagaaccgcagtcacactccatacagctgggatcttacgcggaactgtgagcataataattggttagtggctttaagctgctaaatgcgtagtaatttgttatgcagccataggaaacaaatattatttgtttcatgaaagagtcagctggagataaacttgggaatccccancagagagagcgtcggtaccggctga

SEQ ID NO: 461013 - DNA, 290 bp, Homo Sapiens
accgtggttgcgtggcttctgctcgggaacggcccggcgtctggctgtcagctagtctggcgctctctgtggggcttcaccgcccgaccccgcggtggagcctgcttctctcggacctccagagacctcggatccgtccgagcacctgccctagtcctgcctggtcccccaggacagtcccaagccactcctccccaggcgagcactgcgaagggtgcgcgggattgccaagccagttcctcttgatggcagtattgctccagaaatgcccacctgcccttcccccacgt

SEQ ID NO: 461014 - DNA, 603 bp, Homo Sapiens
acgctctctgtggggctaactgagactcagaagagtcccttctcagttccatcaacaagtagggcattgaagaaataactgtagaatccgctacaccatctttctgaacttgagattccagttctacagatccatcttcctccttggctgtctcttgttcagatgcttttggtggggcttcggactcaatgagttcttcaacttttcccactgcctcctccatcttcatttcagaatttcaagttaaatcatggagtagagtctaggaaatgatatcaaagatgcaacaggaaagcaacctgcgctccgcggcgactccgtgccttctcgctcgcttcgcgcgcgccccgtcggggcacgcaccgaacccccggccgggactcttccccgctccggtgactcaggacgcgacggccaccgccgccttctcctcctcggaacaagccccggcagcgagcagtgggtcgcggtcagagcccctgccgggaccaaagtgaacctcgccgcctccgcagcctctaccaccaagtcccttcagtcgtccgcgccgcccccaagaaaatgtcaccagaggccgttccgctgggcgcctcacttccgccc

SEQ ID NO: 461015 - DNA, 466 bp, Homo Sapiens
  misc_feature (353)..(362): n is a, c, g, or t
tgtctcagtttcgggacgcatggcgtgccttccactctgcccctggatttctttttacagccctgtgctcttgtgggccacaacagttcttgaggttggctgctagggttccccattggagcctctccattccagtgttctagggggcagatgagctcctatccccactggcctgtcttgctggtgtacagggccctggcttccactttgcgaggtcacctttcaggattcatgtgtatccactttgctgtgtcagaaactccctactgctgacctccctctcctctttgctgtcattaatggattctcattgtgggagataaacgtgtgctcagcctagaataccacatgannnnnnnnnncttgattcattgcttttgcctgttagccttgttgttctaaagtagttcatttttctactctacttttcctttcccctcaatgacccccgtcccgaaactgaaca

SEQ ID NO: 461016 - DNA, 512 bp, Homo Sapiens
cccctgctctgtgccgttcctctgctctgtcctgttctcagctatgtgctgttccacgctgctttcactgcacctgggggagactgagttgcttcaggcctcagcttctctgacctgccccatctgccttatgggttccatatgataaccacatggagatcattctggaggccttgctctcagcccttttccgcaggcttaccatgaccactgcccatccctctctgctccagtttaaccccatgcaccctgcggtcctcagatcactgtttcctctctgtaaccttttccttgtgccaggagaggtttggtcactggagctgagggcgatgatacgtgcctattgtcaaccagagtcctggcaggccacgagggtgttttcccagtaatggactcaggttgagtaagaatgcgggatgtctcaaagtcttccccagaccaactcttaatagtatttcctagactcactgttgctgttcatccttttgatgttcgtctacgaaactgagaca

SEQ ID NO: 461017 - DNA, 477 bp, Homo Sapiens
cctcatgtccttgagcttcacccatatgccgttgtgtgtctgaatctcctccctttctgaggctggatacaatttccctggatgtagatgccacgtctctttatctgcccgtccgtccgtggatgtaggtgccacgtctgtttatccgtctgtggatataggtgccacatctgtttatccatccatccgtccgtgaatgtaggtgccatgtctgtttatccatccatccatccgtggatgtaggtgccacgtctatttatccatccatctgtggatgtaggtgccacgtctgtttgtccttctgtctgtccgtggatgtaggtgccacgtctcttcgtccatccatccgtctgtggacgtaggtgccatgtctgtttacgccatccataccgtccatggatgtaggtgccacatttgttcagatgcaatttgtggatgtaggtagcacatctgttatcatccgtcccgaactgagaa

SEQ ID NO: 461018 - DNA, 915 bp, Homo Sapiens
tgtctcagtttcgggacgggagtataggcagtgtgtgtccccttgcgccaggacctgccagagcctgcacatcaaagaaatgtgtcaggagcgatgcgtggatggctgcagctgccctgagggacagctcctggatgaaggcctctgcgtggagagcaccgagtgtccctgcgtgcattccggaaagcgctaccctcccggcacctccctctctcgagactgcaacacctgcatttgccgaaacagccagtggatctgcagcaatgaagaatgtccaggggagtgccttgtcacaggtcaatcacacttcaagagctttgacaacagatacttcaccttcagtgggatctgccagtacctgctggcccgggattgccaggaccactccttctccattgtcattgagactgtccagtgtgctgatgaccgcgacgctgtgtgcacccgctccgtcaccgtccggctgcctggcctgcacaacagccttgtgaaactgaagcatggggcaggagttgccatggatggccaggacgtccagctccccctcctgaaaggtgacctccgcatccagcatacagtgacggcctccgtgcgcctcagctacggggaggacctgcagatggactgggatggccgcgggaggctgctggtgaagctgtcccccgtctatgccgggaagacctgcggcctgtgtgggaattacaatggcaaccagggcgacgacttccttaccccctctgggctggcggagccccgggtggaggacttcgggaacgcctggaagctgcacggggactgccaggacctgcagaagcagcacagcgatccctgcgccctcaacccgcgcatgaccaggttctccgaggaggcgtgcgcggtcctgacgtcccgaaactgagacagggtaccgagctc

SEQ ID NO: 461019 - DNA, 556 bp, Homo Sapiens
tcttcccttcagagttgagctgcatcttgagcttcacaaggatcttgtccaggaaggtgctgcgggaggcgttggccgtcagcggatgtttgactagggccagtacgtcctcagcccaggccttgcccacgttctccttgtaggagacgaagttgtggaaggtgaggtccaccatgtccgggccggacaccaccgtgagtgtcttcagcaggaaactgttatcaggaaagtccatgttgaagacgtcccggagcttctggctcttgggcatcattggcaaacttcccaagtcgagtactcccggatgctggtgatatccagaaactccatctccttactttgatacgtccagtataagtagtagcccttaggatccacacggaggataactggagaggcaactgtagtttcatcatcccatttgatgaagcgctccccttggctcagataggccttcacccttggggtggctagcaggaccagggtctgagcagagacatggtgccaagccgttcctctttgcagaatctcagcagaccgtcccgaaactgagaca

SEQ ID NO: 461020 - DNA, 534 bp, Homo Sapiens
ctgtctcagtttcgggacgtcatagctgtagaatgggcatcatgtgacagaagatgtctgtgctggagtccgagtctgcaggagacataccacgtggtcaccaccagcaggcagcctctggacgccaggggggcaaggatctgttcaggctaaaggcagccctgatagaccgcgaggctgtaactggacctagggcccatgtctgcctccacatgaactctaggctgtgggtggcagcaaagtgcttcttgatggcatagtgcactctctgaatcagcatgctggtgaggttggcacggcgcagcaggtaaggcatggtggagctgtatccaaaggggtccactgcccagccagagcggggggttgcaccaagatttctctccagccactggtgtccttcgatgagctggtcaatcaatgcaaagtagtgggaattggcctcatctggcatcacccagcctcctgtcgcaatctccagctgcccgtttcccaccagccttcggactgccgctctcttttggacattgatgttgt

SEQ ID NO: 461021 - DNA, 183 bp, Homo Sapiens
tgtctcagtttcgggacgcatatctccaatttggtaagtcattgtttctcaccatcccagcttgcttagtggttaagtttgagctttaggcttatgcctcctaggttccactcatagttgaactggtctaccaatagattaagttactcactgatcttgagtgagttacttaacatatttacc

SEQ ID NO: 461022 - DNA, 489 bp, Homo Sapiens
tgtctcagtttcgggacgagagaggagtcctttgggccgggcacgtgggctgcctgaatggctgctctgttcccagcctgacagctgtgcagccgggtgcccgccttcccccacaggcccggagtggggcttgggcttggggtggcggcagctctcacagctccagggccaccagggctggggcaggcagctgtgtcccatgcaggccttggcctcagcagcccatgggactcggtgtagccaggtaggcttcctggaggaggggtccttggttcatactttgttccatgagccctatcacctctctgtccctggctctgagctgggtgaccccagggtccccaaaagagccccgtcccagaccctgccttcagagtcttgttcttggccaggggagcggatagaggagcagagccagacataaacgttcccgttgctgtgtgtgtcttggggaggaggaagagaagctgtggggtggggctttggagg

SEQ ID NO: 461023 - DNA, 389 bp, Homo Sapiens
ctctcctgagtgcagggtggctctggtcaggcaatgggcatgaggaggaagacggggcttccaggagttctccctgcatttgtgcttcaggagcctctttccaggtgacgctttcttgtaatttttcctgaatatcttctaggtcatggagaatatctctgattttccctgcagctgtgtcggaagtcaccagctttggagaagccatggaaagatccaccccagaagaaaaagccttgcccaggatgctcagttcgttgtctggtccagattctgataggggcctctgattctgcaggcttctgacaatgtctacaagatgttccaccagctctgtcagctcctgagcaacttctgtgatgctcttctctcgtcccgaaactgagaca

SEQ ID NO: 461024 - DNA, 484 bp, Homo Sapiens
  misc_feature (13)..(13): n is a, c, g, or t
tttttcctcaacnatgcccatggctttccattttgccaccccaagaaaggaggaaggaaagctgacacctggtcttgcattccagcacgcatgccacccttctcctcccgggaccaaggcaggcattgctaatggatccctttccctccctttccctggatccttggtacaggtctctaaataaggcagccactgccagttgagtgaagctgccatcaagtgaaacctgttggccactggtttcaggtcaggtttctccaaagctcaccctcagctgaggattgtgtggctgtgagagtgaaggattagaaaatgtttccaggaaaggcctttaggagcatcgggcagtggggagatggggaggccaggtgagggagcggtgctgcgcagagcaccccgaagggtgactttggctcactcttcctgctagaggttctggagacaaagttgcaccctcaccctagtcccgtcccgaactgagaca

SEQ ID NO: 461025 - DNA, 487 bp, Homo Sapiens
  misc_feature (308)..(383): n is a, c, g, or t
cgtcgctctgaggatcccctgtctcagtttcgggacgagagtagaacaggaggcgattgtagatgccacagcatgggggtacatttcccaaggctgactggctgagaccacgtgaagcatgtctgagttgtgcaggctgcagacccttcttccttcactgcacatctctcccctggcatgaaagttttccttttcttccaggggccgttgtctttttgcattggaggttgtgggccttagccccagttgttgaggactttaggaggctttggtgctttccaagcctttgcttagggaaaggcagcttnnnnnnnnnnnnnnnnnnnnnnnnnnnnnnnnnnnnnnnnnnnnnnnnnnnnnnnnnnnnnnnnnnnnnnnnnnnnttgaccttgatcccctgagctttgtgtcaaggaggtcttcattaccgagttttcccctgagcgaggtttcaacagttctcattctggttggtctgtgatgtcaa

SEQ ID NO: 461026 - DNA, 158 bp, Homo Sapiens
tgtctcagtttcgggacgcacaatgttccccttttagggcctttgcagttgctggctgctttacctagaagggttttcctttcattttcaatcagttaactcctttcctcctttagagttcattcaaatattatttccagctgggtatggtggctcat

SEQ ID NO: 461027 - DNA, 452 bp, Homo Sapiens
tgtctcagtttcgggacgccagaaagaacgggtacacctgagtgcacagacaagtccagtggctctcttccgtcgtggtccactgtgccagctccattgttccagggctgaggcctagggcggtggggctatatggcaggaggagtgtctgcactttgggcctctgcctgggatttatttgtgtctctgaggcatccagcagactcttggaggacaggatgaggtgttccctggcctttcccagcacgtaggtgggaggcctgggcccctcatgaagaaatcagacttggcgtggacttgcaaggaaggtcccccagccggaggaggcgtcatcccctccctggggctgaatgctggggccacctctcccctcatgcctgccatccacaccccgctccaggtctgcttttaggccccagtccctgccccatctagtgtgttcttccagcctc

SEQ ID NO: 461028 - DNA, 686 bp, Homo Sapiens
  misc_feature (189)..(189): n is a, c, g, or t
tgtctcagttcgggacggattctttctggtgataagataccaaattataaataagacctaaggggatgcaggacgcaaaaagctgtgtgtatgtggccactgcgtggtctttgatatcaaggcatcagaggctacttcctcaggataagtgactcctggccaaagtaaaacctccgaaattacccgggngaatttggggtccataattgtccaggttgtggacaactgctaccatgctggcagtgtaagccatttggccctttatcactaggctgaatggggttcctagtaactccacaggtgagaggtgggggaggccagggcagctttgagatgggtgtggatagtggggactgtctgatggcagccgggaggagtgggcaggtgggtggaggagggaggacctctgcagtttgcactttgcattaggaagggcaacactgatgctgccaccattggctctgtcttgtgaccacaaagaggcacagctgctttgctgggccggcatattcccaaagcgagccacagtgagagccattctgcctggccagcctgcacatgtctacacccttcttgtgagggctagcagacaggatgtcttctgggaaactgccggtagctgtgtgaagtctggataaactcccatcaactcagccaggccttgtcataggcattttcacagaccc

SEQ ID NO: 461029 - DNA, 419 bp, Homo Sapiens
aacctgggcgacctgttaagacacagcaggttctggaactcggtttccagccatgcagtgagcattgattgccagctgtgtgcagtgacacggggacgagtcagaactgggagctcttcttgttccgaaagcccgggcacatgacccgagcagtcagcagtaagtgccagtggccagtaagggccagcaagaagggcgtgatccgggctcttggctcccagctctgtgctattccctgctctgtgccgctcccagctctgtgccgctcccaagctctgtgccgctcccaagctctgtgccgtttcctgctctgtgccggtcctctgctctgtgccgttcctctgctctgtgccgttccctgctctgtgccgctccctgctctgtgttgttcccctgctctgtgctgttccttggctctg

SEQ ID NO: 461030 - DNA, 674 bp, Homo Sapiens
aagcctgcgcggaaggaaagcgcgatttgaagggaagaagaatgcatgagcaggtgtgtacaaattgtattatgggcggccagacgggcagagttccaatcatcctgcaaatccctgtggaacctctgggccccaccggagtgtcccagtctcttctgtgtccccttctcctcactgtgaaagcactgggccatgggaagcagtgggcttcctacgtattttccctgggaggcccgagcagcagccaccctgctctatatagtgcagtctgaggggcatccagggagtaggggccgtgtcagggctccctcctcactggctgcagcagaaggatcccaaccacccagtttttcagtcagtcccaggcatcatgggcccccgaggagcatgggcactcagtgccacttaccaagcatacctactccaggcagaaggctcaccagagtccaactagagagagcaggtgaggtctcactctgtaagagtgaaagtaagagtggttctcacccgtgcaaagtcctctgatgtgtccacctgtagctagctgaaggatgtgtgcttgcatgtgtgtgtcaccaaagcatttcaccagcacgaaacgctacgggacaggctcatcaacaccaggagatcttgaataataatcaaggattaatgaagtatatagccttgag

SEQ ID NO: 461031 - DNA, 506 bp, Homo Sapiens
ctcaacgctttatattcccccctgtcatgaaacagcaaccagttgctatttctagcgcaccagcatttggtatgggaggtatcgccagcatgccaccgcttacagctgttgctccagtgccaatgggatccattccagttgttggaatgtctccaaccctagtatcttctgttcccacagcagctgtgccccccctggctaacggggctaccccctgttatacaacctctgcctgcatttgctcatcctgcagccacattgccaaagagtttcttcctttagatagatctggtccagggtcacaactaaacactaaattacaaaaggcacagtcatttgatgtggccagtgtcccaccagtggcagagtgggctgttcctcagtcatcaagactgaaatacaggcaattattcaatagtcatgacaaaactatgagtggacacttaacaggtccccaagccagaactattcttatgcagtcaagtttaccacaggctcagctggct

SEQ ID NO: 461032 - DNA, 558 bp, Homo Sapiens
acaccctcaacgctttatattcggctgtggctacttgaggacccagttaggagaggcacaagatgaagaagttgcctcactgttccctcgatgggaagatccttccctcagtccctcaggaggctggttcctcccgtaggttgctcagcccagaggccagctggctagagcagtcccactcgactgacaccctccctgagtatccacatccagcacattataatagttcaggaaaaaggtgatgagagaacatgctaatggagatggagcaggagtggggaaggttttaagaaatatttaggaggcaagaatagaaataacttagtgaccaatttgagaggtttgacaacagagtagaataggtcattatcttaccaagctagaacaataaaagagtgagtttggatgcctgcaaggataattgactaagttgtagacctggtgtctgcgttttgtgggtgaccaggtagagaggtacagataatggaaacctgcagtttaggagggatgtcaagattaaaggcagaaagctagacttcattgttatatgtgtgcaca

SEQ ID NO: 461033 - DNA, 419 bp, Homo Sapiens
agtcttatcgtctacttctgaagaagatgagccaggtgtggtgaaatttttaaaaatgaattgtcgatacttcaccgatggaaagggtgtggttggcggtgttatgatagtgactcctaacaacatcatgtttgaccctcataaatctgatcctctggttattgaaaatgggtgtgaggagtatggtctcatctgccccatggaagaggttgtttccattgcgctctacaatgacatttctcacatgaagatcaaagatgccttgccatcgcctggagaatgggaagacctggcttcagaaaaggatatcaacccattcagtaagttcaaatctatcaacaaggaaaaacgacagcagaatggagagaaaattatgacttcggattccagaccaatagtacctgcccgggcggccgctc

SEQ ID NO: 461034 - DNA, 541 bp, Homo Sapiens
  misc_feature (24)..(24): n is a, c, g, or t
  misc_feature (105)..(221): n is a, c, g, or t
aatgcaaatcaaaaccacacaaangatgatcaagaggagcatgaaaaaatccccctgaatccattggctttcttccctatactgacaacagtttacttgtgtaannnnnnnnnnnnnnnnnnnnnnnnnnnnnnnnnnnnnnnnnnnnnnnnnnnnnnnnnnnnnnnnnnnnnnnnnnnnnnnnnnnnnnnnnnnnnnnnnnnnnnnnnnnnnnnnnnnnnttcaagttggtgtgtatctgcaaaggcgatggaaaggagttcttacatatgcatattctgaagaaggatgttacccttactgaaaaacttattccaagatatgtttaatcaatcatgagaaaaataaagagacatccttatgaatggagaataaagtcctcagggtttttttctaattccccatgtgaatgaagagctgtgttattctaaatatagtgtttgtcataaggcaattgtgtggttgagtcgtgagtcgctggacactgataggaattcttccaaacagagagacaacaagtatcaaaccgtgcatcatttcg

SEQ ID NO: 461035 - DNA, 575 bp, Homo Sapiens
  misc_feature (51)..(82): n is a, c, g, or t
tactcaggagcccgaggacagagaatgcgtggacccaggagtcggggattnnnnnnnnnnnnnnnnnnnnnnnnnnnnnnnntgacaaagtgatacgccatctcaaagaaaaataaataaaagcattttaacagtattatgtttgtgctttcaatttcaattctaagttacagtttttactaagtttgagtaaatccttgagatggacatagtaggatgaattttgaggagtcatttagcaactatcaggtattttcttggttaactgttatagaagaatatgtattcattatagaatataagcaaatatagataatccttagtttttactggtcgctggcttgatctgaatttaaattatctcattcctcattttaagaagaggaagaagtgattgttaccaagtaactcacagctgtctgcttcactatctagttgagattggtttttggtattttttttaagcctttggatttataatctgttatgtcaagaacttgtggcttccttaggtaaggattacttaaattggatcggagttgttttctgttttaggtagctgaggaccatcgttg

SEQ ID NO: 461036 - DNA, 595 bp, Homo Sapiens
  misc_feature (67)..(111): n is a, c, g, or t
  misc_feature (134)..(151): n is a, c, g, or t
  misc_feature (471)..(487): n is a, c, g, or t
tgtggtggctcatgcctctagtcccaggtactcaggaggccgaggacagagaattgcttaaacccannnnnnnnnnnnnnnnnnnnnnnnnnnnnnnnnnnnnnnnnnnnntgacaaagtgatactccatctcnnnnnnnnnnnnnnnnnngcattttaacagtattatgtttgtgctttcaatttcaattctaagttacagtttttactaagtttgagtaaatccttgagatggacatagtaggatgaattttgaggagtaatttagcaactatcaggtattttttgttaactgttatagaagaatatgtattcattatagaatataagaaaatatagataatccttagtttttatggtgctggcttgatctgaatttaaattatctcattcctcattttaagaagaggaagaagtgattgttaccaagtaactcacagctgtctgcttcacaatctagttgagattggnnnnnnnnnnnnnnnnnaagcctttggatttataatctgttatgtcaagaacttgtggcttccttaggtaaggattacttaaattggatcgagtgtctctgttttacgtagctgaggccatcgtt

SEQ ID NO: 461037 - DNA, 549 bp, Homo Sapiens
gatccactcgggtttccttttacttacccagagactataacttggagacagaacttatggtacaacatatggaagtgtctcatgagagtgcttaccagatacagacaataatttaaacatttctattctggagacacacctttgaattctgtgtttgaatatgtgttataagcaacatgttccacatttacccaaagattcccaaatcctgaaacttattacataatagaactgaactaattttaaacctacctccacagaaagctgaagatagtcataagatccatgcctaggatgtacacacatacctgtactccctcatccagaagcagaatgatcctcaaaatgtgaattttgagagtgaaataatgagaaacagggggaggggcagagtctgctgtatttaagtcggtatagcatattgacatcttagatgttctcaaagggggttatgtttccaaaatactatgaagccctcgatatagtgaagtctcacctctgacgtggtcatttggtattttaaaatttttgcccttcacattcaaaagt

SEQ ID NO: 461038 - DNA, 879 bp, Homo Sapiens
caacgatggtcctcagcttattcaaattactcagattagaaggtacttgataattagggggattagaagaacctcctaatctgagtaatttgaataaactgagggaaattgtggaaaagaaagattacaaggtgatgaaaaagagagtagataatgaagagggtgtaaaaacttataaggtactggaaagggcagccatgaaattcctgaccatggaacccaaactgagagatgacagacttgaaggatatggagaaaaagattcaagttcttggcggagaaggtcatgttcagaagcaagtaaggtagtgagagcggtgagaacaggaaacagttaaagaaggagagctccagagtgaaaatcttgtgtttgatggtcccttcagtgatgctgatgcggttgaggtgtgttatttttatgaatagttgagcagaatggaggtgaagtgggtgagaaagtgtgaaactgtgtgtatgtagttttacaacgtgtctgtaaatcctttgatatttttccctcgtgaagtatagtgtaatttccttctccttaggtatggctagccttagtcatatgtttctaacaaataaaatgcaatgcatatgatgctgtgtgggttctgaggctaggccctaagaggtgatatggcttctgtctgtctctctcttgggatgcttgtcattggaacccagctgctatgctttgaggaagcccagggtacatggagagatctatatacagggacacttaagcctgggaccctcagcctaggctgagctcctggacaaatccagcactagcttagcagtcctggaggtgaaccatctggaaagcagaccctcaaatcttgctccagctctccacatcagaactcgttagga

SEQ ID NO: 461039 - DNA, 637 bp, Homo Sapiens
tgaccagggaggcggaggatgcttaaggccaggaaatttgagacagcttgggagacagagctagacctgtctctaaaaaagaataataataataattagtaataatagcagcttctactttagagtttcctttgtgccaggcagtggagtaaggtctttgcatctattaccagatttattctccctggcagggaaagctgctgttgttattcccaatttataggtaagtagtgaggaatccctgccacctaagcgtggctcaaggtttcaaggttggtgggtgtgtggtatttaaatactttcctgcctgcaccaggagtacctgtacccatcccatgaataacactggactgttgctgtagtctccttctgcaatgatctcggtcttagtaactagcatttaagtactttcacccactatttcatttcattccttctattgcaattccactcataagacagaaaaatgtttctaacatttgaaatgttttagaaatgttttaaaaatgttggtgatcctttgaggatagggaaggaatgggacttgttattttataggggaagaaaagcactccccagctattaggtcatctcagaatgactatgtcagactttgtaggaatctctaccaatattc

SEQ ID NO: 461040 - DNA, 572 bp, Homo Sapiens
  misc_feature (445)..(462): n is a, c, g, or t
aggactcgacctctccaggtggtgagaacataaacacaatggctctgcctataaagcccctactaatggctggcaaataacaggagtgccatgagaagtagtccctaatatctccccctctatactcgcccatacagcagagagctgggccaaaggacccgcttgttcctgagtgcagaaaaaaccccagtggggtgttcatgccccggttatgtatgggcttggtcatcttcaagaaaagaatgtgtgcaccgtaaagagagaacacatcactggggcccggaaggaacagtggtagaagggacccccagcttcccccaaactgccaattccctgcctcccacctggggcacctctggcaaccaaccacggtggcaacctcgtactttctcttgggctcttcctgttggcatagcccaaccctgttttaccaagctcccgtggnnnnnnnnnnnnnnnnnncatggctccagctgttagataaactttcaaggatatttctgtggcaggtacaaacctgacagagacttggcaagtatatctaacacgactgagaccatcgttggtaccga

SEQ ID NO: 461041 - DNA, 828 bp, Homo Sapiens
tgactgggaatacctggcgtgagggaaaacatggttaatgaacttggaaaaagggagagtaggggagcaagcagagaggctatgagggtataaccagatatggttacactggagtttaatgttctggaagcagagacattacagaagacaaggccagagtgtgggcaatgtgactgagctggcaaagtatggtggggatgaagtcttgcaactctgaagctaagtcactggatatttcctgcacacgcagatgctgaagaccaccctgatggtggcagttcagatagcaaagaggacatgagccaagggactgagccttcatgggaccagaggaagtaacagggatacaataagacagccaggaaaaagggtagaatatggtctatgggaatttcactgggaggtatgggatcatacagttttgcaggattatggcaaaggaatgttttggaagctatagtgaccacagctcctttgagcctgggaagtgtagacaaatgaatagtcactccccctgccctctccagaatgcactttcttggggaaaaatcagatgtggggagggagagtttaatgaaccggggtccaaagacgttgttgaaaaaaattatgagaaagtcaagtgagaaagaaagaggggcaagccagagagaatgagaatgaccttcactgtggggtttaatgtttcatcttgaatatgagctttatttttcacaaatatctttaagatttctagcctgggtccaatcagacaaacaataatgatgccataggatatagtcaacattcctcttctcttggaattatctcaggaataacaaaagatac

SEQ ID NO: 461042 - DNA, 713 bp, Homo Sapiens
  misc_feature (71)..(369): n is a, c, g, or t
cacctacaattttactgtagagaacacaaggattgaaactgaagttgaaaacaattatgtggcactatggnnnnnnnnnnnnnnnnnnnnnnnnnnnnnnnnnnnnnnnnnnnnnnnnnnnnnnnnnnnnnnnnnnnnnnnnnnnnnnnnnnnnnnnnnnnnnnnnnnnnnnnnnnnnnnnnnnnnnnnnnnnnnnnnnnnnnnnnnnnnnnnnnnnnnnnnnnnnnnnnnnnnnnnnnnnnnnnnnnnnnnnnnnnnnnnnnnnnnnnnnnnnnnnnnnnnnnnnnnnnnnnnnnnnnnnnnnnnnnnnnnnnnnnnnnnnnnnnnnnnnnnnnnnnnnnnnnnnnnnnnnnnnnnnnnnnnnnnnnnatgtgacacatttttaacagcaattaatttctgtagagaacttgaatttgttccttctttccaaatcgtcatcaattcttatgacatttcccagaaacaaatagttaataagctcatgccctaacaaaggctggctgcactagcataccaaaaggtttctgtaccactttaagttttagctgatacaaaacttaacagcacattttttaaaagaaagttttagagtcacctggttatccactccctttccctagctcctaagatagatatcgtgccgtacgcatactactactgaccgctttagcctcgtattagttaggatgctgtatgtaccagacacacca

SEQ ID NO: 461043 - DNA, 722 bp, Homo Sapiens
  misc_feature (16)..(16): n is a, c, g, or t
  misc_feature (22)..(22): n is a, c, g, or t
  misc_feature (40)..(40): n is a, c, g, or t
aactgcacgtgtcccnagttgnacagctggctctggttangcggccatcagccacgatgtcgtcgatctcatcctcaatgcggaaggggtgttgtgaggtgggctcgtcctcagggcacgagtatgggctcatgtaggggtgttgcagccccatctcagctgttaggcgatccatggggttaaaggtcaggatcttctccagaaagtcgatggcttcactgttcacttcagggagcagcttgcgcagaggcctcttcacctcccaggtgctgctgacaaaggaaggcatcaccctgagcagctcgtccttgtcttcctcccggattacagggatggtctccaggatgagttgcatctgctccagctcatgggccccagcaaagagcattctccccgtaagcatctcagccaggatgcagccggcggcccacatgtcgatggctttggtgtagttattgggggaaaggagcagtcgtggggaacggtaccactttgttaccaacccttctgacagataacccttgtgggagtaatgctgatcaacgattcctttgccaacccgaaatccccaatcttgagcacgaggtcctctgtgctgatgaagatgttggcgggcttcaggtccctgtgcagcacgttggcggagtggatgtacttgagcccgcggagcagctggtacatgaacagcttggcatgctcttctgccagcgtgcactgctcca

SEQ ID NO: 461044 - DNA, 693 bp, Homo Sapiens
  misc_feature (190)..(233): n is a, c, g, or t
gaatgggaaaaccatggcgaagagagatttcaaatgaatgtgttggcttctgctctgtctcgggggaagcctgcatcccctctgtagcatccatatactgtgccttacagcatagacctcatggtagcatggtaggagctccatataactctgcttcttctggaggagaaacagacactctactcccaannnnnnnnnnnnnnnnnnnnnnnnnnnnnnnnnnnnnnnnnnnngcaatcccctttcccatttttcccttgatcctttgcgtggaagtagaattagaggaaatatgtccttagtcatcccatgagagcacttaaaatgttcagttgtcacagtgaaaataaactggcaagaaatcagaaatcaagaagtggagtcatgggaatcctggacatgctaatccaatagagacaagatctacatgttagtgatggccatggccaaggtaatcatcccagacagcagtcagactctgcattatcccatagagagagactacaaacatttcatttcatatgaggatatatgtacacccaccaattgcccttactgcccgctttccccttcagcttcagtggaacgcatacttattttcatttaatgtttccctgtggagctatggcaccactgtgataagtactgtaacctttgcttctggagcactcactatagtcagcatcagtatac

SEQ ID NO: 461045 - DNA, 402 bp, Homo Sapiens
  misc_feature (97)..(97): n is a, c, g, or t
  misc_feature (104)..(104): n is a, c, g, or t
gtccgaaagctatggagtggtggtagcactggagttaacaccgaaattggcaagatccgggatgaaatggtggcaacagaacaggagagaacacccncttcagncaaaaactagatgaatttggggaacagctttccaaagtcatctcccttatttgcattgcagtctggatcataaatattgggcacttcaatgacccggttcatggagggtcctggatcagaggtgctatttactactttgaaattgcagtggccctggctgtagcagccattcctgccggggtgcttccagtcatgacgactcgtgcctggctcttggaatctcgcagaatgacaaagacagatggccttgtttcgaagcctcccgtctaggcgctgtaactcggggatcctctaggag

SEQ ID NO: 461046 - DNA, 422 bp, Homo Sapiens
aagtatctcgtttcacctcccgattctcactgtcttttactttgttccctccacaccttcaagtctctctcaatattcctcagtttgcccacagcagcctatcacatgcagtattccattcccttgatctcatgctgggtaaatacgataaatataacaggagctcccattacagaatgagcttctggccaggatctgaggtccatgtctaatttggtagagtatatcccccaaatctggagatttcatggttcccacagaaatgcttcttaatgcctagtctcctcttcagatctgttgtttaatgccagctgcctctaacatcatatatccttgaacctgaaaattatcctggacactatcaagtatttttttcttcttgctatcccccaactacccgtctaggagcgtaatcgtggtaa

SEQ ID NO: 461047 - DNA, 781 bp, Homo Sapiens
  misc_feature (75)..(118): n is a, c, g, or t
cctagagtatccacgatgacgctcctagacgggtttcaccgtgttagccaggatggtctcgatctccttacctcnnnnnnnnnnnnnnnnnnnnnnnnnnnnnnnnnnnnnnnnnnnntgagccaccgctcccggctgatacgttttaaaggagaaaaaagtggaaggcagggtccctttcaataagggtgggccagcaaggctgactgggggtaatagacctgagctgctgtgattcaaatagcctagaagctcctggtgtcctgtgggacaactgctgctggcatcattcttgactgtttcttcttttggagacaggagcaagttaagcctttctacctcaactctcacaggactctgcatgctccttggtttcctcctaactcagttatgtgcatgacaccttctttctctttgttctttggcttttctgggtggcagccaagtcccaggaactcatccccatcttcccctacccacctccctgacctcaactctttgtgcctaaccctaactgtgatggtgaagtccccagcaattccacaaagcaggctggctcgatgggcaaaaacatctgcatcagacactcttgcgctggctggctctccatgggttcttagagatcttttgcaagggatatgaaggataaaatcctatctgtccaattgctccactgtgatcttccaagaccagaaattcacagcctctgaagagtcaaaaaggcacatattgttcagctggcctgaccccacccccattccgtctaggagcgtcatcggtg

SEQ ID NO: 461048 - DNA, 378 bp, Homo Sapiens
cggtaccgattagctcctgacggaagcgggagtccgagggcactgacgactggggcagagggccaactgcaaggtttggggaaagccttttctagggctcctattgggaaggggcactgggtggatcatagccaaacttctttgacacacaggggcagcagttgagagatgatcacacagagctttcagtaactcccaaatggactagagcgtatgagagatgataaaggcccagagagagaggatttgcccttgccttagtccccacccaaactcactcactgatgaagtatccactgagacttaatgtctttgatagtgtaacactccacttaaaagcaaacaagtgctattttcttgaaacctacaattttagtt

SEQ ID NO: 461049 - DNA, 430 bp, Homo Sapiens
gagcacatcacgtctgagtacacagcttcagaaccaggataccttctcagtggctgtctccttcctgacgggccgaatcgtctacatttcggagcaggcagccgtccttctgcgtttcaagcgggacgtgttccggggtacccgcttctctgagctcctggctccccaggatgtgggagtcttctatggttccactgctccatctcgcctgctcacctggggcacaggggcctcagcaggtgaggtgcccaagcgctgtggggaggcatgagcagtcccaggaaattcctgctgtgaggggccggggaacccagactttcccttagtggattcttcgcagcctagggaaggggcaggaagctgtgctcactcctctcctgtctgtcccagtcagcctcacgggacttacccagagaagtccataggggac

SEQ ID NO: 461050 - DNA, 517 bp, Homo Sapiens
gcatatattgctcctagactagactacataatgcagagatcctcgtgaggatgtcgagctgtctggcgataagcacagaatagcttgggaggcttccaaaaagttctgaattggaaaaaccttggggcctggagtgcaaggctaaggcatcaacagtcttggtggtttctgagcagtagagcagtgtgaggcgtaggacgttaggaaggctaatggataggtggagcagagaatggcaggaggaggaggcattataaggaggctgtgattttctaggtaggtgggaatggagtttgaatttggtgagagaagggacccaaagcagagaaggagggggtgtgttgcgcatccacgcagcctacaggcagtcagggactgttcactccaggtagacaggtaggacccaagctctggtcaaggttgtgctgctgctggccctgtgctgagtcttaaccctgctgctgtggactgctgtggctggagggcagggcttcttgggtggggggcaaggttgccc

SEQ ID NO: 461051 - DNA, 469 bp, Homo Sapiens
acaacccacaagcccactcatgaggcgtgtgacttccttgggcttccggatcctcattcgctaaatgagaataacactgggtgccctgcccagcttggaagatggtgatgctcaaaggaagacacgcgcatgtgtttgtcattggcagtgttcgggacagttaagttcctttagtgacggagaagggatcctgccacaagctctgccttcttcacagctgagacactactactacgctgatatttttcatctatcatggagcactcagagagtctcatactattcacgtcgcctcacgtcacccaccctccaaatattaatctcgccctgggattgtcttctgccttctcttgaatctgggtctgaactttctacctggatctgcctctatatactcaaatactatgcacgtgcgcagcccatgtctcagctccaaagcctgatagggggatacctcaaggaacaacta

SEQ ID NO: 461052 - DNA, 398 bp, Homo Sapiens
caggtcatgcaagcctcagtttccccagcatgtcagccgggctgatacacgctggatctcttggtggtgtgtgaggattgcatgagaaccgtgtggagagggcacctggtcagcgctcctttcttccccgccttctccccgttggctgacagtgctggtttccagagcctccttcctgaatgtttaattgattgacgagtgaattcagagaatcctaaaggtgctgcctggtgggctgggcctggcactgcctggggagggacttgccggctctggggaagtccatctcccaggatggctccagctccggggaagtccatctcccagaggtggctccagatcacagacacgtttgagcgcctgctgtgtgctgcgttcagcccaaagccctgataggg

SEQ ID NO: 461053 - DNA, 202 bp, Homo Sapiens
ctcaatttgccatagaatcacttcatcctaactgcgcaggagccttgaaaggtcacaaggtctgagcatccacctgctgctttgtcattcatctcatgctaatcctcctccacctgcgtctaaactaacatggacagtgtcagcgcagggttttccagtcagacagtgtcatatcatcgtaactgtcaagatagaactccgt

SEQ ID NO: 461054 - DNA, 585 bp, Homo Sapiens
ttgattcctagagtaacacaagatgtcagatggaccctccaaatccaggagcaccttagaaagtcagatgcatctaacagactgggggagagctctggagagggtgctatgtgggtttaagctggaacgtgatgtcctgtaagtcaccaaaactgactcagctttaggtattctctgtgtaatgactatgaaaatagaatctacctcaaatagttaatcactctacagacttggagagtccacaggcaacgaggcttcagggagatcactgagaaagcagcaatgtccaagaggcggccgccagcagaccctgtgctaaagccacctctcctgtggcagctaggagaccagactctctcggtattcctgccactgctccgacaacgtcttgatctttcctactgaccctctctcccttctttgctcttctggccctccttggggctcagccccgcttctctttctcttccccctgcactctcttcctggaaggactcatccttccttgcagatttcatgcctctcttctgctgatgattcagacaggcacatgcaactctcttatcttctccagaatttcgtggt

SEQ ID NO: 461055 - DNA, 484 bp, Homo Sapiens
  misc_feature (178)..(178): n is a, c, g, or t
  misc_feature (460)..(460): n is a, c, g, or t
tatttggggtttttccctaattgttttaaacaaaaattacattacaagatccaggttcttcccccccacactcaatcaagccagccctctcctcttctgtcacgtaaaggatatttggcacactcatgcgtcattcattcacaaaacacaaacccaggactttctgcctaaggcaganacacaagactcacagcagcaccgaagcgcatctgccgtccgggccctgccagcttgccaggctgccagtggtaactgtggacctactgcgtgccacgtgttttcatagactcatcccatggctgggcaacagcccttgcaagggctttggcttctgccacagggcagggagagggaagtttttaggcgcctagcgaggagtttccagccccagacggcccacctgtgcctcaggggaccgccttgccgagcagagtaaggcacagcagccgtcagagttccntgagaggtgaaaccacacagcagg

SEQ ID NO: 461056 - DNA, 466 bp, Homo Sapiens
gaaactgaagcccagagagagatgaagtgatttacccaaagaaacccagctcaaaaggagcagagaccccctcagaccctgcttcctgatgctcctttgttcccctccttacttataaccagcagctcagaatccttttaatttgtgaacttcagatatcattcccaaactctcatgtttgatagaagtccctaagtttcttttcccaatgattatggtcaatgtgaacatcccaacccagccccgtgttagccaagggaagagggtttggatttaggatgtgaaatgagctaatgtctcattaacctatatttttgaggggtaaggaagaacaatgaaaataaggaacagcagaatctaaacctataaactgcccttactaaatctcctgtagagaacagcttttttcttacaatctcatgtgctccatctgatctctcggggatactctaggaatcggccatca

SEQ ID NO: 461057 - DNA, 377 bp, Homo Sapiens
cgtcacacagaacatcccgtcacacggaacatctcacctgtcacacagaacatccctttacccctcacacggaacatcctgtcacctgctgacacgggacatccgatcacgcgtcacacggaacatcccatcacacagaacatcccatcacttgtcacatctcacccatcacacggaacatcccgtcagccatcacatctcacccgtcacacagaacatcccttcacccatcacacggaacatcccatcacccagtcacaatctcacccgtcacatggtacatccctctcccccatcacatggaacatgccgtcatctgctcacactgcgacagcccattacccatcacgaccggaacatcccttcacccagtctcg

SEQ ID NO: 461058 - DNA, 573 bp, Homo Sapiens
gtacagttactcgcgtcactctttcttcagttcgttgacgctataagccgtacagttgtggccactgctttccgccttgtgagttataatggaacatctaccatgtgtggctgcccaaatcttgtaaatatttccacatttcagtagtgccatgtttcgtgaatcttgtcacctcaaggtaggttccaaaaaccgtaaaccaaccagcctacctacaattcccagcttccattgcagcaagagagtagaatcatggtctaggttctcctaaccagataatcctatgtggaattttgatttgcaaatatttgagaaagcagtttgggtgagtggctagtgtattggtatcaggtcccttattgggtcagttctttagcagggttctgggagttgttctaggaagaccagcctaaaacctgtttctccacactttcagtgattctgtgagctaatccaaggtagttttcacaatacttcacaagtggcacagcctgggccctgctgcacctgacaggtgtgctgtgatctcaggcagaagggaagtggctgtaaacagccaagtaagtctgtgca

SEQ ID NO: 461059 - DNA, 493 bp, Homo Sapiens
  misc_feature (320)..(422): n is a, c, g, or t
gatcagtattgccatccaatcagatggatagggatagttaataaaataaaacataacgacatggcggtcttttcatggaataatatcttatttttattaaataaaattaccagaaatagcactggacttccatttcagttcatgctgcactcaattcacccaagacaacctcacattgattgagcatcagtattgtatgccaggtactatgtgacatggtacacaaacacaatgtgagatgtgtttgtgagatggacaaacaaaaatgtgagacacaaaaatgtgagatggacacaaacacaagtaagaagtaatgttgnnnnnnnnnnnnnnnnnnnnnnnnnnnnnnnnnnnnnnnnnnnnnnnnnnnnnnnnnnnnnnnnnnnnnnnnnnnnnnnnnnnnnnnnnnnnnnnnnnnnnnnagggacaactgatgaaatgaccagctcaagcagttcgtggtctcctgctagctgaataatctcaagggtac

SEQ ID NO: 461060 - DNA, 375 bp, Homo Sapiens
agagaaaatttccagaaatagcactggacttccatttcagttaagctgcactcaattcacccaaaacaaccccatattgattgagcatcagtattgtatgccaggtactatgtgacatggacaacaaacacaatgtgagatgtgtttgtgagatggacagacataaagtgtgagacactgaaatgtgagatggacaacggaacacaagtgagaagtaatgttgccattaaaccacaggctctttgagggcaggggattttttcttattcgccattgttttcccagaacccattcctgcctggcacatagtaggtgctcagtttaataagggacaactgatgaaatgaccagctcaagcaattcgtggtctctgct

SEQ ID NO: 461061 - DNA, 560 bp, Homo Sapiens
  misc_feature (1)..(1): n is a, c, g, or t
ncaattttatttttggttttgttttaaatgtacctttattgtttgactttgggatctgggagagagtatgtcttttaatgccattcttctttcttgagtcttcggtgacacatgtttacttgtgggaatatttcactttatagttcttttaaagaccttttgctattcgcttgctcttactcaaaccagaagttaaagtggcttgcataagtgtcagaggtaaccacttggatccagagtttctggttctctctctgttgtcaagtggtttagaattatctagggtctttaatggtagatttaagactttggagttcttttgggatagaatatgcaaccaggttttgaaaatttggcatagctctttgttccttgaaggccatctaagatgttttaaacataattgtgttctccaatctgcagtgtacagagggatatcctacaatgtagcaactcgggattccagagaagatggtgctggcaagtgagacagttcttccttctaggttctaagtctgcagtacaggagctaggactgtgccataccagcgaacctatat

SEQ ID NO: 461062 - DNA, 338 bp, Homo Sapiens
cctgtggactaatcagtaaccattattttgatgcatgaaaagaactacagataactaccaaatagcagttagctttcaaaccggcgctcccaggaggaagtgtggcaactattcagaagttcactgtcttttgcaaaggctgagtactgaagtgacacacttcatttactagagtatttgcagtaggaaggtgacctaatgagaacaaatggtaaacttcaggagctttctcatcttctgactacagggtggtgctacagattacttgcctgtacttgagctcaagagacgctctagtgacttgctagctgaatcatctcaaggggatactctagagt

SEQ ID NO: 461063 - DNA, 496 bp, Homo Sapiens
tggagcagaaagatgaagagagacataagtactggctggacacggttcatactcagcctcccctgcactgcctctcaagacctcgaagcgagcttactggcaacccagcagataccacactttcaacggctgacaaggccgggctgctcctgcctgtaccccaccccgatcaggaccaggcttgggaaggaaagctcagcacccatccagatgtgtctgcggcagcacgaggcacttcccgttaagagtccaaattctaccccagctcccagaaccttgtcccaccacacctactgggcgaggagcgagggccaggcaacaggaaactgacaaccatgaatcagaggaactgccacctgcctgagatccaacccagatgcccactcagccccacctcccaaagccaaggcgatacaggtgaaccggcctggcagcaccttccttcacgaccgaatcagcgcaacagaactacagggagcaaggccagaacactgca

SEQ ID NO: 461064 - DNA, 464 bp, Homo Sapiens
gggtcctgagtctccgcaccggccctcccttatccctccagtcacctttgaggtgaaggcagagtctctggggattcctcagaaaatgcagctcaaagtcgacgttgagtctgggaaactgatcattaagaagtccaaggatggttctgaggacaagttctacagccacaagaaaatcctgcagctgattaagtcacagaaatttctgaataagttggtgatcttggtggaaacagagaaggagaagatcctgcggaaggaatatgtttttgctgactccaaaaagagagaaggcttctgccagctcctgcagcagatgaagaacaagcactcagagcagccggagcccgacatgatcaccatcttcatcggcacctggaacatgggtaacgccccccctccctagaatgatcacgtcctgcttctctccaggggcagggtaagacctgtacgcgccttatgct

SEQ ID NO: 461065 - DNA, 690 bp, Homo Sapiens
ggcggtccataagcgcgtctgcgtccaataatctttgtctagacagtcattaattctgcaagttggacctttgtgctgtaataccaaattttcttttcattttcattttctgtatcttcttctattatgagtcttcggttcaagaaccagtatttcctccgacttctatcatatccaataggttcatgtcgaatatatggtttatttttttggatttcagcaacacagtcagtcacaccaggcaccttgtgtgctacacagacttcacactgccactcgtcctctggcacctcctcaagaggtggcttcacacattccaaatggtatactgctgaacatgtctcacagcaaagcaaatccccaagtttgtgacaaaccctacaatggtcatcatactgtatcaccccttcagacatcaattcctctcgagcaatatttgttgtaagaaactgatcgactagaaactgtagaactttgatcttgttctctactggtccatatgggtagtcctctgcctcttggtaaggaagaacgtgatggtactccttatcactctcacagtacacccgtagcacctctcgccacgtcatcccatctatgaaatacagtgcggaattaacgctatctttcagatcagcaggtccacaggtagtattggaagttcttcttcacctattacgcgcgtatgcg

SEQ ID NO: 461066 - DNA, 474 bp, Homo Sapiens
gacactttaattacatcagagataagataggtactgctttgtattttggggagggagggcagataaactgttgtcatttaagccagatataaatgtttttacattgacacattgttctagtctgttcagtaatgccaactgtacattgatgaaacagggcaagcttagccccagacttttctgcccacctatttttttgcaaggggtgtgtatgagagatgggaaagaaatctatcccaaccttgtgtgatcatgctgcaattgcttcagcctcttcccagcagttgtcctcatgttagttgttgtttgcggggtctggagttgaggccccatgtagaaagggcaccacaggtgtgcagagaaggtgaaaggcacaggtcagaccgggcacggtggctcacacctgtaatctccgcactttgggagccgaggtgggtggattgcctgagctcagacgctgaccgcttatgctcc

SEQ ID NO: 461067 - DNA, 752 bp, Homo Sapiens
ggtcgagcggtacataaggcgcgttctggtaactcaactttaattagaatgacaactaattgaaagtaatttaatgctagttcatgaaagattaatggaattcatgttttggagatgctgaatgcaacacagatttggcctgaaacacaaatctaacctttattcactttaattattcagtcagaatcatttcctgggagcaagtctagtctctggacggctctaatcaaacaccactgaactttgaagacatcaactcattcagctgcaactcaattttcaaattaatctgccacataacatggaggctttgtggcctaagcagggggcaggtgggaggggaagatggggttaaagccctcccaggtatgaactgattctagagcatctgaccttccccaccctctctagtggcgaggcacttccggaactggtgccaggtcttcctatgagaggctgagctgagcaaccacgctgcctccatgcttgagctcagggctccacactcacaactgaagcctaagcctggtacagctggaaccctgaagggggccctggaccagcagagcctgcctcttccaccctagcctagctgcccttccctgctctctccctctccctaggagagctgagacgagggacttgagctctctgcttggcaagatgccctcagaaaccacccctatttctgcacccacttattccttggcccctcagcagcaccaggtacgcccaccatgacgcgcctatat

SEQ ID NO: 461068 - DNA, 450 bp, Homo Sapiens
atggtcacagtgtaatgatgtatgtgtaagttcagaagcagcatagaggaggtggtgattaatctggatggggaataggacccataaaaggcttcattgaaaggctgtgactggaaagatgagtagatatttgccaggcatagaatttggacaagggagggtattccaggaaaagccaagtgcatatgccaagacagctgtgtggattagcattatatgttaggggatttctgagtagatccaaagtgctggggcttaataagcaaggtgaattatagcctaagccagaagtacctgaaggactcagtttgccgtgcatgaggaggctggccttggggcaatggggaaccatgggaaggtttgaaacagatcattgccatactagatttctgttttaggaaggttattctccaacacccaggagaaatagtgcacgcagaacgcgcctaa

SEQ ID NO: 461069 - DNA, 527 bp, Homo Sapiens
  misc_feature (76)..(91): n is a, c, g, or t
tccaagggcctttttcgtgatccggaattgtgccccttcaattcaacctcaatggccgagccagactccatttccnnnnnnnnnnnnnnnncaacaccccacgaaagagggatatttactaacaggattccagagggcagggtacccaagatcaggagatggcctcagacctcacaaggcactggaagaggtcaacaagcaaggccctccctcattccctctggggccaccgggtcaccaccatctccgcttcccactgcacatctgtgcttcatctgggagacctgatacccatgcttttccacacacctggcctgctcctgagtgtgcagagtgtcagttccagccagttccccaggctcatggacaggcctccgttcccaattcccacggaaagagaatcaccatttggccacagccacaagaccaggttcccccaacagaaatgggtgggttggacttctctcccacaccttgaagctgaaggctgcattgagccctcagcgacgcaaacgcgcgtaatgatc

SEQ ID NO: 461070 - DNA, 742 bp, Homo Sapiens
tctggtgcattgtcccagcaggagacaatatcagtcttccaaggctgcggttagctattcaaatatccgtgaaagaaagtctagaacaatcagcaggcaagtgccttacttgaaagacatgcagaaacataagcaacccatggagaactgcctcccaacgttgtctttgttttgacctcatccatacattcaatttgattattccacacacgttttacacctactctgagcaagaccctatgcttggagtgtaggatacaaaaataaaacacattctttgccctcaagaagctcactctccagtcagatggataggtgatgaatagagagtaaggtagaatgggatgagatgtaagagagaaagttctaaggggatgtggaaggcagaggagaagacccaacttagcttggaaggaataggcattgacagctttgtagaggaggtaaaagtctaaatgatgtagccattagcctggcataaataggtgagagtgagtgagcactcgggacaggatgaaaggcagtttgacagagcagccatagggagggggttggagggtaagtagccaggcttgggagaaaaggtcatgaccagattaggggctctggatgacacctgaagaatttcaacattatccagagtgaaactggtggggaagggattaagcagggaatcagcatgttgatgtgtgtgttgacagatcccttgggcagctacgcatacgcgccttatgtaccgacg

SEQ ID NO: 461071 - DNA, 136 bp, Homo Sapiens
ggacattaggcgcgtctgcgtattaggcgcgtgctggtggccatcatgaaaatacagctcatatatacagctcctgtggcgtgcaggacgttaccatgtggtattgccaatatgggacattgcactcatgtgtata

SEQ ID NO: 461072 - DNA, 506 bp, Homo Sapiens
gtctggatacatccatcccccatcctttctgtgacagttccctgagttccctttgggtaaagcgcctaccccattgcccagctatgtatcttgggatgggctgaccccaccaccaggctctgctgatacccatgtgacccagttattctcataagagacagattctaggattttcctggaacttctgaactagagagggtctctttccactggggagagcgggcaggatgtggtctggagctgcggggggccacagtgtgaagagggctcccctgggaatgaagcccacatggaggaaacagagctgacagatggggaaggagagagccctggtgatgttattggagtgcctggatccagccagacctgaatcttcctggatttttcagtcaagaggggcagtacgttctcgtttgttatttaagctagcgtgacccaggttctgacctttggagataaaggtcctggctgatacaccagagaccctcccgtatacgcaaacgcgc

SEQ ID NO: 461073 - DNA, 577 bp, Homo Sapiens
gaggatccccattaggcgcgttctgcgtggtggctgcccggtgccgcacaggcagagtagcttctcctccagcgtgtgcctgcggatcacccactttgcaatggggcaaccgcgggaggtcgttccctccttccccgtgtagatgaccttctcgatccggatggctttccccttctctccataccgctcctccatgagttcccggatagaggcgaccgtggggccagatcccaagtgagtataatatggaccttcatctttctccactatttgttcgacgcaatcgcaggtggggaactcggcctgggctctcttggcaggtgtgtccagcagactcttggtgggtgtgtccaggtacttaagaggtgactccaagaagccactgagggtgggtgtgagtgggttctcagccttggtgggtgtggcctcctgtcctccctcctctgaatggaagcaggtggttgagagcacagtcacagcccccgaagactcaatcttgatttgcttgggggaacgggtagcaaaggggctctcaggggctgggagacatgtttgctggacgcagaacgcgcctaat

SEQ ID NO: 461074 - DNA, 552 bp, Homo Sapiens
ccataaggcgcgtctgcgtctacatggggcatgaagtgtggggatgggtgcgctgtggggcatgaggccagtggaccgagcaggagcttcatcctgtgagggtgtaagcaggagtgggagtgacctgggtttagttttcccaacaaccacatagcacctgtatacattccaattacttaacgctcttcattctatcaagaaaactttatatctgctccacaagtgaaaagccagcctcactaagcataaattgaattttcccatgaaaataaatcaacaaaaacaaaatgctgttataaactcctgctttgatcctgttatcagccccatccctgaggcctgctgtgttttgtttacaacacagattagcaagcacagagaatccacatgacaggacgccgccaataaaacagaagcatgctttttatatcctgatagggactgagatacaagacatagtgctacatgaaaaaggtaagctgaagaatgctggatttgggttacaaaaaaggcggacacatgcacgcagacgcgcgtaatgtaccgagctga

SEQ ID NO: 461075 - DNA, 462 bp, Homo Sapiens
agcggaccattaggcgcgtctgcgtggctccaaggcatcgaatttcggcctgagagtggaagtttagacacattttctcactggtgagagctgctcggaccaaggaattcagtcctctggaaatagctagctgcttttgcggagtcttcctgctgagttgctggtggtggggtgaacatttattgagtgcttactgtgtgccaggatcctgctgagggcctcacctatattgtgtgatttcatcccgtcaacaccctttgatgtggggactgttgttccctatcctggtgctacaaatgtgggcaccgggtataggaggtcaggtacctcgcccgaggttacagtttgtacagtggtggtactgggactggaactcgttctgacaaacttcaaagctggtgtttttagccatcaaggggattcgagggtgccatgggggtgtggacgcagaacgcgcctaat

SEQ ID NO: 461076 - DNA, 507 bp, Homo Sapiens
attaggcgcgttctgcgtcatagctccacctctttcggggtggagtcagtggaggctcagtccttgctctacctgcatggggaagactcaggggtgttgcctattaactgcgccccttacagagagggatcaggacggtatgagtcctggcttcacccgcttaaagcgctgtaagtggccaaattcctggtctccacatgatttctaaaggggttcgagttgtcactcattatccagcagtggatggggagggggaacaggagactggggacgtgggaaatgcagctggaagagacctcgcgctagagggtccaggccctgactccacgccccgccatcgctccccagctgacctcgtgcgtccacgcgtcctgcgcgctcctgtaccccatgcgctgggagcacgtgctgatccccacgctgcccccacacctgctggactactgctgcgcgcccatgccctacctcattggagtgcacgcagaacgcgcctaatggtaccgagcc

SEQ ID NO: 461077 - DNA, 691 bp, Homo Sapiens
atcaggagataccaggacagatccaagctagatgcagagggaggtcacagatcacagccaacaccagcatggtggcaacgatggtgacgatcagcagagttatgttgcaggataattcagacatgtgaaagtcctttagtagggttcctctataactttccgggtagtcacacttataagaatcaggccagccctctaacacttcacttgatacttggtctatatttttgacaaattctcctagctcacaggtacattggaatggattgtcccctgcttttattgacctcatcttctggcagctctggaagaaatcagctgatgggtgggtaactgaattgtgatcaatgatcaatacagaaaggctgctaaagctgccacatccaggaaggtcagttaaagaagttgaaagcaacattgagttcttgcaaagcttccagtgtttacgacttgtttaggaatgctctttattttattgctgtgaagatcaagtaccttgatcctgggaggtaaacatctgaaaatagtgtcagtaagtatatttgaagacatatttatacttaataaacttttagtccaagaacagtctcctttcttttcatcatagcttacagaattctggctcacatgccaattgttgcagagatcttcatctgtgtagtcatttcagctatttttgaaagttcatatt

SEQ ID NO: 461078 - DNA, 263 bp, Homo Sapiens
agtactggccagggtggctctgatatagtagctctggtgtagtttctgcatttcaagaagactggcagacagttgtttttattcttcctcaaagcatttgcaatcagctaccattcaaaattgcttcttcttcaagatttatggaaaatactctgacgcgtatctcttgtacacaagttcctgataactttaagatcacgccactggactgtcgtatgaacttgcaaacaggctgatacctttgtgaagttgcccagctaacg

SEQ ID NO: 461079 - DNA, 492 bp, Homo Sapiens
ctgattctttccttagaataactccgagaagtggaattctggatagaagggcataaacatacttaatcctctagtcttacatagtcgatgctgacctttagaactatttactaatttctctgaaaatgctcacgacatcacgtttaccaaaactgtgtattattgttaagggaaaggaaaaacacttggtcactttcatagattaaacaacagcatctcttcattttaatttgctattgattttaaatattacttttaattttctatattttctatatgtttaatggtaatttggactttgacttttgtaaactttctttctgtgtccttggctcaaaccgaaacttcttgaaaggatgctctctctcctcacatctcgctctctgaaacctgggctctgtcctcaatccatccctcacagcacgtcaccagttggttccttgcatgctaaatcctgccagcttttcagcagttattagcagaccttcttag

SEQ ID NO: 461080 - DNA, 687 bp, Homo Sapiens
  misc_feature (58)..(67): n is a, c, g, or t
  misc_feature (114)..(172): n is a, c, g, or t
cgtacataagcgcgtactggtagctgggactacaggcgcccgcacacgcccagctaannnnnnnnnnggtatttttagtaaagatagggtttcactgtcctagccaggatggtnnnnnnnnnnnnnnnnnnnnnnnnnnnnnnnnnnnnnnnnnnnnnnnnnnnnnnnnnnngtgtgagccactgcgcccggcccagagtccacatctttaaaatgagaacattggataagacgattgccaaagtgtcttggttttgatgttctgtttctgggggttaaatatagtacaaacattaccattttcttaaaaccactgagaattctcattctaagacactcacatttaagagcagagagtgcagcacgattaacatgcttgcttttagagtctgttcaattcactgtgatcttagaccatgaactcaatttccttaccctgcaaaacgaggttttgcatgcctgtcttcacggggcagagaggggcaaagtgaaagccttttgatttctcttaagggaagacaagacgccgtggaaattctaagcaggattaggactaagctctctgcatacaaaggttagctccaaagtgactttatctttggtttcttagccccagtgatgccatttctgaccccatcactattccctatagttttcaaatgcctgtaagacacatttcctaaggac

SEQ ID NO: 461081 - DNA, 782 bp, Homo Sapiens
agctagagtatatgtcatggcagagcgtgggtgtccccagcagtcctgacacatgctcgccatggtggagcgaagcccgtcgcctccaggggtctggccctgaacccctctgtgtccactgcaggttttggaaatgggcttcaggagggtctggtgaggcagaggggacagagcatggaggggagtacagggcatggggctagtcttgtagtctgagtgcctattttgagaacccttgcgcaccctccatgggctgtaattgtgagcacttgttcagcacagactcagctggggaataagcacacagctcttgctcaactaaatgtaagtgattaaaaaggttttccctgttcagatataatctgaagattctgggaatcaagaggctctgcaggggatccatcaggagcgtcacccccattcccaatatgccccatctgaaaggggttgtggtcaggacctgatcaggcacactctgattctcttgtcagtgcgggttgtgggcgaacaggcgtcctgtgcaccgtggattatgtgaggcagctgctcctgaccctaggtacgatactaggcatcctgtgtgtgcagtgtgctgcccagtgaccacgtgtcctgctcaagtgccttgtctgtctgccccagatgatctcacctgacttcagtctctttgaggtgctccttaagatgaggatcctacgcgttctgcggcctgtgctagatcatgaggagcagtacaggttaatgtgactacgcggtggttcagatttctcattatacccaat

SEQ ID NO: 461082 - DNA, 512 bp, Homo Sapiens
gcggacataagcgcgtctggtccagtttcttatctggcagcggaggtaacgtatctgctcctatttcaacactgctgtgatgccatgaggaattcacctgagaacccaggtgccagaggtcacattgttcacccacttaattcccagatgctcaagtgaagggcatcatgacccccatttcaccaagtctcaaacagtggaagccacgtgtccaaggtcctgccacagccctgcttctgggcaggccaagccaagcctgactgccacctggctcctcagctgagcacgccgccaccccactcctgagaggagacggcgtcaggacctgccgctcttcggtaaagcacagctcagtacccagggcctgccggttgtcattcctactttaaagatgagaggcctcctggcccctgagctagagaagacgccaggggtgacgttcacctcccccaccaccccccatctgctccctcggcagggcagtgaggagaaacagactctggtctcaagtt

SEQ ID NO: 461083 - DNA, 522 bp, Homo Sapiens
aggagagctgctgtgtgtatgtgacaactagtccctggcagctcctgggtgagcctctgtcccctggggaaggccagactaagaacaagtggatgcaggctcctaaggggagagggagaggcttctccagcccttggagggtgagattagctgtgatgtgcagcggaattccactgtttgttttgtggtttctcttagatttatttgtgcttagtgaactacctagtagcgtatttataattccctaaaagagaagggcatggagctcagaaaatgtagtcatcgcattgtcaggtggctaaaggaagagcgactgctttatcagggcatggagggactatggagacagaacgggctggaggaagaggattctgggctccagggcttggcgctggccttgacatggctcccagtggctgcgctccccgcctgttccctgccccatgcccctcacttctgcagagagactctccagaggaatcccatttctcacgggagcacgcagacgttccggtaccgcta

SEQ ID NO: 461084 - DNA, 150 bp, Homo Sapiens
gatccccattaggcgcgttctgcgtggcagtataatctcacaaaagatgtataaacacagtgctttgccaggcataagccaccttaaattctcttcttaactccagttgatcttgtccctttctgtagttccatttatcagcaacatatc

SEQ ID NO: 461085 - DNA, 484 bp, Homo Sapiens
tgtctgtagttcagcacttggtctctaccagtgggactttgccagttatgatattctcagggtcatcaagactcctgagatagcaaacttggccttgcttggctttggagatatctttgccctgctgtttgacaaccgctacctgtacatcatggacttgcggacagagagcctgattagtcgctggcctctgccagagtacaggaaatcaaagagaggctcaagcttcctggcaggcgaagcatcctggctgaatggactggacgggcacaatgacacgggcttggtctttgccaccagcatgcctgaccacagtattcacctggtgttgtggaaggagcacggctgacaccatgagccaccaccgctgactgactttgggtgccggggctgcgggttttgggtgcaacctctgcgcagccgactgcatgaaccaagttctcacctaatgtatcatcaccagacgcgcttaaggtaccgccga

SEQ ID NO: 461086 - DNA, 392 bp, Homo Sapiens
atgaggttgctcggtctgtgcgctgagaagaagattccaagtggggatatagagatatccagagggtcactctgagacgatctggggtcaggagggaggtgcagccctctccttacaattcatcacctgaacaaagacactcgaccttctgctgagggtcagggctatcccctggttggtgacctttgcacagctcactgtgggacctgagagctggctaaaatctcagggaaaggagcatagccctaggccccaggccccaaccctattctcagtaggttatctcagatactctgcttgtccacagagctaagtccagtagtagcaaagccccaaatcaaagccagcaagaccacagtcacaggagataaggactctgtgaacctgacctg

SEQ ID NO: 461087 - DNA, 192 bp, Homo Sapiens
tcggtacctattacacggtcatgtttttcgagttcttttgttggcctcttacagttttctaatcttcctcgtcattgactaatatttctccattcctgatgttgttaaatgaccttacctactcctctccttttgggatgcctctaatctgctgaggacttcaaaaccagaaatacgcagaacgcgcctaat

SEQ ID NO: 461088 - DNA, 231 bp, Homo Sapiens
ctttaaaaattaaaagatcataattctgcctgcgtatctgcaaaataagatttttctaacttgatgtacatcttgatctaaaggttcctgatgtcatctttgaagtttggctttgcttatctgccgtgcttcagctatgcccgaccctatgaacagggactatgtccaggtcagcttcccacatggcagctgaagttcagaggaagattacatttcttctgggtaccggcc

SEQ ID NO: 461089 - DNA, 328 bp, Homo Sapiens
tgccatttactccatggctctttgaggcatttagttggtgtttacactctttctcagttctagcagctaattttgtttgcttgaaaggcaagcatgatgacagaatctcctggaattcgcttctggatgcattctattcaggaggctttaaagtgtcttcatgtctatcctcttcttcctggattattttctcagggcagtaacctttagacaagggcttttcatacaccatggtcagaagccattcctgactcatgttttcatgaggtagtcccccacctcatataacagcctcagtgttggcttctggccatggagtatatagccc

SEQ ID NO: 461090 - DNA, 300 bp, Homo Sapiens
tccacagctcacatgttaggctgtgacaagcccatctgtgtgagcctctagtcctttcacctggcaagtggggcattaatccctggcactcagtagtacgaggcacacacaggagtttctcactgctgctgcctgggctgctctatagaagcccagcccgagatcgccataacgcactttggaatttttacatgcgcattatagaactctgaagcaatcctactaggtgcttactgcccagacaaacagggttggtgacctttatttatattacaattggccgggcatggtggctcacac

SEQ ID NO: 461091 - DNA, 441 bp, Homo Sapiens
tgccatttactccatggccaggcatagctgatcaggccatgtgtatctccccattttactgttagacagcaatgctaggtataatagggacaaacctgtggagatgcccggctattccagcagctcaatccagtctgatttttgttttagctgcttccccctagtgttggggaaggggagttaggatgtataaattctcatgtctcttgaggtaaagagataaggctgttctattctttataaatatactgctgcaggatgtgtgatcctatcagccttactaaagaaaatgcatttctcaaatcttagagaatatttttgcatcataccttagagctataaaggggataaaatgaattaaaaggtaatgtgaaataatagagcctctagaatcccacactattttggctctgctactttgtagccatggagtaaatggca

SEQ ID NO: 461092 - DNA, 386 bp, Homo Sapiens
gcaccacggatcagctgcagagaagagaggataggcgagagacacacccgctaagcccacatcctatccttaaaataagagagcggcgccaagggaagagccctagaaagtcaaagccaacagggtgctcagataccacccaagtacagttccatcttcggccataaggagacaatggtgtcaagaggctaaggccatatgatctgtaggtgaaaaacctgggatgagaatcaaggcctcgaaactttttccactacatcacagatttaggagcagttagagggaaggcttcaatctggagaacactaacaggctctagagattattgggtcatggtggcaggaagacatcctaagtggcccctacactaggatacagtagggaga

SEQ ID NO: 461093 - DNA, 350 bp, Homo Sapiens
  misc_feature (194)..(207): n is a, c, g, or t
ttgaactgaaccaatggtgtgtgtgtctctgccccctctaagttagtgtaaatcagaacagcttgttgttgctgcttgttttgatcccaggccaaagagtgattgataaatgtgctaagtattttctgtgttcttaaggatgtttggtgtaacataatttgggatacccacatattaaattgccttcattcttnnnnnnnnnnnnnnggacaacaacatcatgcctttagattatgtggaacccctgaattttttctcagggtacctgccagggagtggtccctttttacagtataactaaaaaaacttctgcttgtatttattttgtaagttcagccgctcagtcgaac

SEQ ID NO: 461094 - DNA, 356 bp, Homo Sapiens
cacatccacctcatggctgccagccaggctgggcacaccaacagtacagtcctcaccctgatgaccttgaccccagaggggtcggagctacacatcatcctgggcctgattcggcctcctgctgttgctcacctgcctctgtggaactgcctggctctgttgcagccccaacaggaagaatcccctctggcacaagtgtcccagacccagctcacagcagcctgggctcactgggtgcccacaatcatggaggagggatgccttccagctgcccggccttggcccgccacccatcaccaagctcacagtgctgaaggaggatgaaaagaagccggtgcactgggagtcccatcacc

SEQ ID NO: 461095 - DNA, 441 bp, Homo Sapiens
  misc_feature (19)..(19): n is a, c, g, or t
  misc_feature (408)..(408): n is a, c, g, or t
tgggttagaatactggaanccaaacataaagggaaaggcaagagtatacctggcctgtttgaaacaattaggagtccagtatacttgaagtggcatgaggagggggttagaacttgggaggccactcagatgggtaacagaggcagtaggaagcatgagagattataatataaggccttagagtcattttatagaactgggcatttactttggacaagatgagaagctatggaaagattccaagcagaggagctacaggatctaatttactttaactggactgctaaagcaaactgctattttgagaagaacctgtggaagagcaagggaagaaagaatgagaccagttaggaggccactgtaatgctacaaacaaattatgaggaaagtctggactacagtgatgcngcagaggtctgagtttgggatatatttcggacg

SEQ ID NO: 461096 - DNA, 227 bp, Homo Sapiens
aaaggactggggagaaaaaccctcttaatacactattgtcctcagcagtttcctctttaaaaagcaagggcctgttgggctccttgaaggggaaaagttaagaagatggcaatgccagtcaccagcctggtacagttacaacggctcttattcacagcaagacccttgtcctctgtttcaggggtgaccttgtacttgtcacccatgctggagtgtggtggtctgat

SEQ ID NO: 461097 - DNA, 454 bp, Homo Sapiens
  misc_feature (15)..(15): n is a, c, g, or t
agggcagaatcctcncctggaatacattagaccctgtggtgacattagttcatgctcagtgctctgttcacaatctctggtcctcacaacggccctgttagcgggttaggtgtgggcatgcagtgaggtgggtcctggaacttgtacccaggcttgtctgacaccagagcccatgctctccaccacagccgtgtctccaacctctccctagtgcttggtgctactgcaaggacttctttttccttctccccttaactgtcatggtaaagtgacagcatctcagacaaatttaaaaattccctgaaggaatcagctggttggcgctgaactttgcagggtgccgtgaacaccctgggctggagtctgaatgcattgctttcctcatgcaacagtattgactgagccactgtaaacacacaagagtgtgcagtggcttcggggtccgagccgatcg

SEQ ID NO: 461098 - DNA, 836 bp, Homo Sapiens
cggaagcacactgcaacacaacccacatttatttcctcatggaagagacaagttagaagttttccttgttgaaaatgaaatgcactccccgagggccagactcagagttggagatgctttgtttactcagggtttcagccaaggcttcaggtccacagaggaaaactcctattctggtattagggtgttggcttgcaattgtcttgaattcattatcccagttgggccgtccatacaaagtcttttgtttcaggcctgtgatcacatctttctcctcatcatggtgcacagcaaagtgattggcctgagactcatcccagccagtgaggtagatgttgtagctgaggaagccggcattgttcctttcctgcatctggctctccagcagttgcagcagatctgcaaaccactcaaaggcatgtgtgtcccggcacagccagtagaagtagatctttttgagcttcagattggtggcgttattgcaatatttgtaccagactgacttgagaatggatgcgaagggtgtgaccccaatccctgctcccactaacatcaccacctcatagctgaacacatcttcactggcagtgccaaagggcccatcaaccgctatcttaggtagtttccacgcatcttgaaactcctgcttatcacagccacaagcattgaacagcccctctgtccagtccccaacgatgcggatatggatactaaagaagtcttcctcaggggcggatgtcagtgtaaaagggtgccactccagcttggacacctttgggcacttgacaaaaatgtattgtcccacttccattttgaacccattattcttcatctgt

SEQ ID NO: 461099 - DNA, 620 bp, Homo Sapiens
atccactgcacaccagcggttggttcggctctacgctgtggtcacccaggagcccatttacatcatcactgaatacatggagaatgggggtctagtggattttctcaagagcccttcaggcatcaagttgaccatcaacaaactcctggacatggcagcccaaattgcagaaggcatggcattcattgaagagcggaattatattcatcgtgaccttcgggctgccaacattctggtgtctgacaccctgagctgcaagattgcagactttggcctagcacgcctcattgaggacaacgagtacacagccagggagggggccaagtttcccattaagtggacagcgccagaagccattaactacgggacattcaccatcaagtcagatgtgtggtcttttgggatcctgctgacggaaattgtcacccacggccgcatcccttacccagggatgaccaacccggaggtgattcagaacctggagcgaggctaccgcatggtgcgccctgacaactgtccagaggagctgtaccaactcatgaggctgtgctggaaggagcgcccagaggaccggcccacctttgactacctgtgcagtggcttcgggggatctctagagc

SEQ ID NO: 461100 - DNA, 645 bp, Homo Sapiens
cgcagcacactgcacaccgcagagctcagctgcaccttccacctgccttcagaagcccaggaggtggcccttgtggcctataactcagccgggacctctcgtcccactccggtggtcttctcagaaagcagaggcccagctctgaccagactccatgccatggcccgagaccctcacagcctctgggtaggctgggagccccccaatccatggcctcagggctatgtgattgagtggggcctgggcccccccagtgcgagcaatagcaacaagacctggaggatggaacagaatgggagagccacggggtttctgctgaaggagaacatcaggccctttcagctctatgagatcatcgtgactcccttgtaccaggacaccatgggaccctcccagcatgtctatgcctactctcaagaaatggctccctcccatgccccagagctgcatctaaagcacattggcaagacctgggcacagctggagtgggtgcctgagccccctgagctggggaagagcccccttacccactacaccatcttctggaccaacgctcagaaccagtccttctccgccatcctgaatgcctcctcccgtggctttgacctccatggcctggagcccgccagtctgtatcacatccac

SEQ ID NO: 461101 - DNA, 520 bp, Homo Sapiens
ctgttgcaaggaaattgaggcacctgagcggattccttcaatcatgccacagggcagcgggcagggataatggaccagcaattatacagactgcctcaggaccagctgtgaaactcatcccctgccccagagggttggggggaggccctctcactcaggtgagtgcggctgtggggggcctgctgaggcgtgggctggaggaggcgagcgtgggctctccatgggactaagatgccagcttcagaggcagatcaacagctggagatgggggaaggctaccccaagccccagtggtctctctcctgcttcccactctcaggatctaagatgccagtaggaccaagacctgaagaggccttcagcccagggctctaaccgtttcccttcccgatgttgccagagcctgcggcaggggacgcagcccttagaggtcccagtgccacctgagtgtgctcagggcccaatcccctgtgggccaagaggtgcttatgtgcagtgtgcttcgggggatctctagagc

SEQ ID NO: 461102 - DNA, 477 bp, Homo Sapiens
  misc_feature (20)..(20): n is a, c, g, or t
  misc_feature (78)..(78): n is a, c, g, or t
ctcaggaagagtcacaatcncgaatcttcaatctagaaggttaggcatttagtggaggtagggagatttctttcttcncataaggggaaaagcggcacatcatctaaatcctgacagaaataataaataatgcaatatttccatttagtcaatattgttaaagatcataaaagggaagaaggcaagacctggtgggtaggtcatcttaaaaggattaggaaatgttttgcaagtggttcagagcagcctacagagaagaagacagctaaggttgcattaggtcagggtttctcagtttaggaaggattgggagcagagaaagtgggggataaggcagatttacaggcttagttctctacatatcagctcaagtttcacctctagaaggtcattcgcggcccctttcttcgctactctttcgatgttttcgccaagtgtatgtctttgggctcccattatgaggtggatctctagagc

SEQ ID NO: 461103 - DNA, 156 bp, Homo Sapiens
cagatgatttatattcttagccaaattaaagaaatactgtcttaagccagttaagtaaatcttaattgacaagttgttgtaattttaagcttgtgtgttacatggaatgtttccatatgaataatagatattactctatcgtgtgcagtggcttcg

SEQ ID NO: 461104 - DNA, 304 bp, Homo Sapiens
ctcggtacccctccataatgtgtgcccaacacacccgattaactgccccacataatatctttcagtatttttccactagctcatcctggcccttaaaaacccttctgccttttgtttcagaggagttgagttcacacttagttctggcctccttcccctattgcagcggccttgaatacagtcttccttgtctgtttgactttatccagtgtaatttttgattcaagaagcctcactcgccaacattaaaatctaacatgccatgatacatcgaaatgtaagagatgggggatctctagagcgc

SEQ ID NO: 461105 - DNA, 738 bp, Homo Sapiens
  misc_feature (89)..(89): n is a, c, g, or t
  misc_feature (97)..(97): n is a, c, g, or t
  misc_feature (106)..(106): n is a, c, g, or t
  misc_feature (129)..(129): n is a, c, g, or t
  misc_feature (146)..(146): n is a, c, g, or t
aattaaaaaaatatttattgcataatatctttttaaaaaatgtttggtaatcccaactaatcattcaaaatgccaaactgtaaacacgnacaacagncaaaagggntaacaattgagtgagtaagcagnactgaacaggtgacagnactgagcaagagtgtgggggggagcaacagagaatgtaagacaggtgcacaagtgtgttacagacagtgataatttgagtgtgtaagaattacatttggaccacagtgatttcaaggcaaccatttaggaaacctctgggccaaatactaaaacacaggaggaatggacgagccttctttgtgagcatgctcagcatgttggcatggaaacaaggaagcatagaagctctttagtcacaatgaatgtctaccatttctaagatgcaaagaaattttctttctggtccctgggtacatcatatattgtctttccgtgcttttcttgaccccggaggacagcagatgctgttctataatccccaaagaaacccctagacaaaaatttaaaaaccacagtagcattaacacggggtttgctggaatgccccttcctatcttggcctatgattttcttatgggcacctcaccaggaatggttaaattttaccactctacttgataaccaagccatcacaaacttcagtcacatggtcacaaagctagagtgcatcgggctaaggagtgtgtatgtgatatgtaagatgtgcagttg

SEQ ID NO: 461106 - DNA, 174 bp, Homo Sapiens
gtcttgaaaataatagacatttgtagaatatggagactaactcctaggagttgctttactctgtcaggtgacttaagtcactgggattctctaattttctctgagagaacagctgattgagaatttccatgtgtacataggtcagtgtgcagtgtgctccggggtccgagtcga

SEQ ID NO: 461107 - DNA, 403 bp, Homo Sapiens
catccctgtggaaagcagtttggagattttgcaaagaactgcaaatagaattaccagttgacccaacaaccccattactgtgtacctacccaaaggaaaagaaattgttttaccaaaaggacataggcacacatatgtttattgcagcactgttcgcaatatcaaaatcatgtaatcaacctaggtgcccatcaatagtggcgccagataaagaaaatgtgatacatgtactccaaggaatactacatagccataaaaaagaatgaaatcgtgttctttgcagcaacatggatgcagcttaggattggcacttaagccataatcttaagtgccttaacccagaaacagataatcgaattctgcatgttcttatttataagtagtagctaagcattgagtgcta

SEQ ID NO: 461108 - DNA, 393 bp, Homo Sapiens
ttattctattccttagataaatgttctgatttttaaagtattaaagtattttaaaaatattaaaaattatactttgaaactataactgtagttgcctcaaggtagcagaactaggtgggctagggacagggaaagaagacttactttttactgcctatcctttataatctcttttgaatgttgtgccacttcatgtattcatgtgcagaataaaaagcaacccctcccccgcaaaaatgatgctttattagaagagataacatcgtctatacacttttcttttctctccctaaatacttagccggtactcagtaagtgctgaacagaataaataaccctaatcctggttctagcgcatcaggcagggttgtgactgggctctcattataaggg

SEQ ID NO: 461109 - DNA, 430 bp, Homo Sapiens
gatgagctccgtacccctccataatgagtgcccattccttcttgaaaattctttccccccttagtatcagttacactatcctgcttcttttactgctctagaacctcctcattttccctaaagccgcagacctccataacgcaggttttaggcttttctttcttaatagttctttcagtgcaaatctcctcacatagtattcacctgcctcactctgcatttgactcccaattctttatcattaaacctgtcatttatctgagcttccgagatgttctatcatcacttcaaattcaaagcgtctgaaactcaacttggcatcttttctattttagctctatttctactaatactaaaggactgtcattgccaatatttcactctaattcaaacttcatgttgccccttgagtctttacacctcatccttg

SEQ ID NO: 461110 - DNA, 379 bp, Homo Sapiens
tctggggctatgttccacatgtgaatataacatttgtactccctgaagctgtctgttgcttccctacagagagacagaggctgctcacgtcccaaaaaatagaaaggagacaaagaggaaaaaccttacagggagaaactcataaccactaatgtgctttcactgggcttaagtccaaagccatggattgttacagaagcgacatgttacagggtgtctgaattgttaaaactgctgtccaaattggttctgtctctagggcaagacctactatgtgtcaaatattggcaggggcgatgaatgcatataaggcattgttcttgtgctctaaaaagcttaagagtctcactgggctctcattatgaggggtcggagctgc

SEQ ID NO: 461111 - DNA, 247 bp, Homo Sapiens
acccaggcaggacaggagatcccacacaaagtttaacaagaagtccaaatagctcagcaagtgctcggcctaatctggaggaagctgataacaaaggcttgatttgcttaattctggcagccattgctggtgtgattttagatttgcccttagagtctgaagcagtaggtttatctgtctccatgggagccaatgtgtcaccatttagcccaatgccttctaataagacctgggtagaagcaattac

SEQ ID NO: 461112 - DNA, 305 bp, Homo Sapiens
cactgactttctcttcagtcttctaggacactgtgcatgttgcttagttacattttagcccaattcccaccatcctgatgacacagtccaccatcacctttcccttccttgtgtactaagttgccacagcagctgctctctgagccccgcaagttggagatctgaacatcatcttcactcttctctttctaccctaagagactgagtgaccgagccacatgattctaccatatctagagatgctgtcctctcttccctctcttcacattatcgtatctctgtagtgactcatggttccagacaaa

SEQ ID NO: 461113 - DNA, 254 bp, Homo Sapiens
gggggcaaacacaggaggcgccggtctccgtgagccagacacaggagggacatgccacttcttccacgcagggactaactagcagcaatgctgcagagacacaggtcacttctcaacattcctggtcaagacagacctcttgaaatcatgggtagatatccaccgactgcctcctagaagcccgcactgtgctgcacgctgctggtgaatactgagccggccgatgtgaaatcgtctgtatgtgaccccatgca

SEQ ID NO: 461114 - DNA, 365 bp, Homo Sapiens
ggaggaaaggtgcagaatgagagaggagagggagagagggcagtgggtgacaagcagagtagagggagaaccacagcagggaggaagcctagggagttgggggtgctagagagtgggaacaaaggaggtgtaacaggtaagagggaattttaacaaggagagcagagagggagctcagatggggaaaaagaggcggaaatacgtggagattggggacaatcagaaagattggggagaaagagctacgagaggtgaagtaagttgcagagcatcgggcagaacagacataaagaggagataaacagaaaaggggaggaaaggtgcagaatgagagagccttttctggggagttagggtaccgactt

SEQ ID NO: 461115 - DNA, 448 bp, Homo Sapiens
caggttggcattttcatagcttatttctcaaaagcctagtagtgaatgtatattactggttgtatcctaacattttctccagagagtggctgttaattgctgcatgtctgtaagcatgaactggaagggtcttttccatctgtggcagtatgtatgttttggaagcagctctttggttctcttggaaacattatttctgcctgggcatcttggaacaaccagaatcttgcccataagaaatttagagaccttgacttaaaaccttgaggcatggtctgtgagtatttttcttgtgctgcaaaccttggacatcactgaccctcgcaagatagggggaggttctcacttgaggagagtccctggaataaaagtgtttgattgaagagcatattacaggctacctgcctgcctcagagcaactcagagtcccttttatgggagagaggta

SEQ ID NO: 461116 - DNA, 172 bp, Homo Sapiens
gtgtgagccactgcgcctggccgatttcccactctttaagggtccgaaccttgtgaagagtaattgaaaaataggagtaggatggagacattacaacaaagaaaccatgcagctatactgcctagttcagtgccaggctacataatagttttttcacagactagtaagcaaa

SEQ ID NO: 461117 - DNA, 254 bp, Homo Sapiens
  misc_feature (127)..(142): n is a, c, g, or t
aaagggtatgtgtatgtcccgtcagtctaggtttctcttgggttttaccaccattattatcagggttatacccggttgggccctatctatttccaaggactggaaaccccacaccaactcgcagccnnnnnnnnnnnnnnnngaagaaatttattgtctcaaggaactagaatagccagaagtagagttcatttctgacactcagcaatgccttcacaacctgatacttctcccttttctgggagagaggtccc

SEQ ID NO: 461118 - DNA, 560 bp, Homo Sapiens
ttttctagggatggcagcgctaagacaggaatagcgatgggtaggtgttttagctgctcaacctagtggatttcatcagaagtccacagaagagggtcaggcttttcttgggtgagctgtattgttaccatcccattgagggtcttgggctggaaatatttggtctgctgcaggaatgttttggatggatgttcacattcccagactattatagcggccctatggatcatgcttctttcttcccctgaaaagaggatgcccaggatggacattcactcagcccaagtatacagctgtggccctaagaattgatcaatttgatctgcagtcccataggggttatttaataatgatctgagttcctcttttaaactttggacttctgagctagttaagggaccattaacaaagccgatgcttccttctccaaggggcacttcccttaagggaaagagagttggagttgattgcttagaggtggaggggaaagggaagttctgaatatctttgttgcactgttttatctcacgctgagccttttctgggagtgaggtaccgcc

SEQ ID NO: 461119 - DNA, 191 bp, Homo Sapiens
gcacgtggctccagcaagagcactaggcaggacaaagggagcaggcagcagctgcagaaacagccctagacaggtgctggcctcaacccatggcagggtgagggggagcccagacgtgatgtttctcctaaggccaaaccccaggggtgggtcatttgagaggagttccagctgttctggccacactgggc

SEQ ID NO: 461120 - DNA, 211 bp, Homo Sapiens
gggacaagagaactgtgaataggaaagttccaattgtggaaagtaacaaattaggtagggatgtttcttatcatcattcatttacactaagcctgtttctttataaataatgctgcaaggaatataaacttttaaagtatattttattgaaagagtgatcatgtctccatctctgtcctctcctccttcccttttctgggagtgagcgtcc

SEQ ID NO: 461121 - DNA, 180 bp, Homo Sapiens
cctattcccagaaaaggggggatgcacttggacccctcaactccaagttggtggtgcgatgatttttccatattctcccttaacaggctgtgagggagtctgggccaggcactaggccatgagcaggcagactggggtaaacccttagcgagcctctctccagccacgaggaaacctgga

SEQ ID NO: 461122 - DNA, 453 bp, Homo Sapiens
catggatgccttctgaggccacctctgtaaattgtgaaagtactttatgtaaactgtggcacacttcataacctcagtaagtgatgaaaaatggcattcctccaagatgcagagtctgagggctcaaaagtacctggttagtcttgagtacttgcttctcaatggccagactggcatgcagtctgtccaagtctttttaactttgcctggcacttattttcagagcccagggcttgtagttagtatttgtctgattaacgatgaggttggttaagagttagaatggggagggtgggaagtaagtgatttaacttgaggcttgaacctggaagttcatctagaaatagacataaacattgcccagggaaagtatcaccaatgtggatttttgtttctttcaaggctactgagctgtcatgactttgtcatttcccttttctggggagtgacggt

SEQ ID NO: 461123 - DNA, 768 bp, Homo Sapiens
tccccgtgggaagtgatcaaatgcttcctggtggccatgatgagcctggaggacaacatgcacgcactctaccagctcctggcacaccccaactttacagaaaagaccatccccaatgttatcatctcacatcgctacaaagcccaggacactccagcccggaagacttttgagcaggccctgacaggcgccttcatgtctgctgtcattaaggacctgcggcccagcgccctgccctttgtcgccagcttgatccgccactatacgatggtggcagtcgcccagcagtgtggccctttcttgctgccttggtaccaggtgggcatccagcccagcacagccatgtttcacagtgaagaaagtggctcgaaaggaatggatcctttggttctcattgatgcaattgctatttgtatggcatatgaagaaaaggagctttgcaaaatcggggaggtggccctagctgtgatatttgatgttgcaagtatcatcctgggctccaaggagagggcctgccagctgcccctgttttcttacatcgtggagcgcctgtgtgcatgttgttatgaacaggcgtggtatgcaaagctggggggtgtggtgtctattaagtttctcatggggcggctgcctctcacttgggttctccagaaccagcagacattcctgaaagcacttctctttgtcatgatggacttaactggagaggtttccaatgggcagtcgctatggcaaagaccacgctgacagcttctgatctgtgcgcta

SEQ ID NO: 461124 - DNA, 295 bp, Homo Sapiens
ctctccttaagccttttcaccatcacatttagggactgggctgggacactaaggcattccttccatcacccttccttctccctctgctccaggttctccctctaccagaaatctccttaaactaaaactcatgcaaataaagaactaaaggggttcaaagtgattatgtttctgagacctgtatttttgctagatttccactagtctacctctcctcaaacccaataggagtaaactgaattcttcccgcaaacctctccaccactacccccttttctgggagagaggtccctcc

SEQ ID NO: 461125 - DNA, 496 bp, Homo Sapiens
taactccgggaaaaggtctctccgccaaatcttatgaagttagagtgtatcaaagaagatgattcttcagaggaatttaagagtagaaagcactgaggcatatcctacccccaccacaaaccaagtgaggaaatccccaaaagcatcattcagaaatagttgatagtgggacacatgctagcagagctgaagcagtttgtaggaatctctgttgttgtaggaatctctctgttgctgtctgtgtagagagacttcttgggaggactagacacatgatctatgagaactgcagaaatctcagcacataatgactctatctaagcctctgcattaagagaggaccacagtctagcatgatctctagcagcatgaggccctgtccctaggatgaccccagttcccctgcccctccattgaaatgcctacctgagaaagctcaatactgccaggtgaatttatttgcttcagccatgcctgaagacaggcctctgacctc

SEQ ID NO: 461126 - DNA, 524 bp, Homo Sapiens
tccactacagagagtgcagtaatatacatgtaacatttacatttttaagagctgaaaagtacaaagttctgtgtcatttaaattggcgagtgtctctcttcagtcaataggcttgatcatcatctgaactgctcttaaggagtatgacccgcctctgtattcggaccagaaaattccatcttggtgcttgcttctgtaatggcctcctctgtaccatactccatttaggttagaatgtgcacaggcattgtaccaccagcctcctttatgaaagtgggcgcagtttcctgcatacatatctttatctctgtccagtgtggtgaattgtttaccattatgccacatcatagaatcccctgcatttccctggtaagttcccaggcgcagtctatagaattcactttcaggttccagacgaaagctgctgtattctgcatagacttttttatcactccagtcttctaattcaatcaataacttgtaattatcttgattgctaagcatatagatattttccagtccaa

SEQ ID NO: 461127 - DNA, 527 bp, Homo Sapiens
gtttggggtagtcagcactaatattttgctgcatggctttttaagcccttcggtttatgtttcagtggtccttgtaataaactgtcactaatgcagtagggtgtaatcagctttgctaagctctgcacagtaaaattgttctttcttagttaatattccagtgttctaatgttttgagcagaaggcatccttactttgtattcccatagttcttcagtgatgcacgagagctggagtcattcttgaggaacctccaagattccattaaacgaaaatattcctgtgaccacaacaccagcttatcccgccttgaagacctgctccaggactccatggtgggtgttgcctcagtggggatgattacttctgagaaagagagtaaaccatatcagctgctgctgtttatatccttgaaagctccagggcaatgggccattgttgtaataaagtttggcttacattcaaatagagtctaatcgatgttgttctgtctctttcctttttttccttttctgggagtgaggcta

SEQ ID NO: 461128 - DNA, 326 bp, Homo Sapiens
gtaatttttcttcctctatactcatgtggtggtctgtagttagctcatgtgtctttcttcctttctcaggctttctaggcagatttcacacattttgtagaaagaaattgtcaaggtttaatccaagaactaaagaggcaagctatgtgagacagagggcctgactgtgaccctgaacttagtgtagtgctaatgagttactctgacggattatcctacatctgtataataactaaaagtacagactgtggatgcagactaagctgggttcaactcctgacatttccactttatctgtgtgattataaacctgtctaagcctgcac

SEQ ID NO: 461129 - DNA, 501 bp, Homo Sapiens
  misc_feature (304)..(304): n is a, c, g, or t
tccaatcttagcaccgcggggggggatctggacacagtagtccccttgtcttgtctcggtgagacctggtcctgggccaccccggatgtttccctgggctcctgcctgctgtgatgtggggcatggagttgtaccccagtgggcgacatcccaggttgtggcacctgctgtctttctgcagagtgagccgcaacagctccacctgggtgcaggtttctcccctggttcacggttcagctgaaggatgctcagtgctgtcactgcattgcagcagtcctcagcgcagaagtttatgcgtatctcncatcagcccaagctcccagtgtaacccttgggagagatttgctggaagaaagccgcatggtacctgctcattccggcctctcctggtgggaaggagggatgtgccccgggtgttctcaggagtgctggctgttcagttacgttgacttgcgaagcatattactgaaggtgtgaggttttaatggtcaaataccgctg

SEQ ID NO: 461130 - DNA, 452 bp, Homo Sapiens
  misc_feature (89)..(89): n is a, c, g, or t
  misc_feature (231)..(275): n is a, c, g, or t
aaaaaacagaactggcccaaattcggcccgtgggcaagtagtttggccaacccccgggtaataaaatatcctactttgtcttgtccagnagaaattgctgtccttaggcttctagacaatctgctgcctgaagtcaagtggagaagggccttactttacaatttaatgtggtttgtgacagaagtagaaatggagagcttctgctcacttttgactctcccagtttttccnnnnnnnnnnnnnnnnnnnnnnnnnnnnnnnnnnnnnnnnnnnnnactcttaaatatcttggtgttagcagaaatttccagtgtttcttccttaaaagggtgatttctccagtttctccaaaccaggaattatttcttaatactcatgttttatggaaaaatcaggattaaaatctctaccagcacacaagaggatacatgattatacaaaatgaatctagc

SEQ ID NO: 461131 - DNA, 555 bp, Homo Sapiens
ccagaggcacccagcaggacagccgcagaacttggattcaacagaacattccgagatcatcttctacccaacaggacaatccgtaaaacctcttgtaccaaacgagataacctcagacccacttgtacacagcgggaccgcacacagtccttttcttttcaacgagacagccctggaacctcctcatctcaatgctgcacccaaaaggagaatctgagaccatcatctccccaccgctccactcaatggaacaatcccaggaattcatctccccatcgtactaacaaagacatcccctgggcctcgtttcccctccggtcaactcagagttatggtccccgaacctcttccccatctcgctccaagcaaagcgaggttccctgggcatccatcgccctccggccaacccaaggtgacaggcctcagacatcctctcccagcaggccagcccagcgtgacccaccccagtcctcctttggccccacccagtacaacttgccatcccgggccacctcttcctcccataacccaggccaccagagcacctcccgaact

SEQ ID NO: 461132 - DNA, 260 bp, Homo Sapiens
atacctaatagtacactttgaagaagaccattcagactacaaactacagcatatgaataaaatctgcctggatcatatgcaggccgtatcacctctgtattcaggtacctataatcaccagtaaattagcaaattcagtgtttcaccatcttccaaatactgactatgctgttccaactgatccagaattccaggctattcagaagcaagttttagaaaatgtacctcaaactctccactctaggagagtaatatgaaga

SEQ ID NO: 461133 - DNA, 483 bp, Homo Sapiens
gggcatcgcgtgggggacctcagcggaagctgtagaacatagcttcacaggtgaccccaaccccaatctgcagaaagggaaagtggtgattcacacatctcgtttttaataatggagttctctgaagattggggccttttgatgaaggaatggatattaagcctggggactgtggttggttagtgctttagactgtcccacatgggcctcctactcctggctttggggtgatggcctgttctgctcaaaattgtgctctgttaggggctcatgggtgtcctctgtcctctttccttctgtgttggcccagcccacattggagcaagccacactccctgtctctgtacttggggaatgaagtgtgtcaccttcccagtatgcagctggcttctgtggctgcataattaatacccaagggaactggagagagattctgaattaggtagtacttacagcttctcccgcggtgctctgatagcgcgc

SEQ ID NO: 461134 - DNA, 214 bp, Homo Sapiens
tggcccgtctgctcaggtctttgctgtgatgcccttctctggactacttcggtcctgggtagtgccttcctgtcatcaccctcaatcttggtcattccttttggatttcctttgataactcctttttttctgtcattgactcagtcagaatctggttatcatatggagactgagaacatgggctttgctctcagccagacctgagcaagccagg

SEQ ID NO: 461135 - DNA, 394 bp, Homo Sapiens
gctgggcttctcggtggaagggccatcgcaggctaagatcgaatgtgacgacaagggcgacggctcctgtgatgtgcgctactggccgcaggaggctggcgagtatgccgttcacgtgctgtgcaacagcgaagacatccgcctcagccccttcatggctgacatccgtgacgcgccccaggacttccacccagacagggtgaaggcacgtgggcctggattggagaagacaggtgtggccgtcaataagccagcagagttcacagtggatgccaagcacggtggcaaggcccccacttcgggtccaagtccaggacaatgaaggctgtcctgtggaggcgttggtcaaggacaacggcaatggcacttacagctgctctacgtgcccactgca

SEQ ID NO: 461136 - DNA, 453 bp, Homo Sapiens
  misc_feature (92)..(167): n is a, c, g, or t
  misc_feature (179)..(232): n is a, c, g, or t
  misc_feature (257)..(266): n is a, c, g, or t
cccagctactcaggaggccaaatggggcaagatcacctgaggtcaggagctcgagaccaacttgggcaaacatggccaaaaccccttcttannnnnnnnnnnnnnnnnnnnnnnnnnnnnnnnnnnnnnnnnnnnnnnnnnnnnnnnnnnnnnnnnnnnnnnnnnnnatcggatgaacnnnnnnnnnnnnnnnnnnnnnnnnnnnnnnnnnnnnnnnnnnnnnnnnnnnnnntgacggagtgacacgtccgtctccnnnnnnnnnngaaacgatcaacatccagatgtcctgttactggaagggcactatagtttatcctgcacctaacacttatacacctactctgggaattcttctacctacaactatttatttatctgatcctatctggtattaaagttctaaaagtaacagaattcttaaaggttcccaatgcctcctgagtagctgaa

SEQ ID NO: 461137 - DNA, 407 bp, Homo Sapiens
  misc_feature (84)..(104): n is a, c, g, or t
gaaggtggcagccactaggacagtcttcactgatcagccatcctgacagtcccaggtctgggagcaccaccagcacagggggannnnnnnnnnnnnnnnnnnnnaagcaagtgtgcaatggtatgttctggaacgctgtctatgaggggctctatatctgagcaggcgagtaatgtctgtgagtgtgtttctgaaggctgtctggaagaacgcatgtctgagaatggtgtaggatagtgtgcatctgtgaatgctgtccgtgagggatgcatccaaaagtgtggttgttgtctgtgagtctgaggccctgaaggttgttgctgaagggcatcgatgtctgagagtggttgtgagtgtgtgtctgctgtatatatccgagagtgccgttgttgtctatgagaacatgt

SEQ ID NO: 461138 - DNA, 523 bp, Homo Sapiens
gagatccttaagcccactccaggatggagaaacccatggccgagtgggaagaaaccagctgaggtcacatcaccagaggagggagagtgtggcccctgactcagtccatcagcttgtgtagctgaggtctgggccaggtctaaccaggctccccactcctcccaacctgagcctgccctctgatctctgcctgttcctctgtcccacagggggcaaaggctacgggtcagagagcggggaggaggactttgctgcctttcgagcctggctgcgctgctatggcatgccaggcatgagctccctgcaggaccggcatggccgtaccatctggttccaggttgggccctactgttcacacaggcagagaccccaggaggctgatgggtggaaacgtggggtcacaataactggggtggtgatgctcagggtctgtctagaccctccaaggaccacactgttcctgagggtcacacccctcccctcccatgcttcccagggttgcagctagtggaagtagcccctc

SEQ ID NO: 461139 - DNA, 377 bp, Homo Sapiens
gtcttggtctgtctacctcggcatctagttgtcctcactgccccctagccgaccccaccctatctgactgactaccccatcacagagtactttgatttacgttttgctctgcctaatggttacttgatactgtcacgccgacagtgtccagttcagtggtctttgcagttgaaatgctcccgtacacgctgtcttgttaaaaatgccagtaagttcatacaaacccagcttgcacccaaggtcacattcagagagcgtagggctgggatgggttgttttccaagcttctgccactgtgtggctagctcttcccactgggaagttctgtgtacccggaatgtcggagtggagtcctgttctagtgtccagaccatgac

SEQ ID NO: 461140 - DNA, 590 bp, Homo Sapiens
cagggcaatgggctgaaccagctcgcgagcacctcccgccattttctttttcttgcatgttttcttcagaactgaaacgcaaatctgggtcacccactttaggccccttccaatgttgaagggaagggataaatttgcacgtgaatggtgagggcaataagccaatcctggttttatatacttactgaatgggcatattgggctttcgcccaaagccctgagtagctttctaacctgcccagattagtgcttaggagccaaaggccttatactttttaaggcctcttatttcatctgtaagatcagaaatttaccaagccagcagtgtgctccaaaggccacctagcccatttccctgcctctaggaaagactctatggaatgcaacccagagagttgggggaagggggaagtctcagtctgctccccttgcatttaacgaagtctagctcgaatttctccacccaaagtggctctaatacatttgacattcgttttctcaagggctcctagggctccttaagaaccagatgagactctaggtacatctgcagctgtgtgtgtctgtcagttagtaccaggtctactgtc

SEQ ID NO: 461141 - DNA, 762 bp, Homo Sapiens
  misc_feature (193)..(193): n is a, c, g, or t
  misc_feature (274)..(274): n is a, c, g, or t
  misc_feature (292)..(292): n is a, c, g, or t
ttctgtaagagccttgtggttagaccacataggaaataaagtcactgtggcttgtcacatgcaagaggacagcaggggacagggcatagcgctgtgtgtgcaggaacagtgtgggaatgatctggaatttgtgaaatacctgggcagcaatacaaggacgaggctccaaagggcagggcttcaggagaggacntggataaacactgcacttcttcattactgccagccacaaagaggtttcctgagtgctgaaaaccccatctggaaagtgtcncataggaaacaaaagaanttacagtgtgtgaaggtcacttggctgctgcaccacctgccaccccattaatcacttgagttggtgggtacaggaacaaagctgtgggcagagggtcagaacacttcctgtctgccccaggcacatggaagacattctcctgagtagtaaccttggcactgccttggttatttgagaagctggccagttacgtatttcagtcactgggtatttgagaagctggccagtcttctgagcttcaaccattctcacagatgttgaatatgcagttcttaatggatctagtgacaccttcctacctcagtagagcaaaaaatgtggatcccaggtctgggaacctaaaagaaatcactctgagtaggttagaatttcacctctatctgagaccctgacagaatcatttaaaaataaaaacacatatatacaaatatctatacacacataggtgtgtgtgtgtgaatagggtggcc

SEQ ID NO: 461142 - DNA, 456 bp, Homo Sapiens
ctcggttgttttgttctttttacaaactatagatatatacagttgataactcaggatttctagccaataactatatagttacccccaccttacaaataaaaagaaaatgccagaaacatctttaaatgccttgtcacaccaacggcaaagtgcacagagtgaggagaacacgagagtgccttttcattttaaaaatgtttggaaatatgtacaactttggtgcagtttcagggtgctccagacacccatggccacttcatgtaaaccactgacaatttctagagcactttgagagactacaatatgatcgtgatcaaattttgtaattaaacctaatgagggcaacagacacttctcaaataagagatgtgttagttacggcgctcccttactctatgtatttcacaaggagacagataaacagtttctttgttcatcctcctcgctcgatcttac

SEQ ID NO: 461143 - DNA, 491 bp, Homo Sapiens
tccttaacccttagtagcccttcagaacaagacagtagacaggggcagaaggatggatgaagggagggggacgagctgtaggaggggattggtgccagaaggcagggataaggagcggcagctgcagagagtggtgggggaaaaactacaaggaaagacagggcggaaagacgattgcagatctcagaaagcagcagagggaaacaagcttttactgcgtccagactcaggcttcaacataataggatacaatatgactttcccccatatcataccaatggcgaaactgaggctgagtgagattcaatggcttgtgcaagggtcaggtctgtagagcccagtctcttacccctaaaccacaaatctctgataaagaataaagcagtagaggaggacagggcgtgatcaaaatcagtgggacagttaacggatgtgcataggacaaggagtagccacactacctgatttccaggaaagcaagggccaaggcc

SEQ ID NO: 461144 - DNA, 340 bp, Homo Sapiens
  misc_feature (226)..(226): n is a, c, g, or t
ggggaggggagaggagaatccctctcattaatgcctcactcttcccaaatacgagaaggggtacctgggacctcagcccagaaacccgtgcccaggaagacacaagttgcacacggctttgtttctgaaacttcttgaaagcccatttaaaccagcatcccactgttcaaccctctgctaccacacaagctgcacggtgtcccccaggctcttccaagcccggccnctctgctgccacacaagctgcacggtgtcccccaggctttccaagcccggccctctgctgccacacatgtgcgcggcccccagctcttccaagcctgcctgccataccgcgacc

SEQ ID NO: 461145 - DNA, 211 bp, Homo Sapiens
tgtactgaaacagtaacctactgacaaccactcagcgtaccctacggtccccgtactcaccacacctagtgtaactctacagtcccctactcatgacccctacagtcccctaccgacgacctccagcgtaaccctacggtcccctactcaccacacctagtgtaactctacagtcccctactcatgacccctacagtcccctactgacgac

SEQ ID NO: 461146 - DNA, 331 bp, Homo Sapiens
gagaagcagagtttcaaagggctgagaatagcatagtttcactgtaaaccaatgtctacagcttattggggtgggggctactgagacgaaagacaccaactcgtttctagagggctaagaactgcactctaagaaagggcggggaggtgaagggacccgagcaagaactttcagctgtgcgtgttagaggtgatgggagttactataacgcgtgtgctgctcccttctgccaggagcccactgcttttgcacacaagctgcattttgcgcattgactcaggtcccagttgctcttcatatctccgtgaatgattggagtgcaaagatactg

SEQ ID NO: 461147 - DNA, 194 bp, Homo Sapiens
agtatgatgaaagcgtgttgactttcctcatctgtgtttcccagtgcggtccaattcacggtggtttccaagcgcctcgttccatggtcaggtgaccagaggccgtataaaaggcagcctggcaaagcagaggtccctctccgccccgttcctccggtgcgattcccgaggggggatcctactagaagtcgacg

SEQ ID NO: 461148 - DNA, 123 bp, Homo Sapiens
tctagctcccacctgatctgcccctgcgtggctcactctgctctggcctcccactgttcctggagcactccccccagtcccccacaccagccttgggatctttgcatctgcaagtccctctgt

SEQ ID NO: 461149 - DNA, 577 bp, Homo Sapiens
ccttatccccaagccttggctatagaaactagaaattatgctttgtgtcagttcacctgagatctcacccaggctcctcaaatcccctcactaagccttctgaaatcaccagaaccatctgctttgggttcagaaatgagatactacaaaagttgacacacaaaggtcattatttctggaggacaaaggggtaaaacaaagcttttcctaaaggctttgggagctactgcagaaagcgactgcgttcccctggctggtggagggcctctcccgtcttctcgcccgggctgcagatggcagccagcttggccacttggacgtgcaggttatgcaatgtgagcatcctaataccgtcttcccctcccacagccgccacccggctgcctcaccctggagctgggattgtccagggctctgggctcattaagactctgtcttcacagccaaagtaaagtgaagaattgaggtaattacctaaatgattcagtaaggaggaaagacaccaccacgggtggaaaaagatagtttgggagactggtccaagtgactggcaaatatcgccacctcctcagcaggc

SEQ ID NO: 461150 - DNA, 215 bp, Homo Sapiens
cctgtgtcaatctctgacaggacatgctaggtatcacagctgctctgagggtgtggaaacgggaagctgggctcagatagtgcaggccttaaaaaggttaataagcaaacactggctaggtccccaaatggggttgggtttctctgaccaattatgtaggaccccatggaggcgctgaaggtagatgctgagaagagggttttctactgcagtag

SEQ ID NO: 461151 - DNA, 326 bp, Homo Sapiens
atcagcctaacatttggaactagggggaagggtgggacagagaaaaacagttttcaggaggaaaagtggtcatcaataattggggcagagctactaaatgatgcctttgggagcagcaaaatttcatgcagctttaagaagaaggttgtttttctccgccagaaaaaggctttcaagctggaggaatgtggatcaacagaaataggtaatctggattaagtggcttcccgtgtccaaggaatctctcaagatcaactcaattcaagtaatgggttgcagaaatcgaaactacagtgagataccacgccatgccagtcaggatgtcg

SEQ ID NO: 461152 - DNA, 673 bp, Homo Sapiens
agtgttcagaggcctcagagatcagtttcttagctccaaaactaatttgtacccacttgaatttctgtcttaattaaagtcagacttagtgagtcttactgcagagctgacagtaatgtcccagggggagaatctggcaacctgatgcttcccgcagcgtttctgcctggggcttgccctccctgctgaggaagctcgtttgcttttctctcttcttttcaatgaaatcctggtctatgctaggaaacctacttccctgcctaggcgggatcaccctcaggaatgagtggggacttttccagggagatgcctgttcttttcacccatgctccgcagctctttgctgcgtcagtacctcatggttatgtggccattggccacggcttctgacctatgcccgccggctcctgccacccctggaacattctgctgtggcatcttatcacctccagctgccttggcgcccccagtggtacccgtcccctggctccccacagtgtcctgcctagtgtcaggtcacgtgtattcacacaggattgtacgtttgcctgctgcaggatggtgagtgaggtcttggctggcaggtatctgaaaggtgtcatctgtcttagacacaaaatgtgcttcctcccttttgttctctcctctggctgacttcagatgtctgcaaaca

SEQ ID NO: 461153 - DNA, 567 bp, Homo Sapiens
  misc_feature (46)..(180): n is a, c, g, or t
gctcctgtaggaacgtgggcttattgcagagggtaggcagaaactnnnnnnnnnnnnnnnnnnnnnnnnnnnnnnnnnnnnnnnnnnnnnnnnnnnnnnnnnnnnnnnnnnnnnnnnnnnnnnnnnnnnnnnnnnnnnnnnnnnnnnnnnnnnnnnnnnnnnnnnnnnnnnnnnnnnnnntagaaggaagtaaggtggattttggagtcctgcggatagagcattgtagggcaaggagcattttagccccctgtaagtcacatcagtggggtggcctctggcatagccttcttacactgtgtgctggcctcagcaggtcacagaggggacccggcaccagataggcagagtcctcgaagtcaggcaaactgtgacagccagctcctgggtgagggaaagagcagagagtctgcagagctccaatactcagggctactgggctagcattccaggatcaggcagagtccagcacggtccatagctggatgtgctgtggcatgagaaaccgtcaaactttttaaataggtctgaacactggctcagcaggctgctttcaggaaatcgagc

SEQ ID NO: 461154 - DNA, 499 bp, Homo Sapiens
gggtactgtgtgggagtacagacacaaaatgaattgtggtgaattgacaagccttataaatagctccatgaagtttaatatttttcccccagcatgatataagattttttaattttgcttttaaatctcaatcacctgttgaatctttaaatttgactgtatagttggttatgtttctgccatacttaaaagtaggatttctttgtatggcacagaaggtgttctgggaacagctctgccattatctctggcttcatttcttaccagtacctgcttaagtcatgccagccaccaaaaccactaagatggcgtacacgagaggttctctgtagctttgcatgtaccatttttttctgtttggagtgggcccagtgttaatttcttcacttggcaaagtcattctgacctttataaccaagcccaaatgaccttgatgaccactccctttccctggtcagattgataactatctcctttcacgctgcgcaggctgcacaca

SEQ ID NO: 461155 - DNA, 522 bp, Homo Sapiens
  misc_feature (350)..(466): n is a, c, g, or t
cctgtaagtagcaaatctgagatttgaattgagaattgactctaaaagcccatgctgcttctaaaacagaaccttctgcaccttctctctatccctaatacttcttttccacctatacaagaatagaccaaaatagtattttggtataagccctgattctgccttacagcacaaattccagccattcattcactcaatattcaaagttcaatactctcctgaaaagacaggtcctgacaccaacagaacagcttcttgcacagcaatggcagcccctttccctgactcacagatcttctatttgagaaggggaattaatttacacaagaaagccaggcacggtgtctcannnnnnnnnnnnnnnnnnnnnnnnnnnnnnnnnnnnnnnnnnnnnnnnnnnnnnnnnnnnnnnnnnnnnnnnnnnnnnnnnnnnnnnnnnnnnnnnnnnnnnnnnnnnnnnnnnnnnctgggtgtagtagtgcaagcctgtaatcccagttactcagcaggcagcattcaaag

SEQ ID NO: 461156 - DNA, 427 bp, Homo Sapiens
gcccagaatgtccttaactcggcgtctccaggacgagctcatcctcccagtgcgtctacaggcccgtctcctgcctcacaacaacctcctttggtccaactcctgctgagctgcttggcagcctctgtgggccacagagttcttaaagtaaagctttccaggcccaccttcggcctcccggcagcctcagcaatcaaactattccctcactgcggccaccgaaagccaagtttctccctgcctcacagcatcctccgaaaactgagcatttgcctcacggtggcctccccaggccacgaatctgcctgcctcccaggcaggtgctgcctcacaatggtctctttaggcccagctcatgctaaaagatggactctccaggtacagctcttgccttctggcgggcttgcagcccaaattctccaaagct

SEQ ID NO: 461157 - DNA, 405 bp, Homo Sapiens
gtacaccagaaacctagtatatctcaggtcaggccaccccccgtcctgtttattcacacactatactcagtcattcaccggttcacgccagcatctcttcctgtcaccagcacttcctcagcatccaccggtcacgccacccctcttcctgtcaccgacagcttcctcagtatccacaggtcacgccacccctcttcctgtcaccggcctttcctcaggtaccacagatgacgccacccgtcttcctgtcaccggcgtttgctcggcatccacaggtcagttcacgcctcttcctgtcaccagcctttgctcagtatccacaggtgacaccacgcctcttcctgtcactagcccttcctcagcatccacaggtcacgccagccctcttcttgtcactgacgcttc

SEQ ID NO: 461158 - DNA, 365 bp, Homo Sapiens
  misc_feature (49)..(168): n is a, c, g, or t
tgttttcagcctcctgagtagccgggattacaggcaggtgccaccgtgnnnnnnnnnnnnnnnnnnnnnnnnnnnnnnnnnnnnnnnnnnnnnnnnnnnnnnnnnnnnnnnnnnnnnnnnnnnnnnnnnnnnnnnnnnnnnnnnnnnnnnnnnnnnnnnnnnnnnnnngtgtaagccaccatgcctggcctgttttaatttttttagtacacctctgctgaaaggaagcatccttatttgtaacacaccactcattaggctgtgttacaacttattttgtgttatgattagttctatgctgttactagattttgagttacacaaggtcagggactttgtcttattcatgtttgtatcatcagtgc

SEQ ID NO: 461159 - DNA, 358 bp, Homo Sapiens
tttggctggcatctgtggatcaatctttaaccccttcagggtctcagtagaaagattacgtttgagtacagctgcctttttgtacccatcatataacccaaaggcagtgtctcgattggtagttgtccaggaaatccgtaaatctactaagtgcagctgatgtgtatgaaaggtaggatccccatcacgagcagagagctcctcctcagctgtgcgattgctatgccggtggtaggtgagggaggacaagctcagcaggtgggactttgttaccaaaggatcaagacagtgatcagcattctcttcagtgggtgaggccatcaggagaacggacacctgacttagggcactcaccatc

SEQ ID NO: 461160 - DNA, 178 bp, Homo Sapiens
cgcgcgttaccggagcagtgtgggtggccagagctttggaaagctagtggcatgtccccagaacaggacatgatgagtagtgttctactcatatttatttattttttatcaaagtttaggctaagtgtgggcggtggctcacacgtgtaatcccagcattttgggagtacgaggcagt

SEQ ID NO: 461161 - DNA, 376 bp, Homo Sapiens
tgcgtcgttctagaggacccgtggtggacgtggcttgacctcgtgacgcccaccttggctcccaaagtgctgggattataggcatgagccacttacccaatagacaaaggcagaaaagtcacatttccttcagtatcccaagcccttctgctgttagagaaaagaaaccaattcttatcgtacaacatttaggtgcccattttagtatatttaaagagtggaaagctgaataatttttacaagtataggaaaaaaaacatgagcttgttactctcctgcttcaagtccttcactagaacaaactgttgagcaaagagtaaacacactcttcctaagccccaacagctccagaaccatcacttgccaacaaactact

SEQ ID NO: 461162 - DNA, 353 bp, Homo Sapiens
tatattgctttaaataatatctatatactggtgcttggcaaattattatctccaactccaatctcttccttgagactaacatatccaactggctaactgacatctccttttgtgtatcaacttatttcaagctcagtatgtccaaaatcaaactcttaattcctcccccatccaaatcaatcctttcccagtcttttccatgtcagtaaatggtaccaccattcatccagttggtctctcatcccacatctaatctaccatcaagacttcttggcttatatacaaaaagtattcttaatctaaccaatttttcccacttgttactgctcttgtccaagccacggtcaacccac

SEQ ID NO: 461163 - DNA, 120 bp, Homo Sapiens
aaacagacaaacaaaaaattactcttaaaaagcaaataaatcaaaagaagcagattttgtagccaggcccatctgggtttgaatcctagttctgcttattcctaatgtaagccacggtca

SEQ ID NO: 461164 - DNA, 186 bp, Homo Sapiens
  misc_feature (46)..(58): n is a, c, g, or t
accagggttgagccgtggctgtcatacgtgaggccccatctctacnnnnnnnnnnnnncaaattcactgagtgtgttggcttctcctgcctctccttccacctcctctacctcttccatctctgctactcccaagacagtagaagtccaacccacaagccacggtcaaccggtccggctcgatatt

SEQ ID NO: 461165 - DNA, 504 bp, Homo Sapiens
ggtgcgagtcggtaccgggttgacgtggcttggggttgggaaggaccagtgccacaccatctggggcatcatttcatggggcagaatgaggcatgcttttcttctccccaccctgcccctcaactggtgcccacctagataggataatgcagcagcacgaaacttagggtttctgtgggatctaccactcctttaacattgtggctgatagtgccaggaaaggtctctcaccctgattcccttccttaactgcagggctttgtaaagcaagggaacaaggcacaggtatttgctttctgagttgctagtccctttcttccaagaaggtggtctttgtttagcatgggctcacctctccgtgccaacttctcgatctttgtcctttagccagctcctctcagccttatacttatcccacctctttcagaggcaggtgctaaggttccttgccctctcctacagaccaacaagcatcttcaggtaggcaagccacggtcaacccac

SEQ ID NO: 461166 - DNA, 636 bp, Homo Sapiens
  misc_feature (577)..(577): n is a, c, g, or t
  misc_feature (601)..(601): n is a, c, g, or t
  misc_feature (622)..(622): n is a, c, g, or t
ctttcaacagctagtgatacttggcttcatataagattacccactaacaatttgatcttgaactctttcctcaaaggaagattttttaaagcatagagcaattatgtatgattccaattcaggacaaagtaggcggtaacttacatttttagctcttaagtgggtgctcacggccatatgtagctcctgagtgtggagattacatcccaaatatagaacaaggctcatctatacagtataattgtggaattctaagtctcagtctccaagccacagaaacgagggagctattcagagaagtggattccttcaagcaaatattctatactttcccccaatcaccatttttttcaataaatcaggttgcagctgagaagatgccaggctcatatattctcccttcaaatttatgtatttgatactttctattcggtttttttggaggtttcctcaacccaggaaagggtgggctgctgatcatctcttcctgaactattgttacacttgcccaagtacccaagcccttggcgtgtgacacacttgtggcacccgggattctcaattagtttccaagcantataaataggaaaaagtgggccangggtaatgggttttaaattgnagtggccggaattt

SEQ ID NO: 461167 - DNA, 147 bp, Homo Sapiens
agtgcagagacggaataagtttctaaagcttcaatatagcctcttgaaacctagacgagtacataatacctatcgattttcattttggagggtgagttctttatcaatggtgccttccctaaacttgtacttgagacggaacctggc

SEQ ID NO: 461168 - DNA, 218 bp, Homo Sapiens
gagactgacaagaatttttttaaaggttgtcacgtctgtgagctgcatttctccagagctccataacccacagtcttgccaaatttatataaaaggattggctgttcttcttcgtctgccttaagaatgtcaccatttgaactgtgtggggaatacagctactatgaactcaacattcaggcctctttttctgcttgggttgtatccagtactaactt

SEQ ID NO: 461169 - DNA, 853 bp, Homo Sapiens
  misc_feature (32)..(32): n is a, c, g, or t
  misc_feature (39)..(39): n is a, c, g, or t
  misc_feature (47)..(47): n is a, c, g, or t
cccttaaaatggcaagggggattttttgttcnccccaanaactcggntttttgaacccaaaaaacctgttgttcgacccaaaaccctgggttattagttcaccccttagcttctcccccagcggagaccccccagggcccttgggcacaggggattaagccctcctatctgccttacgtgcaagcggaagaaataggccccagagagcaacagtggcgggtctgcagtcacacagcccaacttgcgcttgtggcagtggcaaggttggaagctggttcagtggggctgtcgaccacaggtaccaaccctgccctcccctacagagtatgtgacgtagcacagccaatgactgcatcccagtgcttcgaccagtcacagggtcaaggaagttctgagggtacccctcactcaagctccaggcgtcaggaaaagaacattccacgaagtccatctggaagacggtcctttccctgctgcccccagcttctagaacattccctggatcacagcaaagtgttcagtattgttcatggagtgacagatgtctcagccaagaaggttcactctcagggaagaatgacttcaactggtcttgacttcaacctgctcccagcctggttcacttctacgggctcactcatggtcacagaagatcttttgcaaactggaagtctgtccaggtcattcatgtgctctaaggctttcagtagctcccccttatccccaggaggaagttcaaatgccttaacaagtgtcaaggatctcttggtgagccctgctttccttgctagtcactcgtgcacagctgagtctttccccagagtggatgtcattcatgctgtagtcattaaat

SEQ ID NO: 461170 - DNA, 416 bp, Homo Sapiens
  misc_feature (16)..(16): n is a, c, g, or t
  misc_feature (181)..(182): n is a, c, g, or t
  misc_feature (274)..(274): n is a, c, g, or t
ggcgaatgtttgtganctttcactaccaccacctcccccgagcatggtccccccagttttcaatatgaaccatcctgtgggtgccctgtcacaaggctggccctgaggtgagcaatatttggtctgtgatgttggttgttctccactctttctacaggacagaacagggcctctagaagtnngggaaatggctttgggaaatatggcaagcagtaggctttgttcttcggcttgcccgagaggataattctccacgcccttcctgtactcagtncctcagtttgcctggtgagagagcagcctccttgcgtgtgctctgccggctggagccagactggccatattaccagtgagaccaaaaagatcgaggtggggaggtagctctgaggtctgggaaaccattccgtcgctgcact

SEQ ID NO: 461171 - DNA, 417 bp, Homo Sapiens
atggttatggctgtttccaggctgaaaaagaagtcacttattctattaaagtttgtctatggtgaaattcatctacctaaagttttccccttgagtctgagcctaattataattgtttttccgtactctaccagagattagaatgaaaaatctattaatacaatcatccttagagtgcaacaaattgagccatttaccctagccccaaacttgggaagccctttgcagttgttacagaaaccagaaaagtagtcttgcaaagaatcagaacaagggcaaaaagttaaatcagtatcagcacatataccttcccttaatgcctttttattatgtataaaacagtgtgggttatctctcttccgacttccaatgtcctccctatcaaccactaaacattaatgcttatttttgccagat

SEQ ID NO: 461172 - DNA, 231 bp, Homo Sapiens
acaataaaaaaatacaacaattaaaaataaaatgttaaaatacagtataacaatttatttaacatttaaattgtattaggtattataaccaacctagagatggtttaaagtatacatgaggatgtgcataggttacatgcaaatactatgccattttacataagggacttgagcaatctctgattttggtgtcgatggtcgggggattggctttactggatcctctagagc

SEQ ID NO: 461173 - DNA, 490 bp, Homo Sapiens
ttcctctcctcccacctccagttaaacattttttatttaaggtttaggattaaaaactccaccaaaatatcatataacctatgtatagagttgttttccttttagatataaaatccttttctttgacgaataaaaggaaaccttttattcagatatgatgcgcctatatgtaacaaataattggagaaataaagaaaaacataatttgaagaatgggaatgttctacctgtgtaataaatagtaaatatttttcatatgaatccacctctttaaattcattagagaccagataaaaggataggtcagttaatttcacctagattatagaagattggccacctcctcccagggaggtagtgtactgttgtggaatcaacaccgaatttcggagttagtaagactgacttattgtctcaaactttgtcattaacctgtccttaatgacataatatgaggtgggaggagaggaaggggatcatctagactcgg

SEQ ID NO: 461174 - DNA, 406 bp, Homo Sapiens
ttcctctcctcccacctcccgcacccagagcctgggtgacactgaagcgctccgaacactgtggcgtctcagtcacacagcgaatcaacccaacacttttcaagaaaacaaaatatttgctaggaaacttactttgcatttagtctctattctttgggggatgcggtttaggtcggctcgcaagggaagcccgttttgtccaggttggatattgtctacgtatggatcagcccttggatgagggtttattttaatttatggcttatgcattcttttaaggtcgatttacatgacctccgactacaactaagacagccgaggagggcactccagtcgtcagtcggccaaacccactattaaaacagccctccccctagtctcggtgtgactagggctctcccgaggt

SEQ ID NO: 461175 - DNA, 507 bp, Homo Sapiens
ggctgccctgaggactctgtctggctttgaagttttctactgtttccttttcttctgtgcactgttttaggatgatggggtgatagttccaggctggttgaggatggatttggagacagtcctttgtaccctcagtgagcaagagtatctgtcaccctacctcagcagttgtctctgtcactggtccaagcagctggttcctacacaaggtcaagatcaactggggagaagcagactcctgggtctatcccattagtggggacagctgcctgggcttatggcctccttggtttggtttctatcttgatcatctctaccatccccccatcccggccttccattttctacctcagctgtcagtgcacagattgatgtgtgtgggatcggagcttgggaggagtggggtagggctggtcctgtcctgtagcctgccctttcttcgggcgcttggaccctttggagctttccgaggtgggatgagaggaagtttatcctcgggagtcggca

SEQ ID NO: 461176 - DNA, 544 bp, Homo Sapiens
taatgctggcttttttctgtccttcaatcatgtcaagcttgttttcacctcaggtattttaccaaatgttcgttgttcttgaaattctctctgccctgatcttaaagggctgctccttgtcattcagattagtactcatacttcattagataagtcttttctgaaacctatctttactaagtcccctcattttaataatacatattattagctggtattttttgctttgtttgactattgccaatcttgcccagtagattacgaattccatgagaaacaaggctctgtctggttcaccactgtatttccaatacctaaatcagtgcctgttatataacagattctcattgtttgttgaataagcaaatgaatagacctaaatctatagaatggctataaacctgacccagcctcaaagtgactcaggagaaaagtcaatgagtctctcccagtccagacccaagtacactagggaaggaaaagatgtctagaagcaacctgattccgggaggtgggaggagaggaaggggatcgtctagagcaa

SEQ ID NO: 461177 - DNA, 461 bp, Homo Sapiens
tttcttttgaacagtttcttgctcttctaaagtaaatccattacccagaacacataaacacaaagtctttaaactttgctcattcatcagagaattcttcctccttggtgtcagagagagggcagcaaagaaagctgtgaatatttataaggtaagttttgttattggggcaggggatgtgggaagaatccatatcacaaattttgaacacaaatgagtccaaatattgccacatttaactgtcctgcttctctggaagaataccaaaatggtccaaaagaagaaataacaagggaccatagcaggtgtgtgagccgtgcaatggcaaaaagaggaaatgacaggaaagaggatggataggatgtataattaactgactctggagaaaatatgaggaatcaaggaagggtatgattctgagccttagaaactaagggaaagatgatatctataacaggctg

SEQ ID NO: 461178 - DNA, 456 bp, Homo Sapiens
aaagactccaagcacagggtcctccctgcttcacaaggtgtccaattccactctcatatgttagaaagttcttattttaaggagatatctacttcctgctgcctccacccagtaatccaacttctgccttctgaagccacatgaaataaacttaactcctcttgtcaatagaatttttcttcaaataaagagatgcagatattttcacaattcttcccatatcctttgagcactgtctttcttagacaagtgctcaaatttatcaagaccctctttaaaactgggagctagaaagactgctcaaatactctgtaagattgaatgatacagggacattatattttactgaattagtcctcatgtaacatttcccagaagaaaagctactttttatttctccccacctttgaagccccttaagaaaggaacagttgggcagggtgtgatggctcacgc

SEQ ID NO: 461179 - DNA, 539 bp, Homo Sapiens
  misc_feature (146)..(199): n is a, c, g, or t
cctagttttatttggggtacttactttgttatttcattttggttatgcctaaataacacccaattttagcattcctgggatgatttaggcaagcttcagaaaagaggccagaagaaaatggaattggaagcataaagccactaaannnnnnnnnnnnnnnnnnnnnnnnnnnnnnnnnnnnnnnnnnnnnnnnnnnnnncgtatcaatgagtagaaaggatttttcttgactaccacatagcttataaagtgaccgagtattctttccttagagattctacagtgtttaacattcattaggtactcagtatgtttatgaatgaatatatattaatggtagggctttaatagggtcttattttactgaaaattgaagacattcattcaaatttagattacaagtatttgtgttatgttataaacatttaatgccttggcctaaatattaacaagcatggtcatattttggcattgccatggtatgtattctgggaggtgggaggagaggaagtgtatcctctagagtcagccatggcgta

SEQ ID NO: 461180 - DNA, 490 bp, Homo Sapiens
  misc_feature (130)..(169): n is a, c, g, or t
gcactgcactcctctcctccccaccttcacccattcctgggcactcacccaggctttctgatggaaacacgccaatcttctcctacttttcctcttaagaattttacctgaccgggtgcggtggctcatnnnnnnnnnnnnnnnnnnnnnnnnnnnnnnnnnnnnnnnngaggagggcaggctgagccctgggcactccagtgtttagcatgtgggctgatggggacgcatggctggaggagaaccgggagaatgtggggtcttggaaattgggaagagtgtctcatggagaagggagggacagggctgtgtcagacataactggcagtcaatcaggatgtggcctgaagattgactactgtcctggggggacctcatcgagagtagttttggctgcatgaagttgaaggcggaaaaagcctgactagagaaggtccgaaatagaggtgggaggagaggaagtgtatcctctagagtcagccatggcgta

SEQ ID NO: 461181 - DNA, 450 bp, Homo Sapiens
cgagctcggtaccctcctctcctcccacctccaccgggggtgactccctgaacccactgaagagaatgctaatgcacaccctcgggcccctgccgctcccctcagctgcttagcttttctgcagaacacttaccatacttgccactgaactgaggggcaagtgcctccatgaggcaggttgtttggtttggtttttaaagtagtgttcatctcggtagctctagtaactgggccctagtggtttctcaacaaatatctttgaataactgctggcttttatgtttgctgagttttgccaggtattgtatttctcagcctccacggatttttgtggtgggggtggcatgacttacttgagatatggccacctctgctttctctttctttcttcctgcatttatttgaaaaataaaacaagggccgggcacagtggctcacacctgtaatcgt

SEQ ID NO: 461182 - DNA, 554 bp, Homo Sapiens
ccctctctgctccagattcaacccttgaatcgcccatagcacatcaacactggacatcccaactgaaacacatcacctccccaagctgctccctctggggtttaccatgttggtgaccgctgcaatactccctcagtctctcccaggccagagacaggttctgtctcttctgcctccagtcactctgtttccacagcaactggggtaacagaatgaaatgtgatttccctggagtcacttgatcatgagagagcccagtggaatcatcacccactaagtaataaaaacacaaatccctccctctacacaaacacctacatgttgacagagcacttgtgcagacattatgtcaccgaattttcacaactccgggcttggatgtcattattcccaatggacacatgagaaaacaggttagagaaatgaaacaattttcttgaggtcaccgattaagaggaagagctgggggcttgaatctagatctcaagactaaaactgtcagcaatctgtatccatcacagtttaaaagactgaggtcaggtgcagtggctcat

SEQ ID NO: 461183 - DNA, 262 bp, Homo Sapiens
ttcctctcctcccacctccaggctaatggtgggcaggcacctgacccattaatcaggaagtctcaagcactaaggaagctcacaggtgcgtggagcatgttcaaaactagtttctacatggcatattattataaagtgctgtggcccctggggaagtatgagttgaggactgttagtcccaactgttggagaattggactttgaagagcagtggaatcttgctaagtggaaactaaagacttaggaggtgggaggagaggaa

SEQ ID NO: 461184 - DNA, 512 bp, Homo Sapiens
gtcaagttgcaccacgttgctgatgtctggtgtggcaggtggtcctgatgttagttctgaggttcctccccatatctaaatggcagatgatgtcacgccccctaaatacaacttgcgcattaacattaaagcaattgaaatatttattgatgtttcaactatgaaatttgacatgttgctgcaacaggaaaactcatggctctttagggaaagtgagtgcctggctgactaccatccgtgcagttttgctcacagaccccattcctgttcactggtgtcgttcatattcgcgtcttccctgtttcctttattctcaccacctgccccctctcacactgcatgtgctttcctgtttgcttttagacatcatgtgttcagtgaagccagacggggttcctcagctgtgcagaacggatgagatcggggagctgtgtgtgtgtgcagttgcgacgggcacgtcctactatggcctatcaggcatgctacaagcactgcctttaaggttggaggag

SEQ ID NO: 461185 - DNA, 775 bp, Homo Sapiens
ttcctctcctcccacctctgcatgttggcaatatttaagtgttggagtccactacaccctaggggtgatgaactgttttggctcccttaaccggtttgaagtctcagcgcagccaggacagccatgccatgttgaagggcatgcagatggcttaggaatgttggaaaggatgggtggttctgagctcgcagctcactcactagctgcatgcatgtagacccagtggtggtgttcaggtagtgttgactttgaggcattgcggcgggtagtagtgcagtcaagttggctgcataatgggatgttgcctcagaggtcagtacaggatagccctgtgggtgtgtccaatgcaaggaaaatgaaaggcagtgtatcccatccgcctggtccttgggacatcggtaggggggacgtcccattggaaaagcagccattccgtttgtgtgtcgagagggcatagtgcaggcacatggactgaggtgggaggagaggaaggctgtgtcttgaggtcctttggctagattgggaagaccacctctggccttgacgccaagtttcaggctgatgtgctggccattgcaaaggcgccctccagcacaggttgtgattggttttccaccaggtacgcctcacctgagagggcggctagagacagtgtctgctcaggacatcagatgtcccgtcaggaggagtgtgtcctcacaccaggggaggttgaactgatggcagttcaggtgggaggagttttatcctcaagagtcagctatgaccattgtag

SEQ ID NO: 461186 - DNA, 558 bp, Homo Sapiens
atacaattcagctcgtacccagcgccctagcctattttcatattctctcttccgggtgccttcttcctgcagtagaaccctcaacctttcaatctcgtactccttctccttgatggctttctcagactctaatttctgccaaccaaggttctccttttcacattgccttgctttctgcagttggtcatagtcattcttctgttggtcaaatctgtcttccacagattttcttcttctcttttcatcttcaatctcataagtcagtcgggtgatcttctcattgagttcttttatttggccgtagcacttgtctagattttgcttagccgacttcccatccagctcagcctgtctcttcagctcctccaggctcgcaagcttcgctttgaactgggaacactctgcctggtatttctgcaggttctgatccaggaatttgttcttattacagttttccgagttggcatctcgggccagtctgagctcctcttccaaaacttcgatcttggtatttttcagcttcagatcttccaaactcttcagcatctcacttaagaa

SEQ ID NO: 461187 - DNA, 461 bp, Homo Sapiens
aacgctgactcttccctgactgattttctatcagcagcagtctgaaccctcatgtttgattccaaattcctatagcttgtcaagatataaaaatgaatttagatactgtaggggaactgctgttttaataacgccatcatttcgtttattttgtacatttaagagttttttatcaataaagatttcataggaggacatcatcatacttgtctgttcttccattgatgttctcagagtcccgggtcagtctctgagtgtctcatgggtcgggatgcacctctgctctaggcagctgcagggcagtttacagagtgagcaacatccaccgggcggtggcagactggctccgtgtctgagctcacatcatgctgacacctcactcacctgctggatcgtggaaccccagatgggcttcaagggacccacggtgggcaggaggcaaaggttcccagtgccaccca

SEQ ID NO: 461188 - DNA, 452 bp, Homo Sapiens
cctgtgatgagcttcgcctccaggggccatcagggacgacctcctccttctccgttttcttctgggccggctgccacaccaaatgttcaccagaaggtccttgctgccctcatcaccatgtgtggcttccaggggatcctgcaaggacacaggccctggctctctctgagcaggctcttctgcccttccttcactttcctctgaattcgcggacagggcactgtgattgctgtgacagctggcacttcctgccccggggctctgggggctctgagggctctggggcttgggtgtggtgggccttagaggggtgggaggctgctcagggtcaaatgtcaactggctgccagcgtttgggtcacaggagtctttgctcaacacatcctggacaatcgggcttggcaaagagctgcaagtgcaggaactgtcgctttccaccgcccaggaacctt

SEQ ID NO: 461189 - DNA, 172 bp, Homo Sapiens
acaacgctgatctctgcctatttcctgcccatatgtctttcctgaatgcttagttattttatgagttatgcaaaagaaataggaagagatcagcgttgtggaagaggtcagcgttgtagaagaggtcagcgttgtggaagaaggtcagcgttgtagaagaggtcagcgttgt

SEQ ID NO: 461190 - DNA, 173 bp, Homo Sapiens
acaatcgcaaagacttgatgagaaacgggacgcgaaaaattggcaagtggcaaacacagaagcatggtggtatgaagagaggaagaaatgcagtggtggctagggagcattcagactggggaaagaccatttcaggaagggaactgagtgtatctgggttgaagagaggaccg

SEQ ID NO: 461191 - DNA, 580 bp, Homo Sapiens
agaagaacggaaggaacagagggggcaaagcaacaaccccccgtatttgccccccgaggctgaagatggaaacattgaatataaataccgctttgagcacctggtgacacaaatgaagtggcggctccaggagggacgtggtgaggccgtctaccagattggggtagaggacaatgggctgctggtggggctggctgaggaggaaatgcgagcttcgctcaagaccctgcaccggatggcagagaaggttggggcagacataaccgttcttcgagagcgagaagtggattatgatagcgacatgccccggaagatcaccgaggtgctagtacgaaaggtccctgacaaccaacagctcgtagacctcggtgtggccgtcttggggaatgtggactctgggaagtcaactctgcttggagtcctgacccagggagagctggacaatgggcggggccgggctcggctcaacctcattccgcacactgcatgagattacagtctggaccgaacactccagcatcagcttcgagatcctgggctataacagcaagggaagagtcagcgttgaatggtaccgagc

SEQ ID NO: 461192 - DNA, 293 bp, Homo Sapiens
tcggaccggttacagcttcctgactccactgaagcaaaaccacacatcactgaggtcacagcctctgccgagaccctgtccacagccggcaccacagagtcagctgcacctcatgccacggttgggaccccactccccactaacagcgccacagaaagagaagtgacagcacccggggccacgaccctcagtggagctctggtcacagttagcaggcatccctggaagaaacctcagccctctcttgaacaacaagttacgtcaaagtctcaggaagctgtaaccggtccgag

SEQ ID NO: 461193 - DNA, 588 bp, Homo Sapiens
  misc_feature (140)..(184): n is a, c, g, or t
  misc_feature (457)..(457): n is a, c, g, or t
gacagtgaccatttattacacacatcagactgggggaagaccattgacatagctgagcaccaggtagggtgtcctgggtattcgggcatgagagcagcaggggcctcctgacgcgggcaggagaaacatggcacccaccnnnnnnnnnnnnnnnnnnnnnnnnnnnnnnnnnnnnnnnnnnnnntgcctggatgcaggatcgggggcccctggattcccctccagcctcacatcctggagatgaggagatgcttgcctcttcttgtcctgaggcttccggagcagggagtgtctttggtgacgtgctaagcgtttctggtggccgaggccagactccagcatgtcctgtcgggagtgagaggtgtctgcttcctcaaggccttgtcccctgccctggggccccctgtggccacacagctcacagggcactcctagtgtccgggctgtcttttgtccncaagggcccaaggcccccaatgtcccccgccggatcccactccaactctgtggaagtggggaggcctactgggtgcccagggcccccagaccccacgcaggtcctggccagtccgagtctccctcgacctc

SEQ ID NO: 461194 - DNA, 275 bp, Homo Sapiens
  misc_feature (170)..(224): n is a, c, g, or t
cagtaacccctaggtttaaggacaggttctaaactagacccaaacggaaatcctgacatctgtgcgcagcggctcgccgcacacctggacggcacctcctgacctgcacacacctgtgcacgctcacctcccaggagcaaggccagggtggcttaagattgcgtccatcnnnnnnnnnnnnnnnnnnnnnnnnnnnnnnnnnnnnnnnnnnnnnnnnnnnnnnngcgacagtcccccctctagctttctgctcaggagctgaagccgggccgcct

SEQ ID NO: 461195 - DNA, 277 bp, Homo Sapiens
ctctctctctctttctgtattcttttggagtgggagtgggagagtggaggcggcacggtggtccatgtccaacttcctgcctgagctggagcaggggtctggaggtaggttcttgtggctaactgatgcaggacagcgactcaggaaggtgtcactcagcttagactaaatcattctttggagacagttcccacatctaagtggagttttatttcaccctgatgtacattaactgtggctctgggtgatgatcaggaagctgtcaccgggccgacca

SEQ ID NO: 461196 - DNA, 394 bp, Homo Sapiens
  misc_feature (13)..(13): n is a, c, g, or t
  misc_feature (26)..(26): n is a, c, g, or t
  misc_feature (54)..(54): n is a, c, g, or t
  misc_feature (93)..(93): n is a, c, g, or t
tattccactgagncaaataccccggncccagctgttccccaatagcctctgaanaaaccaacctctggacaacctgcaattactgtaatgtgncttgtaaaaactagacttgaaacattttcaaaaactgcaagacaatttactatggaaaaatgttatccttttcactgcaattcctcttaacatatgctaaaatccttttggtgtatgggttttccccaatatatggggcaaaggcaaaggttgggtcatccttggaagtttctaatcacctttgcattgacactgtgggaaaggggatgtgtcttgcttttaccatggcaatcccgtctagagtcatggggaggattttccctgtctgagctatctttccttaccctgactttttctttat

SEQ ID NO: 461197 - DNA, 378 bp, Homo Sapiens
tatacaattaaaaacaagctgagaaataagataattatcatatccctaactttaattctagtttttataacaaaactattacagctgtgtgaattaaatgaatggtaataaccttgtgagaagtaaatcggataccaggattcacaggaactttcttggaaaccccagcaatgaaagccataaattactgtagtaatttagtttttcttctgctacatttataccaaaacctatttagagatttttcttgaaaatcttgatagtctgaactatctgtcacaaaaaatactatcatgaattctgactatatgatgaatgtacaggattgagtggatacgaggtactgtcctccttcaatggttgtctggcatctttcct

SEQ ID NO: 461198 - DNA, 435 bp, Homo Sapiens
  misc_feature (211)..(211): n is a, c, g, or t
  misc_feature (233)..(233): n is a, c, g, or t
  misc_feature (368)..(368): n is a, c, g, or t
  misc_feature (404)..(404): n is a, c, g, or t
aaatacagtgggaataaactaatggctctagtttgtaaacaaagatctctaaaaggaagtggacactctaagtgatatcatcttcttaaggtggctcttgtgtaggctcttttaaaacatctcagtggttgtgtgagtgtgttggttgaaaaaccagtctcctactttgtaggaggctggtctgtacagggaccttctcttgtctggggtncagaatttctgcttttgcattnatggtaaaagttggccttggtcctgctgtttctgccaggggtagcatttgtcagagcagagtccagggcagccccaccatgtcccctgggagcctgtggggcagcatttctcctgggcagcagttctggagattnggtcggtcgtactcttgggccagcctgacggtttanccagaaaagcaggtataagaatttttcttct

SEQ ID NO: 461199 - DNA, 596 bp, Homo Sapiens
gtctaggaaacacttgcctttattttcttgcctgaatatgtcagcaccttaaatcaccccatctatctagaagtactacagttgattaaagtaagtcaccacaggtcacccattcgtggcaggtcagctagctggctgatcactggaatacagtcatatccccaggcatacacacgagcctcacttgacgatccccaagtttgtacatctgagcttgagacgtgacaagttgaggtctctgctttgttcttcatagttggcagtttgtctcctcgggtgcccctccggttagctgtttatcatacgtctagccctatcaacagtgcaggcagcttccagagtatagcttttctctgcaaagtgcctggtggaggggtacctccttttccattgtcctaatggctccactgggcttccataccagccctttccagtgtcttaacagctcaaagaaacccatctgtggctttcttgttagcactggcctatcactaccttcctattgcctgttaactaatattttgcctggaatgctttaagcttagagtactgggtctttgtttcacccgattgataggagatccgatcgattctgt

SEQ ID NO: 461200 - DNA, 392 bp, Homo Sapiens
ttccatctgaggtccttcctgaacatgtcactccacagcagaggaccggttgcagcttacccagaaccactcctccaggagagctggatgttttgcgtgcaacaccttgagcactgactgctattgttcaaaaaaagcctttgctgcattcggaggactgccccgtgccctgaggtgacttcctaactatgtggtttcattagcgaatttattttttgtgctgggtgcacatttgtattttgttaggttgctgtttaagctacaagtttgctgtgctctctgcagctacataacatcttggcatatttaagagtggcttttataaatagctttattctgatattaatcagattcccaactttactgagaattaaggtctgggcatctttcct

SEQ ID NO: 461201 - DNA, 606 bp, Homo Sapiens
ggagggtctgtaaccctccttgttttgaaaggtgggcctagatgtttggctggtaaaacttgaaatgggagaattaatattccttaaagtttaacacccccctataagcctaaagcccatttaaattggataaactgagagagactaatagattttgctctaaggtataaaatccattatctgatcatattcctgacctccccccgactccaactaaatgtgcccatagtcccaacactgtgcctcactgaattggaactcaagtatttcaattcttttgagagcagtttgtagctccttaagcagagcagacctttcagtagagaattcgctttaaaaggaggacaggattatcaccacacgattaacacaaacactggagaacttctgacacaaattcagtatttcttctaagtctgcatttacaaagggtcttttattttaatttctttcacaactgcctcgccccaaccaaagcctcactttcatttcctcacagctttaaaaaataaaatattatcagtgcctcagcccgaggtaacaccgagtgcaggcagcctgtgtttaggaatttgcagcgccgctgctattttcaacgagaagggg

SEQ ID NO: 461202 - DNA, 421 bp, Homo Sapiens
ggaggcaaaggtacaaagtaagggttgggataagtcttgccgagggagacttaatcagttggatcactcccctaaacatttcaaccgtgggccaaagggacttgacgaattcttgcaaggagcttgtattcctggaaatagaatgctctctatttctcattgttgggctttatttgacattgtttcttgttgttgattttcagtttttaagctggaggaattactctgtgttgattattgtagtgacttgtagattgtcattggaaaagattttgtagttacaaaaaaattttatgtaggaaacatggcaaactagacatctagagtttggaatgctggctcttgctgcatggactatagattgttcagttctgtgcagattctcagtcagccttcctgatatgagaagtctggcatctat

SEQ ID NO: 461203 - DNA, 295 bp, Homo Sapiens
  misc_feature (26)..(26): n is a, c, g, or t
ttcaaatgtgtggaatgtgggaaagncttcagtcgtagatcagcacttaatgttcatcacaaattacacacaggagagaaaccttataattgtgaggaatgtgggaaggccttcattcatgattcccagcttcaggaacatcagagaatccatacgggggagaagccattcaaatgtgatatatgtggtaagagcttctgtggtagatcaagacttaataggcattccatggttcacacggcagagaaaccattccgatgtgatacgtgtgataagagctttcgtcagagatcag

SEQ ID NO: 461204 - DNA, 364 bp, Homo Sapiens
tcagacatgatgacagatgctgtgaatgaaaacaggaaagatgaagaaactgaagagtcagaatatgattctgagcatgaaaattccgagcctgttactaacattcgaaatccacaagtagcttccacttggaatgaagtaaatagtcatagtaatgcacagtgtgtttctaataatagagatgggcgaacagttaattctaattgtgaaattaacaacagatctgctgccaacataagggctctaaacttgcctccttctttagattgtcgatataatagagaaggggaacaggagattcatgttgctcaaggtgaagatgatgaggagaggaggaagaagcagaagaggagggtcgctctct

SEQ ID NO: 461205 - DNA, 350 bp, Homo Sapiens
cgatacagggcgatccttcagctaaaaactaatttttctttgttaaacatggattttctcattttggttttgagaattactcctatttctcccaagtggacccataaaatctctgggccaaattagtctaacagttccgatctatttttataatccaaatctataaactcacaaaataaagttatcttacaaaggaaaaacttctgggctggaagaaaaatagccactatgatatagggaagctagatttatctcagacaatggaatactctattctagagaataaatatgaatacgtttatcagcaataattaagatccatttatattatacattaaggatcgcccttt

SEQ ID NO: 461206 - DNA, 164 bp, Homo Sapiens
tggggggcacaattgctgtctgtcttatttacagctcattctccagtaccttgaacatcacagacaaccaaatcaacacacaatagatgtttatttaaattggctatttctttcttctggaaggaggttaaaggaaggtgggaaaggctgggcgtggtggctca

SEQ ID NO: 461207 - DNA, 522 bp, Homo Sapiens
gtgcgtatggcctctaagggaagatacgatcgtccagaggcccatggaccagagtgctggaaaagcttggggcagacaggcgtctcaagttgaaagagcaacatggcattcgtaaggcttcaaaggcagcttccggcccatctgggtgacactggacactgaggatcacaaagccaaaatcttccaagttgtgcccatccctgtggtgaagaagaagaagttgtgaggacagctgccgcccggtgccacctcgtggtagactatgacggtgactcttggcagcagaccagtgggggatggctgggtcccccagcccctgccagcagctgcctgggaaggccgtgtttcagccctgatgggccaagggaaggctatcagagagcctggtgctgccacctgcccctactcaagtgtctacctggagccctggggcggtgctgcccaatgctggaaacattcactttcctgcagcctcttgggtgcttctctccaatctgtgcctctcagtagggggtttgggga

SEQ ID NO: 461208 - DNA, 199 bp, Homo Sapiens
cggccaggacagatccccctcattttcctttgtgtgacagtgggctcatttaaagattttgaagcaagatgggataatggatccccacgtcctgaaggaggcatggaggtggcatcgagtgcccaggaggtggtgtttgtcactggatcaagcaggaaggcttttctgagaagactctggtgccttttgagacaggagg

SEQ ID NO: 461209 - DNA, 456 bp, Homo Sapiens
cagtgctgtggaggctttgaatagggccctgcatgtaggacgcagccagtgactctggatcgttgttagcgtccccgtcctgtccaaatggcaggtccttatcgaaccagcttggcctctctagctccccaggctcccagggagtggagattattatagtagtgaacacagtagtcaggcagaggacgccactgagtcgggggctccatcttctatggagctgactttggactccgctggctagcagcttctgcggcacccagaggctttggtgtccggctggcccgggctggcaaccggctcgctcatcgtgctgcccagccacacgacgtgagcttctaggataaccaactagatgtatgctactccggagtgcatggcacacagttctactgtgtaaaatgtgccgtcgagggttttcccactctgaaggtaatacctgtttctcagtatgac

SEQ ID NO: 461210 - DNA, 374 bp, Homo Sapiens
  misc_feature (21)..(21): n is a, c, g, or t
  misc_feature (49)..(49): n is a, c, g, or t
  misc_feature (51)..(51): n is a, c, g, or t
ccctatagtgagtcgtatatntgccactgatcctttcggcaagtcaagnanaaatggcctgcctagtgggagtgttctgcaagcctgtgttctcatgccactgcccgcgctagtttctgcctcaaagccatctgctcaggttgctgagtgtcccgggagacggtgtctccactgatggagagagacaagaaagacagggaaggtagagaaacgcaaagaccagaaaggtgtatcgagagcggtgaagtctcctgttgccgccttcggccagcaggaggaaaggtgttatcaaggagcagcgaagtctcctgttgtcgccttcggccagcaggaatggcagtgtttgtttggcacatggctgcatgtgtccgtgc

SEQ ID NO: 461211 - DNA, 277 bp, Homo Sapiens
tgctggacttaaataggcgcactcactatttcgaggttactgggaaggactttcttacctctctccttccctccacaacaccctagagagggagcatgggggaagaggagtgagcattagagctctctggagtggaaaggtttgtcaagggtggctgtcacttctgtgactctacctagccagccagctgtttaccccatcctcaaggtagaaatcttgtgctatagggtaaggactatccaagtggttttgctcccactcagggttatcactgttt

SEQ ID NO: 461212 - DNA, 158 bp, Homo Sapiens
cgcactctcgacttgtttaaccctacaggacaagttctgtctttgccactgatatgaactcgtggctgtgcctcaaataaattaatcaacaaatatttattaattagtctgtgtaggctaagtacagtgctaagtgctatgacagatgtaaaaagttg

SEQ ID NO: 461213 - DNA, 153 bp, Homo Sapiens
agaccccatccctaaataagtaagtacacgctccatgaacatcaaaaggcaggacacccagaaaatgtcaagcaagctgggctcactgcttggtaagaaatgcggaggaccgcggggtggggcaaggactgccttgtgtaagagaactgcttt

SEQ ID NO: 461214 - DNA, 146 bp, Homo Sapiens
cgggaggactgcttgagcccaggagttcaagatgagccttggtgacagaacagtaccccatttctataaaaaatgttttaaaaaattagctgggcatggtggtgtgcccctgtagtcctagctactcaggaggctgaggtgggaga

SEQ ID NO: 461215 - DNA, 452 bp, Homo Sapiens
  misc_feature (280)..(343): n is a, c, g, or t
gccagagtgaagatccccacctgatccatcccctctccagctcccctctccatggagagccatttccattgcttaataaaattctccaccttcaccatccttcaagtgtccgggtgacctcattcttcttggatgctggacaagagcttgggacccaccgagtgtgggtacctaaaagaggctgtcacattggccctggcagagggcagccaccctaggcaacaaggcaagggacccactgagctgataacacactactgtccatagacggcggagcttnnnnnnnnnnnnnnnnnnnnnnnnnnnnnnnnnnnnnnnnnnnnnnnnnnnnnnnnnnnnnnnntgcagggcctgcacggagcttgctcctgccagctcccaaagcagctggccagatgccacactcactcacgtgctccctcccacaaggggttgagcacggcgggccaagt

SEQ ID NO: 461216 - DNA, 458 bp, Homo Sapiens
gctgtattgctgtgtacaagacaactatgtctgtcccatcccccaccttacgccataacattgggattagcctctgctcttatccctgggatcaggcaaggcctcaacctgggaattggccctcaagtttgccttggcccctgctttagtcatggcattgggattagcctctgttcttaaccttagcatcaggcatggcctcagcgtgagtactggcaagagctatgaggctgagcagcagctctcatgtcagctccagttattgccttagatatgacattggtatttcccctaccatcaatcctggcaccagacgtcacctcagcctgtttcttggccacagtctgaggttgtatacaagctctcacatctgcccctgcccccacctacacatggcattggtgttacccccggcatcaatctttgccccaggaatgtcctcatagtctgggcatctg

SEQ ID NO: 461217 - DNA, 313 bp, Homo Sapiens
cattggtcaggacaccacactactgtaataggatgtgtgtgacccagataaaaaggatatatcctagagtaaatatataccagagtttaaggaaaaaccaacaatgcccaatgggaagctccttgttcatcatcactagcaattttttcccccaagtgtctgtccaacttaagaagaaatggtagctctcattaaggaagcttcaaaactggactctgcttgctggaagagggcattctgatccaggtttggggggatgagcattaaaactgaagataaatgttaagcaccttcaaattcatctttgtaagag

SEQ ID NO: 461218 - DNA, 372 bp, Homo Sapiens
taccggcccagccttagccgatttcggtcatgaaagtggcttttctttctgaatccattacctgtggcccctactttagctgtgttggcctttaacctgttagaggacattaaagcaatctctttgctcttatatagtcatattgtgtttggattagagggacgtctgaggtttcatctgcttatgcagacggtgctagctaagccgtgccttttgggtccaggtgacctccaaagcaggcctctccaacacataaagatcattgggacatagtcacgtgtgaagggtctgcccgtctccgctgtgcattaggtgctgttggggaaatgggagcagacggagtgaggtcaccgaccccacacacacacttga

SEQ ID NO: 461219 - DNA, 667 bp, Homo Sapiens
  misc_feature (573)..(573): n is a, c, g, or t
  misc_feature (637)..(637): n is a, c, g, or t
ggcagcatttaatgaagtacctgttgtatccttttaagtgtttgttgtggtaatcctcacaaagaccgggactgatggaaactccttgctattaaactttttttcttgaggaattttgcttttcaagtgcatatacactattaatattttttacccaagagagcattctaagctaatttatgcagtgtgactgtattaagcattaagcttccttcagagctggcctatcggagatgctactgccctctctacagatgtgtctgaaatgcctgcccaaggatggcccttagccagttaacagctttatagcccatcctcattgcttactgccacccctcagctggggtccaaggcagtactattcagtttattcaccagacctgcctccagacatctacttctttcaaaaattagtgttttccatcaagggggcatgttccagaggcatttcccagagatgttcccaaaggaacactgtccgggtgctgtgggcgtacagtgggcaacaggcattaggattaagtggggacatcccaggcagggttggctttagggattccggttcattttgantagggatacggtgtaattgggctgtttttttaaaaaaacggcggcacacacacacattttgttngggcttttttcttggccctttcatttgggg

SEQ ID NO: 461220 - DNA, 576 bp, Homo Sapiens
  misc_feature (58)..(58): n is a, c, g, or t
  misc_feature (147)..(147): n is a, c, g, or t
gcttcgttctatcagtgacatcacccattgtggccgaggaaccacaaaaaccttaaantacaggcttaaattcagcaagcgaagaacattccatattgaatgggcatgagatatgcctatcagattgtgtgtgtgtgccgcgttttnttaaagacagccaattacatcgtatctagtcaaatgagcggattctaaagcagcctgctgggatgttccacttagtctaatgctgttgccactgtacgccacagcaccggacagtgttctttgggacatctctgggaaatgctctggaacatgctccttgatggaacacagctaatttttgaaagaagtagatgtctggaggcaggtctggtgaataaactgaatagtactgccttggaccccagctgaggggtggcagtaagcaatgaggatgggctataaagctgttaactggctaagggccatccttgggcaggcatttcagacacatctgtagagagggcagtagcatctccgataggccagctctgaaggaagcttaatgcttaatacagtcacactgcataaattagcttagaatgctcctct

SEQ ID NO: 461221 - DNA, 270 bp, Homo Sapiens
  misc_feature (232)..(232): n is a, c, g, or t
gaccttgctggacactaggtgcccagtctacctacattttgacagacatatatattccatggcatggttacattattcagttaagaatgttcccggttttctctaagataatgctgcccatctgtgtctcactctggacatgtagagtacctgcaaagacttggactgcttgagcagagggcctgcttttgttttttgttcttcctgcctgttgtaacttgatgctgccaanatgatcctcttaaatgattgtaccaccttccctgccaa

SEQ ID NO: 461222 - DNA, 184 bp, Homo Sapiens
gggacctaggacactagtgcaggcagtactcctggatcagttgacaatttgtctctcagatagattcagttgaggaatttgtccctggatatttgtactacaacatactaaaatcaaaagtcaaaacatcatattagttaacagaaagggttatttatttattttttcttagaggtctgtcaca

SEQ ID NO: 461223 - DNA, 326 bp, Homo Sapiens
  misc_feature (29)..(29): n is a, c, g, or t
caggacatctagtgcatcggaggtacacntagtgcattagtggactggtgaataggaggtgaactgctgaattacgtggactcggtgaatagcgaggtgaacttggtgcatatagtggagttggtgaatagcgaggtgaactggtgcattagtggagtggtgaataggaggtgaactggtgaattagtggagtggtgaataggaggtgaactggtgaattagtggagtggtgaataggaggtgaactggtgcacttagtggagtggtgaactaggaggtgaacttggtgcattagtggagtggtgcataggaggtgaactagagca

SEQ ID NO: 461224 - DNA, 246 bp, Homo Sapiens
agctgaagaagataaacctctcatttcagagcttactggggagcaacactaagataggcaaggctgcaatattgagactgcttttctcttacatactagaaaatgtggggagatggcagagacaacatctcttgcagcacaaagacattttttaatagaagggaaacttgcttgctcttcctgaagaaagaaaattaacacctaaaaataggttctcctgcaggcggggtcttgcactagtgtcct

SEQ ID NO: 461225 - DNA, 306 bp, Homo Sapiens
  misc_feature (12)..(12): n is a, c, g, or t
ctaagtgctgcntcggctgatgatgatgggcagctaggacacatcagagctgcctcggctgacgatgatgggcacctaggacactcagagctgctcggctgatgatgatgggcagtaggacactcagagctgctcggctgatgatgatgggcactaggacacacagagctgctcggctgacgatgctgggcactaggacactcagagctgctcggctgacgatgatgggcactaggacacacagaactgcccggctgacgatgatgggcactaggacactcagagctgctcggctgatgatgatgg

SEQ ID NO: 461226 - DNA, 325 bp, Homo Sapiens
gtgcctgtggtctaggatactaaggtggctgagacaggagaatcgcttgaacctggtaggcacaggatgtagtgagccgataaatataaaaagtattagagtactaacagaggaaagtttccactgatcaccttttagctttaaataatgcagaagcatttgcccagttaacttgtaaataaaaatcatgcataattcacaattaaatcttttttgtttgtacaaaaatgaacacaagttattctcttttatctgtattgtgattggtttggtgagagggaattaggccacttgagagtttgtgtgtgttacagtattctggcca

SEQ ID NO: 461227 - DNA, 452 bp, Homo Sapiens
atttgatctttactatgagtccatggcttcctggcagtgctctggatttgatctttgctcacaggctgttacttaatttgggattcttttgctagctggagaggatagaggcgagaaaacattttttgccgttgttttcaactaacccagtgtttctgaaatatgctacgtttaattaaattttgttgcctctgaattctgcttgcaaactggccagttattttctgagctaattcttcatgtcttacagcaagcttagaatatgcatctaacagcaaccagttcatgctttcaacatttggagttttctattgctcaagtccatgagttcactgagcccattttctttcttccgtgttactgcactatataacatagcatttcattcctcctaaggtcgtcacagtcgccaggtcgtggctccccaagccttgctgcgcgttcctctccac

SEQ ID NO: 461228 - DNA, 462 bp, Homo Sapiens
ttgacaagtcggctggcacctccttctcagtgtgcttcttccggcgcaaggccaggcagggttgctgcttgcagagaccaggtgctcattaaataggcggtgctgagagcctcgagtgtgcctctcaccgcagtaatattcagggttcagtgcttccccactgcgcaggaaggaatagaggagaaatgcccggtggtagacagtcagacccaggttgcctggctccggctcaggacaagtggacaggtaggacccaaatgttgccattgcgatgaacttcattaattccacattgggcacatggccaaaactgcagtcataagagtaaactcctcccacctggacaaaggaacaagccacagtgccactgcgaagctggttcagcagtgtctcacagacagcaacatcaggtacactgtcacccgcatccgtgatcacgataatcctgcactagtgtccagc

SEQ ID NO: 461229 - DNA, 455 bp, Homo Sapiens
gaatgggcggccagacagaggactgtggtcctgtcaatgagcaccgtggcatccagcgcctggaggccatgctttttgcactggaccgcatcaaccgtgacccgcacctgctgcctggcgtgcgcctgggtgcacacatcctcgacagttgctccaaggacacacatgcgctggagcaggcactggactttgtgcgtgcctcactcagccgtggtgctgatggctcgcgccacatcgtgcccctgaccggctctttatgcgacccatggtgatgctcccactgccatcactggtgttattggcggttcctacagtgatgtctccatccaggtggccaacctcttgaggctatttcagatcccacagattagctacgcctctatccagtgctaagtctgagtgacacagggtcccgctatgactacgtgccacgcactagtgtccgtgaaaggccc

SEQ ID NO: 461230 - DNA, 786 bp, Homo Sapiens
  misc_feature (670)..(670): n is a, c, g, or t
ccctttcactcaggtaagttctgagccttcaaataatttgggttcccaaagatttctgcaattgtcttggaattggcaagtgctttcacctagttcatatttggcatcctttgaagctttgtcatgcttccacagaccggtccaccacatattctacaaaacctggactgttaaacattagtttctgagcccagggttggtttgcaatggccgtaaacacttttaaggcagcacagtgtagttcagggaagggctgactactaatgccacgggaagagctccagtgggtcctgagataaagaagaaaaccaggattctgtcatcctcagaaggtcatcagtctgctgctcaggtggtaagtacagaagagatgaaattgcatccaaacatctaatttttagctccactggggcattctttgattgatgtcctattctcataagcaagcgttcaaagcgagttcctgttttctgtaaaacctgttttccttcaacattggatcccaagattccaactgtgtctacagctacaccaatcatagtggggtcctgactttctatcatttcaaagactttttccacaaagataggataacgctcacagatctgttgaggactatccatgacacgccaggtttccaaaaaacttcacgaatcctggcagatagaangctagagaaagggtctgaatctgccccaacaattatattagaaatttggtcaattactccttcttgagcaagatattgtcgcccatgatgagtatatgccagtgatgtcaccattt

SEQ ID NO: 461231 - DNA, 213 bp, Homo Sapiens
ctctggaaagattgccctttgttataggctagaatggccttaccatccttactgtgaaccatctgccatgaagctcttttttgaagggcaggggtgctttgggagacctgattgcaagagggcatgggaggggagaagtcagaaggttgaaaggaagggaaagggaacagggagagcaggcaccaagagggatgaagggaatgctgagcagga

SEQ ID NO: 461232 - DNA, 210 bp, Homo Sapiens
tttattatcagatggggcaacatattgtatgaagcatatgtagcacttcacagcatggttatcatgtaagctgcaggtagaagcaaagctgtaaagtagatttatcacacaatgcctcatacaatatgttgccccatctgataataaaaatacaaaggtgctctttaagctaaaccataaaccttattagagaattctagttaagaggtc

SEQ ID NO: 461233 - DNA, 408 bp, Homo Sapiens
caaacaataaaatgctatgtgagtgtaagcaattgctataggttgagttctgtttccccaaaaaatgacatattggagtccaaacccctaatatctcaaaagatgaacttatttggaaacagggttgttgcagatgtaattagttaagatgaggtcattagagtgggtcctaatccagtatgaataatgtccttacaaacaaggaaaatttggactcagagtcacacacacagggagaatgctatatgaagatgaaggcagagactgggactctgctcctccacgccatggattgccagcaaacctccagaagctagaggagaggcatgggacagattcttcctcacaaccctcaaaaggaaccaaccctaccaacaccttcatctctacttctagcctcctacagtc

SEQ ID NO: 461234 - DNA, 203 bp, Homo Sapiens
agtctgtaggaggctctctaggattggaaaagttcaagaaacccgagggaagctgggactgtgaattgtgcctagtgcagaataaggcagagtctacgaaatgtttggcatgtgaaagtgcaaagccaggcacaaaatctgggtttaaaggctttgacacatcttcctcatcttcgaactcagcagcctcctacagactgcct

SEQ ID NO: 461235 - DNA, 321 bp, Homo Sapiens
acagcagttttggggaaaatgtgtgtgtggccccagctgcctgatttttctctgagagtcagaagtggtgtctgagtacatacaggttaggaatccccaaggtctgtcttcctttagctactaccagcccccatcttcctccaggactaatattttttaaaccttagtgcaaggacctatcccccccagactaaatactgattatcacaagagatcttgcctgctagctctgaatggacttgtggaccaggtcccttgataaactgtagtgggggttccagtaatacaggcctctttcttacaacagcaaagggtaccgag

SEQ ID NO: 461236 - DNA, 370 bp, Homo Sapiens
ttacgcattcattgactcaataaacatgtttgagaacttaatacccaattgttcctgtctttgataatgggaatgcaaaactcaggatcctccacttcaaagtgcctggagtctgaaatctcgtgcttcctgcaaacaaataatcacagattgatggctcatgtcctaaaatggtgatgcttggatatgtgctactggtccttcctgaagagaacttgagaagttttcaaagagaaaacaatatttaggcctaatatatgtgcttgactaggagaggtgagaagagagactatttcagagaatgggaccaccatgttaattcctcttcatagtttccggagttactctcttcttgcattagctatgctga

SEQ ID NO: 461237 - DNA, 248 bp, Homo Sapiens
agctttaagtgaaacttaattcaacactaatattgattgagaatttttgctcagggctttataggacttacctaatttactccattttacactcatgtgaaatatggccatttaacagatgagtaagagaagattcagagaacttaagtgatatgcccaaggacagaagtccaggtctgcccaattctagaacttcccttgttcagtgtgttccttaagtgcagcaagtctctggatctaaactatat

SEQ ID NO: 461238 - DNA, 144 bp, Homo Sapiens
ctcgtaccctcgagtctgagaggcgaactcagctccgccctgcaatgctctccgggtctgtgctgaggagaaggcagctccgccctcgcaaaggcacagggcgccggcgcaggcgcagagaggcgcacgggggtacccctagcg

SEQ ID NO: 461239 - DNA, 604 bp, Homo Sapiens
tacccataaaagttggtaaaagaattttattattatgtggcttaggtaggtttttgcattctactaacagaaaagcattttccacaccttattcaacctaacacattatacatttgtgattttatctacatcgctgcagtattacactattgaaaaccttcctttcaaatgtactttggtgcaattatacagtagatatctctgccttcagaaaataaaaatattctcaatctaaactcaaaatggaataaagacatcaataccaagtttgtgcaccacttggtaaaagattgcaataaaaatcagaagagtatgctgcttaacatataaagaagatgagacatctgccacagtttcagtcaaacctttgtaggaatgatttagcatctgggtttatttttactgcagttttcacatatgataggtggaattgtaccacaaagaatagtctcatttgcacgagagactcaaatattggactctagcacaggaaatgtctcttggggcttagtaatatacaaactgatagaaaagaaaattgccttaagaaaaatttcacaattgactaaacatctgaaacatttttatcacagctttcatatat

SEQ ID NO: 461240 - DNA, 419 bp, Homo Sapiens
aaagttggtaaaagaattttattattatgtggcttaggtaggtttttgcattctactaacagaaaagcattttccacaccttattcaacctaacacattatacatttgtgattttatctacatcgctgcagtattacactattgaaaaccttcctttcaaatgtactttggtgcaattatacagtagatatctctgccttcagaaaataaaaatattctcaatctaaactcaaaatggggataaagacatcaataccaagtttgtggcaccacttgggtaaaaggattgccaataaaaatcaggaaggaggtatggctggcttaacatataaaggaggatgagggcatctggccacagttttcaggtcaaacctttgtagggaatggatttaggcatctggggttttatttttaactgc

SEQ ID NO: 461241 - DNA, 621 bp, Homo Sapiens
gggctgaggcttcagaaagaaagaggcaggggtaggaggcaaggctgtgggaacggaagcggagggtgagggaggccgccatcttaggtaactggcgcctgtaagatggctgcctgaccaggtgtgcactgaaagcctcccctggttggtggacatggaacagactgaggccataagaaggacttcctggctgaccagaaatactgttgaatcttcctgttaatggaattaggaagagaggatggagagagaaggaaggagggagagaccatgaatggcggcccccagaagagatgtaaggttgagcacaggagcaggggtggtagagaggcctcagcactgggcttagttcccagactacttagaggactgtgggtaataagaaaagtactggaggaatcagaatgggggaatatcagcatgaggagagagagagtaagatgtggccaggcagtatcatctgctagtttgagggtctctctggggcctgtgaaaggtgactgtgtacttgaggtgatgctccaccttctctcctcagcccagcactctggtgaaactgcatcctctcagaggccattcacagccccctcaacaaagaccactggcccttcccaagcccag

SEQ ID NO: 461242 - DNA, 507 bp, Homo Sapiens
  misc_feature (485)..(485): n is a, c, g, or t
atcataccacatctggcctctgctcagaatcctcccgtgactcccatctcattcagaggaaaaagttctcgccgcttcctccctgatctgacctcgccacctttctgacctcacctgcctccacattcccctgactcactgtgttccacccacagtggcttccttgctcttcctcaaatatgccatgtagagtcccacctcagggcctttgctctggccgttccccctgcctggacttctcttccgcgagatatccgcatgactcactctctcacctcccttaggtctgtgctcagatgacacttcctccgtgaagcctcccctgtccacctcatctaaaactgcagcatcttccccacccctagcacttcctatcttccttccctcctttatgtttattcttaggaacttgtcatcatctgacatactatacttcacccgtgtctcttctttgttatctagaatgtcggttccacaagggccgngatctttatctgtgtagttcac

SEQ ID NO: 461243 - DNA, 342 bp, Homo Sapiens
cttgtgtcactcttcttatttcagaggtagagtttagcctggttcacctctgggctttagatccagatagctgggtttacagtgagcaagttcccagggctaggacagggttcttggggttaataagggaatctgtctcttcctatcgacgtgcctgtgcagatatggattcgttcccagagaaagatgccctctgtgctgctgagagacagcctctgcccaagtgaatgagctcagcgcctcaaagcagagtttttgcccagggctagaggctgcccccgttcgagcatctgtggggcgcccatcacgttcatccatttgctaaacaggctccataacact

SEQ ID NO: 461244 - DNA, 343 bp, Homo Sapiens
taaaatgaggataacagttcctctctcatgggcttgctgagagaattgagtaagataacgagtgcaaagcacagttgctggccactagcaatcttagaaagcagaagcttgcatcagccccatcccactgacgggcaaatcaagaaaagccaagtggctactatcaccagatctgcttcccaggctggcgcaccggtccatctcccgctggcaggtgtcagctgcccatgggccatacctatgctcttctctataagctcattttggctgacagggaccccctaatccactaaggactgggaggtcacagagccctcttaggacaatgagaatgagctcctca

SEQ ID NO: 461245 - DNA, 417 bp, Homo Sapiens
cgatcagaagaaagtaggagagagtctagtaaccttgagattggaggttatgtgaaatcaccaaactagatgattccagcaaaaagagtttctgtgatgtgtgtgtaggttcgcaccccttaagatacccatacttgactgtatgatagtcgcaggagtcacttacttactacagatgcatcagtgaccatgtgatgaagaagatggcttcccagtggagttgcaaggtgcctctggggggtgtgtttttaaattgtcaacagcttccacatggtgtttatatccttaacttttggcattgggggcattcagatgaggtcatccgcttgggtccatcttcctgagtgttgatcattttgcggtccagagaacagcgtctagatttaaattcactggaattaaagtgcgcctagagac

SEQ ID NO: 461246 - DNA, 709 bp, Homo Sapiens
cagacaccatctcccttcaggatggtcctgcttttcccccagcacctgtgcaggcatctctggcgagccttatcacagtctttctgagtttgcctgtatgcttcacataaatgtagtaaaaaaacaatgagacgcttctttggggcaactgctgtagaggccactaatgagaaagtgtagatgtttccatcatggaaaattacaagtttacttggtttcagtccttggcactaagtcttaggtcccttgtcactgaacagccttctttccacttggcttctcttggccagcatcctggcacaccatcagaggagaaaataatgagaaagaagtgtcttacagggatggggagcactggtggcttaccatatgggcataatcatggctcttcaaacaaatccttgaccagacagtagcactatttgtcttcttgcctacacaagctacatgtggggttcacacctcctgaaacatgtgcacactaagagaactggagaatgtttgctcagtttccctccttttcaggggaaccctctggctggtcttcagtacatgagcagtgacccagctgtggttagctccagagagttttctaagagtccctcatgttcttagagttctaatgttgcttagaagacagaggcctacctcattcttggtttactcatgcttcaggttacatgaatgtggggtggggagtgggaaacag

SEQ ID NO: 461247 - DNA, 446 bp, Homo Sapiens
agatcaaggtaaagtggaaacgttacaatccggaggctgcatattccaaggttttacttattttatgatctgagcactttacattcacttacagaaagagttaaaagaatcacagtagaaaacagtaaagtttttctggttccttgtttactttcgcaacatttaaaatcattagaatacttggatctcagtgaaaatttgatggttgaagaatgcttgaaaaattcagcctgtgaggatgcctggccctctctacaaactttaattttaaggcaaaatcatttggcatcattggaaaaaaccggagagactttgctcactctgaaaaacttgactaacattgatatcagtaagaatagttttcattctatgcctgacacttgtcagtggccagaaaagatgaaatatttgatacttatccagcactcgaacttcacagcgtaaca

SEQ ID NO: 461248 - DNA, 162 bp, Homo Sapiens
ctcctatggctcagccacaccccagcagccatccgcaccccaacaccaagggtctctgaaccagcccccagtccccggcatggatgagagcatgtcctaccaggctccccctcagcagctgccgtcggctcagccccctcagccctcaaatcccccacatgg

SEQ ID NO: 461249 - DNA, 420 bp, Homo Sapiens
  misc_feature (26)..(26): n is a, c, g, or t
gagtcactcctccaaggcttgtcatntgcatcaggattggcggcttggtcctgtaatgccctggcatttggtctcatctggttcctgcctccccacatagtcatacactgtcagagacagagggggcttctgagatgaactaaacattttcattttataaagggagcatcaaatctagagagaggcagtgactttccagggccaccttgtgtgtgggatctgagcccaccttggcttctaggtgcatgctaacctccactaaggcccaacttaactgtcagggaaaaacccaggcaccgaatatccatctcttgcttcttggcttgctactattaatagaaggccacactgcctcttctcttcctgggccataaattagcataccttctcttgattgagagataggaggaggaggtcttg

SEQ ID NO: 461250 - DNA, 428 bp, Homo Sapiens
tgcattctttggcatggctagttgtgtcccaggatttgcattccagaacttccattctgacacaagatagagtgttgcctagcaaatgtatacacaaagtcccgctgttctagaaatttcacctggcttgatattctgtcaatccctgggctcaaattccagctccatcttatcaaacaataacagaattccctaatcagtactaagctccgcatgcagtctcttttccagaacattctttgcctaatgttccttagtgtggctctctctttagttggggcctccttccttagtacatgcataccttactattctgtggaattgcaagccatgcatcttttagagccacactagtcaaattgattggcatttccatttattttccattgttcccttgtttctcctggacttcctctcgtttctctttt

SEQ ID NO: 461251 - DNA, 393 bp, Homo Sapiens
  misc_feature (337)..(337): n is a, c, g, or t
cccggatgtcttgtcctgttcgaattgttacacagttcagctagagatttccttctccctgtggagttttacccgtcttccttctggccaccccctcaatggatccctatggtatcaggttaggaatggcctgcttggggacatagtgagctcccagggcctttctgctacttgcactacccctgtattttgctccactctctaaattgactcacttccagttaaggtcagaaacctctcctacaaacagaccttcagtttctccattctgggggtgtgttcaggagaggaggctctccctttcccactccgcaattggggcactcacagtatttgnggtgtctcctgggtcctgcaggagcagtccgcttccttcagagagtctgtggctct

SEQ ID NO: 461252 - DNA, 462 bp, Homo Sapiens
catgcttttagaaactgcactaggctgtcatcggtgctggttattcagtgcattcacctcccccggagcgagaacaggacactgtcaggctaagagacggcagcacacagtatgtccatggtaaacaatttatttttctacctcggttgcttacaggggaaaaaaataaaacgtcatcagggagaagcacagatgaactatttacagagatgaagaaaattcacaatggctaaaacgtttgtgaggcaagcatactaggccaagttcaccaaagcgaagcaattcatagcgaaacaaaatatggagatggggaaaaagccatactagatttgttctttgaaaaaaataatactcatggaaaagcctgcaggaaaataaaaggaaactaaccaattattacatcaagcatctttaatgagatgagccaaactgcacatgtaggggctccgttacactgaccga

SEQ ID NO: 461253 - DNA, 437 bp, Homo Sapiens
ccgcagctgcacatggtaggagccggcctcgagcgcggtgagcgagaagcctttgccgctgccggccagggccgggcccctgtccctccaggcagtccagctgtaggagatggtgccgtccctgaccacggcctgcagctgtaccatgtggttggtgtggaagtagcggccaccgcccaccacctgcagcctctttatgagctgcaggacatagactaagatgctgtcctgggcggagcctacctggttctcagctgtgacgatgatattgaaggtgcccacggagcggaaggtgtaagagatgatacgaccaccaggcatgagcgtgctgcggtcacagagcacccaggaatagcgcacatcactgccggcctccagcgacaggctgaagctcacgctaccattcaggggcaccaccgtgcggattgcattgacga

SEQ ID NO: 461254 - DNA, 218 bp, Homo Sapiens
aacaggataacccattagattttcgatttaccaatcctccacaatagaatgagccaaattagcaaaacagctttgaaaaagaaggatggagttggaggactacttctatctgatttcaagatctgttataaagtaatagtaatcaagacactatggtattggtaaaaagattaatagaagggaatatagggtctataaatagactcacaattattttt

SEQ ID NO: 461255 - DNA, 186 bp, Homo Sapiens
agctccttggactttccctttgtaagaagtgtttatactcagaagaggaaaaggccattaaaaaggggccgaaaccacgtaagacttcatttctaatcttgacatgcacgggtctttttatttgccagaggcgtttgtaaaacagcatgattttctctcatattatttatatgatctcccaatcct

SEQ ID NO: 461256 - DNA, 258 bp, Homo Sapiens
tttgttctggaacttgacgtgctccagccctctttgccgacgcgactcacgcttctcccggctgctggggactttctcgtgactttcagccgccacggttttctggtgtgggagagtcttctctgggcttggggcctccttctcaggtgaggagtgctctaggggggacctgtcacttggctgcgcctcaggctccgatgccaggtgcccgccatcctccgctggctccggccccgtgctcagctacctgctgccctc

SEQ ID NO: 461257 - DNA, 235 bp, Homo Sapiens
cgaactttcttcaactttcctaaattcttagtaaatttatgaggaataggataaagatcacttagagaaagggtgcttatggacatagcctgagtttcctttaacctctctgcaatgggtgcttttaactagcttctacatggcaagctgtttcagtttgcaaaatcacatgcccagcatgtttgaagtcagttggcaccttaaaacacctgttctccagccgcagacagagccc

SEQ ID NO: 461258 - DNA, 583 bp, Homo Sapiens
actatttattccgctatgggcgccacccccttatggagctgccactcatgatcaaccccactggctgtgcccgatcagagcctaaaatcctcacacactacaaacggccccataccctgaacagcaccagcatgtctaaggcatatcagagcaccttcacaggcgagaccaacaccccctacagcaagcagtttgtgcactccaggtcatctcagtaccggcggctgcgcaccgaatggaggaacaacgtgtacctggctcgctcccgtatccagggcctggggctctatgcagccaaggacctagaaaagcacacaatggttatcgagtacattggcaccatcattcggaacgaggtggccaaccggcgggagaaaatctacgaagagcagaatcgaggcatctacatgttccgaataaacaatgaacatgtgattgatgctacgttgaccgtcggccctgccaggtacattaaccattcctgtgcctctaactgtgtggccgaagtcgtgacatttgacacagaggacaaaatcatcatcatctccagccggcgaatccccaaaggagaggagctaaccta

SEQ ID NO: 461259 - DNA, 666 bp, Homo Sapiens
gccagaaaacctttatttccaccgagacctctcatccaattctcttctttccgggaactttttcccttccctactccaggtcgtaccctggccactcctttccttttggctggccaatgtctcctctgtaggctccagaaggctctcagggatgtaggcggcctcccgcagggttgagttgcaatgggaacaaagacagctgtggtcccatagcaccctcatctggtgacatcctgctactgacagtcaaaagaagccttcccagatgaaattttagttctctgcgcagccatgctcttcttccagcaagagagccatgtgcagtcgggtctgctccccatgggggctttgatgtgggcccagcagtggatcagccttccagacacgctcaactctgcacactcttcctgccgcctcaggctttccaggaccctcccgagccttatcagagtccttaccctcaggtctactgataccttgctgggtgaccttggacagattcacttacctggactcagtttcataatatgaaaatgatagggttgggctacgtgattttcacgttgtgcttccagattgttagaagttagtggctgaaaggcattacctgtccctctctcaatttcactcatgctactttgtttttttaatctaccttttatatgg

SEQ ID NO: 461260 - DNA, 472 bp, Homo Sapiens
  misc_feature (434)..(434): n is a, c, g, or t
gcgaaggactctgtgggctttgtcgggctctggatctacgttgctctctgcctgggaaaacgaggccccgggagttggaggcttggcatccagataaggcggctggtcacctgatgaaccttcctcaacacccgcaggcatcatggcagcttctttatcggggtctgctcctgggggcaggtctacttgttccagctgttccacaggggcaggagcaggttcagatgcaggctttgcttcttctgagacggtagctggctccacagtcttctcttctgttaccaaaggcgcctctaccgttttgtcaccagtggtcttctctagtgctgatggggctgattctagagttacgactgtgacacttgtaggcccaacggaaggtggagttttcagttctgaatctttattctcaggagcagattctggggtctggngatgattctctggatcttcctgtttctcaacctctttg

SEQ ID NO: 461261 - DNA, 375 bp, Homo Sapiens
ggggtgcgggggcggaggggtgcagctggctgggtcatcaaattaacatgagaagggaatcgttttcagcagggaagtaggagatttggggagggtgcttggaagatagaatcagcatgctattgccaccccccaccccaaataaccaaaaggcaaggagtacagacatagaaatgggaagtgaaatgttggtatagactgtgattaagcctgctgttggtatgaagtgctgtctcactaaataaagcagagtggatggtggctgcatccctggatctgccggtgtgaagtaaatccaggtcagctggcctgacacccgctgtccatatcactgaaggtcctgctccaagaagggggatggagagtcttccacac

SEQ ID NO: 461262 - DNA, 376 bp, Homo Sapiens
tgggatggctgtacagaagaaagtgggaagggagggtgtacatacaaagaaaggagtatagtccatttttgtaaaaatttgctaagagttacggcccagaaatgtagctaaaagaggactatagaaccaagaaaaggtttttaagattagaaattctagctcatgtttgtattgtagtaagaatgatctaaagagggcaataattaaagcaacaaatgcttaaggatgtaaaaagagatggtagggttttcccagggttgagggattgccaggtaagtgcaatgatggcacagaagggctggggaagtaggagcctttacaaaggaatgattataacaatgaactatggactccaagttggagcgggagagggaag

SEQ ID NO: 461263 - DNA, 371 bp, Homo Sapiens
tgttcctaaccctttcaactggggggtctcaagtgggtgaggactccatggccacggcagcagaactgtctcttctgaaaaccagactccggggcccctgggtcagcacctctaggtcattccacagacttacacagtttaaagaaagagccagcgaacatggggtgatcctggggtgccactgggatcccaagccaggcccggaggtctgcctgtttcgtccccagaaacttgagctggcatcctccgctggtttgcactgggcacggggactggagagccaccaggccactgagcacagcatgctatcacttctcaggaagttgtgagggtgaggagtatagccgggcccactctgcagaggggaggaa

SEQ ID NO: 461264 - DNA, 493 bp, Homo Sapiens
gagctcttcctgctgcctgagggagacttcccactgtaggctgacagggtggtccagtccgtcaaggccatctgcaacgccctggccgccgtggaaacccctgagatcaccagtgctctcaaccagctgcccccctgcccctcccgcatgcagcctaaaattcagaaggatcccagtgtcttggctgtgagggaaaaccgagagaaggtcgtggaagccctgaccgctgccatcttggacctggtggagctgtactgcaacacattcaacgcagacttccagacggcagtgcccgggagccgcaagcatgacctggtccaggaggcctgccatttcgccaggtccctggccttcactgtctatgccacccaccgcatccccatcatctgggctaccagctatgaagatttctacctctcctgctacatcagccatggcggcaaggagctgtacagccccctgcagccgccgaaagagctcggaatccgagctc

SEQ ID NO: 461265 - DNA, 448 bp, Homo Sapiens
tgtgtccagagtgtaagcgctgctttaagaagcggactcatctggtggagcaccatgcatctccacttcccagactccagcctccagtgccctaactgccagaagttcttcaccagtaagagcaagctcaagacccatctgctgcgggagctgggtgaaaaggcccaccactgcccactgtgccactacagtgcggtggagaggaatgcactcaaccgccacatggccagcatgcatgaagatatttccaacttctactcagacacctatgcctgtcctgcctgccgtgaggaattccgcctcagccaggccctaaaggagcacctcaagagccacagaaagaagcttcagagatacagtccacaggtggccagatttttccacgtcccagagattgtagagcgccggccacgatgcctagtatgccagcccgccggccgactgtact

SEQ ID NO: 461266 - DNA, 360 bp, Homo Sapiens
ctctttcttggctggagttttgcagaaggagaaggctgccaagctggagagtctgcagcagcaacttcagggggctaatgaagccaggcacagtgcccagacctcagtgacacaggcccagcgggagaaggcagagctgagccggaaggtggaggaactccaggcctgtgttgagacagcccgccaggaacagcatgaggctcaggctcaggttgcagagctagagttgcagctgcggtctgagcagcataaagcaactgagaaagaaaggtgggcccaggagaaggaccagctctaggagcagctccaggccctcaaagagaccttgaaggtcaccaagtgcagccgccgaaagagctc

SEQ ID NO: 461267 - DNA, 501 bp, Homo Sapiens
cagaagcctgaggcatgcccagcctcgggaggccctattggaccagcaagccaagagtgagtgtgggcagcacccccagccagagggaggcggccagggcacaggcatgacccagcaggtgctcggccatgatgccgtcctcgggcagcagctgtcagtggtgagcctcgctggaagtaggagctctcctgggccttgcagaagtagtggccgtactgctgcgccgtgaggttctcgatgaacaggatgcagttggggctctggtgaccaggttcgcagctctgctccacgttctccttgtggcgccatgagtaggtggcgtggcgggattccatggggcagctcaggtagtagcgagagtttagggtcagggagaccttctgcagtgggaccttgtctggtttggggttgggacactccttgtgtagctcggctgggttaatagattgcagctctgaaagttcgccgctgtagatggagatgcagcggccctgtagacac

SEQ ID NO: 461268 - DNA, 376 bp, Homo Sapiens
cgaggccagcaggaagccaagctgcttgctgagcggggccacttcgaagaagaaaagcagcagctgtctagcctgatcactgacctgcagagctccatctccaccctcagccaggccaaggaagagctggagcaggcctctcaggctcatggggcccggttgactgcccaggtggcctctctgacctctgagctcaccacactcaatgccaccatccagcaacaggatcaagaactggctggcctgaagcagcaggccaaagagaagcaggcccagctagcacagaccctccaacagcaagaacaggcctcccagggcctccgccaccaggtggagcagctaagcagtagcctgaagcagaaggagcagcagtcga

SEQ ID NO: 461269 - DNA, 291 bp, Homo Sapiens
agctctttgctgcattatcactagtcttatcaaccaggcatgattttctccactttatagatgaggtcatctcaagctcattataattaagtgatttggctctaggactgcctgactccttgttgctgcatgtcacgacctacctaagctactctttctcactttctgtgagttctgttattatgtaaccacatttttagggatgttgatttttagttgatatttagtgattaaaatcaccatggaactgcagaaatttcccctaaatgacccagatgaattcctgaaacc

SEQ ID NO: 461270 - DNA, 389 bp, Homo Sapiens
tgggcattggagcacaatcttaattgagcctggggtttgaccagattgccactgaagactgccagaacactagccaggcgtttcatttatctatttctgaccccaagacatggtggcataaacaaccaccattttattatgctcataattttgcaccgcaagaattcaggcagagcacagtgaagatgacttatctttgctccacaatgcttggtaccttagctgagatggctctaacagttggaatgggtgggaaaggtgtattagggccatatgtagggggctttagttctgtctgtagttacagtagagataggaaaatgaaaatgtctttcctagtctcaaacaaaccatgcaacacagaaaaaggtgtggggatttctccccac

SEQ ID NO: 461271 - DNA, 484 bp, Homo Sapiens
ttttttttgggagtactttcacgtttaatacgcaagggcataaaatagaatgttaggaaacaatttggatttttttccctaaaatataggtgactatgggttagtttacaactttccttctctcactgaaataaaaatacatagttaaggattagggacgaatacataacaggtgacatttgacagtttgggcatattccttgttactttctaatcttgagaatcacagtttgctgttttaggaggtatctgaggaggttccagataaaaagcgatggctaaatgctcttaaactttgaggcgtgctgggatgctctaaagtaggagaggaatttataacagaagcttacaatgaagagccagacattccgagccatctgagatcttgcaatgagaaggcgccaggcgataaggaagagggcagtattaaagaggtagtgaatatttcggagcctttttaagcgttgctttgcttttggtatcc

SEQ ID NO: 461272 - DNA, 287 bp, Homo Sapiens
ttgctattcatgagagcagctttccttgctgaaaacaagctataaataagaaggaatggtgaaggaaaggaaagagctgaggatgtgaggtaaacagtagaatatttggcttttgaagttgtttatgtaggtagataaatatgcagagataaacagggacaggtacaaacccatagggatgaagagtataaacatcgatttcatcaacaggcacccactggctcagctaaaaataagtgcctcattacaggagcagccgcagaaagaggggtccgagccgattgtaa

SEQ ID NO: 461273 - DNA, 346 bp, Homo Sapiens
tggagcgaccttagtcacgtagctgtgcctgcttccaggggttgggggaggacctgggaaacgtagttcaggcctgtgccctgggagcaagggagagcagatgttggtgtgcgcctagcaatattcggcgcatcctgcaatgtgcagattattctgtacactttccagatgatgaattagaaatttgggaggttaattaactcatcttgccctagatgatgaggttgtaagggggaagtgcagattctaattctgttatatctgatttaagaatctgtgctcttttcaccaccgtgataccattgaacgctgtgttgttgtcatagcgccatgtggagagatcata

SEQ ID NO: 461274 - DNA, 197 bp, Homo Sapiens
tttttcaatactgtgattttttatactgccccacctgtttccaagtttttgatttctgaataaaatgaacccagagatttctttagagcaaagaaaatggcctaaagggagagatttctgacttagagattttaggtatgttgctaaagagaaagagctatgatgtgtaagggccaattctgttgctttctctgttt

SEQ ID NO: 461275 - DNA, 385 bp, Homo Sapiens
ttcccagttctgttgtagttttcattcctgttgcaggtgagagagatcctgggccaggcagtcatgaagggcacagaatcccagccccccagggaatcccagtcccgcctggaagccgcaaaggggcctgtggttctgtctctcctgcaggcccaggaggaggcccctcgcggtgacacccacactcttgcccagtcgcctctgagggaagcccatgtccacatcagggggtttcctgcagtgactgctgctgtcccagaacaaaccagagtcacgtgtgtccttcccagacctacaggttctcttgaggcccctccatcaccataagcacagtgctagcgaccacgggaaatgttttcccgacacgaacacttgcataaccact

SEQ ID NO: 461276 - DNA, 260 bp, Homo Sapiens
ttcccagtgcccgcggattcgttattaacttttctgcctgttctctgtgtgaaggagggaggtgagagtgatccagatgagctccattcacacgagaataaggtcagcctcccctttgagactggccacttaggatgaaaaatcctgctggatgaaaaacattagaggaaaagctgctacgaaatgctcctagggcaagggccaggagatgggaatagtgggtttagccagtggtgaggcatggtaggaagctgatttgg

SEQ ID NO: 461277 - DNA, 366 bp, Homo Sapiens
cgggattgcgtgtattggcgagtgcacggtctcccggtggagtgggattgcgtgtattggcgagcgcctggtctcccggtggagtgggattgcgtgtattggcgagcgcccggtctcccggtggagtgggattgcgtgtattggcgagcgcccggtctcccggtggagtgggattgcgtgtattgactagcgcctggtctcccggtggagtgggattgtgtgtgttggcgagtgcctggtctccctttggagtgggattgagtgtattggcgagcgcctggtctcccggtggagtgggattgcgtgtattggcgagcgcctggtctcccggtggagtgggattgcgtgtactggtgagcacctggt

SEQ ID NO: 461278 - DNA, 184 bp, Homo Sapiens
attcctgaccgctgctggtggagctcctcaaagttggctcttgtgtccttttaagatgactccagtggtcttgcttatagcataagttctgagctttaaaatcttataaatgcctgtcccacacttggaatcaactatttctctaaggagtcctggttctttttcattagaaattgtctttaaa

SEQ ID NO: 461279 - DNA, 370 bp, Homo Sapiens
gagaaccagccatgggaattggttttcaagcaatggacacctgacctgaccaaagccaataaatcatgagacttttgctgagacttcagagaggtgggatgtggaggggagaggacatgaggatggagctgccaaagccatcctgccactgtgaagcacaagactaaggccaacacagcagaaagggcaaagggctggaaagaagctaagtcctgatggaggctttctgaagtctgaatcccagctgtccgtgagaccagtcctgcttttcatttcatgagtcaatcactgtctttcttgcctaagtcatccgttagctcagctgtcagccttggattgccattgagtctaaccccattcctccccgcgg

SEQ ID NO: 461280 - DNA, 317 bp, Homo Sapiens
gggcgaggggcagaaccccgggctgaatcatctcctgctttcccgggactttgctttcactttcctcagtcttgtggacagagtcaagtagattttcaaaagtgctccagaaaggccggaatagtcatgtagtggatgaaaagggcagtcacaaaactgcttaagaccagctgtcttgccagtaattgcagtgctttaagatttaattaaaaagccgcctgcctttaacccaagaacacttggtattagggcaccatgtcttggtcacggctgctacgtgtatctgatgtagttaaccatggcctgtcatgattata

SEQ ID NO: 461281 - DNA, 314 bp, Homo Sapiens
atagcctaggctagagactgaggcttccctgagaatatcacagcaaaccccttccagggcccccttctttgtatttcctccaaatgactgatctgcaaacaaagtagttgcctgccttccaatctgatagattgcaaaaagcatgtattgaaaggtgctgcctctgttcttctcccatctgaacaaaggtttctaaacctctttaatgtaaagtttgaaaagctggttaaaccaaaaccaaaaccaagcaccaccgtggcttccagagaactgtggcagggaggtctggatagcagccccaggaacagctgggc

SEQ ID NO: 461282 - DNA, 622 bp, Homo Sapiens
gatttttttagatggcaggctgaattaaacactatcgtgagttatctggggtagagactttttctccaacagtctttgaaaatgtcatagagcagagtctctcggcctgcttctcgaatgaataaaagatggtcttctagaacccaaggtgatcttggcagtgcttggtgcagctcacatgaacctgtgaggccagcctggctgcctgccagaaatgaatgcctctcagtccctccctgaccccaaaccaaggtgaactccacttgaagcaatattgggagcccaatactggcaggaggggaacacagccagagtcactgtgccccctgccatgtccagcacccaagtgcatatcaggctgcaccttccctgctcagtcccacctgaattgaacacacagaccggcctggggcagcccaagtccaggcttccccctacttcccatggcttggtaagatggcagggtgaattaaacactatgagttacccggggtagagatactttttctccaatggtctttgaaaatgtcatagagcatcctaaagtctcacctggagggatcctgctagtctgctcaatgccgaacattcctgaacaactgtgtctttagcctctgcatga

SEQ ID NO: 461283 - DNA, 399 bp, Homo Sapiens
ttccaagtcctgtgggagttttcagtcctgtatgtggttcctaaaggagagggagcagtgtcacaccctctaaaactgagccggctcacagcaaatcctcagcacttgaaccctgggagaaactttctggcctatgtagataccagaaactagcacctactacctgtattagacacttccaagaaagacaggctcttaaacttgtatcttacaggacattgcaacacataccacaccctctggccttatttcacgtcactggtgtccccatgagagtgactccatttttgagaatgaagtgttggttataagttgtgcataaggcatcaggaatacaggtttcctgggctacttctgaactatccatgggacaactcagaggctgaggaacacagcacc

SEQ ID NO: 461284 - DNA, 366 bp, Homo Sapiens
attagaactggtagggcctaagagatcattttattaagagtccagttcctgtccttttatagaagtccagcagtagacagcagaaacaagcccaaactcagctccctgtcttaaatgacccaggaaatgggaagccccagagaaatgtagtaggaggggctctgaagaaggaagccttggctgaatggaagcagctgctgcagtgagcaggaagtggcaggtctagctggaagagtagatttccgctcaagtaagaattgacagatgtgtaggaatttattttcggtggcagcctaattaaagtgttaaagttccttaactccattcagccctgcgccaggatcgttagctattgatctggaaaac

SEQ ID NO: 461285 - DNA, 407 bp, Homo Sapiens
ttcccagtgggtgtgagcagctctcagcgtattagccacctgggttttctgccatgtccaataccagtcattgagacacccatcaaaatcacaatgatctttcacctttactaaatgaaaagctaaggcaaactgctctcagatgaaatggagggggtagaaacctggagaagtgcctagagctggagggatatgattcagatgcatgaaacaaacatccccagatcaaagttaatttcttcctcctgtaaagaagtctgttggtgtggagcccagggctggaatgacggttcatgtgtcagggacgcaggctccttctgtcttcttgctcccccatcctcagctcacaggcccccactgaggtccaagagggatgttggagctttcagaagggctatgcttttaat

SEQ ID NO: 461286 - DNA, 491 bp, Homo Sapiens
ctggtggggctgcatttaatctggcagtcctgtgtcaagcaggcctaggcactggcactttgctctcagggcattactgctgccaggatgtctggacagacagatgtggcaacagttgaggttctagaacgtggacacacccaaggatcctgctgtgtcacccttaccatgcatggttccttctccttgcactgttctccacacctacctcccaactaccctaccctacctcttctggtccctgttccatggactcttgccccattcctcaccatgtcctgaagatcagtaataaagtgtgttaccaagctaagcattctgcaggcaggaggcctgtggagactccagcagacctcaggatgtgtctgcatgttcctttaggccacactccctcttagtcccataagatcagcagcttgccaccctactgtccctcctgttcccccagtttgattggcttctttgatcatttcacatacattcactcctgc

SEQ ID NO: 461287 - DNA, 205 bp, Homo Sapiens
cctcttaagaaggatccagcacaaataattccttatgcagagagggaagcattcatgcccattcatttcagaagaatgactgtgtatcatattaataacatatagctatgacttactgagcaattactaaagccaaatactgtgttaagcattttatatggatttccttctctcatctttccaacggtcccttgggacaggcaca

SEQ ID NO: 461288 - DNA, 256 bp, Homo Sapiens
ctcttggctcctcctgtctgagctgtgtttactcttgtctgagtgtttaccagcaggtgattctgggctttgggccaaggcggtgagatccaacatggtcaaaacccctgtgaactctagagccctggcctcagactcttaccgccaccacagctgtcagggcagagaccatggagcttggcagcagaggaggggggctgcatggggctcagtccacccctgtgaaaactcctccccactgcccgctacccctcac

SEQ ID NO: 461289 - DNA, 411 bp, Homo Sapiens
gtagaacctaccctggacctggaagcatgggtggcatttgcaagagggtaggggtaaagacatggctgctgaaacctagaaattatttccaaatctcatttgtattatttttccaatgcttgaactcccaaccaatgctatctcctacttcttccaaggaaatgataatggctaaaccagagcaaagaaggaagaggagaaagggagggtatttggaaaataaggagacagattcctgcatctacaagatcagatgcctatcggtagaggaggaaggtaatgctgtgagccctccttattggactgctaggctctaaaacttagtggcttggtcagggtttgtgggggaagtgacttttggaattgcctctcccagttcccaggttcccattcaggcattgactacaaggg

SEQ ID NO: 461290 - DNA, 355 bp, Homo Sapiens
taatcattgcctggtacataggatatgcttaattagctgttaatttcttttcataataaaagaaattttgacgctgttagttattctttgtctcttaaaatgtttctcaggctggctccttcctgttgtcatttacatatttgcctcatctttgaaatcaaacaacccatagcaacataaaaactttcttcacctctactctctagctactccccgatctccaccatcataactaagcttttcaagagtcataggtcgtcactttccgtttattcgtcagtcgtatccaatgtggcttctgcttccatctctctacagaaagttctcacaacattcacctccttgttgactctgg

SEQ ID NO: 461291 - DNA, 363 bp, Homo Sapiens
ttatttgatccttacaaaaattctctgaggtagacagaagaggtttcttccctgatcacagaagagaaaacaaaggctcaaggaagttaattattataactattctacagctaataagttggttatgcagtcgttaagtctttattgaacatctctagcatccaggcattgggttaaggaaccgggactcaagttcaaatgaatcacacctcagtgttgtttctcttatttggagtagttctttaatgcatcagttttaaaagactgaaagttttaaacttagggtggctttcttacaacttaaaactgtttaatagagaattcttaattcacatagtataatataatatacccagcaacatt

SEQ ID NO: 461292 - DNA, 423 bp, Homo Sapiens
aaatggaggcagtctattgttagcaggttctgtgccagcctctactatagcatgctgtgaagccctgccctttctggacctcagtctccgtatttggccagggaagagtttggatggattttctctgaggtttgccctaacggtactaaggccccacaaagggccaactctattgccacttccagtccctcctgtggcgtgaacaccaaagatgtccactatgagcgtttggtctccaaacacaatgtccttcatgctatttctgagctccatcttggttttgctttttggagatgtgtgtgagttaaggtaggccaggttatgctgcagcaacaaacaaccctgaaatcttggtggctcctaataggaagtgtcattctcatgcacgctactacccgtcaagggctggcagggtccccatgc

SEQ ID NO: 461293 - DNA, 556 bp, Homo Sapiens
tttttttaaaattacctgataatgtctccttcataatttttccttttagaaaaaaacaaactatgcctttaattgagattacattaatataccctacttttactttactatgaagttgacattttcaacttttaccttaaaatcaatgtgaagtctcctaggctcagattttggtagtcctattggaaggtagttttgggatttggggctaaatctagactgtgtgacctggagaggacgctatgagttcagaaaagggtattcagaagaggagaatactcccggcgagacttgtgccctcccaaatttcagttccttctgcaaacacacttaagtgtgctctgggcccagcctgtgctgagctgtgctttgaggaggagaggactcagccttagctcctgaagtcaaggagctcgtagtccagggtggagatgaggtacaaacacagaaaacaaggaagacgcgatcaatgtgaaaatcaaggctcaagaagaactcgagaggcatctacagaattttccctgacatcctcagcacaggtggagggaataacagg

SEQ ID NO: 461294 - DNA, 348 bp, Homo Sapiens
aaggaaagcaaccgtctggttcctccagcctcatagtcctcgtctgagtcacaggatcgatctacttcctctatgcgcgcatcccgcacaggcaggcagcccaggggtcgcttgtcctcatggctccgatagtagtagaagattttcccaacaagagcgcaccagaccaccttggagtggccatgctttaccttggtcagccagcccttcacggtgggcttggtgccaccccgaagcagagctggaggcccggtggcctgcaccttcagcaggctctggagtactcggatccactcctccagcaggctgggtgaatcggccgtcaggtagtaggttttcttctcagag

SEQ ID NO: 461295 - DNA, 407 bp, Homo Sapiens
tgaagctcacacagccagtccaggaaatttgggaatggtgggagaggagatggagccagtcagccacacacagacacacagatgcagagtggcagtggtcacagaacctagggcctctaggagtgaggctggggcaggagggcttccctgtgcctcagtctccctatctgtgccgagaccacaagggctctgaggaagccaagcattacagcagaatggtggctttccacccaggagctagacgggactgggaagagaccctggcgtgccctcagcctggtgccctttatttgacaggaggggaaactgaggctcaaggaagagacagccctgctcaagaacattaacccagccagaggcaagactccaattgccgcgcctccaacaggtctggggggaaccgagct

SEQ ID NO: 461296 - DNA, 474 bp, Homo Sapiens
ctttccaccctcgtgcctgcattccgcctgctgtcttcctcataaagaatcccagctcccgacacctccaatttctctcatcacacctccgatttctctcatttcatcagctcctccctggctttgctttcagcctccgaggcgaatcccctcaacataccactcacttgcaaatataataccttcatccttgttcttctcccacacctggccagcaacactgcagccctggggcaggccagccatccacccacaccacccctgcacctgggtgctgaaaagtcctttggccacagagcagtgaccacagcaacggcactgcctccagcgcccagcggagtctcccacccccagcagtgtgtcatctagatgcccacggtcagttctttccccacagtggctctgttcatgtttcagagtcctcttcaaggtccccatcaggactcccctccgccatgctctatcagatctctg

SEQ ID NO: 461297 - DNA, 376 bp, Homo Sapiens
aattaggatgcagcagccccataccaaggttttggtggcatcctgttattgtgtggttagtacttggcattgaagtgcaccaacctggagtcagagcagttggagatttcaatgcctgtgccatttacctctaaccctggggtgcccccggaacacagatagcagatcagttaggcagaagcagcctcagtcatctagacagtgcagggttctggtaaggacaggtgcaaaccatctaggtgggcagaacttggtgatgactaggaaccactgagactcagcagctgccccagtggcacccacaaatcagaggaggaggaggctgggaggacctaagggctacaggacgagctccctgcctacaagacagaagcag

SEQ ID NO: 461298 - DNA, 416 bp, Homo Sapiens
  misc_feature (108)..(150): n is a, c, g, or t
acttctggggaaactgtggcatagggatttgctttaaccccgggggccaaggtttttctgaaccgacattgcgccaccgcacttcagcgcggaaaaccgagtgggccnnnnnnnnnnnnnnnnnnnnnnnnnnnnnnnnnnnnnnnnnnntctcccaaggcagtcatgcatttgtatgccactagcatttttttgttatagaaatattcaaagtgtaccaacgtagagaaaatagctttaaacaaagcccatgtgtacctatcagtatgctttaactgttgtcacctttctgccccacttttatctatctcgaacacccctttctgcacactctgtaaaccactgtattaacaaacacattagactgcatcctgccagacctacccgtagctgtacctcacccgtagatgtacctc

SEQ ID NO: 461299 - DNA, 398 bp, Homo Sapiens
ctactgagcagagttgaaaccagaagtgaattctgggctcctttcattggtccacaagaggatgagataagtggctattgagaagattgaagattagaatgaaatcagatggcatttccagagagaagtaaaagtaaagctctgggggcaaggagaccagtctaggcaactgttacgcagagctctctgctgtctcattttgaaagttcagcaacaactcttttggccattgcaaaggccagtgtaagcaaacgtcctgggatctaattaaagaggcagggaggaggtgtggtgaggggttgcctttattcacctgtactgagaaatggtaggtacacaggttctgtagggatcaggtgcaggtagtctgaccccaggtgctccaacgggactgggaa

SEQ ID NO: 461300 - DNA, 456 bp, Homo Sapiens
aagtcaaagccccatcctccctacgtaaaggcactgaagcgttgtgcactgccccaactcccagggggtgcccattcacttcgtactgcagcactgcatacccgcacagactgcatctgctcttcccaataaaaggctcaaaagagaaaaaggggaaaaattaaaacagatgtgattttaacggtttaagtaagacaagttactggtgctgatctgaaaactttgctcttgtcagtatcttccacatttcaacaaaatttgctgacatttgttgagcatagctagcatgtgccaccttctcttagttccactgtctccattctatcctctgtgacagtgagacaaatttgtcctcattttactcaagagacaggaaacacaatcttaggaaggttaaacgagctgtcaaagttacaactgctagtaactccctccagagctgcgatcttaactact

SEQ ID NO: 461301 - DNA, 631 bp, Homo Sapiens
tttttttgatttctttatctcggtttgaattgctgagggcccgagatgagccgtggagggactgcacggtctgggtggactcttgcagcttcctgctcagctccagcttctcctgttccagcctccgaatcctcctctcgtaagcttccatctgcaggctgtgctccaggtcccgctgcacatcctcatctttggttaatgtgttggactgctttatgctcttcagagagcctcgatcagaagggcagctttccgttgtgaatgtaaaaccaatgaatggcaaatgtaatccagaaaagcctgtgtgagaaccaggaggtaatatttccgtgtttctcagcacgtcgtcatccacgtcgaagttggatgtgtcagagggactgctcacatcaggaatataaggtgcttctaggtttcgtatattttcccaatttagaccttcaaaaaacgcatgctttttgaaatcctctattccattctgccccagccggcgttctctactgcagatcagtctctggatgaggtcctttgcttcttcagatacatccgtgacatgggatgggaactggaatcgctcttcatggttcatgatcttcccataggtctccacgagtgactccgcataaaaacg

SEQ ID NO: 461302 - DNA, 477 bp, Homo Sapiens
tccccaaggcttcccatgctgtggctgatttttctcttccccagctgattttgtaggctattggttatgaaaaatgagatatgcattcatctaattttgaggcttcctcctgaccatcccaacctcagtcgaaggagacaggaagggagaagccacctattcattcagcaaacccatatcgaaggtctgatgtaggcagaggaggagaaagtgaaattgacatagccccaggcatccaggggctcatagccaggagttgggagagaaggtgtgagataaacaatccagcgattcactaacgagaacagaatgaatggaccacagctcccagatagggaagaccatggtggtgcatgagatgtatcaagaaggtagatgtggaggcttgagggacagctgtgggaagggaccaagggagcctcagaagagaggactaaggctagggcggaagagtgaacaagggttgcttgctagcag

SEQ ID NO: 461303 - DNA, 741 bp, Homo Sapiens
attttcatcaggatcaaatcgttcaatggtgttccctatctcagctccaacccatccacccaaagcatagatggccccataacacacacacactcctaagccgcagcggggatgattcatcgaagctacagttgtccactgtttagtaactggatcatagcattcagtacaatcaaaaatcattgaatccttttcacctccaatagcgtagaccatccctcccagaactgttactcccagcccacttcgagcctgatgaagtgaagacacagtggtccagtactggctaaaggtgtcaaaacgttctacacagctgagggctctgctatcactccagcgacccccctgcaaccgagtatatccacctactgcatacaggtactttcttgctttcttccgaggtcgaaccttagatgtctgcagaaaactacaaaacttgttctctttgggagatctgcatacttcacagtactctttcagacgtgtttgcaatgcaacacgaagattaaaatcggatactccttctatatactttaaaagtctctgaggaggtaataaagggaatcgaattgggtctagcacttccaccacatgttttcttctttttcccaaatctttcagaatccattgcattgcagctaagaagacctggtattcatcctcaatgctaagctcttcacttcgcaaaattttgatcagctgatctttcgtaagtgccaggaactcttctccactatgaac

SEQ ID NO: 461304 - DNA, 320 bp, Homo Sapiens
ttccttagatgctcagctatctgctggcagattggctgactggttagttgtttgaatgtttgattgattgaatagttgcttaattggatggatgagtgggtagttggttaacaggtggatgggtagttgactggctgggtgaatgattggatgggtggatgggtgaataggtggatgggggaatgaatggttggctgatggttgggtaagtaggcagtagggatgttggtttggtcactaactggttaatgtcttccctactcactgcacaatctctccttccggggtccttgggacccaaccaactcccttgaccctga

SEQ ID NO: 461305 - DNA, 311 bp, Homo Sapiens
tccgaaatccggcgatgggatcatagaaaagggactccgtgtctatagtggccttctacagacgaggcaaagtggggattaggaagagactaagggctgggcctcaccagaagccacaatccccgtgttatctctttgggaccctgggaccctgggacccctgacgagtcaccttagctctctgatcctcacactgcttacatgtaaagtgggctgtggcagggacccagtgggacagtccctggtgcatgattatgctcctgggagagacttcaacacccacgacccacccactgctgtagctcatattc

SEQ ID NO: 461306 - DNA, 438 bp, Homo Sapiens
gaaaaggcataaaatagcatgggatatatggaacattgacagaacccatgagtcaccaggtataacatgctcaagctgatgttttagagattcctgaaatcatcagctctcattcataataggtcttctaagacccccaccagccacctttaagccatggcaggggacccggaggtcattcattcatttccccatttcccctctttttaagacctgcaacacagactattattgctctcctcccctggttaccttgctagcaaacagtgctccctgaagtctgatcacagtatctcatgctacctatggtttgatcctacctcctatagttaggtctagctgatgtccttgagaaaagggaagtagaaaaagaggatgaggactctcttcaggctttcttcagtgactctctgcggcatcccatggccggaattcgga

SEQ ID NO: 461307 - DNA, 557 bp, Homo Sapiens
accccttccaccaccccgtgaagctcctgctcggcggccagagttcatgttactccctctaccccagttactgccactccggccccctcgagaaggggtgccactgcctggagggcccccaaaaggttcatctctgtggtatccatcgtggtgctctccgtctaaggagctggaacgcccagatttgggcactctctgagcaggtcctggccccctcgcctttgcctcctcggtcttcagaaggcctcctgggcctccatctctctgtgctcagaagtgcctgggccatcatgccaggggcgctttcggggaggtagggatgccatgtccatgccttggagagaagaggagcgttctctgctggctggggaatgaccgtcgtgagggggatgatcagggcggggagtatcacgaaaatgttcatgacctggcccaggctctctgtttccatcccaggaatctggcttccgccctccttcaaagcgagggaactcgtcaggagtgggaagtaaacccttccttcctcctcgtggggtaccccgacctcgacctctgag

SEQ ID NO: 461308 - DNA, 529 bp, Homo Sapiens
atgtcctcatttgagaagcaagtggctttaatctgttcctcgccccactggcttgtctcctagcttttcgtttgggttcttcctctaaagtgtagaattccaaaagtgaggagcgtgtctgctctggatcgccgaccaatgactgggcctggagccatcacgagagccctgagaagacctgctagcaccttgctggggtctgtgtcctgagtggacatgtcagttgcctacctttaaaagcgctaagggccgacctcgtgcagctggaagcttttgtgaaaaggcactcacaggattccctgctggatgcatggtgcatggctcggcacaatgaagggacacaaaagcaataaagtgatggtccttacagtctaatgacaaatgtgaattattccacagccactaggagcccctgactaaggaatgggccctatctagggagcagtttcaaatcacgttctcagataatacctggtactcacatccagtcggagtggattcatcccatggccggatttcggaaacgagc

SEQ ID NO: 461309 - DNA, 490 bp, Homo Sapiens
ccgcggatgggatggctacttcttgtgtgaactactgtaattaccctttgtcttatctacctcaccctgtccctttcatcccatgtaatgcttcaagagtgatttttctaaaccatggtgcactcacttgtttgctctgcaacctccagtgatttctccttgtctgctgagtaaagttcaggctactttacactagcatttgagaatcttatgaattaattcctgcctacacttaatcattctttattcctttgttctttaggaaaaatcgtaattggtaagataaaccaaatataaaactatatagtaatgctgtttttcagtcttactgatctcactctattccttatctttaccatgcttttctgactttgtgcttttgcctctggatttcccagtctggaatgcctctctcacatcctagtatgttgaaatctgtccattattcaagtgtgagcttagatgccaacactttgatgaaggcttatct

SEQ ID NO: 461310 - DNA, 183 bp, Homo Sapiens
cgagtctggatctcggaactccgcggatgggatcatcaccggacctttggcttttacagctcgagctgtttaaagttgatttatcaagttgtaaatcttcacctgttgaattcataagttcatgtcatattttctttcagacaattcttcagtttgtttacgtagatcagcgatacgatgatt

SEQ ID NO: 461311 - DNA, 410 bp, Homo Sapiens
gttccgaaatccgggcatgggatggtggggggacaccggctgccagtgctgcatcttgtacagctgctcctgctgttgttgctgctgctggcgctggaatcggggaggaagggacttctgatacttgaactcctgtgcaggggacccagcctctctggcctcttcctcactgctgttgctctgtgccactgctggagacactgtgggtgcctcttctgggaatgtggtgggggtctcttgggcagggaattctggggagcctttgtggacagcagggccgttttcctggggagatgccttctcagcacttggagaccagggcacttccttctctgcctgcttccgggcctcacctgcctttcgtgcctgcttacacttctggtccagctgcttgagtttggcagcacagg

SEQ ID NO: 461312 - DNA, 629 bp, Homo Sapiens
aaatttttcctgtcaggtgtatgatttaaagggggaggcctcaaaatacttgcagcttgtgtcctgtctggctttagaacttctggtgtttggtgcattttaacttcagcgcttgccttttttcctgtgcctgcctaatctgtctctaccctgggatgtcttgctcttctaaagagttcctggccatcccttgatttacaaatgtgatgttgatttgtcagccctgtattacagttactcctattcctgtatccaccccacgatgctgtccagtagatttttagcctttgggttagaaattgttttttgttcaccattaatatccatttgagggctgggtagcactgtgattgtgattcagcaattgcatgggctttttcctcttcttcaggaacacttcctgggtctgattggtgggcccagggagctgtcagagaagagcagagcaaatgggccttcgctttgtaggtgagatggcaggagggtggattgttggtctcagtcagtggtgggacagaccagagctccgaacacttcagttttaaaactagttgtgagtttccaattctgaaaatgtcttttttggtccttgtttctgctaaatgaatacatcccatcggcgtagggaa

SEQ ID NO: 461313 - DNA, 411 bp, Homo Sapiens
  misc_feature (68)..(68): n is a, c, g, or t
  misc_feature (172)..(189): n is a, c, g, or t
gcagtcttagcggtttctatgacactgccgccaacacaaatcaggggtattttcatagcacgttgtanctgcagattctcaatgcatcatctgcgctcatgcctgcttcagaacgacagtggttatgaagcctgctgctgggcacgactggaggcccacgcaccatgaaatnnnnnnnnnnnnnnnnnngaaaagcaccagccagggacaagtgtcgttggccccttggattccttgggtcacaggctccttggacgacggctgtggagcaggcagcatgattccatcgcaagcccccttggcccgtccaatgacagtgactgccaagtcctcactgcacacacgtacgtgcctctttatgtattttggtcctgatcttaatttcagctactatcattcccgcaatggctc

SEQ ID NO: 461314 - DNA, 332 bp, Homo Sapiens
tatgtcgattttgccacgaaaggacatttaaaatcaaacattgagatgtttggaataaaaatggtgggaatccgttgatcgctttaagcatgggaataacaccatcagatttttattttagaaaagggcacttgggaagatgctgccgttggttctggagttctcagatctgattctctattttatgaagatcacatggttagtgtgttaagcatttgtaacttcccctctaattctcctttgcgtaaccgattagcatacggattaagaaccttttgggaaatccaaatgtaaatgcaaatgtaaatttcagaactcagcaggcgcaaaca

SEQ ID NO: 461315 - DNA, 499 bp, Homo Sapiens
tgtttatacatatcatatcacacctcagaggaaccgcagggggtgtcacgcgttaatgtgggtgaggttcctggtctggggcctggagccggctctggaggcacctgtgctgtcggtggggttcggcccctgcgctgtgggtgtcaatctcgccgatatcctgagctgctgcagaggcagccagagcccaaaccacagaggaaacctgaggggcagagagcaagcggcggcaactcagcgcggcagaaaccgacgcgcagaaaagccggagccacctggtgtgatgtcaaatgacacccacggcaaactgtgccaaatggggaaagagactcttagggtgacatgaggatccattcaaaccaaggtacaaccactgcaggtctttgtaggctgagacacaacgtggagaatccacaattaaaccttcacgaagtgtgaggagccatgaggattcgactctcaggagggagggacgtaaggtgtctcctcagcctcagca

SEQ ID NO: 461316 - DNA, 496 bp, Homo Sapiens
aaaggtgaggcgcgtgacaaacccaaagtgctgagataagtgaggcacgtgacaaacccaaactgttgacaagggtgaggcgcgtgacaacaccggaactgctgagaaaagtgaggcgcttgataaacccaaactgccgagaaaggtgaggtgtgtgacaaacccaaactgttgagaacggtgaggcgcgtgaaaaacacaagctgccgagaagggtgaggtgcatgaaaaacccaaggcctcattcagtgctttccaggaaagctggtgtcctgcactggagggaagagaagcacttctgtggggcctggggaaaagcaactcagagccacctcttcatattatcagattatgatgagaaaaagtattagggacagtattcctgacagtggacgagacttccaggcacacggcgcttcaatgtttagaactgtaaggcacgaggatctgacggagcacttgtaagctctccacatcagtggggatctctgctcgt

SEQ ID NO: 461317 - DNA, 554 bp, Homo Sapiens
ctgtttgtttacatttctccccacatctctgttcaatgacagcatgtaggtagcttaaaataaccatggagtatttactccagggaaatcagaaaactccatagactagggctttccccgccatagagccagggcacaaaactctttaagactcccattgggttcgaatacacattagcgcttttaaaaattttgatggtaaaaagccctaattatttgactgcactgcagaaccaaacatgcatgctaatcttttaaagcgaggtcccaactcattaaggtaatcatagctttcatcctgatcagagactgctgattctaaggagctcagggatccagctaatgaccctgttccctcaaaagcgtaggtctggagggaatcaaaaggaggggcacacggatcagtattagcttcttcgagcttttccaggatgaatttcctgaatatggcacttgtcggggccaacttgcaaagactgcccccataggctcctgatctcagcgcttgtggtaaaccgagtcatgcgttagcgcattatggctgtactcctccg

SEQ ID NO: 461318 - DNA, 176 bp, Homo Sapiens
gcagcttgctgagaagcaaatccattatttaatgaataaaaagcacttgttataagcactattcccaaaattaagaattaagattatgatagatcttcaacagaccaaaaacaaatgttcacagtccctgctttatttccatttgttcacacacgcttttaaaattcatatgaaac

SEQ ID NO: 461319 - DNA, 548 bp, Homo Sapiens
acctgccgtgggaccccagagattcccaggccctccagaatttccacagcatacacctggacctgttcccaacagtttcagccagcccccacgactccctctccaggaccagtggagagccccacccccgcctcaggatcgagaccctttcttcttaggagtttcaggtgaaccaagattcccgagccatctttttctggaacagcgaagtccccctccaccaccaccgcctcctacccttcttaacagtagccatcctgttcctactcagagtcctctaccattcactcagccaggaccagcatttaatcagcaaggacagcagccagtgttcccaagagagcggcccgtacgaccagccttgcagcctccaggtccggtggggattctgcactttagccagcctgggtcggcaaccacacggcccttcattcctcctagacagccgttcctgccaggcccaggacagccgtttctgcccacacacacacagcccaacctgcaggggccgttgcatcctccattgccccctccgcatcagcctcagc

SEQ ID NO: 461320 - DNA, 670 bp, Homo Sapiens
atgatgtagttggctggtgacttttaagaagagtaaatcgttcacagttaggtattgcagcattcgtgcgtcaactctagattcatgaaactggtctttgtactggggtaagccaatatcatcaagccaccttgtcacccaaatgtggtctagcagtgcagacttctcctcctgtttggtgttgatggctttcactgctaaaacaagcttcttcctgtggagtgggtgcttaattcctagctccttttccatgtcctgaggggtggctgtcaataaggtgtggccagaagatacccactgcctggcaaagatcacatactgagccaggccaaagtcctccagccatgcacacacacgctctgtgctccactgggcaaagggggcattggcgtcacttttctgtcccttggagtccctggtcctagagagtcttggccctgcggttgcccggagcccacctcgtcgaaactctgccatccccagcgtgtcagtgtagaaatttcctgactgagttcttcggatttttccccagaacttcttaatgcctttgggattccgtttaccatctggtgtcagaggagactgaggacctgattcagtgcccgatgatgtggatgagaggtcattgaccacagcagtgtcgtcccagccactttctgtgtctctaagc

SEQ ID NO: 461321 - DNA, 428 bp, Homo Sapiens
  misc_feature (277)..(338): n is a, c, g, or t
aggacagacatttgagcgtgcaagcctgagaggatttggggagactgaggcggggagagaggtgagaaggagcagccataaggcaggaagaaaccagttagaaccgagtcctggactgggcacagtggctcactcctgtaatcccaaagttttggggggcccaggcaggaagatcccttaagcccaggagtttgagatcagtctgggcaacatagcaagacctcctctctgcagcaaatttaaaaattagctggtggtgctgggcgctgtggctcannnnnnnnnnnnnnnnnnnnnnnnnnnnnnnnnnnnnnnnnnnnnnnnnnnnnnnnnnnnnnaccatcctggctaacacggtgcaaccccatctcgactaaaaatacaaaaaattagccgggcgtgttggtgggtgcctgtagtcccagcta

SEQ ID NO: 461322 - DNA, 246 bp, Homo Sapiens
  misc_feature (246)..(246): n is a, c, g, or t
gtagcactggagatgctgaggaggggccacattctgggcacagtttgatggccttagagccagcagaatttcctggtgcaaaatgtgtgaggggaataaagacggtgccgaggatttcggcctgagcacctgaaggatgcaactgacgtcaactgagatggggaagatgcaggtggggcaggtccagaggaaaagatcagaacttcgattttagaaatgtggaggccaggagcagtgctcattaan

SEQ ID NO: 461323 - DNA, 563 bp, Homo Sapiens
aggggcattggggcagagccttggaggataaatggagtttcccttttgggaaggtgggaacaacagacgcaaaggcttgggggtgtggcctgcacaaggaagcataaacagtttggagaagcatggctggggttgagacagtggatacctcggggagaaggggtctggctgctacggagtcctggcctgaccggacacactgaggatttttaagcagggagagaatagaattggaactggtttcatctctgcagggggcctggctggtgttgaactaggagtcaggagcgggactttccctcgggtctccctggcgtccctcctctgagctggcttcggggaccaccccagatcccgtactactcacccatgggtcagaattgcccctgagggcttcttcctcggccatcgcgaggctggggggagctatgtgggcctctcctgacacaggccaacctaatcatctcagcctataaataggactcaggattagtctggaaatagctgtgccaaaccaactccgcaggcatcacaggcacacacagttccctcagcaggctgct

SEQ ID NO: 461324 - DNA, 496 bp, Homo Sapiens
gcagcctgctgagcttattaggttatttcaaggatgaaatcagacagctcctgagaagcacttaatacacagcaagagctcagtgaatgattgagttgctcaatcgttggtcgttacaatgatcactgtctctgttctcgtctccagtccaaggggtggtgagcgtgcagccctgtggccaccagcactatttcttcttgcagactttcaaccctgggtttccgacaggctatttcctgttccaggaatctgggcggtgtgcctcactctccccacaggagtcatgaggctgaggctccgggagccagtacagcccatcctcatggggaggaaaggggagggcaaatacagcagcagggaaagaggctcgggccttgtgaaaccacacctgtctcgcagcctggactcagagccctgcacttcagtcacctcactccaggatgccctgcaatgaccaccagccactccacgttggcaccaccctcagcaggctgct

SEQ ID NO: 461325 - DNA, 399 bp, Homo Sapiens
agactttctggttttgttttgtaaaggccacaccacgcctgcatttcgctttgtgcactttagctctcatgttggtctgacaccagttgaaaattcatagcagccccagatttacgtgactttcttctagaaaggagattattacccagccttatggagaaggaagaaagtgtgcactggaaactgttcttagtttacaaagctcacttgcaggcaggctcaaactagttggaaaatcgtagtcctttcaaatgtgagcctttagtcttcctttttagctgcttgaaaatggagaaaatggcatgttgctctacatgccaatgaatgatgaggggagcccctgaaaatcctttccagttgactctacagcctctgtcagctcagcaggctgcgttcacg

SEQ ID NO: 461326 - DNA, 520 bp, Homo Sapiens
tattcaaagagacagaaaatgatttttaaaataaggccgccaggagacctcaagatcacagcagggtgtggatgctgagtatggaggtcagagccccatcaccctcactagacctgagatgggattctcacggagaggggttccatcccagggaggctgcggggacatcaaagtaaccaggaggtcttgaaaggtgtccaagaggagaagacagaagagctcctgatcagtgctgaggagtgagtgggcaggaaagaaagaagtgatcgcttgaggtcaaggggagctttatttagaatggatgaaacctgaggatgttttcaacacaaggagaagccaggagaagagcagagtggaaaataagacacacgggagagaatggtgtaggtagagagcgggaaggggtggcatgaaaagcctagaggaacagaggagccttgaaagactcaaatcctcctcggaagcccccttcgagtaccgcacctcagcaggcggcaaacagggtacgagctcgagatgt

SEQ ID NO: 461327 - DNA, 241 bp, Homo Sapiens
tgatatttatttcaaggacctgaaaacatgtccacataaaaacctgtccacatatatttacagaagctttattcacaattaagaagtcaagaaagagaggaggatgttgtggagaaagaaagaagaggaaaagaaaagcccagataggtatgatcttatttaaggtgtttcttttcctctcaatgttttatgaaattgaaaaaaaagttacctaatactttaggccgggcgcagtggctca

SEQ ID NO: 461328 - DNA, 458 bp, Homo Sapiens
tctggactttatccacagggcaatggcaacatgtccaggggatgagccatcaggctttatattttagaacgtgcacttggtcggccacataaaggacaaattgtaggggtgagattgaggagagtctggactaagatactggcagagaagaggatgagaactggagttggaatggaaggagttggtggctggtcaggtaggagcagggagcctagaggacaccctggtatctgggtattgggtggtggtatcactgcctgggcaggccagcccagcccaggaacgagcacctagggttagggagagggggaagctgaagttagttgtgaacatgtctggaggtctctgtgggacatctagaacctggaggtactgacttagaaaacaaaacggtaatttcattttgggttattaaaacacaaagatggtaatacaagtcaagggagcaaaggcatccc

SEQ ID NO: 461329 - DNA, 377 bp, Homo Sapiens
atgttgtttgtttgtttgtttccctctaataggcacaggcatgccggtgaccttttgaatctcgaattttgtttcagaaaaggacgatgctaaaaacaaggaccctcactgtgctgtcgcctgtgagatgctgaactctgtaattgctgctgtttcatgattagtgtctgctttcccagcacagtgactcggaaacacctgcagcatggatgccgttgtttgttgttgttgcattaataactgcagatgctgttgaagtgctcacccatcaatcattcctagttacttaccactatttcctctgccctccagggcgcgcctgcccccctcacaaatccctaagcccccactctttccctcttgcagtaaggtctcca

SEQ ID NO: 461330 - DNA, 125 bp, Homo Sapiens
tagttgagattacaggcatgagccatcgcgccctgctacactgaactttgaagaaactgacaagctgttttccaaggtggctataccatgttatattctcacagcaggataggagggttaccccc

SEQ ID NO: 461331 - DNA, 573 bp, Homo Sapiens
ccgtgaacgcagcctgctgagtgatcatctccgattttcagacccctctcctccgtttttctctcccctgggaggccagttaaggtttgagtgaaggcccccgggactggggcggcgtggatcttacgcccaccaactagtgagggaggccatccggccacccgtctcttccttccccagctccgcaaaggaggcgttggcatttcaggtgtttgcttacagagttttcaaagatttttcaccctcccttagttgtgggaaaatgattcaacctacccaagtgaactttgacattaagtctcaattctaacggtgaggaaatggaagcctttgaatatgttttatgtcttaaacgtgtttgtttttgcaggagggagtgctcattttacctgaataaatcaagattgagttggtgtggcacagtgctggcataggcctggggaaaggggtgaaatgctagagatctggtagatggatagaaagtggacagacgggttcgggtgggttttggctcagcagggccctaaattcccaccaaatccctctctgtctgtcttcaccaaggtctgaatt

SEQ ID NO: 461332 - DNA, 268 bp, Homo Sapiens
agaggattatgatgcgactgtgagtgtgtttgctgaaattacatctctaaaataaataagatgttgtgtattttcttgtctgtgttacaaaaactttttgcttcccagtgtactgtttgaataaaagtatgttggtggccaccacattctcccacatgtagagcaaaactgggaagctcttcctctttaataataccgatcttgccctatttcaagaaggtttagtgacttgataaaaattacttgtcaaatgtgttttctagtggga

SEQ ID NO: 461333 - DNA, 828 bp, Homo Sapiens
  misc_feature (598)..(615): n is a, c, g, or t
ggttatggccttcacccacgggatgccgggttctcctttctttcctcaccccaacctttactccaccagagaaacttccttttgaactcagtggggaagagggtgatgagacaggactagaaagtagtgggggacccagcgagtggacgccctgctccgggattcctgagtctgtaaatagtgtgcccagcagctgtgaactccccttatagcctcaggctgcagtgtccttcccagctgtgtgagaaaatgaaagccgacgtccacagggacccaggcagggttgggtgttgtgactcactccacctctgtgccctgcagaggtactgttgggtccttgtcttgtgagcctggggtgagctctctgtacatgttgttgttccacgtatgggttgacttggcatgctggggggtcctcgttcactctctgaagttggcctcctttcactggggattgaaaagcacctccacccctaccctagtgatgtcccctgaggacccgggtgatagtacagtcaatattgtcagtactttgctttgattgaaggctgtagagctgagttaccaaaatttctatttcaaaggaaaccaaaccttnnnnnnnnnnnnnnnnnnctgggctgggtcttccaaacctaccatgaaaccctggtgtgcaggctgcactcaatgacctcaacccaacacctccctgagtgtgcttcttggaagagcctagaagattcctggatggagaccccattggttcagcctcaagtctggcccgtcttcgaaaaaacaaacacatttgtaagctttgtgggagcttccaggcctgctctaagatgc

SEQ ID NO: 461334 - DNA, 360 bp, Homo Sapiens
  misc_feature (295)..(295): n is a, c, g, or t
  misc_feature (302)..(302): n is a, c, g, or t
  misc_feature (308)..(308): n is a, c, g, or t
gagggaagtttctttcaggagaaatacagttgccatgctgggctcagcaaggaaagtctgcagctctgccccaacagtcaggcagtcctggtgcttgtgaatagccttggagaagatgacttcttttcccgctcattcaccactgcagacacaggtggggcttttcccatgggagcttggcatgggtatacctataggacaacctctctggaaacacttcagggtgacttgcatccccacagggagggagcatttccaagtgcagggtttgcattgaggagggcagagggcacantttcctnttccantttggaaacattcaacatttccttgcaggatgattttttcttgcccagcctt

SEQ ID NO: 461335 - DNA, 419 bp, Homo Sapiens
  misc_feature (59)..(59): n is a, c, g, or t
  misc_feature (79)..(79): n is a, c, g, or t
tgaaagatgggactcatgtccctcacactggaatcttcagcgcagatctgtccatttcnctctccaaagtgagctcccnccaggatagagacaactgtgccacactgtaattccctgcatagaacgctggcagcttccagagagaagtccgaatcacagatggagccccacgtgtcaccatgcttcacttcaacacgtccagaacagggaatgtcccctccaaccagtttgggttctctgtgggctgagcaggtaattttggcttcttcatagtgatcacaggtaagtccaccccattgccagttcttgcagtcccaaagagaagtttcatttccgttacagcttcttagaaacagccatgtgtttgttgcccggattttggagtacacttgatagatgttttgagtgcagatccacat

SEQ ID NO: 461336 - DNA, 241 bp, Homo Sapiens
ttccggagtgcagcgacggaatgacagaaagaaaagcagatgtacaaaaatgcagaaatttataagtgtgaagtgtttgtaggtggagagatagaattctttgctatttgtattgaatccttaatatattctagtgcagaaagcatgaagcatggctaccggaagcacacgtgtcacacatcaaagggaagctgcagaaaacagcagcgttggcgcaattactctttcttatatttcccct

SEQ ID NO: 461337 - DNA, 439 bp, Homo Sapiens
gagttctagcacctgcttccactctgcaatccagttattagattcccactgaaaattctatgacggctaggaacaccacggtgtctggagctggagtccctggccctctgccagattttggtttagaggaatctggtcattctaattctaccataaccacatcttccaccagagttaccaagcatagcactgtacagcattcttactcctaaacagcagtcagccacaaactgacccagagtttaattagcagtgactaatttcatgtttccaatgtacctgatttttcatgagccttacagacacacagagacacatacacattgatcttaaaatttttctcagtcactgatatgcaaaggaccacactgtctctgcttccaggagtattttagaaatgttccacaatttactgaagacatagagatgatgctgctgc

SEQ ID NO: 461338 - DNA, 477 bp, Homo Sapiens
agcccttctcattttccttcgatgggtgggaaatcagcttcattccaaagaacaatgaagggggagtgattgctcaggtccccagcgatgttacgtcctttatccggacaggactaaagcctggggaggaatacattgtcaatgtggtggctctgaaagaacaggcccgcagccctcctacctcggccagcgcctccacagtcattgacggccccacgcagatcctggttcgcgatgtctcggacactgtggcttttgtggagtggattccccctcgagccaaagtcgatttcattcttttgaaatatggcctggtgggcggggaaggtgggaggaccaccttccggctgcagcctcccctgagtcaatactcagtgcaggccctgcggcctggctcccgatacgaggtgtcagtcagtgccaaaccgagggaccaacgagagcgattgcgtctcgcactccattccgtgctgctct

SEQ ID NO: 461339 - DNA, 492 bp, Homo Sapiens
agggctacgttggtgaggactgcggccagcggcagtgtctgaatgcctgcagtgggcgaggacaatgtgaggaggggctctgcgtctgtgaagagggctaccagggccctgactgctcagcagttgcccctccagaggacttgcgagtggctggtatcagcgacaggtccattgagctggaatgggacgggccgatggcagtgacggaatatgtgatctcttaccagccgacggccctggggggcctccagctccagcagcgggtgcctggagattggagtggtgtcaccatcacggagctggagccaggtctcacctacaacatcagcgtctacgctgtcattagcaacatcctcagccttcccatcactgccaaggtggccacccatctctccactcctcaagggctacaatttaagacgatcacagagaccaccgtggaggtgcagtgggagcccttctcattttccttcgatgggtgggaaatcagct

SEQ ID NO: 461340 - DNA, 456 bp, Homo Sapiens
gtgaaagagcttttgtgtgtctcacatggtgattgctcaataaatggcagctactgtttttactcgtaaggtgatgatttggatgcacagaacatagattccgctgatgtctggctaacttatacaccttacattcacacctgccttctgaggtagctgctgttactataccctttccataggcgaggatggcaggcatcagaaaagggcaacccctccttccatagttgcacagagactaaacatgggaagcctggacttgaacccaaggctcactgtgagtttggggccatgcatccttgccccttgtctttgggagacctccacgtaaaggctggcaaggcagatgtgtggaaatttggaagttggtggctgcgtgctggtgcagtgcctttggaggtatttcacaaaccattagaaaagtcagtccttgggctgagggtggcattttgtacc

SEQ ID NO: 461341 - DNA, 472 bp, Homo Sapiens
cagagtggtctgtgcagctccagagttggtgctcttagctacttcagtagcagccctctgcatcagactatgaagaaatcagtgtcactggggggacacaggtacagtattaccctactctctgacaggggaaggagaagggggaggccacatatgaggtgtcatgtggaggacaggaagcatcgggtgacccaggagtggagaagggaggagaacacagaaggaatggcctgggcagggccaggctgcagggtggacagggagtggcaggcctcccctctgtggctgtgggcatctgagtagaaagtgtctgaagccagctctagacagctgccagtgcaagaactcatgggagggatcttcggttacgcagtgcatccctcaagcatggggtcaagcctcatcttctacggaaaccttaaatagccagctgccccagcgcccacagcttctattccgtcactgctctccg

SEQ ID NO: 461342 - DNA, 419 bp, Homo Sapiens
  misc_feature (183)..(201): n is a, c, g, or t
gattcctttagaccagccagggcatctaactagacaaaaagtaaactgctggctttagagatttaatgataccaaaacacaataaagcctgccaggaaacagtatttccctcctcggctttaaatagccccaaggctggtcactttaacagacctcttccccccacattttgtatctccaagnnnnnnnnnnnnnnnnnnncttgagggcccagtccaggttttctacctaaaaaaggcaaatcatcagcctttgggcaacatagggagaccccgtctttataaaaagtaaaaaaagaaattagccagaagtggtggtatacgcttgttgtcccagctactcacaggtgaggcaggaggataaacttgagcacaggagttcgaggctgcagtgagctaggattccgtcactgcgctccg

SEQ ID NO: 461343 - DNA, 160 bp, Homo Sapiens
acataatgaagtgtttataaatgaaatagtatgatgtctgggatttgcttcaaaaaaatccagtacagggttgggtgaaacaagagggtgggttataggaaaagcaagacctgccgctgagttttggtaactgttacaggcaaggattcactgtctaact

SEQ ID NO: 461344 - DNA, 461 bp, Homo Sapiens
caggagcactgtggcacatatatgctgcaaaggacacggagaagataagggaatttcttaaaaaggtatcagaagagcaaggtcaagaaaacccagcagaccacgatcctattcatgatcaaagctggtatttagaccgatcattaagaaaacgtcttcatcaagagtatggagttcaaggctgggctattgtacagtttcttggggatgtggtgtttatcccggcaggagctccacatcaggttcataacttatatagctgcatcaaagtggctgaagattttgtttctccagagcatgttaaacactgcttctggcttactcaggaattccgatatctgtcacagactcataccaatcacgaagataaattacaggtgaagaatgttatctaccatgcagtgaaagatgcagtgctatgctgaaagccagtgaatccagtctctctccgcgcgatcctc

SEQ ID NO: 461345 - DNA, 459 bp, Homo Sapiens
  misc_feature (45)..(45): n is a, c, g, or t
gctaaaataagttatggaacctgaatgtggaagctcctgccgggnataaacaccaacatcccccaagaaactgtacaaatagccccagccttggaactcccatactcttggatgaaagacattttccttaatggatcggtctaaataccagctttgatcatgaataggatcgtggtctgctgggttttcttgaccttgctcttctgatacctttttaagaaattcccttatcttctccgtgtcctttgcagcatatatgtgccacagtgctcctggcttctcttttccttcaataaatcgctttattgtgagttcgtcagaatctccatcttggatggtcttaaggacttctagagcaagaagagaaagcagatatcagaccacaagccctggctcaaagagtaagccctccttttatgctcagcaccctaccttcttcttgctcacactgtcctttgg

SEQ ID NO: 461346 - DNA, 593 bp, Homo Sapiens
tgtagcagacacagcaggataatcatgcgttctaatgatgatgtacacttaaggaaacacgcatgtccgttttagaaactagtgtccgcatttccttcctcagagcatttccttccacttctttgggttgtttggactctaataatttcttctatgtgatctttattttattgagtgcagtggatagctttgtgcctgcagcagtaatactccgattgcaataaatcaaattcacttcacttagaatgcacctgtgaaaagttaatcaaaaaagcataaaatcttattttctttatagtaagtaaaatttcagattgtgtttaatatgatacttaacaggaagaagtccagttgtttacactgatgaggaggaaaagctgtctttttaccttaattaaatgtacctgaccaatgtacagcagcgctcccctttctaagacaaaccagacaatctccaattagaatgtgcccaatttccacttaacaatcattttctggaagttgagtgtccttgtcgtagatagcattcacacagaacaccatcctaactttctctttgaattggaatcagtgctgtgtctgcaggagggccg

SEQ ID NO: 461347 - DNA, 395 bp, Homo Sapiens
gcagtgcacgcttgatgctgtggtcgatctgaggatcccccgtcagcagacacagcatttatttgttagtattaaatttgttatctgccagtgtctgtgtgtcaggaatctgggcgtgggttacttgggttttctggttctagaacttttacaaggtgctggtgggtgctgcagtcatcttccagggaagaatccatgttcgagctcacttgtgtggttgttggcaggagtcatctcctgggcctttgagctaaaggccttactggaagtcacactcaatttcttgccatgtgcttctctccttagggcaacttgcttcttataaatatgtaaaaagagagtgagagagtatgaggtaaaagtcttttgaaacctaatttcagaagtgcatcccc

SEQ ID NO: 461348 - DNA, 577 bp, Homo Sapiens
tcagcagacacatcaaagattttcaatgagaaaatgatgtcaggattacgttattcgggaaattaagaacctgtacagggcaatttcaactaataatggcgactacctgctcaccatcttttggcagcaacgaagaagaaatgaatggtctgaacagacttagcccgacagagctgcccaatatagaggatgccaatgttaaagtgaccacaagaaatgtaacatctctttttaggagcagccctagataaggaaatcttccaactggtccttcaggagagtgtctaagcagtcttggatgagctacatcaacaggtctgcagaccacagagccagcaatcagggaccacattccatgtagtacaaaatttagaggtttcccctttatcaacaagagacccaggtgccagcatgttactaccagatccagttcttcttaggacagtgtggctcaaagggatgagaccttccagacactggtatctgagcatctgtggcctgcgcctgagttgtcaagataatttccttatctctgaaggagtccagacaggaatgcttccactgctgttgtctgcag

SEQ ID NO: 461349 - DNA, 585 bp, Homo Sapiens
  misc_feature (80)..(150): n is a, c, g, or t
  misc_feature (237)..(328): n is a, c, g, or t
  misc_feature (334)..(457): n is a, c, g, or t
  misc_feature (459)..(521): n is a, c, g, or t
catgatctaaagttggtgcgttttcatcccccagaaagaaaaaccgtctttttagcagacaccccaccgtccccggtccnnnnnnnnnnnnnnnnnnnnnnnnnnnnnnnnnnnnnnnnnnnnnnnnnnnnnnnnnnnnnnnnnnnnnnngtgacgggctcttctttccgcttggtgctgtcaggacgtgtcctgctgttgcgagtatcagcacttcactcccgtggccagatgagnnnnnnnnnnnnnnnnnnnnnnnnnnnnnnnnnnnnnnnnnnnnnnnnnnnnnnnnnnnnnnnnnnnnnnnnnnnnnnnnnnnnnnnnnnnngtgctnnnnnnnnnnnnnnnnnnnnnnnnnnnnnnnnnnnnnnnnnnnnnnnnnnnnnnnnnnnnnnnnnnnnnnnnnnnnnnnnnnnnnnnnnnnnnnnnnnnnnnnnnnnnnnnnnnnnnnnnnnnngnnnnnnnnnnnnnnnnnnnnnnnnnnnnnnnnnnnnnnnnnnnnnnnnnnnnnnnnnnnnnnnacgtgctggtgtgtggatggatgaatgctattgtgtggatgtatgagatgctgttgtcttaaca

SEQ ID NO: 461350 - DNA, 331 bp, Homo Sapiens
gggaccaaggagggtagggggaccatcgaccgtggcttaggactctcctgtctgcagggacggccccacacacacacgctcatactcacagtcatgctcaccatacatggacagatgctcacacatgcacacagttacagtgatacacatgcaaactcgtgcacacatgctaacatgcacacatatgctcacacatgtactcatgctcaaacatgctatatgctcagtgcacacactcaacgcaccatgctgatacatgcaacgacaatgctatgctacactatgctcacaggcacaaactacgctcaccatgacaagacatgatcctcac

SEQ ID NO: 461351 - DNA, 361 bp, Homo Sapiens
cgcagttgtcgtgagcaaggccgggggcgcaggacggcccagaggtggacaacagcaggctaggccccaggtattgccctgcacggaaccctcagtcccacccttggctggggtctccctgccttgaatgagcgtcctgaggaggggctgccaagcagggtttgtaggagcactgttcccgtgaggggtgagcctctgaagcacttctgagtctttgaagagcccttcctgacaacacacacatctgcaggagatgtgggctcctctgtggctgcccgcagtctcacacctccgtatccccagggcagggcaggacccaggggatccactcgtgtagacctgagagagtggagaggtggga

SEQ ID NO: 461352 - DNA, 437 bp, Homo Sapiens
  misc_feature (413)..(413): n is a, c, g, or t
ctgcccctgtgccacacttgagggtggatataccccatggggctgagactgtgcttggacagtagaaggtatatgccctgggactgtgcctgtagaatgtgcctgttcatgttgggaaccatatgaaactgtctgttggctgctcactcgagattctgtgaagacagaggatccctgaccactgccaaccgtcccatcagataacacagatatactgggttgctggtactgtagttgttgatgttgatctgcctcaggttcttcaggttctacttgtgtagaaactgaagctgaagtggtagaagcagtaggtatgccggtgctagcagaagggagctgcttgattcctgtctgggaagcactggattgttctacctgctgtttgagactgctctcttcctgctttcttttantctgctctcacacacagcaagcag

SEQ ID NO: 461353 - DNA, 467 bp, Homo Sapiens
cgatgctgtgttaggataaacctgctaaggaggctctggaaaagaattttcctgcttggacaagacagagactcacacgaggaaattccttttgttcctaccctcacttccagtgttgaacacagtcatgctagaaatggtgcctaggtgcagctgcagccgtcttgctaccagcagggcaaggcagagccggcgcgcccagggacctgccactgtggggtggccgaagcagccctggcaccacacagctgttatatgctgtggtcagaagtccttattaggtgagcaattaatcagatgtgtggcttctcaccctgtatttcctctggcaagaccctgcggcactgcagacccctgtcctatatgaggcctaagcagtgaggagcttcagacccgtgtgaagacagaaggcgcggggagcaaaggtgccagagaggggtggggtggccacgagccctcacgcaact

SEQ ID NO: 461354 - DNA, 474 bp, Homo Sapiens
atcacgaagcacagctgtcacccggacatcaagtattcaccagttaatagcaccagcttcatattctccaattcagcctcactctctaataaaacatcagcagattcctcttcattcaccaccttccaaagtttcccatcatcagctgatattacaacagcagcaacagcaaattcagccaatcacacttcagaattcaactcaagacccacccccatcccagcactgtataccactccagaaccatggccttcctccagctcccagtaatgcccagtcacagcattgttcaccgattcagagtcatccctctcttttaacagtgtctcctaatcagtcacagtcagcacagcagtctgtagtggtgtctcctccaccacctcattcaccaagtcagtctcctactataattattcatccacaagcacttattcagccacaccctcttgtgtcatcagctctccagtctctgga

SEQ ID NO: 461355 - DNA, 316 bp, Homo Sapiens
tagacacagcagaatgtcttttcaacgtccatcttttaccagctgttcatgttgatgcttgttgaggactgggctctggacttcctgatccttgtgctattctcaatgacttgagtttccttctagtagaggtcttatgcttttcatttgcataaatcacatttctacagtggtaggtttcgtaatgcctggtgcataagatcaggctttttaattagaagtttgttttcattaccaatttaatatttgtattaagagtgttagaaaagtataacatataaaaccataagccctaaagtaaggctgcctgggcttc

SEQ ID NO: 461356 - DNA, 380 bp, Homo Sapiens
cagcagacaacagcactatttggtaaaaaatgttttaaacacagctatttccccttcctcctttttctgacgttgcaaaattgggaaaagagctaggttctttttgtcatggtaaagcacagctcttgaaattggaagaggccttatagggaatgtggtcaaatttttttccttgcagaaagatttatccgattttagcgggtgaagtggtgtgagaacgtagaaagggtcaatgtgatgtacctgaagaggcataagcaattgcgtttttgcatttttgaaatttgctgtttgatattggaatacattcttaaataaatgtggatcattttaatgcacatttctcctttataattttgctgatgacttattgctgtgtc

SEQ ID NO: 461357 - DNA, 437 bp, Homo Sapiens
cacctctgtttcttgctgcccgggaggggagctatgaagcagccaagatcctgttagaccattttgccaatcgagacatcacagaccatatggatcgtcttccccgggatgtggctcgggatcgcatgcaccatgacattgtgcgccttctggatgaatacaatgtgaccccaagccctccaggcaccgtgttgacttctgctctctcacctgtcatctgtgggcccaacagatctttcctcagcctgaagcacaccccaatgggcaagaagtctagacggcccagtgccaagagtaccatgcctactagcctccctaaccttgccaaggaggcacacggatgccaagggtagtaggaggaagaagtctctgagtgagaaggtccaactgtctgagagttcaataactttagccctgttgattccgtactctcaccc

SEQ ID NO: 461358 - DNA, 380 bp, Homo Sapiens
ggaacgggctgtagaggtgaactggtcgaatgtaccccttttacagatggaaccctgaagctcagagacttgtaggtccctggctttggttgtacaaccagtatctggtactgcttgggctaggaaagaggcttcgcgtccgagcattagggcctaccctgtattttgcatatgaagacactgaaacccagaaaggtacagtgacttgcccaaggtcaccaggaagtcagtgtcagagccagccctagcactcgggcctcttcctttccacctaggggtccttctcttgtacctgaattcccccattcccttgaactcatacatcttcttccaggctggaagcagagtaagacaatgttgcccgcatcatggtctccact

SEQ ID NO: 461359 - DNA, 627 bp, Homo Sapiens
  misc_feature (15)..(15): n is a, c, g, or t
  misc_feature (57)..(57): n is a, c, g, or t
  misc_feature (85)..(85): n is a, c, g, or t
  misc_feature (116)..(116): n is a, c, g, or t
  misc_feature (227)..(227): n is a, c, g, or t
ctcgctgttctccangcccgaaaaggggttgccctcttgtgcaaactccaaaatgtnacccgaggacaaaacatgctcttgctgntgtaaacaggtcacctaaatctcaaggcaanccaacttgaactggcatcttggcgaaaacgttccctggcggtaataatccccattgtaaaaccttcttggagaaccccgaaagtccggccacacacacggaacatgttctnattccagcaatgcagttccctggccgcccaggtccccggtgtatgaatctcttggtactcagatactccatgccactggcgatgtctgccatgaacttcactagcatctgagtgggcaggtacactggctggtccccgagccgggaatagaggaggaagctgtgtaggtctccatgtttcatgaaaggtaagatgaccacaggtgctgggaagctctctcgttcagaaccctggaaacagacaccgatgagcctcatgacgttgggatggtcaaattccttcatgcagaccgcttcactcaggaaatcctccagctctgacctcgtgcagatggcaatcttcatcgtcttcacagccaccttgaggatggagtcgtcctggttgagctggccttccatca

SEQ ID NO: 461360 - DNA, 264 bp, Homo Sapiens
taagtcggtacctgctactgggcgtatggcagacctcattgtgctctgtatcctccctacatgagtgagtgatggtgaggcagtttgtgagggcaagaggaaggcacctctctactaccctttaaccagcacccggagccccgggagtgcggtggagatcctgctcactcctgcggcttctcactgtctccttttccagtcacacatgccaaatgcccataaacgcacactcacatgcacatacgcccagatcaggtaccgagc

SEQ ID NO: 461361 - DNA, 375 bp, Homo Sapiens
ctggcagggcctgagtttgcgcactgtgtatcttatgcacatgagtgttcttgtctaaatgactccagtgactgctccagcggggaggccccttcctccttccctctcagccatttctcacccacttcccatacccagtgttcatcccctacctccctttcccaccgcaaaggaaaatagccttacagaccctagcccagaaaccctactcctggggcaaaccagtatgggcccccatcccgcctagtttgaaccctaccttttaagaaggagggataaggaacaaagcagccccttcccctctaattgtggtgctccagccttctgcagccttgacccaggttgggcaagggcggaggtgaggaatctttgagc

SEQ ID NO: 461362 - DNA, 269 bp, Homo Sapiens
ccaccgtaatctgaccggtacctgtctaatcccacgccgcctgtgccaccgtaatctgaccggtacctgtctaaccccacaccgcctgtgccaccgtaatctgaccggtacctgtctaaccccacgccgcctgtgccaccgtaatctgaccggtacctgtctaaccgcacgccgcctgtgtcaccgtagtctgaccggtacctgtctaaccccacgccgcctgtgtcaccgtaggacagagcacaaaggagtcggttgggatacctcta

SEQ ID NO: 461363 - DNA, 403 bp, Homo Sapiens
tgcagggactacaggcatgagccaccaagcccggccagtaacctaacttcttaaaggtaacagttttatactcgttgaatggttaagaaatacatatatactactatagatatagcattttgaccttgaaaaaaatgtgcagtttgcttgtggaagtgggtatcaaaacgaaaggcacgtttgtaagttattttgaagtgatggaaggaacagtgtctgaaatcagagggcaccgttgtaacaccagatgtggatgggtatggctcataacatgagttacaagtagatgtttaaggtgtgtgcatgttgtatatctcctgcagtgcccgacgtgcacccacagtgttgtcatcatccagttagacacgagagttctaacatgaatggaattctgggagcaaga

SEQ ID NO: 461364 - DNA, 554 bp, Homo Sapiens
tgctgggattataggcgtgagccactgcgcccggccttgatctgttggtttctaagagacatagtcctattcttccctgagctgggtccctggtgtcactaaggtcaccccttctcattcctggaacttccctgaggtcatagggggctctttcatcctatctctggctcctgtgggtggcttctatgcccaagcaagaagtgactcaggcaagggtatagatacaaaatggctcactctccatccccagggatgtgattctggctcagtgcatggatctgctcattgagtggcctaggggtggagcagagtgtccccaaactgtagtctacctctcttccccaagaggaaccaggtgcctgactttggggactccacaatctcggggagggaagctgatgttcataagataaccacacaccaaaatgagagctatggtagctgaacagggtgggaggagagcttatggacagaaggcccagaggtggacagcaaggatgggatgatgggaagctggggagtgagtagttggccattgggaatctgggcagaga

SEQ ID NO: 461365 - DNA, 386 bp, Homo Sapiens
aggaaaacatatcagtgtctgttttagtagatctgtagcagaggacagttgtcttgatatattgtagactgtaccctatgtatcagctgccatcctgattcaacaagggggaaggaagttgtctaatacttgttaagcgtggaaggacattgtgacacatgtaaaacatcactgtagaacttcacattaatctgtatttcagcaagcaagtgcaaagaaaaaggagtcaaacaatgtctaagtagcatggagttgtgctcttagttgtgaaagcagcagtctcttgttcagtggttattgtaattctcagacctatgctttcttcatgtatgttgtttacaggttacttattcttttcatctaaaaacagtattttaaaaaaccaa

SEQ ID NO: 461366 - DNA, 339 bp, Homo Sapiens
ctggcaaaattcttccttttggctgggaatgcttacccaatgcctgtacaagcattgtaccttggaagtagttaacttgctttatatttcagaggctcatgggcctaaggaactgtagccttgtgtcagatgagactttaagctttcaacatttgtataaatgctgtaatgatataagattttgggggactttagggaaggcatcattgtattttgcaatgtgagaaggacatgagatttggggagtgagggacagaataatgaaattcagctctgtgtctctaccacaactcatgtgaattatcgcaggtaaaggtgaatctgggaaagagaggccga

SEQ ID NO: 461367 - DNA, 426 bp, Homo Sapiens
ggcagacactctaaaagagcacagggacgtttagattataagacatcaaacaatataaaatcatcgtaacttaagtgattaccaattaagtcagcttctcagaggttattactatctcaagcaaagtacactgttcttattgaggcataaaatgttccttccctattacattctgctataacagtgacagcctttctgtggctagtgaccggacccttgtctatcgcatgttttactaaggtatttagctatggcaaagtgcttagagaaataagattttatcattatcaacattcactatgacagatgaagtaaaaatgtattactttctagcatttttaactgaaaataaatttgatgtccactgtaaaaattatcaaacattctgccagcgcatgatacaccgtgtatcccagatctggatag

SEQ ID NO: 461368 - DNA, 676 bp, Homo Sapiens
cagcctttaagatttgattgggcaggatgacagtaccatacttgagttcattggttcaagcctgcagttacaggcaagccaggtagttgcctctctactctggctctcctggatttacctctcaaaacaaactggccagccagccgccttgcactttgttttgttattcacgtttgtgctcagaaatttccaaacattgtcctgttaaaacagtgatggataacagttccggagaactctcttccctgacacacccacacgcccacacacacagctgtgcctctgaaaacacttctgagttctctctcagcccactcagttaaatatctttattaattctcctcctcacccagttcctagatcaggagttagaatgcctgggttcaagttttagctcaatactaattatttagttgtgtgactttggataaatcactgacccctggtgtcctgaggatcagtgggcaaaacaaatgtgaagtgtaagatagtgagttgagagactccatcctctcctgtctccaatcaatggtttgtactactcaggtcctgctgtttcttactccagtttagtcctataaccatttgcttgcctagggagaaaaagcatacttggcccggcacggtggctgacgcccaacactttggaatctggagcagagcgtgttactctagg

SEQ ID NO: 461369 - DNA, 445 bp, Homo Sapiens
ttgaatgtctacataggtatataaatgtgggaaaattacatgagttgtatacttaagccttgcacacttgactgtatatagccagtgtcttgtttaaaaaaagataattaccacccacccccacaaaagagtgtggcccagagttgagctccagcataaaaccaagcaagactgtcattgcccttactttggcactacacttttattacagcagctaaggtctcaccatggctttggggatgagcaccttgaactgttgatttatgctgggtctacagtcaccggagagccccacatctttctcatggctgctcagccacgtccactcatccggtgcttgcaggctgcaggctgggcctgaaggaaggtgaaggaaaccggttatcgagctgtatcatcccttctctcatgtcccctttacagtacccctttggagaacattcag

SEQ ID NO: 461370 - DNA, 214 bp, Homo Sapiens
  misc_feature (1)..(1): n is a, c, g, or t
ntgagccactgcacctgtcctggattgtgatcttgaagtgataggaacacgtgtgttgtttttttgtctttggtggctttggctcatagtatctggcacagagtaagtgttcactaaatatttgccaaatctttagataaacctagggaatattaaagtatggttggcttggcatgacttcctatctgagactggttcctgaagattccctgct

SEQ ID NO: 461371 - DNA, 533 bp, Homo Sapiens
gggtcatagctgttcctagagtatcccctctctgcccagattccccttgagaatccaagaactggtctactgtcacaacactttagtaccctcttctcccaaggaggcagcagaaactggggtaatcacaacggtcaacagcagcaaaggcagcactttctgatttacttgactgctatggatgccacctctctccacgcctcagtttaatatctgacctgaaagcctctgaagttcactccttcggccccactcccttcctgctgcctttgggctctcctcatgtgactctgcctgttgaaactgtctgctagctggcccagcatctccaggcatggcctcactcatccacctctcccttgctgaaggtctcctcatgtaacacacgatttcctttagatggtccttcatcaccagcaagatgaaacctaaattcattggcatggtagacaaaactctagccttgcctcccagaggccagtctctgtctccgccactccccaggtggactgcattgtgtttctgctggcata

SEQ ID NO: 461372 - DNA, 257 bp, Homo Sapiens
caacgttgagtctgtacacggcggtgtgggtgggccactctgaggtctcaatgactgcttctctgtggtcactccccagaaacagggctgggctggttggagtgtccccgagcagagcagggaatgggccagagaaggtccgtgtagaactgtgctgacatccacgtacccacctgacgcccagccccaccacctctctccccgtgagggtcctgtgtggagggcagccctggccccatcagaggcccccaatcatg

SEQ ID NO: 461373 - DNA, 322 bp, Homo Sapiens
ccagggtagctatttcagttcaattaaatcagcagctccctggctgcatgagccacacttcaagtgccattcagcaccatgagcagccagaggctgccaccctggacaacacagacagctgagaggcagctgagagttctgctgggcagcacgggccagcccacattatagcataaatactagctttcgtttttcagtaccctggcatgttccaggaagagttcacactgtgaagagggatctaatttgattgttgtccatataaggagttgctcatcccggtgccatccctgatagcctgcccgtcccccgcataggttga

SEQ ID NO: 461374 - DNA, 315 bp, Homo Sapiens
gttgacctctaattcattctttttaaggcttcataagattggaaggtacagatgtatcatcattttcccacctggaaactttgtttccaatttttcacttactacgtaataatggaaacactctaccctgattcacaccttatgtgtacatgtagaaggaattctaggtggtccgctcttgggattggcctttctgggtgactcctctccgcttgatggctcatatctcctctcacagcttctatccggcagaagaacgtgatgaccccatcagatacgtggtccccgtactcctatttcctggttgatcatgat

SEQ ID NO: 461375 - DNA, 615 bp, Homo Sapiens
  misc_feature (443)..(443): n is a, c, g, or t
  misc_feature (477)..(477): n is a, c, g, or t
  misc_feature (494)..(494): n is a, c, g, or t
  misc_feature (516)..(516): n is a, c, g, or t
  misc_feature (524)..(524): n is a, c, g, or t
  misc_feature (563)..(563): n is a, c, g, or t
acattaaaacaaaaactttttattcacccagaactgggaatcacaattagtaaagaccataatagaattaacaaacagccctagaacacatatttaaatttgcagtgggtgttaagtaggaaaattatgactccatcaactcttccttggtaggttgatcttgcttttcctgaggcaccaggactcttcactgttatgtaaagaactgttaacctaaaagacatagaacagtgagtggccacctctaccagctgtgatcaagacctcccgggatccagaggatggtctaagtagttcattaaattgctgtaggacactaatttgtcccttctacagttgcagccagttggtttattgcaagcactgattttctacaaagaatactggcaacctcacgctgggcactgggctgttccccaaggacaactggcctgtccaggtgngcttctgattggtctgggccagttcccaaattangctgcctggttcctggncatttctgcagacacagtactnggctaaanaagcgggtaattgtgccccatcggctgagaaaggtggcngggtttgggcaaagcttcaattttcattaaggcttagatggagaagcaaggg

SEQ ID NO: 461376 - DNA, 203 bp, Homo Sapiens
cagagctcaagtgtgtacaattggtaagatgcagaggagccaaacaattagaaaaattcatctgaaagctatatggagaattttttttctctgcgatgagcttcattgagaagtatatatggagaattttgtatcccataaacatggttttcaaaacatgtggagcattacacaaagccatgatagtcgggcacagtgtctca

SEQ ID NO: 461377 - DNA, 429 bp, Homo Sapiens
  misc_feature (74)..(84): n is a, c, g, or t
cctctcacttggttttcatggtccctgtttgcaccggcatttgtgtatttataaggatcactcaaagtggtttnnnnnnnnnnntgcacaatagctaaagaccacacaagttacaggcataattttgtttcctgggagatttttggaaaatagaaaagactccagtttcccatttttaattcttgttaatctggggcttacattattctaaagctacaacatgctctaagtttcatattatgacaaattaggagccagcttccattcctctctctcttacctctcacctctggggaataatcaagtcctgtatacacttcctaggcagtgtctcacagtcttcccactcctctctatgctcctgccactatcacagttcccttgcatcatcttttccttccaaagactctatcccaccttgctttacct

SEQ ID NO: 461378 - DNA, 173 bp, Homo Sapiens
taagaatggggtcccgaaagcctctttctactaagagaattgccttgtccccaacgcacatctcttagtcgttgggacatctaggcagaggtcatcaaacctagccactgcgtagaaccacctggagagtttttaatatccatgttcccaggccagagccacaacctaggttg

SEQ ID NO: 461379 - DNA, 503 bp, Homo Sapiens
atgaatccttgacgctgtgcctcatgtgtccgcacatccactgccatgagaaaattctgattgattcagtgctcctaaatacatgccatattctggaccacttgtcacctctccccttatgcacactgttcaaaccaaattgatctgtgacaatgactataatacttctactggcctcccagctttaacattgccctaggttagcctattctcaaaacagcagcgagagtgatcctttaaaaatgcaagttagtcaatattgttccctactcaaaaccctatgaggtacccccacagtcactaagagtaaaagcctaagtccttataaaggcctgtaagccctagatgatctggcctcttatttcctaacctcatctcctctattctctctagtcactcaccctactcttctctgcttcatccattggctcctagaaattcctcacacacagaattgctcctctcttaggaccttgcatagctgatccttcttcctgtacctt

SEQ ID NO: 461380 - DNA, 512 bp, Homo Sapiens
  misc_feature (455)..(455): n is a, c, g, or t
gctctgcaaggtgaccttggtgatgagctgtgtgtggtgagtatccacagctcgctggcagagactgcgaacaggtgcgcaggctgtaaactctagagacaggatgggaatggtcagactgcacagtaggcagcccaagaacacagatcacaggtctctgtgcttatttctctcctccgttcctaccctgagccttgctgctctgcctctgtctttattcctggctccgtgtgcacgcgcacttgcctcctggcttcatccaggtttaccatcagttacacctattttacgttgagcctgagaatgagagagctgggcgtgaggtccacttcagacacgtggtccccagcatcatggaggtgcctgcccggctgtgctgcatctttctactccagcagattgggaggaagtggagcctggctgtgactctcctccaagccatcatctggtgcttncttctccttttcctccctgaaggtacagctcatccttcccctgtggcctggccacag

SEQ ID NO: 461381 - DNA, 514 bp, Homo Sapiens
ctgtgaaaagttgaatcttgcttcggagggagaagtcacgctggagctagaggaaatgttggaattggcagcggtgtcctgcaggcctcctgcagaatgggaccgtaaccattcttttgcatcttcttgcgtgcgaagctgggaggtgggagtatacctgagtcctttcttaggcaaagtgttcctattaaggtgcgggtcactgtcctgtttcctgggcagagtacttctgcagaacttagggctagcagcaggggaagagagagggctttctgacagtgtggtcttcacactgttagttctgacaaagggagtcaaggagtcgtccttggaggaggtgatgaggccagtggaagaattgtggctggggacccctccactgctgagggagatgtcgatggactcacagctggtgtggaggctgctgacagactgaaagcccaggccatccttgctaactgcggagaagctgtggcggccgagaagctgtggcggccgagaagctgtggcggcc

SEQ ID NO: 461382 - DNA, 480 bp, Homo Sapiens
agtagcagaggggccaggagagcagtggagagacctgggaccggcttggatgctctgagcggggctagaggcgctacgacagtgtgtggcggtgtcctgccacgacgccgccgtctccagagccaccacacagttgactgtccttacccggcagtgctcaggacctcagccgataaaccacaacctggacttgccgcctccttctccaggaggccgccccagcacggcctccccaggaagcagcatggggtagaaggcagatgcttcgaatccaggtgtcccctagccacgctttccttgaggagctgaggagcccgcagaactcagcggattatttatttttattttaaacgacccttcaaaggcccttaggtttcctttgcctttgctcacagaattagttccagccaggtgtcgctgctgcctcagagctgtgtggggtcgcgtgtatgtcggggggccatcttgccgatttaacgc

SEQ ID NO: 461383 - DNA, 600 bp, Homo Sapiens
gacagctcacgtccaaggttataagggagacgggcagccgttaatagaaaactttgtacatacacatataaaaaaccatttggtcttccagttaaggctgttacagtttaaagttacgtaaaccacgtacaaagaaacagttaaacgtacaaaaaggggagtggggagatgtgaggccgcaggtggagatgtggtgctccccacaggtgcgtccatgatttgggggctgcgtgcgagggggcctggctccagccggcctctccctgccttgactctgcacttggggccggtgcccacctcacgtcactcttgagcttttgattctggatccttctctgagggccgaacactagctctgcagctctggcgcccagctccagtgcaggggccgtcctcggacatgcagactttgtcagctgtggctctcagccattggtctggcccgaggcggggggcaggcagtacgttgggggatccgagtacctccgctttggccccaggtggctggccatcctcttctaggggctccagggcgccctgcactggcaagtctgcccgggcgtgatgtacacggaatgtatctggtccgggcggcgggca

SEQ ID NO: 461384 - DNA, 472 bp, Homo Sapiens
gcagggtctcaccagtgtgcatgatggcggaggtcagggcctcacttctggcccagggctttccaatggccaccgctgcgcccagtgggacaggccttgggactgtgtttgctgctgctcgggtggctctcgaggggcaggggcggcctggagccccgttgggtaaaggttctgcagacattgctcggtgtgcgcgtcacctcaaggggccatggtgaagaagagggctgtcaccacagccatgtctgcgtttgaggggccggactcaggagcaagtgtgctggtctcttcagtgtgagctggggccagcttcttcatggtgcagcgctttggtctttctgtccttagactagtggttctggtagggctttgtggcagccttgtggtgaggactcagttgagttgatgtctgtatgttggatgcagcagtgtctggcacccgagaggcacctaggacgtatccctcttgtct

SEQ ID NO: 461385 - DNA, 367 bp, Homo Sapiens
aaggatctgtgggcaggaaggattctggggcactctgatggtcagaacaacataaaatcccaatacagtaacaccatcctaatgccgcccccttccctacctctgagtgatggagggaaaaggagggagagatccttggaaaaatcagcataaaacttggatcagctcaggagtaagggtccaaaccccccaaatcaacttgtggggctaggggaaggcctggtctgtcacagccctggacatgaattgagagtgcaggtctgccctctggtggacagctgccgtgcagctggttctacagaggaagggctgtctgcttggggcccgcaggggagacacaaagccacaagctctgaaatagagcagg

SEQ ID NO: 461386 - DNA, 899 bp, Homo Sapiens
  misc_feature (69)..(195): n is a, c, g, or t
aatgatatctactgccccagcctcctgagtagctgggattacaggcatgtgccaccacgcccagctaannnnnnnnnnnnnnnnnnnnnnnnnnnnnnnnnnnnnnnnnnnnnnnnnnnnnnnnnnnnnnnnnnnnnnnnnnnnnnnnnnnnnnnnnnnnnnnnnnnnnnnnnnnnnnnnnnnnnnnnnnnnnnncagccctctcttacttttaatgtccccattattgtggctgaagggctcagaagccctctgcctctgagtaggacaccctcctctccttccctcccctgcagctgggtctgggctgtcctgttctggcgtgagtggtttcttctggccctgcctctttatctagtagatttctgccactgagttttccctgggacagccacatgggcacagctgtctcccaggcagcactaggggaggagatcaggctcccagctcccccagcatgacacagagctggcgggaatttcaacaggactttctgacaggtgagggacaacaggggccccatgtcactgtggaggctggcactcttatatattcatgggtcaaacccactgtagtctctgaagtctggcacatgctgttgtacctgagtgtcacagtcacaggctaaataagcccttttcttttacaaccttgccttcagtgaggtctgagggaaatttacatcttcttgctttcccctccttcccttgacttcccaaggacagccagctcttcttggcttttactgccccggagaagatgcttagacatacaggcctgcatgtgtgcaccgccccccacacagtcacacattcacacacgcatgcatgtgctcacacgctcatgctcattagcgcacacatgcacactcacagtcacacatgcaccgtccacacatt

SEQ ID NO: 461387 - DNA, 981 bp, Homo Sapiens
  misc_feature (929)..(929): n is a, c, g, or t
tactgtgtcccaagcttctttatttaagaaaaaagtgatacatgatgtgggattaaaatcaagagcatcattgaacttcaccttccctccaaccagttgccccaaactcccctgcccccaccctttgtgttcccaattccttccttagtgaatgaagaacttaatcccaaaaaccctggcacaaactccaggttttctttccctagctcctcccctccccctgtcccccattcctagaagggcaggcacctcagtttgaatgcatgggagagcccagagtggtgacagagacagggggaaaggcttccccctcagggaaagggaccgaggagtacagtgcagtgaagtgagggctcccatagcctggggtaccaaaatggggccctggggccagaggaaaggacactggtccccctgagaaaggagacccagcagcctcaaaatcctctcgttgtgcatagtcgctgcttgatcgcttgcccttctggcgccggttacagaaccacactcggaccacatccttctcgagcccaagctgctgggcgatgtggctgatctgctgcagtgtgggtttcgggcactgcaggaacaaattctccaggttgcctctcactcggttctcgatactggttcgctttctctttcgggcctgcacgagggtttctgctttgcatatctcctgaagattttcattgttgtcagcttcctccacccacttctgcagcaagggccgcagcttacacatgttcttgaagctaagctgcagagcctcaaagcggcagatggtcgtttggctgaataccttcccaaatagaacccccagggtgagccccacatcggcctgtgtatatcccagggtgatcctcttctgcttcaggagcttggcaaattgctcgagttctttctgcagagctttgatgtcctggganctctccgggttttgctccagcttctccttctccagcttcacggcaccagggg

SEQ ID NO: 461388 - DNA, 435 bp, Homo Sapiens
  misc_feature (404)..(404): n is a, c, g, or t
gccagacgagggtgggcatacactggggaaccctatggcttctcttcccctgccggatcagagaaaagggtgccgctcaggctggaggttgttgaaatccaactgggtccccagacttccatttctgtgggcaaggtactctggctccaaacccatgcacaagttgctgttctcatagcaacgctgatccctgtgcctgagggcactttcgccttgcctgggtgctggttgtgttgggtcatgtgagacaggtgcacctgcagaaggagtttgcctgcttctcatgccaccacactcatttaacatttgatgctccagatccctggtgtggtcaggcagatccccaaggagcctgaatcacccccctacccgacagtaatttcactgctacagtcaaacacatncttctcctccatgctggcctgggttcactgg

SEQ ID NO: 461389 - DNA, 370 bp, Homo Sapiens
  misc_feature (20)..(20): n is a, c, g, or t
  misc_feature (26)..(26): n is a, c, g, or t
cctcacggtaaagttttatnttgttntgttgtaaaaagaaattataatcctttctaaaaatttactaacttcaaattattttaaatggccttcttcaaggtttcttcaataatttttaaaaattattattccaagatcgaggcagatttggataaaaaatagaaatgattaatatcatttaggtactattaaaacttttacaatcagaaagccaaaagaaacttacggaaaaattaccttaaaatacctaatattttggtagatatcatatgaaattatatcctgaatactatttttcttgggcacaatggttctttaatattttttgagtcataggactcattaagggtctgatgaaagctatagaatt

SEQ ID NO: 461390 - DNA, 386 bp, Homo Sapiens
caaggtcagcccgagcctgagcctgccctgaacctgtgccagccacctcaaggcaactcgacctctctgagccttgccagcctatagggtcccttgagcagtgccaaacctgcacagctgtccgcagccgtcctggccacttgccctggcctgccacggggagaagggttggaggcagattctccactgtcattctctgctcacttgatgtttaacagtccatatggaagccagctgcagccccgctgtcctggccagctgggcctgcctctccccttttcaaggtggggcagaagcggccggggctgtcccaggccagcctctctccttcctgtgcctcttcccagccaggcttcccttggtctctacactccctcctcgctcga

SEQ ID NO: 461391 - DNA, 398 bp, Homo Sapiens
ctaagatcgagcgaggaggttctaagcagagggtgaaccagcaccatggcccctgaaatgcagcagctcagagttcaaggaacagtaaaaaggtcattgatcaaagagggtgagagggaaggagagtgaaggagaccatcactcccctaactggaaaatagcggccacctgtccaagcacttgactcatgtcatagtgaccttcagttccctacctatgacccaggtgtcattatcctcacttcatcagaggaggcgacatcgctcgaccccagtggctgcccgtgctaggtgggcagtgtgtgggatgtgaagccaggcagcccacctccgagccacctcctttccatcagtatgcattctgcatcttaccaaggcctatgtttgtggcatccagct

SEQ ID NO: 461392 - DNA, 418 bp, Homo Sapiens
  misc_feature (47)..(47): n is a, c, g, or t
catctggccagcagcagcagagaaaaggaaatgaaaacaacatctcnccttgaggaggaagaaagagaaataaattcttcacaaggcttaaaggaaaaatcgaagtctccttcccctcctcgactgactgaagatcgaaagaaggcctcacttgtagcgctgccagagcaaactgccagcgaggaggagactcctccacctttactaacaaaggaagcatcttctccaccacctcatccacagctccatagcgaagaagaaatagagcccatggaaggcccagccccccctgtcctcatacagttatctcctcctaatacagatgctgacaccagggagctattagtatctcagcatactgtccagttggtaggaggcctgtctcctttgtcaagtccttcagacaccaaagcagaat

SEQ ID NO: 461393 - DNA, 386 bp, Homo Sapiens
atacagcgaatgaaagcattatttgagagcgagcgggctctagatattgagcgaaaactttttgcaaatgaaagatgcctccagctttcagaaagtgaagatatgaagctgagagctaaactagatgaattgaaactaaaatatgaccctgaagagacagttgaagtgcctgtactgaaaaagaggcgtgaggtgctccctgtggatataaccaccgctaaagatgcatgtgtcaacaacagtgctctcgggggagaagtttatcgattctcgcctcagaaagaggagacacagtcctgccctaacagtttagaagataccaacttgcaattagcccaatcagtttctatacacacaccagtagtaagtctctctcctcgctcgat

SEQ ID NO: 461394 - DNA, 733 bp, Homo Sapiens
ttttttttgcaaccatttatatacagtgttacataacagctctggagtacagtacatgcagcagaatatacctgttgaatataaaatactttccttaaaatcttcatcattggaattccttgaagtctaaatcatagaatgcccattactttgagaaaatggttgaggagtacaaatgtctgcatatgttggccactgaaataatccaaggctaactgggaataatattcatagcacaccagggagtgcataaataatttacttacattattaaaatacaacccataaaattcaagttcaagatcttatagggattgtctatggtaaatcctttaggtgggttgccggggaaatggcattgtttcttctttctcttctcttctttttaaagtcctatataaaatcttcaggctgaagtttatttcttcatcaaacaaaaggaccacctttatttgtgtctgctgcctcttctcttcattgcagcagtgcactgtggacagtaccatttgccttttggtgcctctgtcaatccaacgcagccataatggaaccattctatagggcaatcttggttatcacatcccaccatctcaccataagatacctgattacaaatgcagtatcgaggttcatattgggtcgtaagtccaatcaacctgactatttgaatcagattctggcactacagttgtttgttgagagatttcttgtacaacagttgatgatgaagaac

SEQ ID NO: 461395 - DNA, 526 bp, Homo Sapiens
  misc_feature (52)..(52): n is a, c, g, or t
  misc_feature (75)..(75): n is a, c, g, or t
cacacatgacatctccctcttctagaggcagcttttgtgctaagaccggatntggatcttagctcacctgacttntaaaacagtctatgaatgtatgatctcttctcaaataattttacatttaggaatccctcctctttaatgttggagccacctaagcactggtcctggctcttttcatattctctccctaaatgaccttaacaacttctacagctttgagtcactgttgatatgctgaaggtttccaaatttacatctcaagcccaggcctcttctctgagccccagactggtaatagtcaactgcctacttgacatttctacatatccaaaatcaaactcttggttgatttaccccaaccatacttacctcttcaatgagatcaccatctgcccagttactttccacagaaaataaggtgtcagaactattcctccctcaaaagtggagctcactgggaccctgtctataaacgtgtaagatatcatcacctttcacctggatatctcctcgctctatctta

SEQ ID NO: 461396 - DNA, 406 bp, Homo Sapiens
tctccaagcccaggagagaggcctcaggaggatccagccctgccctcacctggatctgggacttccagcctccatgacttgggagaatcaatgtctgttgtttataagccactaagtctatggtattctgtgctagcagcctgaaatggactaagacatcccataagcagaggagatgaagattcagacgcacacagagggacgaccctgtgagaacacagggagaagacagtgtctacaaccccaggagagacgcctcaggaggaaccagccctgcccacaccttgatctcagatttctagcctccaggactgtgggaaataagcatatattgtttaagtcacccagtctgtggtgatttgttatggaggctttagccaagtaatatactcctcgcgcgatcgta

SEQ ID NO: 461397 - DNA, 371 bp, Homo Sapiens
agagatgaaattagacaaaatgatcactggtaagatatgggaattcattctgttcttgctacttttatgtatttttgaaactttctataataaaaaattattttcaaaaaaacaactgaataggtggccggagcaagggtgggggaggaatttcaccacccatctttttgtaacttttgaatgataatatatttatattaccttttgaaataaaagttttaatattgtcaacatctaacatattagatttaataaactaagcattaaccaaaacataatggtacgtttcttcccacacaaataaagaatgagaattaaagaccctggacaccatgctattcaataacttaagctgtacgtgtgcaggtgag

SEQ ID NO: 461398 - DNA, 246 bp, Homo Sapiens
tgcattgagccaagattgcgtcactgcacaccctgggcaacagagtgaatgagactccatctcaacatgctcacatacatgcatgcgtacacttagctatattactatccaatctgctatctttttatggtttatcatggactttatcaaattgcgtgatgccaacaggtgatgctgtagggctttggtagttgtttgtcctccctcttccctcattggtgcctctggcctccttggtgcctctgg

SEQ ID NO: 461399 - DNA, 254 bp, Homo Sapiens
agccaaagagagaggaaatggaatttgtttgtttctaattcttggaggagtcttctccgtgctcctaaaatcataaccagtgccaagattcaggaagaagaggcgggcaggacagccaatgcagattctataaacagtgaaaactccttcatcttcatggtcagaggaccccctatgctctgattcctccacccaaccaccaccacagccttgcttcctgccaccacctgtgcctccttggtgcctatggagag

SEQ ID NO: 461400 - DNA, 247 bp, Homo Sapiens
ggtaccccaccaaggagggtccgcagtgtcacacagacactctagagagaacacggtgtcacgcagacactctagagagaacatggtgtcgcacagacactctagagagaccatggtgtcacataggggttctagcgaccccagtgtcttcccctcctgaatgtccctctttgtgtagtttgtgtacctgtgtaaagatgtgaaatctcctctgtagaattgatgaacccctccttggtacctctgg

SEQ ID NO: 461401 - DNA, 274 bp, Homo Sapiens
gtaatggacgccatagtcactacccagattctctgggaccaagacgccctttcctcagctgctgagagtgttggtgactgtcaaatcatccccactccagagcttgctttccatggagagtcaccttgcctgaggcctaccccttcccagaactgcctccactcagcggcagtcagttagaaggtcaagtatgaggcctggctgacttgccccattggagtatctctgaaggtcctgctcagcttcagagttgccccatggggttggtttagtc

SEQ ID NO: 461402 - DNA, 291 bp, Homo Sapiens
  misc_feature (193)..(193): n is a, c, g, or t
cagggactcaggaataatggtcggctgccagttgggcagaggcagcaccagactgccacgaccactgaagcacagcacttgggagagttgacagtaagacccagccactcaggggacggggtgtcacaccgtcaccaaccgcttcgagcccagcactgtccgtgattcacacatgcctgctggctgctcatgncgggggcacgtgccgccaaccatgcccaggagatcatgcagcctgcaggcagtggggtttgtgatgccagtaatcccaggccctccttggtgctctgg

SEQ ID NO: 461403 - DNA, 454 bp, Homo Sapiens
aaccttgttcagatttctttattgaaaaattaaagtcataagctctgtatataaatacaatgacactgctggtcacctgcaaggcctctgggataggctgggggtgcagagggaagctggggccttggggtccccaggggcatggggagggaaataaataataaacaccatgggggataaggagccaggaggaatgggggtgtgaatggggaggtgctcgatgcttatttgtggcactaaaggtcttgcaagatgccccctgactgggggccgtgtccatgaattctcgagtgacctcactttggacaaaggctcaggcatcttggggatgggctgggtcctagctggagggggggacagcagtgcccccaacccaacctggagaaaccagcactctgcccttccttttcctttcttcctggtcttgcaacccacttgtccttggtgcctctgg

SEQ ID NO: 461404 - DNA, 509 bp, Homo Sapiens
  misc_feature (156)..(156): n is a, c, g, or t
ttcaggtggatctccagcacggccaggctgttaaagtcccgcttggaacaataggggcagctatagaccaccttggtccagccctgcccgtcatcccgcatcttcttctgcccccgcagcggcttcaaggtggagtccggggtggagccacgctcnagtaggcgctggagtcgggtgtggcgctgctcatggaggccacgctgcccagtacagggtcgggactgacactgtggttgctggagtcgggctgccggtggctgtccaggtggcagtagacaccttaccactgaggagaactgtctcagggcacatggggcacttgtgtttctggttggcgtgggcttggtggatatgggcgagcagtgtgttctcgtcgacgaagacctcagggcagtgaatgcactgcaggtccgccttctcggacagctgcgggtggcgggtgagcacgtgcttctccagctcctccgtctggctgaaggtgtcctcgcagtagtcgcacatgaagtcgt

SEQ ID NO: 461405 - DNA, 996 bp, Homo Sapiens
  misc_feature (23)..(23): n is a, c, g, or t
  misc_feature (35)..(35): n is a, c, g, or t
  misc_feature (46)..(46): n is a, c, g, or t
  misc_feature (75)..(75): n is a, c, g, or t
tggaaattttgagaaagaggaanaggcctgtatcnggaaggaatcntgccgaacaggggcctgctggaacaatcnagcaaccaatttcatccccctctggctgggcaactttggctggtagactattttccaatccggagtctcctcttcaagcttttttccggtttgctcaagtttttggttcatctttcctctcaaactgtgatgcttcctgagactgatggtctgaaggagtacctggtctaggcaggatgatgatgaggtctggggagtttcctcactagcttcaactcctactctatctgttttctctccttctttcttatttgtcttatcgggttctttggcctcttcattatggctaccctcagagtcagagcactcctccccttcgtccacaggccggaagtccatctcctgctcttctggaataggctctttctgtactttttttagagaaaggaatgctccagatgagtcaaatgtacccatttcttcttcagcatcctctaagcaccattcgggcaagctatccctgtcatcatctatgctcccactgccagagcgaacccttcggtaaccccgttcatcatctctatctcgaaaatcaaactcaaacctccgacgtcgttccatgtgttcccgccagcctgcagaacgagggccatcaggactgtgaggtcgccacctctctccatccctccttgatccagctagtcgccaacctccatcttcatcttctccattttgttcctctctaaagatgcgccaattttcactttctgagcgtataaattcatgctttctccctactgatgttggtccaccttcctcaaaatttggtctccctacatcttttcgtcctggtttttcaaaacgtctgtcacccctttcctcccagctctgcgatctatgcatttctctgccacctgctcgaccaaaaacaccctctacttcatcaaaacttctttggtagaaaccacattcacctctgcc

SEQ ID NO: 461406 - DNA, 478 bp, Homo Sapiens
tctatattgctcgacactggtttttctttcttttaaattcaacacaatgctattgagatctatccttaaaccttctggacagtgtcgtcctactcacatcatcttcagacaatgtcacatcaaaagatacttatgtaaggtgccatatgcatagacaaccagagcaagctctaagattaactactaagcaggcaaaatttagtcttcagtgttgctagaataaatagttttcctttatcttgcttcctctgcaacacataccaagatgaaggaactccaggcctcctcttcctctccttccacattcttcccaagtaaagaacaagaaaatccacttataaaacttaacgctgcacattttagggagacagcatcaatttaaaaaagagggtttccgggttggtcagagctgggctataacacatccagttgttgcatttactaattgtgtcatcctggccaagctactcaccctctc

SEQ ID NO: 461407 - DNA, 505 bp, Homo Sapiens
tcaggctctcgctgaagagcaatgtgaccagcctggactgtcacatcagccagtatgctaccatctgccaacagctccaggctgaggtagccgctctgaggaagaagctccaagtgtatgaggggggaggccagcccccaccacaggacctcccaggatctcccaagtcgggaccaccaccagaacagtgagttccactgcccattcccgcccccaccctgcagctcagccaggatggggagccaggccctcttctccagtttctggaggactaggactccttgcttctgctccaatccctagggttaagggtttgcacccagtgcctgcccagcaactgactgtcacctagagtgctgtgtccaatgagtaaatggcaccccagcccgtaagagcagggcctactattcgagagaaggtgaacttaggggtgtgtgtcattgtctctcaaaccagaaaatccctgactcctcctaccctcagtttactgcccatttgtcaccta

SEQ ID NO: 461408 - DNA, 372 bp, Homo Sapiens
  misc_feature (66)..(66): n is a, c, g, or t
ccgcaaaggaggacaggtaggtggggaggactaggggtcatctgcagcctcgccagaaacagagcnccgggttctctgcaggagagtgcgtgcagaggcggcagctgtgtagaggaggggtagagggggccagctgtgtcgtcacgggctctccgacccacgggtcacttttgacagctggcctgagtgctgcctggtggaaacccctcctgggaggctggagccagcaccagggcccacgtgtgcttcgccttgaagcctgaggacacagactctccggcaatcacatagcgcatgttgaggtcgctgccttcaatggagcgcgtgatcatggacgccacgccagtgcccatgagggtgagggtgagcgtg

SEQ ID NO: 461409 - DNA, 198 bp, Homo Sapiens
gtaccccagaggcacggcctttacgccggctgaggaggcagaagtcagcgaccccagtgggaagtggaagtagagggggcggggagtggcctacagggtcagtctactcccttcacaaggattcccagctagcaagacaggattgccaggaggtgcgtttttggcagactcacgtctcctcctgcttggtgcctctgg

SEQ ID NO: 461410 - DNA, 139 bp, Homo Sapiens
gtacccccagaggcagcctaggggatcccttatccctaagccctgccctcttgcctcagggtccatcaacattgatctttcttgtttactttgcagagaatggagatgacccagctctcctgtcttagtatgttacctt

SEQ ID NO: 461411 - DNA, 210 bp, Homo Sapiens
tctccgactccgacaccctacacatctggaagaccaacaggtggcgggtgggggggccgtgtggacttctctgtgccgctggggcccctgtggcagggggttcagagtctagtcttctggcctcgcctgcttggggtcaagccctcctctgccatttcgcagctgtgtgttctcggatgagtgacttagcctctgtgtgcttcagttccc

SEQ ID NO: 461412 - DNA, 303 bp, Homo Sapiens
agctcggtaccagtgctgcaaagagggaaagacactggattttcatcacatatctgccattaaatggtgtaacgccttgagttactaatctcatggttccatctataaaattaccaattgacccatctctaagattcctcaagctgaattcactattactcaataaacaacttactcggatagttccctcgtgcctctagcagtcatttttgcaatttttacaacaggcatcttatacacagcacaatcttccctcccctttttctctaccttcctaacttctagcctccttggtgcctctgg

SEQ ID NO: 461413 - DNA, 341 bp, Homo Sapiens
cagactgaagctgggtctccaacagtgatggcctgggagaatcactacacacgtgtgtttgtacaggactttctacttcttaaaaagaggatatccacatctatcgtgaaagctgagaaatctaagagctggaagcctgggaggaagggatgtgctgtggccaacacaggagggcagaaatgacccgtgtgtgaccgctcctgtagccagaaagagccacaaacagtccaactccaaaggggatctggtgcccatttcctgcaggtaaccttgtcatgacctgctctactccctggaaattcttgacactaaaggcgactaaagaccttcctccttggcgc

SEQ ID NO: 461414 - DNA, 223 bp, Homo Sapiens
cagaggacgtggagcgggaggcgcaggaggctcaggctggcaagatgaagcgaaagcagcggaggaggaagggccggccagaagacctggagttcacagacatgggtggcaatgtgtacatcctcacgggcaaggtggaggcagagtttgagctgctgactgtggaggaggccgagaaacggccagtggggaaggggcggtagcagtcagagcctctgggggt

SEQ ID NO: 461415 - DNA, 714 bp, Homo Sapiens
caatgctttgtcctacactaacccagggagttcactggtgtccccatctttggcagccagctcaacgttaacagattcaagcatgctctctccacctcaaaccacattacatagaaatgtgtctcctggagctcctcagagaccaccaagtactggcaatgcaggtgggatgttgagcactacagacctcacagtgccaaatggagctggaagcagtccagtggggaatggatttgtaaactcaagagcttctccaaatttgattggagctactggtgcaaatagcttaggcaaagtcatgcctacaaagtctccccctccaccaggtggtggtaatcttggaatgaacagtaggaaaccagatcttcgagttgtcatccccccttcaagcaagggcatgatgcctccgctaaccacccaaaggatcagtagttctcaagccactcaacctcttgctaccccagtcgtgtctgtgacatccccaagcttgcctccgcaaggacttgtgtactcagcaatgccgactgcctacaacactgattattcactgcccagcgctgacctgtcagcccttcaaggcttcaactcgccaggaatgctgtcgctgggacaggtgtcggcctggcagcagctccacctaggacaagcagccctcagctctcttgttgctggagggcagttatctcagggttccaatttatccgttaatatcag

SEQ ID NO: 461416 - DNA, 376 bp, Homo Sapiens
agactgaagtttgggaagaaaagggctgaactggatgaaggaactgaggtggactcgggaaggaaacagtgttggaaacaaactcctaagagaggaaggcagggaactgaggaggctcgagagctgggcagacagatcaaggggacaagaagcaaggacaagggaaggaggggctggagtgaaacagagagtggagggaaagaggagggagactggggcgcagagtgtgaagctaagggacacggggagatgagaagtataaaaggctgagaaaggaagaggcacctgcgggacagatggtgacatgaggaccaaagagagaatctaacctgtttctggacaacggtcccccattggggacaccctagtccctcag

SEQ ID NO: 461417 - DNA, 291 bp, Homo Sapiens
ccagaggcacaaggagggaggaccgacagtttgaagtgacccagctaggatggggtggcatgagaatcgaaccctggcaggttgcttcaggtgagtcctctcagaagctcacgcaggccccgggggaagcctcatctgagggcccgaggagggtgggctgctggcgcccaatgtcctttacatcttgggtggcattcatcggcagagccaggctgggcaccagggcaagaggcaccactgggaagaagggagtctgtgaggcctggtcagccccagcctccttggtgcctc

SEQ ID NO: 461418 - DNA, 846 bp, Homo Sapiens
actttttgaagaatatttattgacatgggaaaatgctcacaatatgttaaagaaagcaggatacaaatctgtaaatacagcatgatcccaatcttgtagtaaaataaattatatatgcatagaaaaaatacaggaaggaaatacactaaaacattaacagtgatgatctcaggatggtgggatttggggtaaattattaattttattttctgcattttccaaactttccacaatgaacatatattacttttataatcagaggggaagaggtcaatacaggtgacacctagtcctgggaggtggcgagactgatgtgggcactaagggggtgtttagagtcacttgtactgcctcattctgtgtcctcatttataaagaagggataataacacctgccctgcctgcctcccaggactactgggcatctgaaagggtcacaatatctggtgattgttcctctgtagcagcagttcaaatgctttattttaggacacacgcctccgtaccctgcttccaaggtcaggagagttgtgggcagagaggccagcctgcagccttggtccctggcagtatcctaacggattccaggtcttcattggaaatccagtgctgaccatgcaagtttcccactcatacttccacttcaggtcacttccctgcttaaaaacctctttaaactagttctgttgaaatagttattgcttacaatggcctgagaatgaccaccctcctcacaccactctgttcccagcatttcagacgcctaaggaggcacagtgtgggcccaggtgtgctgtggggaaaaggaaggagtggtgctgggagtcaggccgccagagttggact

SEQ ID NO: 461419 - DNA, 871 bp, Homo Sapiens
gttggtgaccaggctgatcaacagaaaagacggatgcctgccaaccagagtttgagagcagacgtccaggggtggccatctgccgggacgcctggtggccgattagatggctgggtagcttccgatgtgcactcggcggttgacacccactgcttggtggaagaggcacatgctaggccacgccgcatctgtgttaatcctcagtacatacatgtgcgaaggcagatgggctggcagaggctcagaagagagcacggttggagaggaagggaaaagggactcctgactgtcactggtgtttacatgttaaaaacaataagaacttatcagtcttataatgaaacacagagaaaagtttaactcattttcaaattcttgtagctatgtaacagcatgacctggtatccaccgatgccgaggcccatgaggggtacatggttatggaacaagaggaggaagtaaacgaagtggcatggagtttacccccaattgtgtctgaacaagcgccagtgtgtgtgctcacagggcacactgcaggggccgccccacagtgacggcgcagattgatcaggatactttccaccttctcatgggtgccattccaagatttaagaaaaaccaaaccgacggatggcttatacactgctttcccaatcagagggaaaggctgtttgtattttgggaaacaggaggaccccgcctcttttctccctgatgacctatggagatatgggtgcagctcctcccggctcctggggtccaagacaatgtggaggaggctggaggaccctcaagccagggccgtctcctcgaggttttgcaggcacccccttccttctcctcgacctggggcccggcccgcttttacctg

SEQ ID NO: 461420 - DNA, 426 bp, Homo Sapiens
aggaagggaagaggagggtgggaccaggccataatggccctggatacccaattgaacagctgggggcttggccggcagccaacattgagccctgagggcagggggcagacactggcaccaggagtggaagcaagggacctggaggaaggcttgtacccaagggctaagttacatttttcccgagagaggaatgctacacgccaaaccctggctcttcctcacccccagcagcccaccctactccacctgtcttagaactgacactccctcgagggtctcacaactgggggggcaccaagtcagggacagtttctgcttggtagtctcaactgagaggagaggagctatttcctacccatacactccccacataactgacaacggctttcacaccccaccccatgccagacttgcgagggcatacgt

SEQ ID NO: 461421 - DNA, 366 bp, Homo Sapiens
  misc_feature (57)..(57): n is a, c, g, or t
aggatgcatcctgtggagtcatgagcccatgagaagaagagtcggtgaagttgctgnggatggtgagctgggccaggtgggcaagaacctgctggcagggagcctttccatcccaggggatgcccaggtagggagaagctgcccctggcaggaggtcgatgtccagggccccatcagggggatcatggaggctgaggcaccgcaggatctcctccgaaagggacgggcactccaccctgaacactgacgccagcgaagagtcaaggtcgtcctcctcagccgccttctgtgtgccctgcccctgtctctgctcctcatcctgcctctcctccttctcttccctgacttcttccatattcggcagac

SEQ ID NO: 461422 - DNA, 403 bp, Homo Sapiens
actacctgcacccactgaacccctgggaccttagggaacaaccacaatgccactgagccccccaggtccctgggagccttcccttcagaccccactgagttcttttccgggatgctgaggactcactgtgcccctgggatgccctgaggaccccgttcaagatattgccagtgcaccacagacctaagagccctcactgaaacctagaaaagctctaggacccgtgggacccgcatgaggactgcaggaccccactgcccccccaccggaccatgccaaacctgctgagccctgagagtccccccaacaagatgagcccctgagatcctctgaaccctccgccaaggccccttcaagccccttgggacctactgagaccctcatgacccctccttgcctctgg

SEQ ID NO: 461423 - DNA, 373 bp, Homo Sapiens
ccacaccttcttgtttccaaacatgacaagctcactcccacctctaggcctttgtccttgcagatcttctccctgggaggctctttccaaagactttgacagcatctacttgtcacatcattctggccttctggcactctttgtggtggttttaaaatatgtcattacattctttgacactcctcccttcaaaaggcaatgattcattcccctctccttgagtgtgggctggactttttgacttgctcttggagaatagaatgtggtggagagggatggtgtgtgacctctgagattaggtcataagtgaaatttcggcctcccccagcaatttcttggatgattcacagtggaggaagccagatgccatgtc

SEQ ID NO: 461424 - DNA, 224 bp, Homo Sapiens
acccgcagacgcaggctaggttttttaatggtaagagacctagcaatcttccatatcagtgtgcacagagagggcacagtcccttggcaagccaccagctccagttctgtgacctcctggctgcatgcagccctcctaacaccaggcttcatgacaagcagtcagtaaaggggttcttgatgccctcaatccctgcacaggtccatccactagcctcagcctgg

SEQ ID NO: 461425 - DNA, 464 bp, Homo Sapiens
  misc_feature (63)..(63): n is a, c, g, or t
tgcccagatgtaaggcacctccaaagttcacaatgatctagtgcaggtgtgtttttgatggcnctggctgtatcatgctggcaattcagtggtaagccttgttctctagtcacaaataagggtgcagccattgtaaggaacagtaaaaaccagttatgaccacaccactgcattagtggaagctaccaacatggcggtttgaaaggtgacattttaccctttgggatattttctgtctcaatggtgagacatagggcatgtcctgggccctaggtatgtgcaatatggggtctcctttttgcctgactgcactgcattgcaggagtcagtggtacaccctgctaaaggcctcagtcagtgcacggattggggatccaactaaaggctggtaaatttattcactaaaagatggcgcgcgctgtctttataaattcgaatcaaggatcggcatgaacacgtctcgg

SEQ ID NO: 461426 - DNA, 336 bp, Homo Sapiens
ctgggctgtctgcaagtggcagccatgagtcctgccaacatcagccgagaggagacgagggaggtgaatgatcagataggcagggccctggtggggagggctctgggcatcaaggtctgggtagagatcttggatcctgatgtcggacatgccagataccacatggcctcacacaagtcacttcttttaggagctcagtttccccatctatttctaactcaggccagagggtgtttggggaggcctgagggctgttgattgctggtgcctgcccacattgggtgtcccataaatgtgagccctggtctgctgcccactagccccaacagtgtgtcc

SEQ ID NO: 461427 - DNA, 406 bp, Homo Sapiens
  misc_feature (63)..(63): n is a, c, g, or t
ccaacctcctgcgccctggtggctgatgggcacaagaacggcactggagactggagccctgcnccgtgcctggctaaccctgggtagggacagacccaccgcccgcttagaaaggtcacagaggcagaatgcatggatgccttggaaaccgcccccagcctgctcagcttctagagagtggccctggttcccactagcaagctccacgtgtgccctgcctgagcgcacgccggcatttcctttactgccctcaagtggcttcttttgaatttgagtgatgcccctgccctgtcccaccagccaggtgtggcaagcccaccaggcccctgctgactctgagctcatctcacccaggggctgtgcactgtctagtctcaggaaggcgatgccagcccctcagcctggg

SEQ ID NO: 461428 - DNA, 198 bp, Homo Sapiens
accgcggtgcgctcatgcatgagagcttctttttttaaattaaatatcaagtttagagaagtctagagaacaacattgcaatgccctatgcacccgtaattcagctttgttaattcctatcactttgccatgtttgcttcagatctttttgtttggtttaataaataaatcattgcagaacacaccacgggggtaccg

SEQ ID NO: 461429 - DNA, 240 bp, Homo Sapiens
  misc_feature (197)..(197): n is a, c, g, or t
caacaaataatccagccattacctaaatgccaagaaataaaagactgatgtataaaaacaggggcctttggtgtgatggatgcattagcatttacaactgagtttcctgctctagcctaacctgccctgcagacccctgtaagtcctccccaagtatttctggacttcctctaagttctcccacaggaactccatangtcagactattagatataatcacatgtggaattttgctttatc

SEQ ID NO: 461430 - DNA, 439 bp, Homo Sapiens
agtcagtgcgtccaggtcatctgtgcgtccacgtcgtccatgcatacacgtcgtccgtgcgtccacgtcatctgtgcgacaacgtcatctgtgcgtccgcgtcgtctgtgcgtccgcgtcgtctgggtgtccgtgcatctgagtcatctgtggatgagtcatccgtgtgtctacgtcgtccgtgcatccacatcgtctgtgcgtccatgtcgtctgtgcgtccacatcgtctgggtgtccacgtcgtccgggcgtctgtgcatctgagttgtctgtgcatctgcagtcagtccccatgcattttcataaacaggttggccttaaagccccaccgaggatccacccactcaaggctccagctagaggccccacgcctgccctgtgccacgcagcatggggtggacagaggggttcgcgggtggccaggccagggcactgc

SEQ ID NO: 461431 - DNA, 165 bp, Homo Sapiens
ctgactctactctattattgtacaccttgaaggcaaggttaattaaatcctattgtggggtttgagggccggaatttaatttttgtaggttttatttaatgttgggagcagattgggtaataatagaaaaaagttgcaattccttgtctccactgtgaggcaaac

SEQ ID NO: 461432 - DNA, 460 bp, Homo Sapiens
ccaagtttgaaaatgttagactgaagcagaaaccttcacccttacttcgccaggcactcccagacgagccaaatgcggggatttctggcctgaaagaaaactggtgatgcagactccaagaatcaaggagcagtgtgaccagagagataagctgtgtggaatcagcagccttcccgcccagagcgtgggctcagcatgtttgccagataataagaaaaaccaaaattggaggcaggagcaaaagttcgggataagaagttgatgttcaacccacaatcctgacccttcaccttcactttggtttagtggagttacctgtcaagtctcccagggcttaaaacgccaactcagcactgcgctggcacaatctctgggactcctcgcacttagacagaggaggaagctgaggttgaggcaggaatgaaaggaccagacccaattctgcatggactccccacgg

SEQ ID NO: 461433 - DNA, 569 bp, Homo Sapiens
  misc_feature (83)..(83): n is a, c, g, or t
  misc_feature (89)..(89): n is a, c, g, or t
  misc_feature (97)..(97): n is a, c, g, or t
gctcaaaagcagctcctccgaatctgcggacaactgtaaagcaatgaagggcaagaatccctggccctcggatagcagctacnccggcncagccgcncaagggtgcgtgagagacctctccacggtggcagacaggggcgctctatccgagaacggagtcattggggaagcatctccttgtggatcggaggggaagggccttggtagcagtggttccgaaaagctgctctgccccagaggcagaacgttgcaggaaaccatgccatgcacgggacagagcgcagcgacaccgcccagcacagaccccggtttgacgggaggcactgtgagccagtttcccccgctgtatatgcctggcctagagtacccgaattcagctgcccattaccacatcagtccaggcctgcagggtgtgggccctgtgatgggagggaagtccccagcatcccatccccagcattttcccccaaggggctttcagtctaaccacccacattctggaggctttccccggtatcgccccccacaaggaatgaggtattcctaccacccaccgcctcagcctgggt

SEQ ID NO: 461434 - DNA, 386 bp, Homo Sapiens
agacccaggctgaggggcagttctaggggcaatttcttcagtttacccctagtgtcatgtcttgctccctctggcctctttctctttgagggacacccctaccttcaccattaaatcattttgagaaacagtaacatttgaagccttcttgcataccttctcccctgcgactcccctctttagccacctgaatttgttacacaaaggaggatggccctaagtggttcttaagtaggagagtggtgagctcatactggcatgaaagaggccaagggacagggtaatcaaaagaccactgagatcagtgcagtgaggggtgacggaggagctgagccacagccagaaaggccggaaggtggccaaccaagagatgtggaggaggaagg

SEQ ID NO: 461435 - DNA, 243 bp, Homo Sapiens
ccccccagtctgaggagccatgcctgtccccccggcctggggggacaggtgtgattcctcaggttggggggacaagcatggctcctcaggcacaggagacaggtgcggctcctcagtctggggggacaggtgcaattcctcaggctgaggggacagatgtggtccctcagcctggggggacaagtgtggctcctcaggcacagcgcataggcatggctcctcaggggatcctctggagtcttc

SEQ ID NO: 461436 - DNA, 342 bp, Homo Sapiens
gaagatccaggctgagggcccctcagcggaacacccctggtgtgcctgggacatctgtgaaggtgagttccatgtgcctggcttcgccccacctggtttcagctgctcttccttacctgcctcgccttttacccttccctgtctcctttcctctcctcagagattctgccattgatgaagctgctgtccactcacccctagatttttgttgcatagccagtaagatctctggcctggaatgttttggggaaaactggaaggactgtgttatgggagtgggagtataactggtacctggttaatgctttccctttccattattcttttcttgctcagcctggg

SEQ ID NO: 461437 - DNA, 323 bp, Homo Sapiens
  misc_feature (227)..(227): n is a, c, g, or t
ctaccaaagaaacacaaagaaataaggttggggctactgtcaacaggatttgctgatctcaccatgtgtctgttatctagaagcaagtggctgagtgataggctgtcctagtaaagacccagggtggtgccaggtaggtggacaccactttgcaaagactaagtgatgtcaggaaggttgctggctgtgctatgaatgggacccagaaacaacttacagtggttttncccttcatggctaaaaaactcaaggatctataggctagaggagggagaggatggctcagatggcatcaatgacccactctcagaattatcatgggt

SEQ ID NO: 461438 - DNA, 243 bp, Homo Sapiens
aggcccagaattgacatagatgatgacggaattagcagacaaggacatgaaaacagctattataaatacattcagaatgctcaagagtataaagaaaaacatgaacgtaatgaaaggaacagaagatataaaaagaagtgaacagaacttttagagaatgatatacacatatctgaaagaaaaattttactgaaagggattacacagattagacaccggcagcagaaaagatgggggaatttg

SEQ ID NO: 461439 - DNA, 286 bp, Homo Sapiens
tttgttcatgcacaggcaccgctgcggcgtaggatatgatgacgtacaagtacaagaaggccttgcccttcaaggagtggccactctacctgcaagaggccaacactaatgcaggtagacaaataagagggtgttctggcatgagaagctagtgcagaggacgaagccgccgaggagctgtggttgagatgagccatgggagttgcccaggcacctcccggttgtacaggcccctaaatggagggtcattgctctctcccaggctataagtcctctaatgcagctc

SEQ ID NO: 461440 - DNA, 355 bp, Homo Sapiens
tgtaaagccacctggtgttttgtgatggcagccagcgtagactgagacgaggggcctgggcacattggctcatacacatagcacctgtttcctgcggagcagcatcaagagaactcaggaaccagtcccaattgctcaaaggccagtggggacaatgaccattggtttagagctctcttccctgaggcctgctcaagtgtcaacacacagtggctcctcgcagcactgtgctggcccaggatgacgtcacaaggtctgaagctctaattccatcccatacctttcagccacctcggcagcctcatcccccagctagtccccctcatcccagccacacacccgcaatatactcgcg

SEQ ID NO: 461441 - DNA, 350 bp, Homo Sapiens
gcactgaaggcggcttgaagtctgccggctggagtcacctgaaggctcgctcactcacaggtctgctggtggctgcatgcgtgtctccctcctgtaggccttcttgggcttcctcacagcatggttgctggattgcagggctggcttccagagtgtgtcagtgtgagcacactccaggcagaaactgtgctattttttctaagctagccttgggattcccacaggccatttctgccatagtcacaggcctgcccagattcaccccgctgatggaatgtcagggttagattgtaagaagagcacatgggatgggaaatattttatagcccactgtggaaatcatgacacag

SEQ ID NO: 461442 - DNA, 476 bp, Homo Sapiens
ctggcagggctggcccatgctagttagatgtacttccttctctgcgaaggccttcaggtctggcaaagagtattgagtcatagcatcaaggtgtctagacatttggagcaggtatgggtaatttacccctttgtgacaagtctgttccttagacagaggagaagcgcaggcatctttggaaagagggcagcccaggaagggatgtggcaggtcctccatatatggacgcatcccttgggaggcaggcagtatcatgcagcagagccaggctggaactggaagagaatttagagaccacgcccatcatgttcctacttttatggatgacatatggagaccagagaggattgaaccaccaaggtcacacagcaagtttcatcaccagcaaagtgggcatgaaacacctcctttctcctggtatagtgtttataaaaccatgccatcagaatactacacacacacactacacagatcaa

SEQ ID NO: 461443 - DNA, 332 bp, Homo Sapiens
gctctgtatccacgtgggtgttcatgcaggagagcctaatcctaggatctaattcctagtcaggtcatggggagcaggaattctgggaggtccagggttcccatcctgcaggagggccggtttttggctgcattgatgcctatctcgtgcagagccctctgggtctctggatgtacaaggagacttcattgccatttctatgtatctgatggtcttagtcatgactctgtcctgtgcttggaaagtccaggctgttgtaggctgagagttacactatcatgttcctatgtgagatgtcgatgtctcatgttctttttggtaggtaatataac

SEQ ID NO: 461444 - DNA, 436 bp, Homo Sapiens
gtatccccgtggttgtgttcaatgcactgaggagaaggactgaaggttggcaagcatctggtctgtctgtttgatgctctgcagcgtgttccagatacgccggattacatgggtacgatacgatgaacgaatggggctgccttagtgcacaggacacatcatgcaaaatgtcgtagccgccttccatcgtcacttccacccgtgttactcgagggccctcaggcttccaggggccaggattccatagccacatactcaatgcgcatgttgtgtttccacagcggcaccagcgtttacctccaagttgggaccctcctttggccagtgtgacctctcggacacgtgtagccctctcgaagccgtacgacacagtgctgccaagtcggctgcacctccttctcagtgtgcttcttccgcatacgtccaggcagggtgc

SEQ ID NO: 461445 - DNA, 477 bp, Homo Sapiens
caaaggtgtcttgtggaaagaatgatctaccctctgtgctcaagaaggctggaagggaagtagagaccagaacatttctagtcagggccttataggtcccaggcaccaggaagtcacaactgacaagagtcagtggatttccagggacatcaggaaggaagcagcaagcaggagcagtggctggcaagaaagtggaacccccgagcacaagtttgggaacctagaggatacaggtgccaggacccccagcagggacacccacaggggctaagggctggggggagtctagatatgagcagaccatggggaatgtggagggttgagggggaagaagcctccggaagagatcgcgatatggagaaaacaggatatacaagtcatgtcatctgacaaacacagacactgatgcccacatatgtacacacgtgtcccaagcagactatgcgacgctgcatgacacaccccgggatcctctag

SEQ ID NO: 461446 - DNA, 499 bp, Homo Sapiens
ccctgacgcttccagaggtacttaaccgaaacccaaggcactgagctatcaggtggtatgaaagcatctccttttatttcccaccttgccttcagatcaatttaatcatctgcaaaacagtaaagcagaaccacagcctaaattatggaagtaagatgcctgctcttttgaagtttcaacttttgaccttcacattcaaactgcactacccagcacaagaaaagaaattatccagttatgatctcatgtttgtggggaagagtatgattatagaggaatttacaggcaatcaaaaaggcgctccttgagagaatggaaaacaataaaacagtcacaggaaggaaatgaatgacagccgacgaaaatgagaaagcgagtttgcctgtgctaggagaggctgcttgctgccttccaatcaagacaggctcctgaggaaccctgtgtccccagccagctgctacagaagctgggtgcatgacacacacgggagtcctctaga

SEQ ID NO: 461447 - DNA, 205 bp, Homo Sapiens
tgcttgagtccaggagttcaagtatgcagggagttatgatcgcaccactacactccaccctgggtgacagagtgaggccctgttgtagaaaataaaaaaacaaagaaactctattgtattgatgtcccataattttttatccattcacttagctggaggatgtgttggtgcttccagtttcggtaatcatgaacaataccacatg

SEQ ID NO: 461448 - DNA, 575 bp, Homo Sapiens
tctagacgatcctgttcggcccggggcatggcctggtggaaggatcacgacaggaggcagtatgagatcaccagcgtttccgtggatgtctggcacatcctggaattcgactatagcaggctccccaaacaaagcatcgggcagttccatgagggggatgcctatgtggtcaagtggaagttcatggtgagcacggcagtgggaagtcgccagaagggagagcactcggtgagggcagccggcaaagagaagtgcgtctacttcttctggcaaggccggcactccaccgtgagtgagaagggcacgtcggcgctgatgacggtggagctggacgaggaaaggggggcccaggtccaggttctccagggcggtccctcatcaagaagcgggtcacagaaagtcgagagagccaaatgacgattgaggagaggaagcagctcatcactgtgagagaggaggcctggaagacgagaggcagaggagcggccaacgactcgacccagttcactgtggctggcaggatgttgaagaaaggtttggcgtcacctactgtacttcccatgagagattgcccc

SEQ ID NO: 461449 - DNA, 346 bp, Homo Sapiens
acatcctattcggccgggcatgttgcctgctgctgtttactgtacattagagactggtactcgacaggcttttcctattggcacagctgccaacattcagcctgcgcaagcttccagcttgcttatctgtgtctgcagctcgattttacaggctgctctttgttagaaaagaaattatttggggttgctttttgttaaaaggcaagccttgccaaggactcctttaccctcactatctgcctaaataacttctttttagctcctgtagcaaaatgaccttttctgggtggttatgaagtagatccctggagaggggcatgtggtggctgttgaatgagccaatgtc

SEQ ID NO: 461450 - DNA, 350 bp, Homo Sapiens
gctgggggaggttgtgtgcaggacaatgactggggccctgcagcagtgtctggagccatgagcctgcaagctcaaatctcttggtggcaccagcctgttgcttctcctggcttggttgagaacaacaaaaataagtatttgtgaacgtaggtggctttgcctgtcgtaccggacagacagcatggccacacggaggaacccctgacctgggaggggacagaactcattttctgaataagtgggttggggctgctggttatccatctccctgtcctctaccactaccagaagcaagtgcttaccaggcccaggtttctcttttaattttattttgttttagtaccacgtcg

SEQ ID NO: 461451 - DNA, 395 bp, Homo Sapiens
gagctcggtacccattccggcccggggcaatgtgagcgcaaagtgctgcccaagttgccgggatggagctgcagagccggcccgaggcgctcgccgtggaactcgcgcgccaccagaacggcgacctcaagaagcagctccacgaaaggcagccgcggatcgccgcgctcagcgacaaacaaatcgcgggcagaacctctcatctgtgcacaagggacccagcacggggctttgggaacgatcactgcagtgcctgtcacgggtcctcaggtcagctccttgcagaggttggccgggcaaggagcggcagtgctacctcaggttaggccaaagactctgattccagacagcctccccagtgccccggccgaattaagctcctgtagagtcacccg

SEQ ID NO: 461452 - DNA, 514 bp, Homo Sapiens
agtggtttctgaggaaaatgggcttctctttctactgtacttggcagctagaaaagctattgagtcctttagtcacttcaaagtagcactttagccattgggtgctactgtgctggggtgggtggtgaatgaggccccacccttggcctcagggcattctgggtaattatgggaggggtgtgacagaaggtgccaggagtgggcaaggagcggacttcgtggagggaagttggtaagtaagtttcacgggatgacaagggagtctgcagcccactgagggctcaaggatcagccaggcccttgaatgccgtgtctgcctggtagctctgggaacgggcgattcagggagccttactcgttgggtagaaatccagctcaatacattggttttgatgtgttcatctgtgaacctgggaggcgcctgcatcttcttggccttttctcctgctgactcttaactagtgcactgccgtgtttgatcttgttttttacaactgcgccaggttatgccccg

SEQ ID NO: 461453 - DNA, 437 bp, Homo Sapiens
  misc_feature (48)..(168): n is a, c, g, or t
tgttcaggatcttaattcggccggggcatgtggctctcgcgttatagnnnnnnnnnnnnnnnnnnnnnnnnnnnnnnnnnnnnnnnnnnnnnnnnnnnnnnnnnnnnnnnnnnnnnnnnnnnnnnnnnnnnnnnnnnnnnnnnnnnnnnnnnnnnnnnnnnnnnnnnntataaataataacaataaccagccatggcacccattcgctaaaagctggaatgcaccaggcaccgtgcagctggtttcaaatcctcccagcaacaccctcaggaggtggcagcaaagcacctccagctgggtgctaccactggccagcccccagcggagggattccgtgtgtaccctagggctacctcctttaaggccctgtgttgtgagcactgtttacagggggcatggataagttatgtggctttgcaggagatgtgggctcctag

SEQ ID NO: 461454 - DNA, 417 bp, Homo Sapiens
tgtgttcttggtgggcaatgtagatcccaggaagcagacaacctctacaggccggagcttgacccctggtaggaaactacactccgttctctgcaaagctcctgagtcagaacaagataaaatgggaactgctgcaagctgagctatccacaggtcatgtgataggatctctgggagatggcccggcataaccaggtcaaatgtggggacgtgattgaaaacagcaatgaagtagaagagaggtctcaaagtgccagcctgcagacgagggatgggtgtgttagcagggaaaagctgcctcaccactccttcgtatggtaactttagaagaggaaaacggaggcacagcatccctgcctgacacaacggcatctgatttaatgctgtagtccatagtgaaatgcacacccacatcag

SEQ ID NO: 461455 - DNA, 271 bp, Homo Sapiens
ccggggaaacggcgcgcttgtacctggccccggggccctttcatccgtcaagccagtttcaagcctctgcctggacacccagacttagcctgccgggcttgcaggcgagcagggtacggctttagggattgctccccgttcagtgcggaggactcacagtgcgtcccggggcgccttgcatgtctacaggcagtgtcatcccccatcagggcacccttagtgccgcgcatgcctgcctgccctctgtatcctccctccctgccctctcata

SEQ ID NO: 461456 - DNA, 482 bp, Homo Sapiens
ctctgagctacagaatcccaggtcttctcactgttgctggggagcgtatttccgtcaccactgtggtgggggaggcagaaaccactggaaaaacgtggcctcatgtttgctggtcttggattgtagtagataaagtgcaaagaaatggccaccccaggctccaagcccgacaaatttatctaaagacgtttttacacaatagaggcattgacagagagggtgggggcacaccacgagattctgcccccttagaagaagaaaaatcggtgcatttcgagatgtgtttggctcttcattaccttgcgcggataggcaggaaagtgtgagtctgagtatttgtaagtttcaagatcactgatgggctggaaacaggtgagccggcctccgggaaattacccaagttcttcagcaagttgcctgcagtcctgggagctctcaggagaaggggcgtgaccagagctggttgcagcaaccccaccccc

SEQ ID NO: 461457 - DNA, 297 bp, Homo Sapiens
agaggatccccggttattacattctctttttcaccctaagtcttctaaaccctggcacacagacatacgtgcacagcccatgtcacgtggccagtaattactgaataggactgcgagattctaggtgattctggggcacccggacctgctttgttctaagcccgcagtgaccacagtctctcagttctgctgtaggaaagctgatgggcgctcagagcatcttccagtctcactcggtgcctggtacccagggacacctaataaatgctcattctctttgaaccccgtgactcctcc

SEQ ID NO: 461458 - DNA, 183 bp, Homo Sapiens
tccgattatgcgagccgggtacaagttctaagcagcttaagcccaggtgcctggtgggaaagggaacagggcaccatcttcacaatggctcaggctcctgcctctgctcctctcagatttagctagggcaggactcacgaggtcctaggggtgcaaccttgctgggcagggccctcctaggag

SEQ ID NO: 461459 - DNA, 492 bp, Homo Sapiens
  misc_feature (55)..(260): n is a, c, g, or t
ggttccagggcagggaacaacacccaagtaaggccaggcgcagtggctcaagcgnnnnnnnnnnnnnnnnnnnnnnnnnnnnnnnnnnnnnnnnnnnnnnnnnnnnnnnnnnnnnnnnnnnnnnnnnnnnnnnnnnnnnnnnnnnnnnnnnnnnnnnnnnnnnnnnnnnnnnnnnnnnnnnnnnnnnnnnnnnnnnnnnnnnnnnnnnnnnnnnnnnnnnnnnnnnnnnnnnnnnnnnnnnnnnnnnnnnnnnnnnnnnnactggcacctgaacccagtcaggcaactgttccttcagctctgggcgcctacttgggtggaggcaggaggtcccaggtgaggacagcactgggtccacaatgggagagaatgagagatcaggtcagggcattccactgtcacctcagttgcgggtgtccacactgagacatgacataagcccgtagaaactacacgagctgtacccggactcgcataaacgggatgctctag

SEQ ID NO: 461460 - DNA, 579 bp, Homo Sapiens
catctgaattctttgccaggactggaaaccctagtagctgaggttcaggcttggaaaagaatgtgctgttaatacattcttgactgagaattctccatattctctcttagaggtgctgtgtcctcgatgtgatattggccttttgggattgaaaaggaagcagagaaagttaaaggagcccttgccaaatggaaagaaaaaaagcaccaaattagagagtctgagtgacctggagagagctttaactgaaagcaaggagactgcttcagctatggcaactcttggggaagctcgcctaagggaaatggaagccttgcagtctctcagactcgccaatgaagggaaattgctgtcgcctctccaagatgtggatataaaaatctgcctatgtcagaaggccccagctgcccctatgattcaatgtgaactctgcagggatgctttccacaccagttgtgtggcggtacccagtatttcacagggcctgcgaatctggctttgtccccattgtcggaggtcagagaaacctccattagagaaaattctacccggactcgccaatagggatcctctaatcat

SEQ ID NO: 461461 - DNA, 276 bp, Homo Sapiens
acctgtacctatacagggattgctcccacgcatccctcagtgaccccaaacccatctccacttacactcaggcactcccagggcctgacaagctactccccgttattgtccttcagttcgaagccctggccaatctactagcccacatgacgcagttacctggccgtttctccacagttcccgggaggtccccacacccagccgcacaagagcccctcctgcattccgtcctcacacgcaggcctgtccatctacttgctcctgtcacactcttgc

SEQ ID NO: 461462 - DNA, 419 bp, Homo Sapiens
aatcttatgtaggctaaaggttgaagaccactgagtcccctttatgtgctaataggacaaacagatacacaaagggcttatcataacctcccataattgatcttaaattgatctctctgcttctacccttgaccccatccctacatacctgcttattccgtaaaccacaaaaggatttttaaggcataagtcagatcatgtaacttctcgtgctcaaaattcccccagagtttctcatctccctcagtggctacaagcctagaataatctcccttctctgcctttctgactcatttcctaccactctcctctcccctcctgcttggctccagccaccagtccgcctcctcctcactcctgtttcacctggtgcatagaacctgcacaatacagcggcctctacccggctcgcctttata

SEQ ID NO: 461463 - DNA, 454 bp, Homo Sapiens
ggcgagtccgggtataccgcagggcacagatgcagatcgacaagatcctggaccccacggcacagcgtggccctcccgtgttcatagagcccaggaagagctcacggatataccgttctcccaagcctcgccgggaacaccaggtcaacggctgtcctgccgacgctgagaaggaccggctcatcaccacagacagcagatggcacctacaggaggccgcccggcgtccacaactcagcctacatcggatgcccatcggatcctgacctcccagccgatgtgcagacaccatcctcggtggaactggggaggtatccagcccttccttcccgcctccagacatccacccagccgtccatcgaggagcacgcagacatgcactcctcctgacgacgccttgcctcgtgccccagcagcagcctgcagaccgaggtagcccgagtcacccgactcg

SEQ ID NO: 461464 - DNA, 419 bp, Homo Sapiens
gagggatatgataggcggccagtggctaacgtggggcgtggattcaacacagctggaagcccagagctcggaggccggggttctggggccaatggaggaacaggagtcagtccattcccgaggggcttgtctcactacaatcttcaccacgcctgtattattcaccatggttggtggcatttgcagcgggcggggctgccccacagcaagctggcgcacctgggcaccagtcaaagtcagcttgttgccctggatttggaaggtgagaggtttgcttccccctgcattagccactggacgttgtgccagtgaggctaaccttgcccgatgcttgaccaatttcgcctgcctgagggcagagaaccactgttgggctgcagtggaggccagaggccagggccaggaggccgaagttaccc

SEQ ID NO: 461465 - DNA, 272 bp, Homo Sapiens
tctttctcagaaagacatatacttacacaaataataatgttaccctaactgcacatgatttacaatgtaaccatgatttgtggaccaaggagcatctctaaatttaactgacccacattgcaactgagcatacagcttaacattatcctttaagtaactgagtttaccagcatgatgccatctaagaacagaatcctctggtagccatttgtgcactcaagcactttttgaaggctcaattatctccatttggtacccgagcatccgcatta

SEQ ID NO: 461466 - DNA, 872 bp, Homo Sapiens
  misc_feature (134)..(134): n is a, c, g, or t
gccggttgcgtctcaggaagaacagggtccctacctgactctttggggtttcgctgggaagggaacagggacccgggaaaggagaaaggtaaacgtggggctcaaggcctggctagcccacgttcccactcccntgctgagaaaagaactgagcgaaacactacaccgggaaagcaatggccctgagggccccctcttctcaggtcaaggaaggttcattctacagaggccctaaagcgtcttctcttcgttgactggtttaggaaaggtcctctcaggtgcagggcaaggtgagcccagggtgtgagcaaggctgcctggctggaggccagcctaagggttggtggtctagcagagccgccccagagagctttctcctaaactgtcagtaccgccactctttccaggacccttcgtgaaggatggaccaagaccaaggttctcctactggaacaacccagctctccccttgcagacttagggagcaggatcagtgtttaattaattgtcttaattctgggggcagaactggggtggagggagcaggggcatggatgtgtgatgtgctccacggctctgccacccttaagttccctctccaggcttgagattcccatcctggggcaaaatggtggctatccgggcagagattacggaggcagcgtggtggaggcacaatgagggaggagggagtgaggggaaagaagatttggagaggcttgtgcagactgagagcaggtcacctggaggtgtggggggcacagcccaggtctcacttcccatgtcctgggcccctaggagggacaagggcgacctctaaacgctcagatgcctacccgactcgccgaaacgatcctcagagtacctagcgt

SEQ ID NO: 461467 - DNA, 553 bp, Homo Sapiens
tttaagggagtccgggtacagtgagtagggagaagctgggagcaggaggagggcgggcagccccatgtgtgcaaaagatggaggggcagcctcgccgggaccacctgtgcagggcagcagcttggtggtctagcgcacacccctctggctgcctggccacagaaacagcacccttgacaccctcgaactcagcaggatgtaagacacccatgtgggaggcgaggcctgaaacccaggaggcatgggaggctctcctgcagcaagagggacggaaatgaggacttgcccgggcccctgtgttggcagcgtctgcctagtggagggagaggagcggtctgctgtcccaccatggccgaggagccaggagccagggaccatgcagctttgtgaaagagtggccttaggggcctccctccgccaccatgctttctagactcctagccagccccttctctctgcgccttgtcctccccctcgctccaagagcagaactcttgatcccattttgcagcacgttaatctgtcttttcatcgaggcacccagctccctaag

SEQ ID NO: 461468 - DNA, 125 bp, Homo Sapiens
gaaaaagagcaattagccaggcatggtgatgtgcaccagcggtcccagctgggaggctgaggcaaaaagcttgcttgtgcccaggagtttcaggttgcacagagctacagataatcatgacgctg

SEQ ID NO: 461469 - DNA, 272 bp, Homo Sapiens
tgctgggattacaggtataagccactgtgcacggcctcagctgtgaactttcatctattgtctaaacctctcaaggtattcagatgtgttgttattttgccaatacccattttcctggagtcatctgatctgcacctctcttaggtgctggtcttcatttcctggatccactttcccttttttgatttacttcatcctgaatggtttctccaagaaatcccttgagagcgttggcagtccgtcgtcctgcactatgtcatgacattttagtc

SEQ ID NO: 461470 - DNA, 137 bp, Homo Sapiens
actggtattttatcttcgtattctccttctagccctctacgcctggttctctatctttcttgatctactatcttttcttgcctctgtccccttctctctatctcttagctcccctccttacctggtcgactagtctt

SEQ ID NO: 461471 - DNA, 380 bp, Homo Sapiens
  misc_feature (151)..(272): n is a, c, g, or t
acaaggagcttctctaagacattcttctgttgttttctggcatccaatgttgataagatattatttgtgatctaattgtcaattctttgaattctttcttacctccagtagtttttaactctcttggtctggtcaggtatggcagctcatnnnnnnnnnnnnnnnnnnnnnnnnnnnnnnnnnnnnnnnnnnnnnnnnnnnnnnnnnnnnnnnnnnnnnnnnnnnnnnnnnnnnnnnnnnnnnnnnnnnnnnnnnnnnnnnnnnnnnnnnnncgtggtggcatgtttctgtaggcctagctactcaggaggctgaggtgggaggatcacctgagcctggcaggtaaggccacagtgaaccgtgattacgccactgccgcc

SEQ ID NO: 461472 - DNA, 542 bp, Homo Sapiens
  misc_feature (96)..(226): n is a, c, g, or t
gctggctcaagcaatcctcccaggctcaagcaatcctcccaccttagcctcctcactagctgggactggagccgcccgccaccatgcccatattannnnnnnnnnnnnnnnnnnnnnnnnnnnnnnnnnnnnnnnnnnnnnnnnnnnnnnnnnnnnnnnnnnnnnnnnnnnnnnnnnnnnnnnnnnnnnnnnnnnnnnnnnnnnnnnnnnnnnnnnnnnnnnnnnncccataaccctgaattcttcagcaaggtacacaaggcccaccagcaagttcacactcaccaggctctctaggctcatttcctaggaattcctacttcacactgttccatccagccaacccccaactgcatgtagtcctcctaaatactccatccattgctcatgctgttgctttggctacaacccatcccaccttgcttgctttagtgaattcttactcgatccctcaagacagggcttaggctattacctcctccctagaaggctctcccaaccctccaggcagaggataatgctcctgtgctctgctccagcct

SEQ ID NO: 461473 - DNA, 403 bp, Homo Sapiens
  misc_feature (109)..(221): n is a, c, g, or t
gagtacagtggcgcgatctctgattcactgcaacttccccctccaggttcaggcaactctgtctcagcctcccgaatagctaggactgcaggtgcgagccaacacgccnnnnnnnnnnnnnnnnnnnnnnnnnnnnnnnnnnnnnnnnnnnnnnnnnnnnnnnnnnnnnnnnnnnnnnnnnnnnnnnnnnnnnnnnnnnnnnnnnnnnnnnnnnnnnnnnnataagccactgtgcccagcctaaaaaattcttttaattttttattttcaagagacgggtttcactgtgttgtccaggttggagtgcagtggctttttacaggtgcaatcccactactgatcagcataggagagatgtttcatctgctctattcgcaacctgggccggttcaccctccctggg

SEQ ID NO: 461474 - DNA, 146 bp, Homo Sapiens
  misc_feature (81)..(91): n is a, c, g, or t
ctgccctagcctcctgagtagctgggaccacaggtgtgtgcaaccatgcccggctaatttttaaaatgtttagtagagttnnnnnnnnnnntctccctgtgttgcctaggctggtcttgaactcctggcctgaagccaccattcca

SEQ ID NO: 461475 - DNA, 136 bp, Homo Sapiens
aagccaaatacatagaaacataataaaatggtgattacaggttggggggaaaatagggagattataggtcaaagggtataaagttgcagatatgtaagatatgcccagagatctaatgtacaacctgtcgacagtt

SEQ ID NO: 461476 - DNA, 373 bp, Homo Sapiens
tgaaatcacttatacttttgagttacatgagccaatccttttttgcttgaactacttaagggtttctgtcccttgcaaccaagagtactgacagatacaaatgacactgggagggccccttgtcaaagggcaagtccagccatgggcagctgggggtgccccggtaccctccaggcgcctgcccctctctggtgcctgtgctcacatggagagggttgcccttctcaaggatggctggcaccttcccacccatttgagggggcttccagggctcccagcccaccctcactgagtctctctcggggaaaggcaagaaaaccagtgtcctcagctcagtctcgtcacccctcaggttggctccttttccatattg

SEQ ID NO: 461477 - DNA, 327 bp, Homo Sapiens
agatgatggacaagcccacatccagcagtgtagatactactgtcctgctttctaagatcattagccctggttcctcaacacccagcagtacaagatcaccacccacctgggagagatgaaagctacccccgagagctctccaattctgtatctacatatcgaccctttggtctgggcagtgaatctccctataagcacgccttctgatggaatggagagaccatcttccctgatggactcttcacaggaaaagttctacccagatacttctttccaagaagatgaggattaccgagattttgagtattcagggcctccaccctctgc

SEQ ID NO: 461478 - DNA, 388 bp, Homo Sapiens
attgactcaggctgtgtgcggcttatgggtcctcgtctgaagagtgtgaggttgtgcttttggatgtgtcccagcagcacctgtcctcgctgctcacagggtctggaggacctgcttcagcccctgggctccgccttggctttcccagaacactgggtccatctgcagcgacttcagcagcatgttctgcagacaccctgatgcgagaaccttcacggcagactcaggaaacccatctatgccctccagcagccgaaagttcagcttgtcctcagggtgctgaagattgccagcgttatcgatgtagaccaggtgagatggatcgctgctccggaccaggatgtggaccagccgcagctcggctgggttccggcatttctctcggagc

SEQ ID NO: 461479 - DNA, 600 bp, Homo Sapiens
ggcgtgggcggctggagagggcgtggatggatggctcggaccgttacatatttgtcacctccacgacagtgctatggcccaatgggctaagcctggacatcccggctgggcgcctctactgggtggatgccttgtacgaccgcatcgagacgatactgctcaatggcacagaccggaagattgtgtatgaaggtcctgagctgaaccacgcctttggcctgtgtcaccatggcaactacctgttctggattgagtatcggagtggcagtgtctaccgcttggaacggggtgtaggaggcgcaccccccactgtgacccttctgcgcagtgagcggccccccatctttgagatccgaatgtatgatgcccagcagcagcaagttggcaccaacaaatgccgggtgaacaatggcggctgcacagcctgtgcttgccacccggggacccacagcgccctggcagagcaccagtgtagacgcagacggcgtcacttgcttggcgaacccatcgtacgtgcctccaccccagtgccagccaggcgagtttgcctgtgccaacagccgcatgcatccaggagcgctggaagtggacagagacaac

SEQ ID NO: 461480 - DNA, 407 bp, Homo Sapiens
ttcatataaattatatttggttttgatcagttagttattgaaggactgaggattgctatagttaatttcctataactggaatgtatattttgaagtgctaggaaaaacacataaactcaacacagtatttgaaatactacagatttatcctttagttttgaattattgctggttctctaattgattttccctttattcatatagcatgttcatctatacatgtgaatcatggtgtgtgtggtaattagtatcagcttttcttttaagagcttaagttttgtaagcactaatatacgcttgcacttttgggcagtggcattaactaaaattgcattctttgccttagcttgatgtaagtctttgcttcatttttctaggcttaaagttttctacaacctggtcgcaat

SEQ ID NO: 461481 - DNA, 288 bp, Homo Sapiens
gttgaagacagggcgtggagaatcaacaaaacagcaaagagaggaagctaggagctgcttctgaatccctgaacagctccccgcaagttacttttcatattttgtagctgatcaaaacagtctactttcccctttccttataactgatacaatccattacaaacctttggaattcattttttcccaaatctagttggattcaggttctccagcgacaccttaactttggatcgtggaggaaggtgcatttcggaggatcagtccagtactagaaaaactatatacgag

SEQ ID NO: 461482 - DNA, 391 bp, Homo Sapiens
gacttaaacaggttgacaagtctccaggtgtgttatgggcctccaggtgtgtgacaagtctccaggtgtgtgatgggccctccaggtgtgtgacaatgttctccaggtgtgtgatgggccactccaggtgtgtagacaagtcctccaggtgtgtgatgggccctccaggtgtgtgacaagtcctccaggtgtgtgatggatcctaccaggtgtgagaagtcctccaggtgtgtagatgggccctccaggtgtgtgacacagtcctccaggtgtgtgatggatcctccaggtgtgacaagtcctccaggtgtgtgatgagtcctccaggtgtgtgacgggccctccaggtgtgtgacgggctctgcaggtgtgcgaaggaccctccaggtgt

SEQ ID NO: 461483 - DNA, 461 bp, Homo Sapiens
tggaccagacttgaccaggtatttctatcattagactgcctggagtcaacgggagtcactttcagtagaatgcctgggatagcccaagtgtctctgtaattagactgtctggtggtcggtcaggagtctctcctgttagaatgtctgggatcacccgggtgtctctatccttaaatttccttgggtcagtcaggattctctccaattaaaatgcctgtggtcagccattagcctctcccattagaatgcctgtagttgcccagttgtcactatcagactgcctagaatctctccaatcagaatactgggttcgcccaagtttctctatcattagactgtctgttgtcagccaggagtctctcccattagaatgcctggggtggcccaggtatctctatcattagaatgcctgtggtaggacgggaatctcttccattagaatgtcttgggacttccaggtg

SEQ ID NO: 461484 - DNA, 435 bp, Homo Sapiens
  misc_feature (419)..(419): n is a, c, g, or t
tagcagtgacagttttagtagtagcacgtgctgttgggacattcgcagtagcctggattgcagacagttctgtgaggcagcctagtttgcatatgagtgctgctgcagcttcccgagacatcacctatgtttcacgctatggatacattgtatagacacagctatgatttgagcagtgccattagtgtcttagtaccactcggaggacctgttttatgcagagatgaaatggaggaatggtcagcctctgaagctagcttatttgaagaggcactggaaaaatatggcaaagacttcaatgacatacggcaagattttcttcccttggaaatcattgactagcatcattgaatattattcacatgtggaaaactactgacagatatgtgcaacagaaacgtctaaaagcagcagaagcntgagagtaaactgaac

SEQ ID NO: 461485 - DNA, 546 bp, Homo Sapiens
cgttgctacaagcacatctgtcagccaggtggctataggcccatacgggtagacctgtcttcttggccaccgctgtcctaagcagcagaagcagaacttcagaacttggagtaactcagctctgctccagccagcacagctcagagaaatggggcatccacactttcggatttgtagcccaccttgcctccttccagttccagctcaggctccagggggataaagcgaagactgcctagacattccctctcttcccccctcactatacgagctggctaggcctccacgtctcccacccggttgcctgacagactagcgaggtccgggagccccctgggcggtggccagcaagcatggtctcccttaggcctagcctcggtgcacccgagttgccctcccccttccattccctccgcgccagcagcgatgacatcattcctccctgactccgggaccgcggacaggcggcagatccgcgcccaagcagacttcagcacgtaggcctaagatgatggggctcttcccaacctgtcgaaagtctggtcc

SEQ ID NO: 461486 - DNA, 590 bp, Homo Sapiens
  misc_feature (14)..(14): n is a, c, g, or t
gacagccttggggnagacgtcaaaggtagccaagaaggtgatctgggcgccgccacggaagatgaggtggttgattctgcagctggtgctcccggtgccctggctccctactggtgcgctgtcgcatgtcaggtgcagggagctgcatttgcccttgtttctgtgcccttctgtcctacgtagcgtgttggacattcctgcggggctgggagaaggtgatggtggttccgtaggagtcttccccgtcattccacaccatcagttctgctttcagctccgaggttactccccaccagcagggacttcaagcctgggaagctgaaggagatgccgagattgtcctggcagatatggtcggctccacagttcttctcaaagggtagggaggccgtgaagtatctctgagcatcggcggccagcataggccgcaggtttcagaaggcaaggaggggcttgcccaccagcgtgaagttcagacgcaaggtaatgggggtcacagagtcctccacgcagctcgggagcagcaggttgaagttttcacagtgtgccttcagcccgaggactcggactcggctcagactccggttctt

SEQ ID NO: 461487 - DNA, 348 bp, Homo Sapiens
tgtcgccagtgtttccccatctagagtttgaacaatgcaactctaatggggacagaatgatgctagtacaccctattgcaatatgatcagattgattgcggaactcctgtctctcatacaattcttccacagttccctggtggtcttacagtgaatagaaagtcctttccatggcatagaatgcctggcccctgcattccctccctcctttttcctctctttactccagcacatttgagtactgctgtgatacgggaactctggtttcacagaccccatgctttgcacactttgtttctttattgtagttcgaatgtctctcctctcccaatactttcgcttggcagt

SEQ ID NO: 461488 - DNA, 282 bp, Homo Sapiens
ggagctcggtacccctcaaggtcccagcctagcaagcgcgaagcctcacatctaggtatgtctgggatcaggcccacgctctttccaccacactgtgttgcgtctctgtcatctgggaagttatgaatggtttcatgctttctgagttagagctaccgcaaaagtagttatgtgcacaaaaccagtccccacctgagtgtccttctccagcctccaggcttctttgaagggaagaatcagttcctagtacttccttggggaaacagttggcgaaagccgggg

SEQ ID NO: 461489 - DNA, 167 bp, Homo Sapiens
tttctacatgttcccatcctctctcccccatcccttctacctcctgtgtttcctccctgattttttgtgtgttcactctttggattcccgttgcacaattatgtgctccaaattgttccttacgtgatgaagacagaagatcattcttagcttattattacttgctg

SEQ ID NO: 461490 - DNA, 172 bp, Homo Sapiens
ctttgtggtgcacacctgtagtcccagctactcaggaggctgaggtaggagtagttgcattgaaccgtgtggagacggaggtttcagtgagctattgagattgggccgctgcactacagcctgggactgaagcgagactctgtctcggggggacatggcagaaagccgggga

SEQ ID NO: 461491 - DNA, 340 bp, Homo Sapiens
aattccatgggaggtttcaacaattccactgtccctgcctgaccttccagctgcctcacatcttctgaccttcacctgaaagcccctcttccttatcaatgttggaatcctactccttccacaagtgctggctcaaaagctcggcaaagtccttatcaggtaccaggatgaagaaatacctcccctcagcacatttgcagctttatctcttcccctatgtagccaagtgtcagggctccaaacctgaatgtccaaggggaactaggacaggtcatataaagaagtgtacctggaccaggtgcggtggctcatgccatgtaatcccagcactttggaggcg

SEQ ID NO: 461492 - DNA, 416 bp, Homo Sapiens
cgggtacgccaatgtttccctagaggttttgctacttgttgatgagtgcttcaacttacacatttatgatgatgtgggagtatagccactatctcctgtttcttcaagcaatatctctattcctgctagataccttttcagtggagcaaagtgacaaggtattatggcattttgaaatggtgatttttaagaaaataaatgtatttatagcattgtatcttaaaacctctcttttcttcatccatacactcatatgggaaccccgatgcatacaatatttaagttatttggacagagagaagttaatataaattgttaaccaagtataaagtcattaacttgctaaacgaaagggtgatatgagcctgaaagtttcatagagatcgcaactgcagaaagcagttaactgctaggga

SEQ ID NO: 461493 - DNA, 476 bp, Homo Sapiens
ctctacaccagagtgcaaaatcttttgtgtcttcacaagtcttgttgatgcttgttgctgtcctcactgcctaaagaaaagtttggtgacctttggactttttccacttaaagtagggtgatactactttattgagtttatggggaaaaaattataaaggtgtcaggggaagagtttgctcataatgggatatttttaggaaagtgaaggcatgcctgtaggagctaatgggaaagatgtggtcagataaagatgctaccactcctgccactgagattacttaggaggtcttgtccacatattcctgaagaagggtttaattgtgtatttggtgtgctgtgtctgacatctgtgtttgcaggtccgtgtaatctaatcaggttgaccaatagaagattttaggactgaaggattaggggagattagagactaattctttaagttttgtgtattgagtgatgacagggtgggaaaca

SEQ ID NO: 461494 - DNA, 641 bp, Homo Sapiens
  misc_feature (46)..(46): n is a, c, g, or t
  misc_feature (48)..(48): n is a, c, g, or t
  misc_feature (403)..(403): n is a, c, g, or t
ttacttcttttatttattctggagtatctagtaggatatcatggcntnggaactcaacacatgtatgtggaacatcatgtgactaaataaaaaagaagatactattctctctcaagttgtaccattaacagtatctggctaacataatcactcctttagccacagttccatggctaggatgcagtaagcacaggaaaacaagggcctcctccaaagcttaatgacaatgagtcatttatactaatgctgcctgttcctcttactccttagaggtcaggaactatttgcttcttgattttgtgccacaggtaacaggcagtgttggaagaaatccatgggaagtaacaaaagtctggcataaaaagtcatgggaagtctggcacagagtggggtttaacattanccatgtcacaactccatcacccgggtaataaaggagggaccggataaccattcattgccctttttctgtgactgtatatttattcagtgagtgctgacatattaaagaactacacagataggacaggttcatgatgacgaggcacagctgtgccctctcttctccatgcatacctcctcacagacgttcacgaactgctgccacactgctcctactcgggctccatgcctccttccat

SEQ ID NO: 461495 - DNA, 481 bp, Homo Sapiens
ttttgggtgtcgtgcgtggcatgaacctgacgacatcaggcgacagttagaggaggagcagagacagttagagatcttgcagcagcagctactgcatgaacaagctctacttctggaatataagcgcaaacaattggaagaacagagacaagcagaaagactgcagaggcagctaaagcaagaaagagactacttagtttcccttcagcatcagcggcaggagcagaggcctgtggagaagaagccactgtaccattacaaagaaggaatgagtcctagtgagaagccagcatgggccaaggaggtagaagaacggtcaaggctcaaccggcaaagttcccctgccatgcctcacaaggttgccaacaggatatctgaccccaacctgcccccaaggtcggagtccttcagcattagtggagttcagcctgctcgaacaccccccatgctcagaccagtcgatccccagatcccacatctg

SEQ ID NO: 461496 - DNA, 305 bp, Homo Sapiens
ctggggcgcggcgggagcaggcctagagtcacactggccccaggtgtccccaggtcaggtgggtgtgggtgtgaagggaaggggagccatcacttgaacacaggtgacaaagtcaccgggctggctgggggtcgatgtgcatttctggaggtcagacaccacacgctcaccaagatggtggcagtgaaactggtcacagggatttgcggggcctggtgtatgtgggagggggtctgctgagcccaatgccatggtcactgtcgccaagagggggaaagaccccggcccgtccccccaccactgta

SEQ ID NO: 461497 - DNA, 205 bp, Homo Sapiens
tgcactaagcagtggtgggtggtagtgctaggggttactgcaggcggtttctgtttctttgaatcccgggactggcttgttctcacctttttgttctgtccctctctgtgtatttactttctctctttttgcattgttctcagccttccatctgcacctcttcatctctgcctctcttgcctgcatttcctcaatcttgattgtc

SEQ ID NO: 461498 - DNA, 251 bp, Homo Sapiens
ggcagtggtgggactcaggtgctaacttcaggctgatgagtgtgtggggtatggggcaggctgtaggtattactggaaaaggcaacattcgattggttaaggcgttattcagaaagaacaattgggaaagggtgggcaaacaggaacagaagttcccactctgcgtggtgggtttcatccaggaccagcaatctggtcttttagccttcaggctgatctttgcttgaacgtggggtttcatttgggaccct

SEQ ID NO: 461499 - DNA, 269 bp, Homo Sapiens
ttttgggctttcgtgcacactcagcttggcctggacgtagcgggcttcaaagtcctgatactgctcctctgcaagagacttctttgccaccacgagcacccgcagcccttctcgggccatgttgccacactcttcctccaaccagtcattgtactgcacaatgccagcaatgacaacatctgctcccttcatgtaaacgtaatttctccagttgattcatcccgcacgacagcccaaaacgggatccttagagttacctgcagaatgca

SEQ ID NO: 461500 - DNA, 488 bp, Homo Sapiens
tcggctggggtaggatagtgagcagttctcattttctgtgtagtgtcccctagagagagagaatgggaaggagagcaaagagggagagggagctcatcagtgccaaggcaaacagcccttccagattccccttttgagggcctggggtggggtggggaaatgactagattgtcatctgtagccttcattcgagacccagcttcagtcttcacattaacaagcactgttaatgttcagtaagtgcttatagtgggccagtccttctgccagatgacaggccatctcgatgaatcctcactattgctgtagaagcaggcactatcatcatttacattttataaatgaggtaagtagagatcagaacagcaaagcatctttcaaagtctcatatcttgcagaaccagaatttggccaattctcagagaggttaccgagagttctccccctacacgaattcagggtcgctgggcacgacagcccaaacggtg

SEQ ID NO: 461501 - DNA, 388 bp, Homo Sapiens
ttttttttgggtgaagaaaggcagatttattaaagacagtatcaaagtatgttatcagggagcaacaggcagaatcagtggaagaggagctgactgcaaggaaacaaaggcttgctggagattttataggatggttcctgggctgattgataatgccaaggcagcagggagctgacctgcattcttctgtcacccgaggtgtttgatgataagtggatgcgtgcgtttgatgataagcaggaagtttgtgagttacgttcattatttgctcggcagggcatgtatgtgctgggggccaggcatgtccaacatcgcagctccatcttcccttttctttgtcaaccacgtgtacagcaaggaacatacaacatggcccggtcagacaggg

SEQ ID NO: 461502 - DNA, 406 bp, Homo Sapiens
gtttgaccagctgattgctgaacagactggtgagaaaaaagaggttgcagatctgagcatgggagacctgcttttgcacactaccgtgatctggctgaacccgccggcctcgctgggcaagtggaaaaaggaaccagagttggcagcattcgtcttcaaaactgctgtggtccttgtgtataaagatggttccaaacagaagaagaaacttgtaggatctcacaggctttccatttatgaggactgggaccccttcagatttcgacacatgatccccacggaagcgctgcaggtctcgagctatggcgagtgcagatgcagaggcaaatgccgtgtgtgaaattgtcacatgtaaaatccgagtctgaagggaggccggagagggtctttcacttgtgctgcagca

SEQ ID NO: 461503 - DNA, 485 bp, Homo Sapiens
acccgggtgaggtacagctatggttgaagccatgcctttgcaatgaggcccatttagtagcttccgtgtgaacccatctatcactttagtagagctggagagtgtcatatgctcacaaggctcttactgaactcctttgctgagatggtttgtgtagagccatcaatcacacacagctctcatccttgtgaggttattcatttgtgcacaggctttggctctgcattgacttgctcaggaagacccagagacctggatcatggcttaactttcacagtgatgaaacagaggcagtaacctgatgatggcttgactgtgagccccagtgccacctgacccacctggatgatatgccctgtggcctccttggagggtgcagccaggtggggctgtctcctctaaaagagatctgtcctcttgctgctcagcatgactttccagccagtctaaaacaaagctgcctcacccgtagctgtacctcaccc

SEQ ID NO: 461504 - DNA, 180 bp, Homo Sapiens
acgggtgagtacagctacgggtgtgtttcactgctggtaaattatacctcaagaatccggaacctccccacaggagagcaggagatggcctctcatgggcgaggcagtgtcccactgaccactgcctgggaccacccctgctctgttcccatctcactgtcatgacatgaagcagcttat

SEQ ID NO: 461505 - DNA, 492 bp, Homo Sapiens
gctcggtaccccccacctcctatcatgcaggtggagttgtttaagaaggagccccagcaacaggtacttccagtgtgtgggatgcagcgagtcatgcggtttggttggagtttctatgtgagagagaaatgtggtgggagggttagcctgagagtcattttgagcaggcccagaccacatagctgactttcaccttcatacgtggatgaagactaaagcagacaaggagtttacaccttacgaagttggcggtttgtgggatgattgaaaagggagcaaggagactggtggcaattagacgtgtccagattcaaaccaaagggctggaaaagagggtggaaccagacacatccaggaactgatgaagacttggaaacatgaggtaatggacatagagaggggagactctagacctaggaatacatgaggtaatgggaactacgacgacggagagttagacgggacacgtcgagtaagcactgataggagcgg

SEQ ID NO: 461506 - DNA, 505 bp, Homo Sapiens
cccccctcctatcatgcacttcccagcacagaggttgagctgcagtggtcatggagaggcgctgtggagctgaatggagtttgaggctgtctgcccgttagttgtacctattccaccaggtgttttggtgttggaagacttgagatcaagttctcagttggcagtggtttcaaagccctgctgagaagactgactgcctttttgggtacctctattttgaagtggctgtgacatttgactgtaatgtttagctcgaatgtgttttgtgcttgatgagctaatagcatgccttcctctaaagatagtatttcagtggtggcagaagaggcttcctctttggtcttgggggacggggacagaagtcagcttctacccctcgatagaaacttacctggtgccccagaattagtgcagaatacccaaataacaccaagataaaaaaaggtatcccaccgaattgagttgaggaggggcatcttaattttgtttgcatgatagagggggg

SEQ ID NO: 461507 - DNA, 434 bp, Homo Sapiens
cccccctcctatcatgcagatttaaagcacagctatgctcttctaactgtagaccagcctgccttctcctctcatccgaccatgacagcagcttgtttgagtggcgttggtttctcaggaccagacttgcatgacttttcagttgagatctctcccgacaactgagtttgacctctggttctctgagttcagaattcgaagtttgaatctgattgttttctcaccagcaatggattggcaaacgttagatcgggtgtccagccctggtccaataagctgtgtcctggagaaccatcacagagtataaacatggttacctaaccaacctcttcagcagaggctgttggtgggtaggttttaaagaaaagttacccaaaaacatggtggctacagccattttacttgttcagtacctgtgcatgataggagggggg

SEQ ID NO: 461508 - DNA, 104 bp, Homo Sapiens
ccacctcagcctcccagtgtgagccaccgcacccagcctggattgttgaattcaatgcttgggtcacctccagattcattttcacagtctcctatttttggtac

SEQ ID NO: 461509 - DNA, 551 bp, Homo Sapiens
cccctcctatcatgcaccagaatttcatcacttccagaaggaaatgcagatgttcagcataaaccagacttgtttgtcgcaaacagtccaggcatagcgagcctactcttatcagttagggaaagatttataacagtgcagggaactgtttcccagctaagttcccagacaccagccacaggctgaccttacaagcaggccttttctaaggataacaattccaggcctgctatgttaagtcttcgtttgaacagctcttgtttctctcccattcctgtctttacctttctcttcaaatatcttccaggatttttttccctatatctcagacctgactcagtcatgcctctgctcagagaccatcgatggctttcagcctgggctgagcattgacctgggaacccaaaaagtggatttgtggcccagccctatcactaactcactatatgacctcaggctaatgacattccttgcttaaccctcagtgtccccatctctgaaatggacaaggatagtggtatcagcgaagggctttgcatgatagagggggg

SEQ ID NO: 461510 - DNA, 319 bp, Homo Sapiens
cctgtttaaatcctccctgtgatcaccttggataaagtcttcattcttcaggcctgacgaacgaggaactccaaaatctgaccctcatctttcattttctccatttctgataccttctatatgtcttccacacatggtttacacagaaaactacttggatggtggtcctcaggtattttaccccctcaatgtttgctcatgttagtctctctgcttggaatctctcccttcctcctctcccagctacacaccaagttaatccctatttgtatttcagggttacactcagacatccagacactgcatgataggagggggg

SEQ ID NO: 461511 - DNA, 490 bp, Homo Sapiens
cccccctcctatcatgcaacctgatccatcacaagcagatccagcttttgtggaacttgaacattagtaaaggggaccctcctaagaaaaaaatctaagaataaaattataaagatataaagttagataggggctttggaaggtgcctgtgcaacgtgaagtgagggtcccccaagcttcggctgtagtagcttcataggaaatctaccacattcagatttgtacaatagccaaactgaatcctttctagctctcccatcatgccatgttttctcctccctctacggtttttgtactaaacgtgttccctttgtctagaacactcttttctcaacttatctacttggcagtatttattcatccttcgagctctaatccaaaagcaacctcactctatagaggccttaccccagagttccccggaagacacgaggtgggtagaaagtcttttcactatgctccaccagaactttgtgcatgataggggggg

SEQ ID NO: 461512 - DNA, 210 bp, Homo Sapiens
cccccctcctatcatgcatcttatctactggcaagaaatattatactcttgaaaacacacacagttctaagagacagggttgttttccttaagttttgtaaaacaaacacataccctgatacttacaatatttatacaaaactgtattagcacctaaaatgtcctgccaaataataatagcttggcttgccggacgcgatgggctcacac

SEQ ID NO: 461513 - DNA, 435 bp, Homo Sapiens
agtggagagagaaggccagggttgtctacataactttctgggtttggatgctcatgcttggaattgggaagggagttgtgttttagggaattgccctggcagccttgcctccaagccaccattctgatgggcttgggaagggaaagtgagaactgggggaaggaaaaaacccttgggtagtaagatgcacacgaactcctcccccagcccagttgagagctgctggcctgaaattcctctgagagatttcttccatttaagaactggcatctcagttttctagggtaggtgttctcttcctgctcctagaggcagttaatttaaatgtagtttcatctcattgacgttcatattgggtctcatttcttccccctttgcaagggttggaatgggtctcattctttctagctaatgttccctcgttctctctccact

SEQ ID NO: 461514 - DNA, 295 bp, Homo Sapiens
catttccctgtgatgagcccaatgaagtccagtgttaccaggatgcttatgagaaagccaagggtcagtccttgtctcctgggctactggaaccatctcagatgcatgcctggaggctgtggggctcctcagcccctgccatgcccagggggtcccagaccgctgccagaggcagagggactggggcttggacagccaggaaagtccttccacacactgtagctgcagttgaaattccacagccccatttgagccccagagcttgtcctggtcactctcaccttctctctccact

SEQ ID NO: 461515 - DNA, 508 bp, Homo Sapiens
cacgcggcggggggaggctgagagagatgtgtgtgtgcagtcttcttgggtgaggctaggttgcaagctctgggctgttcaaaggttgccagaatctctccattggagggatagaagcagtgtccctattctgacttgtcagagagtgagcttgtgaccccttgaaaggtggtgggtatcccttctcatcccctcggacctccacagttgatgcgtatgtctcccaggggaattaggtcacttaactcaagagcaatgtttgcccaggagcaagcaatgctggggagctttcctctagattggaaatggttcttgttgccctaccaggaaaagaattaagaaaacaaccctaaccattgtctcagtactttgtactgattgaagaaaaccacctctctgacaagcgctaatagcatctactacatttaatgtcatagattcttatttagcaagtgagctggattcgttgcaaacattcacaacttccattgcagagagggcggagcag

SEQ ID NO: 461516 - DNA, 521 bp, Homo Sapiens
ttgtcatgtgcagcagttgcctccctccagttgtcttccccatgtcaggcaattgatagctagaggtaccttggtgatcttgtctcgtttctcgcagaaaatggtcatcctccataattggtaatggtgatatcctgaaatcaagttcacaggtgaacagatctaatgtccattttattgttcactaaagtttagggtcagttgagagtgggtgataaatatatgactcttcattcattatctctttggtatttatatttttgacttattttttcagacctccattggtccctattcaggaactgctaaatttaaacagccccgtcctgttttgggaccagccacctagagttctcaagtgctaaaggcaacgacctccttcccatcctcactcaccagtaattccacagggccaggctcagtgagatctgtcaaggcaagaggggtgcttcagctgatcccatactatcactcaattctggttttctgactctcttatttgttttcaatccaacctctac

SEQ ID NO: 461517 - DNA, 523 bp, Homo Sapiens
cctagctggttacatttttttgatgggggttacttttatatatttatgtatttatgcccctcattctaaaaaaggattttaaagccacgatgagctgtcattccaggagcaaataatttttacttagatctgactcaagttcactttccaaatgcaaaaaagggacagtcagattaaactgtggacagcagagtagttgttcattcatctcaatgcagcagtgtttgggcctggcagtgtttttgcttttggtttgaggtcttgacctaaaactttaagtcaaggcaagttgggcttaatagtattggtattgacactctgacagatcttttaatctgaaagaattttaaagatgcatgaaagtaatccccagtgatgattacatcttcgagtggcagagatcagatttttatttaaataccaatgcagtttatcacttttttccacagtgcagggggccagggagggtctggatttgggagggtctggatttaatagtgaacttctgaacttgacttactat

SEQ ID NO: 461518 - DNA, 151 bp, Homo Sapiens
ctccatcatgcccttgcatatggcgtgttgacaagttgggaggactgccctaggcacggctggctgatggactctgggatgaggcactgccttctctcacccagccgcagacacacagctgtcctgggccttgcagagaggggcggagcag

SEQ ID NO: 461519 - DNA, 527 bp, Homo Sapiens
ctcggtacccatccccctttccatcccagagaggagtcctggggcccatctgccgagatcagagtaggatttggaacccaagcaccagggaaccaatgttaggctctggttttagatcctggcgggcagcactgtctagaaccacagcaggaggtgatctagattagactaggccatggtcttgggctggaatctaaatttatagtgggttggatttgttgctcatctaaaatggtcattctggaaagtaaaaattttagactttgtaagcattcagtctctgtcatgagtagtacttaactctgccattgcaccttgaaagcagtcatagacagtgcataagcgaatgagcatggctgtgttccaatcaaacttgaattataaaaacagacaacaggccatggaccatagtttgccaacctctgatctagaaccttattcctcctgaggggtgtgtagattttaaacctaattagacagtgatctaagcaaacaatgttgacatgtcaggatggaaagggggatct

SEQ ID NO: 461520 - DNA, 391 bp, Homo Sapiens
ccctttccatccatttatctttctgtccatctttccatcctcctctctttcttcctgttcatctgtctttctgtctgttcatccatctcgctatccatctagctatcgttgtgtttattcatccattcattcatctatctttcacctgtctatcatctgcaatgttgccaacatctacacatttatggttgtgcacaggatatcttccatgccaggtacctttggccctcctgttgcaaagagtcaactcctattcatctatggctgctaaaagtaatgtttcaatttaaggtaactgagagttgtctgtaaacataaaggggaagttatggacttctgtgtgccttaggccagtgctgttttgggatggaaagggggatctgggtaccga

SEQ ID NO: 461521 - DNA, 404 bp, Homo Sapiens
ccagcggacctgcaatctgccagctgtcagagagacggagtgtaaccgtgaacccagatcaccagaattaagtgcccgaacttttaaatattaaaagctttattggtctctaccaggatggagccctctctcttgcacaaggtgactctcagaggtagtcgcacggagtgggcaacaggttgtctgcaacctccccaagctctagcggtttaggtatctgtgtctcccctccctagaactatcactgaatgcctggaatggacaaaggaaaccgggaaggtctcccaggacccaaacccggcataacctgccttttccaccctgagtctgccccagcctactggggtctcacagtgccaagaccaggggtcctacttggggagaattctcccctctgctaatgt

SEQ ID NO: 461522 - DNA, 466 bp, Homo Sapiens
aggcatcctaacagcatctcacttcaatccacggggttgatagaaggtgcagtcaaagactgtcccctcctctgcaagcttttatggttctctctcctctctccctagccacgtcctgttctggttatcaacacacttactcacctcctggccttctccttctatggtctctcatccctcttccctcacaaaaacagaagcaaagagccagagccttcagtttggaggaactgaaaacattctcttctgctttctcatttggtagatgaggaaactgaagtggaggaatagtgaagagttggtccaatgtcatagccccgtaatcaatgggacaaaaattttcttgctgatgggtcaagatggcatcgtgaagtggttgttcaccgtaaactgtaatacaatcctgtttatggatttgtttgcatatttttccctccatagggaaacctttcttccatggctcagg

SEQ ID NO: 461523 - DNA, 453 bp, Homo Sapiens
  misc_feature (28)..(28): n is a, c, g, or t
  misc_feature (72)..(72): n is a, c, g, or t
aagaccagcagatttcccaccagatgcnggcctggatcccaaccatctccttggatattgtccatagaaatngttgaacaccgttaaaacccaggaaatagagacacattcaaagaacacgaggaacagcaggctccatgccactggcagagtagtagtcaaagagtttgaagacataaatacccccccctgagtgatgttagagagaccgatcaggtaggagatgatgcagacagcagcaatgaagagctctctgcggttgcggaggagcctggggtactcatccaccagggctgtgatgaagccctccacagtgcagaactggctgtcaatgcccagcatcaacagcatggagaagaagaggatggcccagagtggggagataggcagctgggtcaccgcctctgggtatgccaggaacgccagccccgggctgaggccgccacatcagcc

SEQ ID NO: 461524 - DNA, 532 bp, Homo Sapiens
ccacgcagaaaaaaaatggtggtggttcttccttatttagtcttacttcagtggaatctgtgcattcctatgtaggccatatttatccttattctcagtgtctgtattttgggcgaccttgaaggtttgacaatccccctttggccttttaaagtagagggcagagtgttgtgcacagtctggacccaactgtgttttatcttggcctttttggctgtggatctgttgtcccgtgcagggattttttggtctcttgttcaggtctttttatgagggcgggaattgattctgtaatgatgtgaaaacataagtattttgcaagccaacaattttgcacactgcagagcctactgctcttcgttcttctaggctaaacttctccgatgattgacttatggatcaaagccccagacccattgcttgctggaagatgaagctggtggagagtaaagtggaattggaataagaaaagacttactgagagaaagggaccgttctccgtgattttagaaagctggttaggatgctctcg

SEQ ID NO: 461525 - DNA, 328 bp, Homo Sapiens
accgcatccctaacccgggaggcggaggttgcagtgagatcgtacccctgtactcgggcctgcatgaccagtgtgagactctgtctctacctaccaaaccaaacatgtaatttaataccagccctagagctataatgcccacttgggagaaaaacataaggcaatctctatctacccattacttttgtacaccagaaccccgaagtaaagattctctgtaattctattcctttattttcctgccctcatacatactaaaaccctgcccaatcttctccttatcttcccattagcattctctctctggttagggatgcgtcggatcctc

SEQ ID NO: 461526 - DNA, 274 bp, Homo Sapiens
ggaggggatggcggtcctttgataagacccataggcaaacttcgagcccatcagcaggtcaaccctatgctgggaaagtgaggatttgggatttctgtgctataaacctgattctaaatgtaggacccaagtttctggactacttcagaatacctaaatgaatcatggagacactctttatgattttttacaacaccagatatgcaggtgaattgtggaaaatgtcatgtagctgacactcaagtaatagggattcctcattatggctgttagc

SEQ ID NO: 461527 - DNA, 401 bp, Homo Sapiens
ctgtcattcccttgcttgccagagctgtagccttggaaagatgcatgaattggttaattttacgaggaagctctctggtgatatttggtcgtcattaaaaacatttaactttggtggaaggtcctgggtgtaagatgcttgagcttttcctggtttctgtcctccaagtttgtttttaaggcaggagccaaagtgcagagcttgtgacattacatacgtgtgcgacgcaggagcgaaagtgtggagcttgtgacactacatacgtgtgcgaggcaggggccaaagtgtggagcttgtgacactacatatgtgtgtgaggcaggagccaaagtgtggagcttgtgacattacatacatgtgcgaggcaggagccaaagtgtggagcttgttacattacatac

SEQ ID NO: 461528 - DNA, 313 bp, Homo Sapiens
acaccacacatccttcacaattcctatccatgacagctctggtacgagccggctctggagccaggtgaccacccctgtgcctgaaggtgggagagcttcctcccaaagaattgcatgtgttaattcacataattgtgtcactgcagacactcactgaaaggttagctgtgatactgccactgccaccaccatcatatcatgatttcatcaccatcaccgccgctgccacctcatcaccaccatcactgttaccacccagcaccaccaccacgtgtgaactttctactctgcagcaggtgtgcggctcaagatt

SEQ ID NO: 461529 - DNA, 500 bp, Homo Sapiens
actctcgccgccgcacactgaggttcagacaggttggtctccttgctttcagtgactcagctaggacggggcagactgagtatttgaccctgtgtggctccaaaatctgtgctccccggcttctgccctgctttccctggacagccaaagcgctccgtgcatgtttggtgctgaggtattagggggtttaagtcacagggtgtccagcactcaggagctgaggccacccgcaggcgtcttggttggcagctgagccctctgaggtaacaggaaatagaggcagcgggactcaggctggggttgaggtgttcggggtagcaggagaggaggagaagctgctgaagtggtggcagccacactcagtgaagtaagaggcgcccctgcccagcggcctgaaagccacttctcctcagccagcaggaatcgcattccatagcacaggaagcctctgttcagaggaggtccagtcaggagtgaaggctgtggagtcaagaccgtga

SEQ ID NO: 461530 - DNA, 183 bp, Homo Sapiens
caaggacggctcattctccgggcacgtggtacccactggagttgcacccatgtgcaccccgggaagttgctgcctgcctttcgcaggcatctggctggcctctcacacttctgagctgttccccctaaacctaagcgcgtaggtcaggcttcggccgcagctgccttctcatgattctcagtg

SEQ ID NO: 461531 - DNA, 447 bp, Homo Sapiens
cacatgctgttttaattatgaagaaatctggaaaccatattccagattgtgtcggttttcagaaagatcacctacaaggcaatcaaagctgataaattttgaaagatgatgactgaagcaagggatgtagaaagaaaagaaattttagcctctggatcaaatgaggtacccattgctaatactctcaggcccacaaaactagctggaaacatatctttctgtttctttaaccctgatcaaaactgcagggcacagctgcttcacatcctagtaatctttgtggactaactgcattttgttggcacagtatatttttaaaggttatatttattgttacgtaagagtctggggattttagttctcattttactttttcttataggtcacacttaaatactataattttgaatcaattataaggaaaacaaacataagcttagatccact

SEQ ID NO: 461532 - DNA, 240 bp, Homo Sapiens
gtgcccccagctcaaaaaaaccagcattcaacttgtctgcctttggaacactttccccttcacttgggaattcttcaatccttaaaaccagtcagcttggagattctcctttttatcctggaaaaacaacatacggtggggcagcagctgctgtaagacagtctaaactacgaaatacaccttatcaggcaccagttagaagacaaatgaaagctaagcaactcagcgcacaatcttacg

SEQ ID NO: 461533 - DNA, 312 bp, Homo Sapiens
ctcgagttacagtgtggtgcctgtggtgagcattagggaaacagacaaggaccaggggttagcaccagcatcgctgatcgctgctacttgggtaggaataaagcctgccccatatctaagtataatttcagatattttaaaaagaacacaagaatagctgcaaccaaccaaacattccagcccatttctcttcagaaagacttaaaactagacagacatctttctcactctataaaaggttacttcaaacatttaattgttcagtaaaatgccacctgctttgcctttgaatcaatgaagctctggtgttat

SEQ ID NO: 461534 - DNA, 312 bp, Homo Sapiens
cttactttcatgcaggttgaaatattttggggggttggtttttgttgtgtacagttaactttgaaatgcatcaaaaacaggttgtgataaagcacatgtggtaatcatgttaatggtagaggctagtagtgggtatataggtatttaccgtaaaattctttcggctttgctgtgcattggaaagtttcataaaaaatcatgggaaatggtctaggcgccgtggctcactggtgaatattgtcaatttcatgtggttcccctcaatttatgttttatttggccaaaaagatccttccaggttcccaatctgta

SEQ ID NO: 461535 - DNA, 127 bp, Homo Sapiens
tgaggaagggctggtgacatgaagaggggtggtgtgacctgaggatgctgaggaagggctggtgacaggaagaggggtggtgtcacctgtggatactgaggaagcgtcggtgacatgaagaggggtg

SEQ ID NO: 461536 - DNA, 317 bp, Homo Sapiens
cacaatcataccattgacaaaaatgttcccattgcaatggtaaacacaaagatcagaaataaccttatcatctattaataatacccttcagtgatttgtaggaaagtctagggtctctttgggttacatctacattatattagatgttaaaggctgctgcataaaaacacttacataccataggtggccactatataatcttgagatcatggtaccttagaccataaaaagctgaataaacacttatgatgtggatttgattcactaataaattctcactctgatgttcccactcccagcatcaccatgggtaccga

SEQ ID NO: 461537 - DNA, 259 bp, Homo Sapiens
ccaatttatctaatcttcctggggtgataagcccccaaccccactcctccaatggtgatccatggtaggggtgcaggaagggcaaggaggtcggtggcattaggtctggactctgaagccacagacaggatgggaacccacacctgggggcagaggattctccccagagaacaataatggcccgctcatgtttatcaagcgcttactgggaaaaaagccctactccacctaccatattcatttaatcctcaccagccgg

SEQ ID NO: 461538 - DNA, 316 bp, Homo Sapiens
ctctgaggcctaaaggttatattgcttgctttcaaagagctgacagtttaatcagacaaaaaggggatgattgaaatggacaaggaacaatcagggccataacaggcctaagggcacagggagggctcgattctgcatgcagggtgaagaccactgcaagtcagatctccaagatttgccaggaggacgtagggaagggcatcctagggcaaggacaggcatctaaggggccccgccgatagttcagagaagagcgctgcccgcacatactcacggcgcgtgtcggccccggcgctctcccgcctcaccggcgcaa

SEQ ID NO: 461539 - DNA, 529 bp, Homo Sapiens
  misc_feature (197)..(222): n is a, c, g, or t
acccacagtaggatgcagatttgcctcccaaggttgctgcaggtgtcaagcaatgggtccccagagataatgtggttgtttaaaaacaaatgtggcagtggggatgtcccagtgacgtccaaggtgacaagtgtgacgacagacacaggaaggggagggggacagaaggaaagggaaggtagagacagaaacagagnnnnnnnnnnnnnnnnnnnnnnnnnnttaggtcaactatagaaaacacagaatcaaaggttaattcaacttagtaaattaaattgacaaaggttagagagggttcagtgcagtatcaataccataaggccagttcagaagctcagcaatgccagaagcagcacagcagggttaatttgggggctagggatcagcgagcaaatgaaattaaagtgagagaacagaagcctccacgctaaaatacaagagtttgattaggagagtgttacctttcactaaggtgaagcctcttagatacagccagcaagtgtattgtcttctagtgtctagcgtg

SEQ ID NO: 461540 - DNA, 386 bp, Homo Sapiens
ttagtatgtgttaaaggctttttcacgtacaatattttaaatttatgatgggtttattaggacacaacctgatagtcaaggagcatctgtacttcttacaggtaagaccagataaagatatgttttttacactctttctgcaatgctctttactactggagcgtttgtctctataaaggatatagagctagtccatggtcatcagcaacttgtgatatcaaaagtgaccaaggtcattagtgagtatattaaagattcccaaagaaagcaatttcactctttgatacaatgggtaaaattgaaggagtttatacatatttgcttctgtatagtattcctagttccagaaaggattttaaagcagctatttttcctttttcctaatc

SEQ ID NO: 461541 - DNA, 534 bp, Homo Sapiens
  misc_feature (92)..(112): n is a, c, g, or t
gaaggatgaggccacacatttcttgatgaccctcacatagttatttcaagaagaggcaaaatctgaaataaattcttaaataaattcttaannnnnnnnnnnnnnnnnnnnnatgtcaatggataacataatgctgattgtactagactgtaaattcaataggaataattttctttaaatttgggatgcatgtacacaaatatacaaacacaagtctactgctggctgcttaagatatattaatgagaaaagcactaagccacaaaagtacgcattccaggatcaatggaacacacgtttagagtgcattaggacactgcgatagaatataggaagaaatgttaaaaggcagtcatttgcagaacacagtaacaagaacatgtgaaaaacatggttatgcctttgcctactgttaactcctaaggatgcttgagtaaggaagccacaactaactagccaatgtaagagaaatcaacatgcatattttgctaataattcaaagttcctgaatgatacttgggtatttgttctcct

SEQ ID NO: 461542 - DNA, 406 bp, Homo Sapiens
agcatcagtgtaatgtctgtgtagttgcatacccctctggagccctcagtgtaacatctgtgtagatgtgtccccctgctgtagccctcagtgtaatattcatgcacatgcatccccgtcttggagccctcagtgtaacatctgtgcagacacattcccctcctatagtcctcagtgtaacaactctgcagatgtgtcctttcctggagccctcagtgtgacatctctgcagatgtgtccccttctggagccctcagtgtaacaactctgcagatagtgtcctttcctggggctctcagtgtaacatcgctgcagatgtggccccttctggagccctcagtgtaccatctctgcagatgtggcccctcctggagccctcagtgtaacatctgtgtagatgtgtccc

SEQ ID NO: 461543 - DNA, 270 bp, Homo Sapiens
cactttggccaggttccaaaaggtggtgtgcggtcactgatctcttgaacgacctcatgatctttaggagagggctttgctggaaaacactgcagaggcgtatttacagaagccagcacaacagagctggaaccgacttcactcacatctgtgcggggtgctgtggagattgtctaaacagagacctctcaccctgcatttcagcttgcctgtcacgtgcttcaacttcagcagcacctactgctgcagattcctctgaagaccttccgt

SEQ ID NO: 461544 - DNA, 331 bp, Homo Sapiens
aaggattctgtggtcaccgagttttatgctgtattgattaactttccatttcccttggttcacttttagtttctctcttagaattatgtttctaccctttgcattctcaccgccaatcatttattgctgcacgtgtctttccccctccatatactgtgctccttaattcactaagggactgtactaacatagcctaaatacccaccttccagccacccttcaggagggtattagctgtatttgtgcacagcgagagtgcctgtcaaggcagagggcttcctcaccctatacttcacctccgaatctctttgcactctccacaagtcctgcg

SEQ ID NO: 461545 - DNA, 403 bp, Homo Sapiens
cgaaggatctgtgggcttgtgacctctggtcttctttggcttcctaagattcaccactgggttccaccactagagtctcggtgtttgcaccctagctttggaaagggaattctaatagccaagataccctggaatcagactgtagccgcatgaacctcatggcttttgggggggacttggcagcttctctcttgtcaggattcagagttgggtcactgctttgagcacgtgttgcgtatttgtatctgcatgtttaggtatttgcacgtgtacgtaccagttaaagaagggatttggatactggagggtctgtatcactggctagtgattccaggcaggccttgtgggcaggtgtccagagtcatcccaggggacacctaggaccttctgctcttctttgcca

SEQ ID NO: 461546 - DNA, 452 bp, Homo Sapiens
caaggatcctgtgggctgaagatcattttgaacaaagtgacagagagagagtgggttgtaaggtgaagtggcacaggttaagtgaagggctaggaagaaagttcaagctgctggaggaaagacgacatgttatatctagattgtcggggaagtgaaagggaagtagtttagaggaagtactgggaagtccaagagccctgggaaccctgatgactcactggtgacatgaccatgcaataaacggggtgatataagaggtctggccaggacagtcgctgccgtgggtctttggtgagcagtccctgcaggaagttctacagagagaaaaaatattccatcagtcattctttcccttcccttaagtctctctctatcagcagaactagcataccaagaatcccacatccatcctcacagcagatgagctgctctgatcatgcccacagatcctt

SEQ ID NO: 461547 - DNA, 192 bp, Homo Sapiens
tcggaggttgagaatggctgaagaccagatggggactggaagttgagggtaggtactaagcttgagagaagatagacatgggtaaggaacagagtgtgcggggcggcagcccacagagctataacagcaagcagttctcagcccaagccagccttctgcctctctttcaattcacctcatttgctacctctg

SEQ ID NO: 461548 - DNA, 564 bp, Homo Sapiens
aaggatactgtgggcaccaaatataaagtgagtgtcttatgctctctaaggacactttgacaagcaacacaaaactgagagttaaacgccttggcagaaaactagccaaagcttaaggcagcggcttcctggcattcaatctgacagagagaggctggagcaattgagagaggaccagttcttcaaagggttccattttaattaccagctggttggagaatgttacttccagaaccctccctgctacctgggttcacttccaaaatctaatggagttatattggccaaatgaaagactcccaaatcacacagtgacaacttccctgcccaatctcaataagctttgtcttcgttcaagtgccagctcggctcgagggattttaggctctgaagagaattagctccctcttgctctcatattgcattaagaaactggcagccaatcagaaagacaaaacaaaatcaaaagaatgtattctcatgcaagggccccaccctgtgacttccattgtttcccagacctgtggggatttcaaattctcctttgcccacagatcctccgta

SEQ ID NO: 461549 - DNA, 571 bp, Homo Sapiens
cgcaaggactctgtgggctgcgaaaatgagacccttcctcttcccacctccctaacttcccagagcaaacgccagtcctcccagggtacaatgggcagctcaggatccagtggcacatgtgtatttttgcctatgttcccctgtccccatcccccaatccagtctcagtcacactgccatgatacatcacaccatcatccttcatctcaggccaaagggctcagcgccccagacgacagggactgcttccctgaagcagggatgtggttctcccatcatttcaggaacagtgacattgatagggatgcctttctttggtgcaggttcttctgaacctcaggccaagaaagagctccattccctcagatgctgtggcctctctcactgtcttgggggtctccagtttgcacaccactggtagctcactgtagcctacaatttcctcatgctccaggatttgcttcctaaccttaggcctggacttacccatcatgccggtgctgtggggctcccttaaagtttgaatgaactccaagaggccctcaccatatgactgtgcccacagatcctt

SEQ ID NO: 461550 - DNA, 155 bp, Homo Sapiens
caagccctgaatgtggcattcaagctaattattaaaagagataaattgttttttgttgataactaaaaacatttagaggctatttctaaaatttataggtctagtcatattcacctattaacttagtggagtaaacgttatatggtccgcccacg

SEQ ID NO: 461551 - DNA, 401 bp, Homo Sapiens
acggaggttcggggccagaatattctattttgcacagggatgtctgcctgaaatatctatttttttacgtcctgttgactgtactacatacatcaaaggcttaatgtttatgtcctttgccagagtatcaagaaggtccttacataaatgttgacaagagtgcacgaataagtgaaaaattttaattgtaggagtaatttatagtcacttttagaagaagcatgttatcctgaatgtaacttcactaccttaccaattcattccattatttgtgatgagccatagtcctttgaatccttcatttaaaaatcattgttttgtacctggcttctctttaccttatgtataagttcttttattccatacttctctttaacaacaaagcccacaggagtccttcg

SEQ ID NO: 461552 - DNA, 131 bp, Homo Sapiens
tctgtgggcaaatttatttttgattttgaagaatctcttatcagggagctttaaaaaacaggattttagttctaagtttttttctcaaatgcttgagaccatttctttttgaagtaatcctttagaaagag

SEQ ID NO: 461553 - DNA, 376 bp, Homo Sapiens
cgtccggaaggatctgtgggcccacactggcaggctaaacatggctcctggcccagctctcaatcattttgaatcccctggaggcatttgctgcaggactgagcttctggtcactcccagttaagggtgctgtgcatttctggggtcccagttatcagcagcagtgattccactctgtctacctgccccttccttctctgctgatgagggttcttcattcactgtctccccatttctcgcttggggctggcactgcagaaatgcaatggagatggcgcagtcagggcccccgtgcccaagaacatccaaactggtggcagggacagtgtggggcaattgtcagacagtgagataacacacaccacaaacccaatca

SEQ ID NO: 461554 - DNA, 422 bp, Homo Sapiens
  misc_feature (92)..(92): n is a, c, g, or t
cggaggatcgtgggcagctcatactctattgcctaaatatgattgttagggctctgcccttcctatgcagtcttcatggctaccttcatccnaaccccatggattcagttatccccgtatgctctctttctatctctggcctagatctctattttgagttctagatcattcagttgtctcttggacacctcaagtgtctcaaattcaactggtctgcaaataaattaatcatcgtcaccccaccccacccctaaacctgtttttcctcctgtgttctgcactttgatgaatagaagtaccatttaatcagacacctacatcataaccctgggctgtcctgctccaatccctctcccagtgtctccaaactttcctagtgataggatcctgttgtttctgcctctatgatctctctgaactct

SEQ ID NO: 461555 - DNA, 483 bp, Homo Sapiens
  misc_feature (336)..(411): n is a, c, g, or t
aaggatctgtgggcaggactttgttgactgccatatctactctgccttttcagtgcctaatacgtagtaatttatcagtagtatttgaaattactgtcatatttgaaattcagtaaatatttgacatttttatttatctctagaagtttctctaaaattgtactcagaagaattctgcaaggcttggaggatatataagttagtcatatggcctgattttcccatttttgcagatctcgtggacaagtgtttatcaaactgaaggttgcagcttgttagtgggttcagaaatcagtttctggctagcaactagaagttttgtatgttaacagtacnnnnnnnnnnnnnnnnnnnnnnnnnnnnnnnnnnnnnnnnnnnnnnnnnnnnnnnnnnnnnnnnnnnnnnnnnnnnatcatcaccagatcatgtatacatatgtctattaaaccataaagttttctgtgcccacagatacttccggcc

SEQ ID NO: 461556 - DNA, 287 bp, Homo Sapiens
tcttatggggaatcaagaagatagacaaacaagactctagctagcccaaactcagaaatcagacaggatgccaggaatcacgaaagcatgagccacgaacatggtacaaacataaaattctgggactagagactgattctataaagtctttgaattatttcttataagatccaaggtgattgtgattctactctatatccagcattacctagaatccaactttacacaggctttgggctcttccagttcctcttctgccctttaacccatggcgccacagagtcctt

SEQ ID NO: 461557 - DNA, 208 bp, Homo Sapiens
caaggatctgtgggctgagttaatcagggagaatgggaggagggtgcagaatatcacagtgggctagtgttgggtatctagtggagttcatgcatatgttcccaggtgaaaaggtctggataaccagtgctgagaatatcaactgctagcctgaggctattttcgccatgatagttcatctgtactacatgccccagatacttccggt

SEQ ID NO: 461558 - DNA, 437 bp, Homo Sapiens
cgaaggactctgtgggcattaagcagacaagtaacaagaaagaaattaaaaaaatgaaaaacacaagactgaaatctgacaattctatttcaactttctgaattaatttccaataaatttagtggcaccacaggagtgttcaacaaaagcatgctttctgggacaaagcattgaccctttatagaatgttaatctgccatatcacttgctagtccaccccagcatgtacttttgctcctatctaccatttaaagaatacatttattaatgtagtcttatcactggatgttttagcttgtaattcatgctaaccaagatagtctaagtaacatttattttaattttcatttctttgtaaaactttgtagatgtggcatatctcatgattaggaactacaaataaaggatcccctagtctaatcgcccacagacactcc

SEQ ID NO: 461559 - DNA, 335 bp, Homo Sapiens
ggtaaggattctgtgggcacttagaggaaaacatggggacatcaggtatgcaggagatcaggcaaaaaacagtaaagtcagcttaggaaagactcgtacctctcacccccactggctcaacctcctccaaagtgtagagtttatagcttttccttgggaagcttctgtgtatacagtgctcaacagaagagaggaacaggatttaggttactatcttccataccctaaaagtgaacattgtaatattgccaatacagtagcagaaggaaagcacttctcaggaagtaaaaataatctactcgcgcccacagatccttgccggggatcctcgagag

SEQ ID NO: 461560 - DNA, 204 bp, Homo Sapiens
cgaaggattctgtgggctttgaaggctgtcttagctgggcccgtgctccccttcacaggcagtttagtggagaacctgggctggatgttgacagagactgagatgttagctcagctacccactagctaaatcaggagcgtttgctgcttaactctctgagccttggtttcttcacctgttaaagagatgatgatacatccttcc

SEQ ID NO: 461561 - DNA, 471 bp, Homo Sapiens
caaggatctgtgggccgtatggtgtcctgccatctgaatgaataattcagcgaacgtggccagtttcaccttccatgtctgctctggcaacgtggagatgcttgggcagggaatttaactgggtttttctgacttctcgtggagtgccaaagattgagctgagggaaatcaggtatgccagaatgctatgaaagctcatatccactcaatcctgcaggattcagagacatgaagtagcagcactgtatgctagggaggctacttatctgctgccacattataggggagctgaggataacaggccgggtgggcagattatccatttatttttgtctttcgaaagactagcatagggggcatcatttagtgttccatttcctgtgtcctccggagagcacactggtacatacccccggccaggctggggggtcatcccagggggtttctgttgtgagaaagatccttccggtc

SEQ ID NO: 461562 - DNA, 156 bp, Homo Sapiens
agcactgtttaaggcatgtactcagaccccatcatggccagcaagcctaaggttcaaagaagatactaacctctattattcccttgtgcacattgctgttcacctatcataggagcagaacactacctgagctaacttatgcccactgaattcctt

SEQ ID NO: 461563 - DNA, 426 bp, Homo Sapiens
gaaaagtagaggaaggcttcacgtatgctagagctgggtctaacatggcatgtataaatggctacacccactgtcttcttccctggtatgaaaaaaataaattgaactcacattttatgggtcaaagcaagctacatgactatacttaatctgaaaagaggcctggaagtacaaccctaccatgtgcctgggaaaagatgctctggaatattggtgaacagccctaatgatgaccatacagcctctccattttctttcctccattactccagtataagtaaattatgtattttttcaaaattgggtattcagtgtttgttattatagctttgcatttatgtccagtgccaagccaagcaatgcattatgctttcacttccttttttgaataatattttattagcctacaggatccttgccggggat

SEQ ID NO: 461564 - DNA, 346 bp, Homo Sapiens
atcctttgtctcagagccatcatgaactatcaggtaagggggaagcactagctataggtgctctacttcttctgccttatctgcaaaaccaggagagctaggagcaggcatcagcttataaaagacaggtgtgctggatgggcctacggtcaaggagattggctgggctcccccttccccaccatcaaggtcccctccttctgtcctttcccttgcagtacggattcaacctggtcatgtcccaccctccatgctgtcaatgagattgcatcttagcctcaattacaagaatccaaggtgagttccttccctcccctttcctccccactctgtccagggctcaatg

SEQ ID NO: 461565 - DNA, 522 bp, Homo Sapiens
caccaccacgtttgccaggcagccagcagggaccatcatacaagaaagccaggccaaaaacaagcgcacccggtggaatcacaccatcaccggcaggttagagctttcatggctatgggccggcgtgtagatgctgaggtacaggcagtcctcagacatggagtcggaagggaaggtcatgttgaactggctaagaaactctgactccactgcggtgaggtcctgtagacacatggccggatgggtggttccatccctcacaccactccaagattcagggggctacagggggtgcaaatcgcagcggacctagaggtggcttggcaaatggaattcccaggaaggtttggaccccggcattggcgccctttcacatggacaagactccccagcacctgccccgtgtgtgtggtccggatgggactggctgagtcctggccctggccccggacaagaagcagcagaagcccacaggccaccgcgctcagccgcgcacgaagtctgtgcagccgcatggtcggc

SEQ ID NO: 461566 - DNA, 463 bp, Homo Sapiens
  misc_feature (334)..(334): n is a, c, g, or t
  misc_feature (416)..(416): n is a, c, g, or t
  misc_feature (430)..(430): n is a, c, g, or t
  misc_feature (435)..(435): n is a, c, g, or t
tttttattctttcagacctctcagggatgaacggacataggcttctaacacttaggtgtgggcaacattcttcgaagcacctccctcaaagtggaaaaggcctgggggctcagacgagagaagagagaaggcagggagaaggtggaggtgaggaagggaggagggggctcagggggtgcaaatcgcagcggacctagaggtggcttggcaaatggaattcccaggaaggtttggaccccggcattggcgcccttcacatggacaagactccccagcacctgccccgtgtgtgtggtccggatgggactggctgagtcctgggccctggccccgngacaagaagcagcagaagcccacaggccaccgcgtttcagccgggcaacgaagtatttttgcagccgcttgttggttccgtnggtttcggtttcgntgccnggcggacacttgctttttcacccagagg

SEQ ID NO: 461567 - DNA, 478 bp, Homo Sapiens
catttgagccccttgatgctctatttctattcactgtactatggcatcacgcttatattcccttaattgcaatgaactctatgaagctcacatgtctagaatataatcactttggcttctttcatgtttgaattgtttttcaaccaagtcagatcgagtggccttagtctaggtgctctgttattgactgttctgtataatgttgaggatacttctatttaacaaataattaatactaataatagtacatcttactgtattatctatgtagccattaggcatttaccatcttctttcaaatgtttatcttacggtgttagatctctttatacttcattaatttatttttcacatcacagatggtttaaagtcttcatttactataacaactttgaaggttttactatttcactgtagtctcgtttcagtttgtgtatccaacgactcctgtggtctttagctcgcatccaggcacaat

SEQ ID NO: 461568 - DNA, 191 bp, Homo Sapiens
catatgcttctacagcagttcgtaatatagcttcctctctcacctttctctttggcaattgccctctgctgaagtcactgctgttgtttccgagtcactgaatgagaccgttatttcctgtcagcccccattttccttcactcctctgcagcatcaaggggcatcaaatgggggatcctcaagagatcgac

SEQ ID NO: 461569 - DNA, 505 bp, Homo Sapiens
acttaaagtctctgacattttctacctgaaagataagattaagaggagatggaggggtggaccgcattaccacgtagccagttccacactgccttgctctgcctatgacagaggaacacttccccacaccggggattctgagctcagcagtggctgtgcttgggcagatgggaccgaagtgaatacaactccagaccacatcccagcagtggtgtggctgagcctcttgtccagtgctcccccatggaaaaacacacacgggactgaccccagtccagagcagaggcgccagaacctgcacaaaccccaaatggtgctagatccgtgttgggcagctccaggtgtgagcatcaccacgatggagcagggcacagggagagctcatgtttggatccgtgttgggcagctcccaggtgtgagcgtcaccacgatggagcagggcacagggagatctcatgtttgggataaggcagtgaatccggagagcccgcagagcagacataag

SEQ ID NO: 461570 - DNA, 406 bp, Homo Sapiens
cctggatgccacttttatcgcgaaacctgatggtggtgtcaggtgatggaatctacctcattaaagaccccagtgacatccgcctggcagggaccctccagagcaggccagcggtggtccaggagtacatctgcaaacctctccttatcgacaagctcaagtttgatattcgtctgtatgtcttactcaagtccttagaccccttagagatttatatagccaaagacggactctttaggattttgtaccgagaccatatcaggaggcccacccccaaaaacctgcaccgcatctttatcgcacttaaccaactattcactgaacatccacagcggcaacttcatccactcggacagtgctagcactggcagcaaaaggactttttccagcatccaggggctcaatg

SEQ ID NO: 461571 - DNA, 384 bp, Homo Sapiens
catcatggggttctggaggatacattagacacccttgtgatgtgggaataggatcactgaggaaggctttctaatgatgactcttgggataacacactctgtaatggaacaacttgtggtatcctaagcttgcatgctgagtatgattaggtatttgacgtgatgtagccacagttcactatgtatgtacagcataatcaacttagtcttagtagtctgacgagatatgtacagacgattttcccacacagaagcgtaactgctatagcccctgccatagttgattcaaaagcctatagtactatttacagggtccataaatactactacctgttcagaaacattagggttcactgaactagaaattactctgaactaggcaat

SEQ ID NO: 461572 - DNA, 356 bp, Homo Sapiens
caaccacattctatacgtaggcaaaataaacgaaattgattgaggcctatctcagataatttatgctctacatgtgatggggctcaggaacagggctctaaaaaaggggcttcctcccttgtgcccaatctcgcctcctcccacttcccttgtgccttcctgcatgcctgccccacatagtgcctgagaacagaacttggaacagaaggactctaccccagagaagacctggaaactctctagatgcatgtcttaaaaagcccaagaccactggatacatcactggggaacatgataaagatgatgttcactcatagggccaccctatactggcagctacattcagattgcacctg

SEQ ID NO: 461573 - DNA, 350 bp, Homo Sapiens
  misc_feature (49)..(49): n is a, c, g, or t
  misc_feature (92)..(92): n is a, c, g, or t
  misc_feature (103)..(103): n is a, c, g, or t
  misc_feature (143)..(143): n is a, c, g, or t
ctctagcggctcccaccgccttgcctgggctcaaggccacacaagacanccaaggatgccgctccgcaatcgcgtcacctctcccagcacangtgcacaggcncggttcctatcctggtgtcctttctcaaatgcccaccttntggcacttgctgcttccttctaccaagaacatcctttgccatccttagctaattaaggtgcagccaaagtcatttcctggccctctgtccttgacactcctctgtgcacagacagcagttgcaacaaaacacatctggagctcctgggacactgggccatctgcccgggagtactctgggggctcaggtgactccagaccacatgat

SEQ ID NO: 461574 - DNA, 1232 bp, Homo Sapiens
  misc_feature (621)..(685): n is a, c, g, or t
caagaaacttaaagttaaccttttattggttttaaggcagcagggaaagtcttctggtccacatgcgtttcttctgcccaggggagggagggtcaggaagaggagaaggagttggcccctggtaaccagccagagcattctttgccacaatctaccccatcttgtctccccaatcttcaaatgtcacccaaatgcactttggttctcgagcaagtgtgtcctgtggcccataccatggcatctgtcagagcatcttcctggtccagagcccccagctcagcctgcctctttccttacaggctctcccaggggcagatgacctccttttctgtggcccggtcacccgactctcctgttccagcatcctccgagtccatcaagcaggtcccgctcccccgtggtcacatccattttgatctggaaaaagcttcaggtgcaagaggaaagccagtaatgtaggggcaggggcaggagggactgcaccctcccccaaatcatcctgacatccttgaagatgaacataccaggtgcatttgccaaagactgtggtgggggcaggtatagctcaggggtagagcatttgactacaaaggttgtgtgtgcagtgattggcttggtggnnnnnnnnnnnnnnnnnnnnnnnnnnnnnnnnnnnnnnnnnnnnnnnnnnnnnnnnnnnnnnnnntcatttttgaggtgctcggatccctgtggttttgatggattcaggaggtccctgtaggacataccaggacttagtcatcaacccctttaaactgacttcatgggtgctgggcactgtggctcatgcccagctgaggtgatctttctttacacccaaaacagggtctaaagaaaactgggtctaattctgctttccgtaacttaaggctcttaagaagagacaggtaatatattaagaaaaacaggactcatggggaggacagaagatctatttatcctaaagaggatcaaggccaagagaaaccaattaattccttttcaagtacataaagtaatactacaaaggatgtatctgtgtctctacttcctaaggtctgtcatcatttctaaaatagggataatcatatctactttgcctatttaaaatgtatgctgagataataagatgtgagagggttttgaaaactacatattgatatgcaagtctaaaatattaatatttctattctttctatgtaagtgttcttaacctatattccatgatgtcc

SEQ ID NO: 461575 - DNA, 388 bp, Homo Sapiens
cagaaataggataactgggaaggggcaccagtttatgagaggaatcttcatggagtttgaggaaacagcaaaactttctcatggaagatcacctgtagattttgaaaacactgtatttgctttttaaaaggaagatcataggcagccaggtatgaaaccccttctcttagtgtttctgtgtaacctgtggaatttgcccaggggaacatctagagttaacctggaaatcagatgcttttctttcaggcagtatttggcaacatcaaaacatcagttctagagaatattgtgggtgctagagtctgactataggtgacatgtttttgtcatgttaatcaattattgaaattaaggagaagattatcgcatttctatccagaccctgagt

SEQ ID NO: 461576 - DNA, 704 bp, Homo Sapiens
agactggagggaacatatactctttgagtaaaaagcttttgaagtgaagtaaaaggagaaaactatcttccataagtaacacaaactaattttggggggttggggtgatggctaaaggagatttcagagcagcttcatttttgtagtcttctgatctatgccccaaaggacctgatgcatttcatctgagcctcaaattaggagatacgtttttgcgagaacaaaagcggtgctatccttaggtattccacattctcagctgtgggctattggtccaaatgctgatgaatccaatgtgggctggaatccgagttattatttgatgtgtcatcctctcttgctgatttcatgacagcaagacaggggcagcatactgagtttcaaaacaatggaatggaagacaaacaagtcagtctaacgctcatgactggaaaccactggtccatcagtggggagtaagtaccgtggggacatttttacaaaagtaagtctaaggaagaattccatcccctccgtttcttctttgcccaggaagggacagagtggcttatcctactgtacctgccatgacttgatacagtaccgatccggcctgatgccgccatgaaggccttcttggatctttagtgttttgcagtggaagcattgaagcagaaccactggaatcagcatcctctggaataattatggcttatgctcttcgc

SEQ ID NO: 461577 - DNA, 222 bp, Homo Sapiens
tgtgtggtgtagagtagtagagagatgagagtgtggagaatgaggctggagctgttatggcataagcatgtcttctgaccagacagctgtaaaaatcccaagacagcttttatcaaccctggcaccagatatcctctaggccaaattgattcagtaaatagagtgatgaaggacaagagctgaaagatattctgcagcattgtttctcaacccggggttcta

SEQ ID NO: 461578 - DNA, 411 bp, Homo Sapiens
atgggttctggatgtcgtcaatctcccacctgtctaaattcctctcttcctagttgggctctgactccccagtccaagccaccatcccctgcgcggatgccctccctcctcactctgagagtgccggcaaagggccagcctgatcaagtcactcaccttaacacagcctgtggttccccatggtcagtgtggctgtaggagcagcgccctcctctctgccccttctccccaccatgccacccccactgcccatgtgcttggtgtctcagccgccgtgctccttggtggcccctgcactcgccatgatctcccgccctgtgccattcccacatccgtgaatgctcctcccctgtcccctttctgctctcccgggactcaggaacgaggtcttccctcgaccctgctcatccc

SEQ ID NO: 461579 - DNA, 322 bp, Homo Sapiens
gggttccatgtgaacagcaggtgaaacatgggtcattcggtcctgagaagctttggcggccggagaatccagccctcgtcggcccggccgccacagcgtgtcgtccccacccccacagaactttctttaaggttttgtgtggtgtgggatatgtttttcagaagagggtctaagttttcaccagattctcagataacccccagagagcaagaacttccacctggggtgtcgcgcctgacacccggagaggtttgttttccttccagtaagtgcccatctcctaagggtgtttaaggataacagcagagtgcttcctccagaa

SEQ ID NO: 461580 - DNA, 142 bp, Homo Sapiens
ccttcttcactatgtcattattgataaaactaggcaaggagtagattctgggggttctgaggagagttggggaatggtggcagaagaaagaggttccagtcgttttatctaacttattctgtcacagggagaagctgtggcg

SEQ ID NO: 461581 - DNA, 307 bp, Homo Sapiens
agttctcttgggtcctgtggtaggaaaaagtggcttctcaggatggtgtgtctgcagatggccgactggctgtacgcggggccctctgtagcactgagagcctgtcccacctgagtctgggtcaggccaagggacaggcgccggattttaaaagctttggcaaattctcggatctcctccagattaaccccatccacctcacccgctgccgtttgaggatctgctggccgggcttgatgggtgacagcgtgatgccttgggtgttgatcacgggcaggatctggttcccaatgactgtggcggcacg

SEQ ID NO: 461582 - DNA, 368 bp, Homo Sapiens
tcatcggtctgaaacctccgcagggcccagggcaaaggcatctcccatgcacagggcctactcagtcactgctgagctctgttttctgctagccccctggctcgtggtctcccctgtgacagagttgcaggcacatgcagggcgtaaccatgagctgcttgtccttctctgcactgggcctcattacttcccaactaaatgccaggggccaggcatggtccacgttctgaaaataccacaaaagtgaagcagacaaaattcctgcctgagaggttttgaatgcatgaggaatgaaagagggatcccatttagctgggtgtggtggactcgtgcctgtaatcctagcaactttgagagctgtggcggca

SEQ ID NO: 461583 - DNA, 411 bp, Homo Sapiens
gcgcacagcttctccaccagcgcctgctcttttccacataggatgtacaccatgtgccatctgcctctgcccatctgtgcctggcttctcaccagcctctcctaccagctgtggcctcttgagaggaaacaggtctgtcttattcaacactgcacagtcagaagtaaaaccggaactggccatggctggtcttcaaaaagaatgaagcaaagactacgcctctctttccccaagtattatccgaccagtccaaaacgagagagaggtaaacacgtggtaataaatggtaaaggaaaataattcttctcaatcttcagtggtttgaaatgcctctggattgaaccccagttataaccccacaccatttgctcaaagtacctgtgacgaaatctcaggtaagttctcagggtc

SEQ ID NO: 461584 - DNA, 320 bp, Homo Sapiens
tgctcttccctctgctctgaagcaccttccctcagctcatctcatcctgagctctgtccaaatgtcaccctcccctagaaacaggtttccaacccggataacaggattttagtttcttcctcttccttacagtgacctaatcgtttgctgtgctgtgttttgtctctgccccatcagaaggcgagctcatgaatctttgtgtgctctgagcactgtgaataggatctggccccagaaccgggctccagtgctggagtgaggaatgcacacagggccaaaggcagtgagctctggggcctcccgagacgctgtggcggccg

SEQ ID NO: 461585 - DNA, 380 bp, Homo Sapiens
atttgagactgctcaggagcctggacccagctgatgcagctccttgtccttcctgagcgtctttactgacagtggcctgagagacggcaggagcagaaagacttggagatggaccccaccgactgcacaccacccaagtacatcctgctagggaccctggaacagccactgtgtcccctgcaaccccagaacggtgactaaaagcccctgaaagtgctcaccgtgagcggctggtacctgtcccctgggaactgcaagatgcacaggaccttgtgtacctgtttgtgatcacagccgaggaccagcgaggtagcattaccacatccacacagggcttttaccataactgccccagtactggaacgagaagctgtgcagcc

SEQ ID NO: 461586 - DNA, 385 bp, Homo Sapiens
catcagactttgctacttagtacacacacggggttcccttttaaatttgttcactctagttagcatttgcagaagctgtgaagaattacagagagatgatgtgttgggtaagagatggtttaaaagtccagcttgctgtttttcattaagtgtcttgaaaatgagtaagtggcgttcctggaggggaacaatcatataattccgcagggctgggtctaaacttgttttctgatagtgtttagcagctcatggctctgagggcacctgataacacagcagccaggcgctgatgagaagtgtgtgccagacagacccgagtgtggcttggctcttgccttatgtctttcttctgttcagagaagctgtgcgcccgtgcacgagtagg

SEQ ID NO: 461587 - DNA, 370 bp, Homo Sapiens
ctgaaaaatatactcagagttctagactaagggattgtgctcagcaagaaattatttcatccaacaggacttttctttcttttggttttggtttgtggcttttcagactggtgaagtgtgattacataaaacccgcgtatcataaaaataacatatcctaaagagaaataaatttgtctaccaagaacatcagtaacttcatcagttttaagaaatgattaggatcttaagtgagattatgatgcattattgtagtggagaattttaagcgtcatatgtacacgtaacaaataaatgcagggtgaatgcctttatttaaataatacagtatccactgtcagtacctgtttagtttgagaagctgtgcaac

SEQ ID NO: 461588 - DNA, 356 bp, Homo Sapiens
gtaagtctcaagtgctgggatacagcattatgccttcttaagtctaatatcaagccatatttaattatgatgtcttactgtaaatacgcgggattaattggacacactggattcttgcttgtatgacaacccaggtatgtaatgtggaaatgagcaaacatatttgtgaactattaccatattctgtgcagttattaaaattgaatttatggagttctgacagtatacgcttaaaactccagagatagatctgttctctcatacctgatgcaaggaaaatgaacattcacgtttacaaattcagcatgataattttgtgcctttaggtaagggcttacacacacaccacaattcta

SEQ ID NO: 461589 - DNA, 159 bp, Homo Sapiens
cccgccacagcttctcggccgccattactacttggattgttcctgcctaccttgtctatgtcctatcttgtggaagtcttttattttttataggcaggatctcactctgttgcccagaatggaatgcagtgagacatcagctcactgcagcgtgcagtt

SEQ ID NO: 461590 - DNA, 124 bp, Homo Sapiens
gtcaagatagtttggctattctggatgcctggcatttccttatgtattttaggatgagcttctcagtttctgcaaaaaagctagctacgatttgataaagattacagtgatctattagagactg

SEQ ID NO: 461591 - DNA, 245 bp, Homo Sapiens
  misc_feature (48)..(59): n is a, c, g, or t
ttctcccagccctggcgaccagagccagattcccatcccccaaaaggnnnnnnnnnnnngaaacagcagggagcagcaggagcctacgactaaagctgccatcctcatttcccctgccacctccatctcacctccccttctagatcctctaacctctgcactccggactctgcctttcagaatacttttatcagatagagagagagggggaaccagatgtatttatgagaagctgtgcgccggcc

SEQ ID NO: 461592 - DNA, 378 bp, Homo Sapiens
cccaccaccctggacagccaggcccttcccagcttctctccaccagccagggatcggagaactcactatgcctctggcacgtcggagcctttgctgatgctgatcgctaagactggaatccttttctcctccctccgctccgtggacctatccatcgtccaggactcaaatgttcccttgtctacaccaatgcctaagtgtcccaagggctggtggttccttcttctgtgtaccgtgaacaacacatgccctcactagtgcattaactgacatcattgcactgtgtacacgcagactctccgctttcttcagctgagttttccagagtgtccctccaatcggtgggcgaaggaggggagagggggacagcacctactc

SEQ ID NO: 461593 - DNA, 324 bp, Homo Sapiens
ccacagcttctcaggaaaaggctcagaaaattccagcccacactaaacctcacccaccacacacttccccgggagctggggagagtcctgtgccttgcctgggtcttccccacctgcactacaaaggcttagcctttggacccctccagctctacccttccactcattttcttagtgctacagcattttacttctcattctttcctctggctaatcacacagcttcaactttgaaagccacagaaaagtccccagagaaaaggtatgtccataaacataacttcgtgtaacacttagcattggatgttaggagagctgtgcgcc

SEQ ID NO: 461594 - DNA, 438 bp, Homo Sapiens
aggatccccggtccgccacagcttctctaccacgctgatctgtgtggtgttagacatttcagtacttactgagatgagagttttctgtgccccaccttcagctgggttaatccccaaagaaccagtgtttcctataaagagcagttcattccataccttgctcttgtattcctaatggccatgtcgacataccccgctttgacaagatgaaggaccacgatttgggactcttcagggacagatcttggccacctggtgatgtgccaccttcagcagctctgtcttcacacgtccagcctgcgcctgcttcatgtagtacacaagactgctctggtacaccacgaccatgaccttcacatgaggccagtctccccgcccctcacctgggccatagaaaaagtaagagcctgagaactgtgcgccggagaacttgcacca

SEQ ID NO: 461595 - DNA, 354 bp, Homo Sapiens
cagcttctcccccaaccacagcccctgagactcttgctgtccctggaggtgtgcaaggctccaccgcgtttaaaacatcgctcagtgcaggaagccacctggccgctgtgtggcaacacttggccccttcttctcacccaaccttatttccccctacggcagcgtccctgacgccaataccattggctttgcccatgcagcctctctaccagcacatgggctccgcgagaccaagtcttcgcctctgtagttcttactgtgcgcacagctcacaagtgctaagtgcaaaataaatatcagttacagtgaatgagccagaatgggccaatggggattagagaagctaggcgggta

SEQ ID NO: 461596 - DNA, 368 bp, Homo Sapiens
tgacgaccgcgcccggcccactgacttctttagggaaaatagtttcagtcttgggttgtcttgtgagcacacgggcatgggaccctgtctctgctgggcttttccggccccgtcccagctcctcctcaggcagaggctgcagccctcagctctgctgctggatggaacatttcaaccccctccgggaagttgggcaggttggagggcccagggctaggcctgccatgcaccatgagcaggggtgctacctgggtgtgtgaagttgggctggcttttcctggagttgggtgagaaggctctccgggcaaatcagaagccacgagagagagaggaccgggaagattgttaagagagaattctctctctga

SEQ ID NO: 461597 - DNA, 465 bp, Homo Sapiens
  misc_feature (73)..(122): n is a, c, g, or t
cgagccaaggggccgggctagcgaaaaatttttcccccctttttcgcccgggggagaaacaccttgtttgggnnnnnnnnnnnnnnnnnnnnnnnnnnnnnnnnnnnnnnnnnnnnnnnnnnttggtatctgctaaacgggtcaaattagcaggatgtggtgaaaactcaagtggaagaatagctcttcctgcagatgcatgacctggtagaaatccagacattgggctccaccaaactcgaatgatacccaataaatgatgagaggaatatccaaagagttaaatgccatgagaccactctaccccctgaactctaaatccttgtatgaccctgagacaggcaagcagtagggctgcaaggctgagataagtactgaaaattggcccatatacattttgttttaacatagctccttcctttacacttttctgtacccctggcctgaaggctctacagcgtgtta

SEQ ID NO: 461598 - DNA, 283 bp, Homo Sapiens
agaaggatccccgcgaaaatgcggcggatagaatcataattctaatggtcaccttagagtatattatgctggcattctggaagcatctgctgctggtatttctatgttattaaagccatttacagaaagcccagcatctttctcatggagattcttattccacatgtgtcttccccgtgattccttttccacatgtgatggcctagagctccttctcaaattaccctgaggttgctgctccagagacatgtttgctgttccaaggctacagccaatgtgcgca

SEQ ID NO: 461599 - DNA, 457 bp, Homo Sapiens
acaggagagccaaggggatgggctagcagccatcagcctctacctcaaagctgggctccctgccaaagctgctcggctggtgctgacccgagaggaactgctagccaacacagagctggtagaacacatcactgcagcccttatcaagggggaactctacgaaagggcaggtgatctctttgagaagattcacaatccacagaaggccctggagtgctaccgtaaaggcaacgcattcatgaaagcggtagagctggctcgattggccttcccagtggaggtggtgaaactagaggaggcatggggggaccacctggtgcagcagaagcagcttgatgcagccattaatcactacatcgaagccaggtgctccattaaggcaattgagccgccctgggtgcccgccagtggaagaaggccaatttatatattagagctacagcccttgtccggtcct

SEQ ID NO: 461600 - DNA, 470 bp, Homo Sapiens
actacagacaccagactttggatagctcagacgacaggaccagtctattggctcatgtggcttttcctgctggcgggaggccttcgagaatgagatgaggcatttctcatccctccctcttgcttctttctgttcatcatcttccttctctcgagcagctccctctgcacacttaacggagcccagctgctcctgtttcacaccctgcagcttcctcaccagccagctgccccaccaaccagcggtctggtccagggaaacgtgtcctgagtggggtctgcttatcaacgtctgcttcacagagctgtccctggaaatccctgctgggacgggcgaagataacaacccaaagaagggagaatgacctgaaataagcagagtttgaaagagaagcaccagatatctgtggtgctacctggaataacagcacaaatggagatggagctacaggctcctgctacagcccaagt

SEQ ID NO: 461601 - DNA, 462 bp, Homo Sapiens
  misc_feature (415)..(415): n is a, c, g, or t
tgctgactagaaccaaattctttggcatactgcacaaggggcctctccactggcttgctctgcacaatacactctgttgttgtgagttgttctacaaaagacttggtgggctctgggttgtggggggcacctgggttttctagggactcttggtcctccatcgcgtgcatgcctgagtctgttctgaggaaaggctgaagcagtttgagatgaggggattcacaggaggcaggctccctctctggtaagcagtctttacagaggtccaagtaacctaatttggcgagagaagctgagcgcctcatttgggatggtttggtgagccctgcctggaaaaccactcgagactcgatttctttagcacgctccttcaccacaccggggctgtggctgagactctttatgttttcactanctagagctatgtgggagtcgacaggctacagcccatgtccggccgga

SEQ ID NO: 461602 - DNA, 197 bp, Homo Sapiens
tccccacccatggccacagtataatagtacctccctcctatgggttgctgagtgtttaacattgaatcaggcacacacaagcactcagcacagagcttttcctcagtacaggctgctttggttatgacctttgccacaggctgtgtaagtccagggagggaagggtcggaacaaggactagctacagcccatgtccc

SEQ ID NO: 461603 - DNA, 340 bp, Homo Sapiens
gcgacgttgggcctgtagcctctgttgttgaggttgaaatgcagctgctgtgtagctcagctcactgtagctctccacctccacatgttttaaatagttcttgtgcctcagcctacctacagagaggccagtttacatgtcacctgccagcacgtccagattatttatgtatttatctttagaatttattttatttttaagttcctggatacattttctaggatgtgcaggcgtgttcctttaatctgtgccatggtggtttgctgtacctattacctcttcaccttggtatttggccctgcatacattagctgtttatcctaatgctcttcccaccccc

SEQ ID NO: 461604 - DNA, 410 bp, Homo Sapiens
  misc_feature (267)..(305): n is a, c, g, or t
cagggcgagtctatagaggatcccccgaacaggacacgcaagtaaagaagacgtgccgctacagatgtcacaaaatgtatgacagagttgagagcagtgccctggagttttcaaatggtacagtcggggaggcttgagagtacctagcataaagggcatcttgatggtgagggggttctgaagtggtagaggggttggaaagcaaatgatgaagccttgatttcagactcttctctgttactagggccttgggaagccctgttttgnnnnnnnnnnnnnnnnnnnnnnnnnnnnnnnnnnnnnnntagattgaggtccttctttaaatttatttatattttttctttttctaaagctccactctcagaagcagtggtagggttgggctttgaggccatgggtccaagcca

SEQ ID NO: 461605 - DNA, 621 bp, Homo Sapiens
agcagtgtagtgaatggaacatcagtagaccccagattcaaggtccaacttggtcccttggttccttttctgttaaaatagggcttttactcactacagacttcacactgtctttataaggctcaaatgagagaagtaagcaaacactacttaaccttaaatcacaaagctttgcacgaacggaaggtactggacttatcagcaatgtggtggccacatctggcgccagcgtttcattttaaactgaaggctcaagagggtcgtgccaagctttcccggagccccaggaagagactctgtgcctgtataccttggttccgttttgtctttgacatgctaataccacaatctccgcggagcacgaccacctgcgcctcataaacctttccatttaccaacacacgtgcgacctttcctatcctggagccactttgccagtattgatcgctgattgcaagggagcatgctttgcaactgcataggaaatgatgtttgttgccgcgaaggtggtggcctgctaggataaaagaggtcgctctcgctgccagaagaggaaggagacccctgcggtgagcgcccgtcgcggcagacccgggacgcgacttgcctgtgtctgtgtcg

SEQ ID NO: 461606 - DNA, 572 bp, Homo Sapiens
  misc_feature (86)..(165): n is a, c, g, or t
cagtgacagggcagcatcctaagtgctgtgagtacagggtgcccaaagcagatcaaaggggcagtgggcagggtcctatttggtcnnnnnnnnnnnnnnnnnnnnnnnnnnnnnnnnnnnnnnnnnnnnnnnnnnnnnnnnnnnnnnnnnnnnnnnnnnnnnnnnactaactgttgtagccaggtttctttttgttgatttcgttactttatcattatcattttaagctaatgttttagattcccttccatttcttcctgcttatcttcccagcaaaaccccagcatggatcagtactaaaattttaccttttccgttgagcttgatcattgccgaagaaaatcacatccaagtagacaccactacaaactcaaaatttccaacctcatctggagcttattggttctttgtcttgccagctccttccagtgtcctcagcatctacctccctcagtgtccccctccccagtctcctccatgctggaacttagcttcctacttgattgggaaaatagaggccattgtggggcaatttccctcagctttcaaacacccaccttgcttgtcctgtt

SEQ ID NO: 461607 - DNA, 241 bp, Homo Sapiens
cgaacaggacaagcagtatagggaggtggcggtttgcagtgcctgggcagtaggtttcttacagaaacaccacctttcccaagctaaataacctactggtggcagtgctctagaaaggacagcgagaaaaagaagtgcttggcgtttctatcaagcaccgccgtgagtgtctctacagaccccttccagaacatgctcacggctggtcagctcagggtcaagttcttgcctgtcctgttcg

SEQ ID NO: 461608 - DNA, 475 bp, Homo Sapiens
  misc_feature (34)..(34): n is a, c, g, or t
  misc_feature (50)..(50): n is a, c, g, or t
  misc_feature (105)..(119): n is a, c, g, or t
ttatcagatgttataggaaaattcagaaatgatnttaattatttttcaangggaagttctggagtaggctctatctgtactactcctccttccccttaccccacnnnnnnnnnnnnnnngacctataacagtctgttattatcaggattaaaaattgttgccatttttgtattggtaatgaaaattgtagtttatatttgatagtttctagttttactatctttagttgaaattaagtataatatgtatataaaatgtattaaaatgtaataagaatgagatgatttgattaattgcatttattttatcactttgaattaaatttactatattggttgtttaattttgatcatatgataacagcaaaaaggactttatttatatatctaatttattctctttttaagatggttacatgggaagatttccaaacaggaagcttataatttactaatgacaggtacttacatattta

SEQ ID NO: 461609 - DNA, 519 bp, Homo Sapiens
  misc_feature (21)..(21): n is a, c, g, or t
aatacgtcctcagaaggaaanggaaataccacttagacagcttttcaaaaggtatactcgcttttgctttgtcctagccacttaagaattgtcattcagagcagccagtgaagtcatttctgtgattgtcccagaggtcactgtcactgagctcaccaaaggccttttgattttagtgtaacaacagtcattgactagtgactgtaaagtgatggggataaaaggtatattttgacttgaagctatcttcccttgtcagaagaaggccttctaatagtagtaataaattcttctgtctctaagtatagcacaggaggtatagaaaagcatattgtaggcataggcaatttctggagtttagcagtccagagctaactctctttcagaattgcaaatggagtcctggttctgttaagggaggaggctgggcaggatacacgctatagttgagaaactctgtatgtaggaatgttctcacacattcttgctttcttggtaagcttctcaaactagttagat

SEQ ID NO: 461610 - DNA, 614 bp, Homo Sapiens
  misc_feature (185)..(185): n is a, c, g, or t
  misc_feature (199)..(233): n is a, c, g, or t
aatttatttcagcttttaatatattttctactataaaaccaagctgtcaagacaggaaaatattactagctttgttattacaaaacaagtgagaatttttaattcacaaaggatgaaaacgcaagacattaatctcactgtacatacaatattacaataaactcgattagctgtagactaataanacatttaagacttnnnnnnnnnnnnnnnnnnnnnnnnnnnnnnnnnnngtaccttgaaacaagaaacacaggacaattttaatctttgatatatgttcatgaacaccaagaacaagaacatcactgatttgagtctaattgttttcctgggtatacaatcactaaataagcaagatctaaagcatattgtattattaaggacatctttaggcaaatataaacattctggatttagggctttttctccccacccgaaaacaatctgctttagctatcaagtagtttggtttgttatcaatttaacacgctcacaacaacaaatacagaatttctaccacaaaattcaggtgagaggtttttagacagatcatacaaaaaaatacttgttcccaaggaaggcaatctgtaaattataaatgcaaccctaag

SEQ ID NO: 461611 - DNA, 363 bp, Homo Sapiens
tgcaggaacctggatctatactctagccaggcctggctcattttatacccggatatttctacctccttaggtagtagcatctttgagagggccacagaaaaagcacaagccctcacagaacgaaccagacagctgattgtctaccactagggcaatttgtcaggattgtctgccacagagagtcctgggaagtccaggaacctccacacatacctgcagagacagaggtcactgttaccatatctggatgtcaaaaaggtcttttggaaaccaaggttttatcctttttttgttcttcccctcatctgctcacccccaacaccaagggttaaattcaacatcagtagctgtggcacaagtcct

SEQ ID NO: 461612 - DNA, 401 bp, Homo Sapiens
  misc_feature (330)..(330): n is a, c, g, or t
  misc_feature (363)..(363): n is a, c, g, or t
gatgcgggtggtgttcggctaaccctgagaaagggaccagaatgcacctgagtcttgattttcattcccaatagcaggtcagcacgaaacccaaaaacgctctgatttctgccttccatgccacactctcttcacctgctgccttctcactcctctcattaacaatgtcctggcaggaacaagactttcccctccctctcttctcgtctcttagcaggtcaggtcggccttcacctccctagacccgtcctgctcctgcctttccctgtggggccctccatggatgctctggagtcccgggcaatagtcagccaactgcagacatgcggngccttcttgggttccttgctgtgctcccttganaccactgtgcctgactgcaccccagtagcacacactga

SEQ ID NO: 461613 - DNA, 494 bp, Homo Sapiens
  misc_feature (13)..(13): n is a, c, g, or t
aacaggacaagcnaggccatatagtactggtagaatccgaaagagaactcagggtctacccagttcttcttatgattaagctttttcctctccatctcctgaaagctgccttgaactggagtggggagaaatgggagggctccatgacagcatgccctgtgctttcaccaggtttctatatatacaggacatccatgtgagattttatgtgaaacaggttttggcttgcttcaagctgtatttcactatttagcaccctcttttgctcacagcagatgggctctagaggtcctgactaggcctgaaatgaggaacgctggggagcacctgtaggaatgctcagccctggatcaaactacagcatgctgtaagggacagtaccaaaaagaatgacaagggcagtgtggaagccatgtccctgcaacacaagggctggttcccaatcctggttatgatgctcagagctgtgaattgaagagatgtgtgattacata

SEQ ID NO: 461614 - DNA, 470 bp, Homo Sapiens
  misc_feature (447)..(447): n is a, c, g, or t
  misc_feature (455)..(455): n is a, c, g, or t
cagtgagggcgggaggaaattgcagtaagaggaaaccgcaagtgcaaaggccacgtggtggcaggaaacacaggaggagagagccaacgtggctggattgtggggaaataggttggcaggagccagactaggcagggctttgtggaccatgacaggaattttgcttttcattccaaaagctctggagagtcactagggagcactaaggaggagagtgacatgatcagatttacattttgagagggtcacttgggctgcagaacagagaagaattgagtggaggggcaagagtggaagtgggaggccagtcaggagggagacaggggtagctgagaccaggtgatggttaacacggtaagaaatgggttacagaggaagtcaggaagtaaaatggacagagcttgatgttaagttagatatggaacatgacagagagggaaagacaanatgacttncaggtctgcttgtct

SEQ ID NO: 461615 - DNA, 329 bp, Homo Sapiens
  misc_feature (12)..(12): n is a, c, g, or t
caggagccccgnaacaggacacgcaagaggtaagcaccatataaggacacctgtgtgccagtggctggcccatggggtagggtggagcgatgaaggagcagcccctcggggccatcatggtgacatgaccttcacgtgcactcccgtggccttccactgacctccgaatgtccagtgatgggggtggaggcagaagaagccccagcccaggggcctgtgcaccactttccaagatcacggtactcgcgcatttgagatgagcgacttggccggcgtgtgtgtggacctgcctgccgagcaccccggtggcagctgtgcccagatgcgcc

SEQ ID NO: 461616 - DNA, 467 bp, Homo Sapiens
ttttcatgtccctagggtatttgcaaatccaggtcaccagctagtctatttcaacacccatagcttggtgtatctagtgttcttgcatgttctgtcttttctccagaggagaggacaaagaggaactcataaactctttcccaactgatgcttttacaagagctatttgaaaagattccacaatgactttttgtcccttaatctacagctctgctctgagactggatttgaaaagtaaaaatgtgattaggattgtttggtttggcattgaggttattggcaaccatggttctttaggtctggctttgaaatatcagggtgctggttggttctcaggtggaaggaagcggggcattaggagtcctaccactttatgagtagtagagggggaagttggtaggtgaggtgacaggtggattcaaatatttgtagatgtttgctttgcatttccgtgcttgtcctgttcg

SEQ ID NO: 461617 - DNA, 602 bp, Homo Sapiens
  misc_feature (561)..(561): n is a, c, g, or t
cagagactggacagctgttgggctttgtttgcttttttacgaattgaaatactgaagccaggagcggctgggtgacgtctccagcgtcactccttactttcctccccacgctgagttcagtacgacttcccgtgacaccactgttggtggcggaatgggactgtggctgcttccgctcagccacgctccctctctgtggacggcggagggtgtgtgtcccagcccggctgccgccctcccttaggtctgtctcccggggctgctgtaacccaggctcacaaacctggtggcttaaagcagcagagacttagtctatcagatctggaatccgcgtcgattggccatcatccagccatcggtgttggcggggccgcctccctctagggcctagggggagagcattccttgctgcctccagcgtctgggtgctgatggcattccctggccagtggccacctccctccagtcgctgcctccgtgtcccatggccgcctccctccagtctctggccccgtgtcccgtggccgcctccctccagtctctgcctccgtgtcccgtggncgcctccctccagtgtctgcctccgtgtcccgtgggcggct

SEQ ID NO: 461618 - DNA, 723 bp, Homo Sapiens
atccagcagcaaccatttctgggtgatgtcaaagtcaatggagcaggttctgagttagatgcaaaaggcattgacataggacttaaatcagacacactggatggctgtgctcctcttgtgtgttactggaagtaggagtgggactactggatgggtgagtttctggagctcccggggtgttgctggcagagctactgcaactgtttgcagttgaacgatggggtacataggtttgccatgggctggtcctgtgtggacactttctctttggtgggtggcacagcagagaaagactccatcttttgtgaagaaagctgtgcttgaggaagtacttgcaggtagaaatgtggtgggagcttgcccgctagtgataggtgcagaggagacagaaggcagggaactacaagtgcttgtcacagaagaaatcactgttgctggaggacttgtcttaggcacacaggcaaacaactgctttctgactgatgaaggagtccgggtattagtgacacacagttgctgactggcagcaactacagaagagacagtgataggacaactggcagtagctagtccagcagactctgagggtaaaacagtcccgttctggttaggtagacggcttgtgttattatgctttggagagctatttgtgttgccaggattcacaggtctcactgggaatggtccccatgtgttaggagaaggtgagaaggttcctccagt

SEQ ID NO: 461619 - DNA, 231 bp, Homo Sapiens
agtatttatatttagaatatttacattccatgtccctgggtcctaatctattcctcagatattacatagcttgtcaggcatttgttggaacaaatcgcatgcagatcactttggactgtggaccctggaatctgcctcttgagtgtgttgtgtcagtaggaagattctgaaagggctttttgtgagcaggctccagcccagtgggtaagagggttgcggaggggtccagct

SEQ ID NO: 461620 - DNA, 405 bp, Homo Sapiens
tgttctcagatgcaggatggagatactaagggcactgccattagagggcatgaaagctgaatgaaataacgcaagtaaaggctcagcacagcgcccggcaaataagcttaggaacctggcattgtgcctggcatactgtgggcattcaaaaaacagtggctacagagggcacaaggaaaagtccaacacaggccccacgagagcacattagcttgctgctgtgatgagtgacagggtccagaaacagggacttctactggacagcatgagaggagaggcttggccatacacatacctgacgcttattagcaggttgcaggcagatggcaaggtcgacattcttggtctgtgaagcatttactcagttccctcagggacctgcataggttatgtggaacgtggatt

SEQ ID NO: 461621 - DNA, 430 bp, Homo Sapiens
gttggacaagagtcacttagcattattttttcctcaatgaagaggttaagatggagggagcatgagaaattgaggcctgtgttttaccagaaggtgaagggctgtctttgcctttcctacatttatgaaggataattctagacaaaaacattaagttcatatcaaaccatctgctttgtgaagccatgggctttgctagaactttctgtgacatgacatttattaacccgagtctacctggaagttagagctgaggaagttttcctagagtggaaaaagtccaatgcacttgtaaaagtcagaccaagctcagctcagatttcagttttattagaagtatgtcaccttcctgagcccttattatttccccatctgtgaaatgaggacaccgttctctctttgtaagcattgctggcaagtccacacacca

SEQ ID NO: 461622 - DNA, 530 bp, Homo Sapiens
aggctcacggggcccagaaactcacagggcacagactcacagagcacacaggctcacggggcacaggacacggggcaaacaggcttatggggcacagagtcacggggcacagactcacagatcacagatgctcatggggcacaggcttacggggcacagtcacagggcacacaggctcacggggcacagagactcacagggcacagactcacagagcacacaggctcacggggcacaggacacggggcacacaggcttatggggcacagagtcatggggcacacaggctcatggggcatagactcacagggcacacaggctcacggggcacagagtcatggggcacacaggctcacagggcacagagtcacaggcgcacacagggtgataggtcagatactcacagagcacacaggctcatggggcacacaggctcacggggcacagattcacagagcacacaggctcacagggcacagactcagggggcataggctcactgggtacacaggctcatggggcacaaagtc

SEQ ID NO: 461623 - DNA, 451 bp, Homo Sapiens
tgagataggatggcacagtcgctggctacagcatggatggcgtgagatgagttagggggctcacgagggcctgcggcccattggagagctttggtgtttactggcgtaggatgggagggctgtaagggacacaggcagacttcaatgttaataagatttctctggtgactgtgttgagactagaccactggttctcaagccagggtgatgtttccccaggggacatttggtaacgtctggagacatttttggttatgtcagctggggagggggttgacgattatggcatctagcaggttaaagccagaaatgctagacacacacatcctccaatgcacaggatggctgcccacaacaaagaattacctggcccaaacagtcaatagtgccaaggctgagaaacctgggaatagcctggagggggccatgggcaagagcgtggagaccaggg

SEQ ID NO: 461624 - DNA, 578 bp, Homo Sapiens
ccttagctccagcagggtcagctcagtagggtcaagtcccactaccctcatccccatcccagcaaagggctccctagaagtatctttccaaccctctgaggcccctatttctggactccccagatcagaagctatgagctctgtaacaccaccagtacccccttgaacccaaaacagactaggggagagttagggggcagggagagaaccagctgcagggaacaaagcagttcaggttatgggagaaaaagcaagatcagctgaggaaagctagaagggcaagtcgtcacaaaggggcaggggggcagcccagggcaccaaggggaaaactgcccccctctcttcatgacatttgttagggcttagggggaacagaattgagtcagccaccaccccccatgccagaacagacagggccctattgtctcagccaaaattccttctttcaaggaagaggaggctcattgtccagccctacacccagctctggcccacaaagctcaaaagcggcacaacgaatgcccaccctgaccctctgccccctcgtctagcctgggggtggcaggcgcattccagcc

SEQ ID NO: 461625 - DNA, 647 bp, Homo Sapiens
ctccaaatatataattggggtaaacattcttaagacacaacctcgcattggtccttgctgtattgtaagaactatcataacagggaattctcccaatcctggaaagatagtatatcaaaactgatattatatcctgaggcatggcaaaaattaatgccatctttaggtatctaatggatatagtctccattgtgtcatcacttaattcattggtctgtttcctccaaaaaccagataaatcctgtaggatgacaataaactaccacaaacttaactaagtagtatctccaatagcaaccttcatatcagatgtatctttgcttgctatgtggtatgtagccattgatttggcaaatgaattcttttcctataagaggatcaaaatcaattcacattcacatgaagaggacaatagtacacaattacaatcttgctccaggcctatgttatttcttctgccctctatcaagtgcagtccaaagagatctggattatttgagtattctaaagattttcacaatgatctatcaatgacatcatgccaatttggctgggtaagcaaaagtggttagcatagtggaggtcttgatatcacacatgaactttagaggttgggagacatgtcctatgaattttcaggtgcattt

SEQ ID NO: 461626 - DNA, 202 bp, Homo Sapiens
  misc_feature (54)..(114): n is a, c, g, or t
ggccacctgtttatttgattatctttaacagagaagatccttttaaaaatatcnnnnnnnnnnnnnnnnnnnnnnnnnnnnnnnnnnnnnnnnnnnnnnnnnnnnnnnnnnnnnttgggtgatcctcccacctcagtgctccccaccctgagtggctgggactataggcatgtgccaccacaccaccatgctaggctaatgg

SEQ ID NO: 461627 - DNA, 435 bp, Homo Sapiens
  misc_feature (65)..(125): n is a, c, g, or t
actagcctcatggccacctgtttatttgattatttttaacagagaagatccttttaaaaatatcnnnnnnnnnnnnnnnnnnnnnnnnnnnnnnnnnnnnnnnnnnnnnnnnnnnnnnnnnnnnnttaggtgatcctcccacctcagtgctccccaccctgagtagctgggactataggcatgtgccaccacaccaccatgctaggctaatggtttgtatttgtttgagagatgcagtttccctaagttgcttaggcttcttttttagactcaaataatctgcatgcattggcctcccttagtgctggaattacaggccatctaaatcttttatctcaggtttgccttgtgacaaaaggaggggtactttttctgacatgatgaggcagagaaaggtgaggtgggtgcatcctgtgcatatgattttctcaggtg

SEQ ID NO: 461628 - DNA, 684 bp, Homo Sapiens
ccatgctgggccatgtctgtgggccaggccccaggagggcgggggatgttaacagcttggttcatgtcaggtagggcctggtgagcccaagatgagtgtttgcacaagggacaagtgagctggcagggctggtgttggctctagcagagccctcatcccacccttgcacacagccagcagcccaccctgttaggcctgaaagaggtgaggaggaaaggttctagtgggaaatggttctgtggctggagaaggcattgctgggccctgcctgtctccccaagccagcctggaggaggatttcttgtaccgaggcctcacgagctacaggtcatggtcatccctaacttccctagtgtgtgcaagacttgggggatcttgctgaaatacagactttgatcaagcaggtctggggcaaggaggacacgcttcatttatacaagttccggagaagctgccctgctgctatggcggtgacagcggtggtcagacattcacggggccagccccaagcccacctacagccttgcccccacctgccgctcccctgttgtgtctgtccatcctggtagactgaaccctaaggacagaaattccttttatccaggggttcctccccactgcctgctatagcacctgctttttaaatgagctctcagcagatgtaaggaatgaatgaatgaatga

SEQ ID NO: 461629 - DNA, 137 bp, Homo Sapiens
atatttctttacagcaatgtaagaacagcctaacagacagcctcatgatttttttgaaccataggtgctacagaggctgagcctcccttgaagctattactgaccaatcagaatactatcactaaggatctctctcg

SEQ ID NO: 461630 - DNA, 177 bp, Homo Sapiens
tatggcttgtgttttacagcctcatgttaaaatgagaaaaggtgattagctgagatgttagacacggactgtcccccctattaagatgccttctgctgattaagtccctccctcattcctcccaagctcagggcaggggctttgcaggaagaggttaatccagcctgtgtggtttgc

SEQ ID NO: 461631 - DNA, 419 bp, Homo Sapiens
ggctgtgagcatgtgtgtgctgtgtagtggaggggagaaagaaaagaataagaagacaagctctagaagcaaaggcagccttcctagttattatttgatattaggaaagacatcttaccgtttgtttcccattacagccttcaattcccttttcgttcgggggacctgaagcacagagccagcttgttgattggtttgagtttaattcatttgtgtaatatccctgttccgatgatgtctaattaacacttttgttggggggaataaaacctcccataatcattaatgaacaggggagaggaggggactctttcccaggcagcagcctcgatgctactgggctgtttgctggctccatcttagagaagtcttaatgagacatgtcttaacaatgggattctcgtccactttggaccagg

SEQ ID NO: 461632 - DNA, 444 bp, Homo Sapiens
gagggcagcctggactgtatacagctcaccaatgactacctgtgtgtttgccgtagtgcctttactggccggcactgtgaaaccttcgtcgatgtgtgtccccagatgccctgcctgaatggagggacttgtgctgtggccagtaacatgcctgatggtttcatttgccgttgtcccccgggattttccggggcaaggtgccagagcagctgtggacaagtgaaatgtaggaagggggagcagtgtgtgcacaccgcctctggaccccgctgcttctgccccagtccccgggactgcgagtcaggctgtgccagtagcccctgccagcacgggggcagctgccaccctcagcgccagcctccttattactcctgccagtgtgccccaccattctcgggtagccgctgtgaactctacacggcaccccccagcacccctcctgcc

SEQ ID NO: 461633 - DNA, 211 bp, Homo Sapiens
cacttttcctactaaatgtaaccacttgctaacaaattcccttcttctcaacagtcatgtgacactgccagcagcctcagtccttcctaaaagtgcccctgccctcatctccttttgtttccgccatagcccctctttcctgccaatccaaagcatgagcatcgttctgtctccctcacagctgccactgtgccctcagttttaatctctc

SEQ ID NO: 461634 - DNA, 737 bp, Homo Sapiens
aaaccttatctgttctcatctattataaaggagacaatcctttcattttatatggtatctccttttgaaggcgtcctgttagtgtcctattatcagccaatctgtcattaaatatttatgttcctgcagcaaggcacagttcagttcctagctctgcaggccataagaagacttgtaagtaaatcctgtcttcagttgtttacaattgagtatggaaataagataactaatgaaacaagccagtctataataagtgccaaatgagaattttgcaaggaggtccttctgtaaattctatttgttcaggctattttaaaaaaatctgtgtgcataaaaagttcattaaaataatattatccattgcaaattggggcataaatgcaccagatcctaatgcactgaatcatctttgtgaccagggaattttgaatccagcctgaattaaaatatttcctagtttggagctacattttagattaagcccattaattcaatgatgaagagttagaatcgataatttaagaattcacccttctgaaatcatgtgagaacaaaactcctgacctggatgtataagcttaatttcaagattgtctttatctttgagtgctggaaaattgtccattggcagactctgaaggcgctaatgaagatattgttaaagtgaaatgttttaagcaaatcaatgtaaagttcttctatccatgacattagtgctagctggggtgccgagctcg

SEQ ID NO: 461635 - DNA, 233 bp, Homo Sapiens
ggggacagtacattttaattccaacaaaaaatgaaaaatttctcagacacatgagccacatttcaggtgttcaatagctacatgtggccgcaacagctacggaagagtgtggtcacatctctgagcctcagttctttaaaagcagcataatcatacctatcttgctgattgtttcaagaattaagtgatcatctataagcctggcacctaaggccgcatgcggtggctcacac

SEQ ID NO: 461636 - DNA, 878 bp, Homo Sapiens
tggagctcggtaccccagcgccattagccttatgcacataccccacacgtgcacccatccacatgctcaaacacctgggcacacatgcacacacacaccctcacactcgccccagattccaagagcaaaccagggcagtgtgcagtcagctccatccaggaggaagacgctgacactcagagactagagccacctcctctaatctcgaatcccacgctcagcaggcaacagcccagatcatcaagtgaccccctggatgccttgaaaccaggacgcaggtgcctcagccagaggctcctggcagtacccccttgaagaagggcggctggaaagagacatcaacatctgatgggtgcacccctcctgtgctcctccagagccatctgtcatcagagagcctgggcatctccaattctgatgagtcagcacctccaagaccaattcccagaccctagagaatgacagttaccagagtgaggtctccgacccttctggagctctcccaccccatcctgtcacccctgcctctcagcctgaccgccatgtaaccctgggggtgctgagaagacaggagaaggggaggggaagggataagggtggccctgcacgtctggggtcatcagtcctcacaagacaccacgattacagacaccacagaaatcatttgggctgaaccgtgtgagatccagatggtccagatccaaacccaccatgccctggccatgaccttggagatggtactgagcagttgaagatatcagtggctgtactcaccttacagatcattctgacggctaagtactgataaagacctctgcctgggagaatacacgcatgacctccaccttgtcaaggtgagaatcaatactttacagatg

SEQ ID NO: 461637 - DNA, 519 bp, Homo Sapiens
tgagccaccgcgcccagcctcgggggtttctttttagtggaaattacttgtacctttcttactttgaagcattttgtttgtgtctacacaaattttgaaattttacatagaaccacaacaggatttagggggtggggaggtgggaggcaaagcagtaccattgatcaagtttgttagtttaaagctggtgtagtttggatgtttgtcccctccaaatgtcatgttgaaatgtgatccccagtgttggagggaggcctggtgggagatgtttgggtcaagggggtagatccctcatgaacggctgggtgctgttcttgcagtagtgagttgagttcttactctatgagttcacagaagagctggttggttaaaggagcctggcacctcctcctctctcgctctttctcttgccatgtgacacgcctgctcccccttcaccttccaccatgagtagaagcttcctgaggccacaccagaagccgagcagagctgttgcgtgcttgtacagcctgcagaacc

SEQ ID NO: 461638 - DNA, 354 bp, Homo Sapiens
cgacacgcaatgtgcccatgttaacaaatctgtgcatgtaacccctgaacctaaaataaaagctggaaggaaaaaaaacaagtgggaactcaggtttattagaaagctttaaaatatggaatgaatgtcggacatttttaaatagaatagtcaaaggttagcataataaccaaatgttttcaatgaaaagattacataagttgaagtaaccacatttttaaaaagcacagcgttagcatataaatgggagcatgcttttactctcctcttcacccaaaatacatacttctactacttcctcaccatgttgaggtcaaaaactggaggcttagggctgggcgcagtggctcacac

SEQ ID NO: 461639 - DNA, 125 bp, Homo Sapiens
acattcagctcggtacccagcgccctagcctatataactctaaaattaaaatgaaagaaaaatcaaatatcaggatttagatgggccttaaaagctatttagttcgacgactgactcaattcctg

SEQ ID NO: 461640 - DNA, 192 bp, Homo Sapiens
aggcagtgtgaagaaattaagagcagcaattggaccaaagtgtttgtagtgcactaaggttctacctaaggaatcgaaacgcaactaaaatgcaattcttctaaatttttcgataacaaaccacaaaccacgactgggtgattctcattcataaatcaccatgtgttcaaactgtttaatttttaacagtgc

SEQ ID NO: 461641 - DNA, 323 bp, Homo Sapiens
gccgcgccacagcctcatccgctgccctcagtttcccctgctgctcctgtcttgccttggcgtgtctgtccctattgcagccaggctgatctgtcccagcgcacctcactcttgcctccagccatgggcacggcctcatcgcgtctgcgttccccgttggaggccttgtggaggccctcacccatggcagcttttgccttccctctagagtttaaagatacccattatccccaaagagtttgggggcaaagtccccaccgtcatccgccagcgctatctcaacctgttcatcgaggagtgtctcaagttctgtacctccaacc

SEQ ID NO: 461642 - DNA, 462 bp, Homo Sapiens
aattcgagctcgccacccactagcctcatgcgtgtcctctgtcatggctctgagcacaccattcatgtatcgagttccctggagactgtgacaccggcacgccagggtcagtggcttttctagacagagtttggaggcggtaggtgctcagagagtgtttactgagagtcagtgaatgcccagaggtagcaaaaaccaccacccaattgtgcttgtttatggtgcacctgctgtgtgcccggctccgcgcaccacacgattccatttgacctcagcaatcctgtgaggcaggtcagtgattatccccattcctcagatgaggagccgaggcccagagaggttagtggctggctcaagggtgcagagctcggctggggcctggggccatctgaccccagcacccgagctcttatcttcatgatctcaccagcatagaatgaggctagtgggatgaggctagtg

SEQ ID NO: 461643 - DNA, 371 bp, Homo Sapiens
  misc_feature (258)..(291): n is a, c, g, or t
  misc_feature (293)..(316): n is a, c, g, or t
ctcagcctactttttaagcagttgtttcctatgtacagaaatatactcaattattttaaatcgggggaaaaatcctcaaccacaagtaggaacacacccagcactccgaagaggccccttaattgacccattcacctctttagatatctcagctacacgtttgcctggggattgatttttggccattgtgcgacgtctagtgacatgaacactggatgtggaatgtgagcattccctttgtacgtatggtctgcgtgnnnnnnnnnnnnnnnnnnnnnnnnnnnnnnnnnntnnnnnnnnnnnnnnnnnnnnnnnngtgaggaactgaagttttcattctactggatattaatttctatttcaattgcccc

SEQ ID NO: 461644 - DNA, 426 bp, Homo Sapiens
cccactagcctcatcaccctgtatctgcaaacctcacacctgtgtcaaacaagcccttctccccacctgggagctgcctgtcaggaagccagggcgctggctgttcctggaggtccgtcctttccatcctggccccttctccgggacgaggccacccatcagcatctccactgtagaggggttggttcctggctcccttccaggggcagatgcagccaaaggcaccctcttctcactgagagctgcccctccactcaaggcccccagatcctcatcccatctactgctctgactagcccagcccctgggtccacaggtgactccatggcagtggtgacttgcgctgggtctcgagtgtgcacacagagcccacagcccatgtgctacaccaaagttacaccagggacttccagaaccactcttttc

SEQ ID NO: 461645 - DNA, 138 bp, Homo Sapiens
accacaagctaaaatttattaacctttgttcacaatcctgaattaatccctatttactgtgatgacagtctgaaattaaaacttttgaaaagaagaatacctaggccgggtgtggtggctcaagctgtaatcccagca

SEQ ID NO: 461646 - DNA, 403 bp, Homo Sapiens
cagcccactagcctcataaactctgctctgaatgttatttataaaatcaggttggagtttatatccttattttatgcaaacagtttctagctaatgtgcaaaattatcctaatcatgtcaaagtaaaaggaaaataattcacagaagcccctttctatagctacagctcacaaaactacagcttcactagggtatttaactggaattaagctctatagtcatttaagatttaattggaatcaaatgtgccacacttaccatactgacatagtcacaagagaatagaattgtgccgtgccaaaataaatgtttctctgactgagattatgggcattccttttcaaattaattagttcagaattttccatttttattaacagattgcttatactacaacacaatt

SEQ ID NO: 461647 - DNA, 288 bp, Homo Sapiens
tcactagcctcatgcagacgttgacaattaaattaattatgattaaatacactttaacatagtctgtgccgccacagttgaagtgctcagtagccacaggcagctggtgccactatagaggacagcacagctagagaaggtttccatcactgcagacagctcttagcgtggtcagtgtgcagatggatgagccagatcgtcaagtagggggccctgccagtctctccagtgcctttgtgccagtttcaaaaggttttctctctgggcaggtgcaacttcttgccaagg

SEQ ID NO: 461648 - DNA, 426 bp, Homo Sapiens
caccatctgagaggccaggctaagtcactcctcctcctgcccggggcattgtgatgctctaaccagagtgagcaggtaagagattgaggggtgggctgcccagttcctcacctgggtcccccataagggacataatagcgattcatgaggtagttctttccctccaagctcacagagacagtcctgttcttggtccaaaagtccaattccaaggctagtgtttcaatgttttccctggagtgaagcagacaacacctcagcccaggcgtgctgcccatccccagccctgagaggtctgagggatgggtgggtctgcagagcagcacagggagggtggtacccactgtagaaaggcggtgtcattggtgtgagtcaagtagcaatacatggttaaggttatggggcttggggaaccttttaaagtga

SEQ ID NO: 461649 - DNA, 425 bp, Homo Sapiens
gactagtgctcctgccctcagagccgaccccagcctctgccaggcacatttggctattcctccctaggggcaggatgaagggctgggggactgcccagtgttacttgtcaggctgtgctgcccagccctgtttatctgtgtaattatttttgtaaacattgtattctctgtggtcgccacctcctcgcccccagcctcgggttcagtctgtcttgcaggcctgcttgcacctcattgggctgctccggggtctctgcccctcattccaggcctggctgtcaggcccagccagcaggggcccgtgacccagcagcctgcccaaagcatttgtttctgggggatggggtgggggctgctccacagtaggtttgagcccagcaccctggggaaggggaccctgcccgacacccctttgccctccctcc

SEQ ID NO: 461650 - DNA, 145 bp, Homo Sapiens
gttttcatcatcacaaccatcaccattatcaccactacaatcaccatcggtaccatcatcatcgttgtcatctttttgtcttcatggtcacaatcactatcaccatctccaccaccagcaaagccactactgctcctcagtgctc

SEQ ID NO: 461651 - DNA, 261 bp, Homo Sapiens
tgtcctgccgacatgctttggatgtgagactgctcttctgtaaagttaaataacacatgacaacaagacggatgccatggggtgatatgtggttaattgtcaagtgatcgtttcaggctatgagctcgcagaagataggatccctgtgggacatactgcaggaatttgagactttcataatgtcaagactgggcgtgcacttgggaattgtcttcatcaaatcactcatgatagagatgaggatatgaggctagtgggctg

SEQ ID NO: 461652 - DNA, 379 bp, Homo Sapiens
atcttttcaagcgaaggggaggtattaaaaatcaagaggtcaataggtcttgtttctaaataaaatttcccagagggctttcccaccctcccggcaaatcaaaagacaccttctgaaagcaaagaggcctccaaggcatgggttgccagcctggcttactgtccccacatggcctcggagacaacaagcaagtcactgcctcctattcctgtaggtttcacatgtagaatgagacaggccttctccttgggctcccgtccctgactcctaactctcagttctccattcagagatagggagagagaaacattatctcctcaaacttccaaacaaggtgtccttatttctctcccaggggcatatgcactccaatttgtca

SEQ ID NO: 461653 - DNA, 405 bp, Homo Sapiens
acttcactcgtacccagcgccctagcctcatatggacccttagctaactccaaagactccagttacactcttctttcctttccctttctgtcttcaggtcctgggctttattttctcccatggcctcttttatctcagcctgctcccttccatgcacttcttagtgggataaaccacacatccccataggcatttgtagtactggggctgatgggatggggttacttgctcagactcagatgaagggcattcacagtccaggagcacctgagtctaagcctcatgagagaatgccatcgtgggtcataactgggctctgttcagggcccaataagcacagccttaaaatggagtctcaacctggtgtccaggcctgtagacagagttcaggggtctgcgaacttg

SEQ ID NO: 461654 - DNA, 413 bp, Homo Sapiens
  misc_feature (236)..(362): n is a, c, g, or t
gttaaagccaggctgatttgttcttggatcttaagtgtgacaaagcctgcgggaaggaaccacattctgaaggtttgtgggctgtgtgagatccagagaacccaagggggtttttttgctcttgacaaacgaatgttaggtatgacctatgatgatacaacttctgcaaaattgaggaccagcctatttcttcattagaaatgcaggaaacctggccgggcgcagtggctgacgcnnnnnnnnnnnnnnnnnnnnnnnnnnnnnnnnnnnnnnnnnnnnnnnnnnnnnnnnnnnnnnnnnnnnnnnnnnnnnnnnnnnnnnnnnnnnnnnnnnnnnnnnnnnnnnnnnnnnnnnnnnnnnnntgggcgcctgtagtcccagctactataggctagggcgctggggcgagccaa

SEQ ID NO: 461655 - DNA, 366 bp, Homo Sapiens
cactagcctcatgggctagacaggttcacgggtctcacaggctcatggggctcagagtcccggggtacacaggctcatgggtcacaggctcgcgggtcacagagtcacagggcacacaggctcatgggtgtcaggatcccagggcacacaggctcatgggtcccagaggctcgggggcgcagactctcagggcgcacaggctctcagggcacacaggctcaaggggcacaggctcacgaggcacagactcacagagcacacaggcttatggggcacagagtcatggggcacatggctcacagggcacacaggctcacagggcacacagactcgcggggcacacagacttatggggcacacagactc

SEQ ID NO: 461656 - DNA, 414 bp, Homo Sapiens
tgagccactgtacccggctggcagtggttttcttagcccacctctggtcccctccagtggtggctttccccaaggaggatcttttcttaactttgcataagtttgggacacagcattagggagtacagctaaattcttagagattagaatctcttctgagatgttcaagccagaaggaagaaggcgttaatcatgcagcatggcttttcctgaatgcaaagaccagcctgggcaacatgacacatgcaaggtcaacaaggatattcctggacttttgaagatgtccccctccttatcatggtgagattatggaaagcaatacctggactccagggccagctttgtctctaacttgcttcatggtcttggaaaactcaatccttctctctgggcctcagattcttcatttgtaac

SEQ ID NO: 461657 - DNA, 281 bp, Homo Sapiens
cgtttaatccagcacctgctgtgacattccttggtgactgtcccgcctggaagagactcagtttgagcttgccatccttaagaaagaggacgaaactccctgaaccacgttgaagttcgccgaaaagcaaatgtcctgctctgttccacgttcgaaattgaaaagtgacagacactttgtcctccccagagttgcctggcagagccagataactcctggagctcagaaaagtcacagggacagtctgtggctgtggacatgagaaggacacatttcccatc

SEQ ID NO: 461658 - DNA, 398 bp, Homo Sapiens
tgccaataaggatggataaaatgtggtatacgcatacaatggaatattattcagctataaatccgtgaagttctgatacactatgacttagatgaaccctgaaaacactaagttaagtgagtgttttcaggccctccaggcacaaaaggacaaatactgcatgattctattcatatgaaacatctagaataggcaatccataaaatagaaagtagattggcggttactaagggctggggtagaggggaataaggagttattgtttaatgggtatcaagtttcagttgagggaaatgaaaaaagttctagagatgaacagtagtgatgtttggccaacattgtgatgtatgccaatgaattgtatagttaaaaacagctggccaggcgcggtggctcat

SEQ ID NO: 461659 - DNA, 264 bp, Homo Sapiens
ataggatgatcagagaaggggtctttaatgccgcaaaggatgaggagagagccaaataacgcagagaagagtgtttggggtacagaaaacagtcagtgcaagggcactgcagtaggaggggcttgcacatttgaggaacaggttggtggtccctgtggccagagcaaattgagaagagtgccgaggaagagatgtgcttggaaagggtcagattcatgccactgggatgggatgagggtagtggcgctgatgagactagtggcg

SEQ ID NO: 461660 - DNA, 284 bp, Homo Sapiens
agctcggtacccccctgtgcgctcctggaactgcgtgttgaacaccatgtccttactctgtgaggggcaggccttggtgaggacagggtaggtgaggatccctgtgaggtgggaaaacagtaaagaacattttgaaaatagaattttccaggcaaggattgtaacaaaaagacctaagaaacgtagtatttgtcctcctgtgtttatcaccctttcggggccaattttaataacttcttgtttatgttgcaaaactagatttcctaggaagattgttctgatgt

SEQ ID NO: 461661 - DNA, 212 bp, Homo Sapiens
gtcagtgccagccgcagaagcctcatgcaatagacggatcaagggcaatggggagaaaagagagggggtcggtgaagtcgtgctataaatgggggcagaggtgggtccaggaggctatgctcagggtgggagcagccatgggcaggcgccccaggaagagggaaggtctgatgtgggagccaagcacactgctgggagggtgtccctggagg

SEQ ID NO: 461662 - DNA, 247 bp, Homo Sapiens
tctagcgactctagcctcatggataggtggggctgttcacaatggagcagctatctactgagagccttctatgaactaggaactctgcagagtggatcacatatgtatattatcttttaatcctcgtaacagttcaaagaactatggtgctcttaggccaggtgtggtggttcacacctgtaatcccagcactttgggaggcaccactagcctatctcctagtgttaatagtgcttctgtcaatagg

SEQ ID NO: 461663 - DNA, 293 bp, Homo Sapiens
gccattttacttgtctagtgacatttagagtgttttgtctaattgggcaattgaaaatgatatgaaaaatgtagcttcattttatttgggtaacttgagacagttatgtcttttaatgaaattttaaatcatcactgtggaagagtcgatttttaaaaaatgatagttgcattcttagagctgtattttatttagattacagcaagtatacgcacttaggaggattgtgtgtgagcatgtatgtgtgtccttttaaactcaaggataaatgtgtgcgaaaaacacactaacta

SEQ ID NO: 461664 - DNA, 258 bp, Homo Sapiens
cagcgccacagcctcatgtctgttgacattttatttgtccttcaagatttaactttggtatcgttaaatctcttgaagcctttctagatcttaccaagagaaaataatttccttatctgttgtatcatgggactttattaaagctactgatattatggttatctatacacacatttctttcctctattatggattgtcttttattttgcaatatacaacagttatttgagtacttactgtataccaggcactgttact

SEQ ID NO: 461665 - DNA, 166 bp, Homo Sapiens
  misc_feature (48)..(59): n is a, c, g, or t
ccatatccattagcagccatttcccattaactctccttggccccttcnnnnnnnnnnnngcaaccactaatttgctttctatctctatggatttgtctattctggatgtttcagataaatggaatcatgtaacatgtggacttttgtaacttgcttttttcactta

SEQ ID NO: 461666 - DNA, 367 bp, Homo Sapiens
ccctgtggagttgatgtgtatataacatttgctgatagctaaagtttatagagccaggcacctgcagagtactttatgtaccttatccatataattctccagttgccctattaagcaggtactatgattctccatcttgcaggtgaggaaacagaggcatggagaggttaagctatttagccaaggtgatgtagctcataaaagaggagacaggatttggatccaggcttttaaattatttacgtctacctcgcacagagcttgtgcaattggtaagttacatgtctgcctcctctgctcagctgtgagcttttgagaacagatatgatgacttcatcatctgtgtgtcatctttgcaactgagatc

SEQ ID NO: 461667 - DNA, 381 bp, Homo Sapiens
ggagcaccagagatgaatagccccaagtgctccctctttggggttcccaaggcaccctgtgcctgcttccctcagaggaccttccaatccatttgccccgcaaccctggctgctccgacaggggagacttgtctcccttgttcccctcaggatccatagagtggacagtaaaggtgctcagtacatgttggctgagctgaactgcatacatgtggcccccaggttcctggtctttatggacgaagggcacaaggtggaggggggatggggggatgctgctggatgtctcagtgggtgcagacagccctgccttgaggatggcttgacctgggattgacaaagtgtgtctgctgaaatgctgaggtccccacgtgtgaatgg

SEQ ID NO: 461668 - DNA, 418 bp, Homo Sapiens
aggagcctaacagttttctaaaaatctacccttgaagtttgttcctaaggtggggagaagacaatatatttgtgtttattgtaacagatttttagtggaaaagaatagggtcctagagagaatgagggggacctaatttagatggtggtgggagtgtcagaagaaacctcactggggaagtaccattagtggaccttaaaggaggatgtaggacatagcctgtcagagatttaggactagcttttaggactgggtagctaggcgaacacaacattttaggcaaaggcactaactgaggaagaatgggtctcagtgggtttggggatcggatggaaggcccctgtacctggaaaaataggtagcaagtaggtagaataggtaatgctacagtgttggagaggccagggaactgctcata

SEQ ID NO: 461669 - DNA, 218 bp, Homo Sapiens
gcctcacacagacctgcttccaccttctcgggctagtatcctttaggctctccaccccacatccccagcccacaccccagctaagcagctttccggctggtcttgggtggcaggggacataagctatcgagggaggggaagtagcacatcagggccttgggccccaggctgagctgctctcgtaccctccatccaccctggtcagaagagcatcctgt

SEQ ID NO: 461670 - DNA, 444 bp, Homo Sapiens
attatttttaaggctattgattactagtactttagaactttgtatatactgtgtctccccacccccattacaaagtggcctttgcatagtaaaagttcgtatggctttgagtgtaatcatatctttgggtggatagtgcatcactacctttgccttacatgatatattaaataattgaacagcagcagatacctctttaactttattcagattttgtccttggcctgttccccaccagccaaagcagggagaaatttgtagctcaggccctcaagttgaaagtgggcattaatattagcaaattccctttaataatcatcccattaaatttgatgaccagaggggacgtcctcatagcttataacagaaaatagtgtctctaggagtcaagggagcttttcccaaatgttatctattgagcaagattaaagagacagatcaccc

SEQ ID NO: 461671 - DNA, 318 bp, Homo Sapiens
caagttcgtgaccgtgcaggccaccttcgggacccaagtggtggagaaggtggtgctggtcagcctgcagagcgggtacctcttcatccaaacagacaagaccatctacacccctggctccacagttctctatcggatcttcaccgtcaaccacaagctgctacccgtgggccggacggtcatggtcaacattgagaacccggaaggcatcccggtcaagcaggactccttgtcttctcagaaccagcttggcgtcttgcccttgtcttgggacattccggaactcgtcaacatgaggctagtggggtaccgagcaga

SEQ ID NO: 461672 - DNA, 166 bp, Homo Sapiens
gctaagtgcagttagtgtaccatccagttttacaaatgaggaaacatagactcagaggcattaagtaacttgctcatagcctcagttggaaggtgacagaaccagaattcgaactcaggctgtcagtgtctagggcccagttggacccagggcagagcagaatgag

SEQ ID NO: 461673 - DNA, 103 bp, Homo Sapiens
agcctgcccgggctccaaccccaattgtggacctcaggcaagtgactgcttctctgtgcctcagtttccttgtggagtgggccatcgtaaatagtatctgtgc

SEQ ID NO: 461674 - DNA, 339 bp, Homo Sapiens
gatcttgctgcacaattagaaagtatcttactagcagaaataggacttactgaaagtgaagggccacctctcacatctttcaggccacagtgtagctttatgggaatggttatttcccatgatatgctgctaggacgttggcgcctttctttagaactgttcggcagggtattcatggaagatgttggagcagaacctggatcaatcctaactgaattgggtggttttgaggtaaaagaatcaaaattccgcagagaaatggaaaaactgagaaaccagcagtcaagagatttgtcactagaggttgatcgggatcgagatcttctcattcagcagact

SEQ ID NO: 461675 - DNA, 523 bp, Homo Sapiens
  misc_feature (429)..(437): n is a, c, g, or t
cctggagactaaaggtacaaacatggatttctttaaaataactagtgggatgcttttgttgtgtgttccataaaactcttgcacttccctgtgtgtttattcattgaggaaacatttacgaaggacctcctaaaggccaggcactgttctaggcatttagttttaaccaggaccctcaatttctggactacaggacctgtgaggaggagaccgtgcaaatcactgtcccttctgtgtcttctgtgctcagcggaggccatggcacaaagcagggaagtaaccaacatttgttgagtccagttactgagcatggaggacacgggcgctctggacctgcctggagcctggagtctctgccccaacttctggtgacagcagcccacttttcctggggacaactgtttctccctcgttcctcctacttctgtnnnnnnnnncgtggaggggactgcctatcatgggacctgcccacccacctgatccaaactgggccaatggcttcctcttgctcagggatttcaat

SEQ ID NO: 461676 - DNA, 468 bp, Homo Sapiens
tgtagaaggagtaacatcctgttttatgtttagtgttggcattagtcataaggatctggggaacaggaataaattcttaacaattaactatagaaatcccaaacaccttgctggtggagtcactcttctctacgtggtaaactcctacagatcctacaagatccagctcatttgcccctctgtgaggccttcattaactccttcccattaactcaagaacattcaattcactccctcttctagttctctcattagttccacccataaacatttactaaaatctatgtgtcaagcacagtgtctacaactatgcagtacacagaggaatgatacgtgcttcatgcccaggaaggactcactagttagaagtggcaggcatgtatgcaaggttattgttacacagtggactagtgctctaatggagatatgctatgcagagaaatagtcatatcatccctcaagtacccc

SEQ ID NO: 461677 - DNA, 460 bp, Homo Sapiens
  misc_feature (253)..(261): n is a, c, g, or t
atcataatagaaaaataacagcagatttaaagcaggcagaaaataaaatagagaaaaaggggaacttaggaactctatagtttgcaggtctactttagggctctttttctttaacgtaaatgtgcacgaagacgatattacttccattttacattaactctggcaagtagaggtgccataaaacctacagagtgctcgcaagagggtcattcttcttgttttctcctcattcttaggttatttgtttcacacnnnnnnnnncttaagagaaggaactgagctgtagcctagggtttttgtgtggtggattgatgtgtgctgcttgtagacaggactccacagtgtgtcaccagtgagttgtttccgccctgttatgtatctcagtttctctctctagaggtctatgacctctgagagggctccaaacaccgggtgatcagcccttatatgcatttcctag

SEQ ID NO: 461678 - DNA, 170 bp, Homo Sapiens
acttggtaccccattaaaaatagttggtcttttcaagtggcagtcttcatttttcaatttagagtagattattttgtaaaagggaatgtgaacagtcatttttaaagactttcctatatgccagtctctgtgctcaaagtcttatcttctctaatttaataactacaacc

SEQ ID NO: 461679 - DNA, 156 bp, Homo Sapiens
ctctcggcttggactcgatcttccctggccccagcgttactgggactggattagttccctagttcggggtgaccttggcacctcaatggtttccgccgaacccatcggcccgcagattgcttctcgtcttgcggtgaccggctggttggttgggtt

SEQ ID NO: 461680 - DNA, 443 bp, Homo Sapiens
ctcagtccctgccctgctggagctggcgtttcacccggggaatgggcaaaggtgcaatggccggcttcactatgctcacagcgactgccaagagggaggcaggtgtgctgcgagggtgcactcccacccctaggaagcaccccgactgtgctgagcctgagggaagagggggagttcaacagcaggagtgagctgtgaaggcacaccaggcccaggtcacagccaggacggcagcccccggaggggtgagctgggggagagagtcagcagggtccttcagccaggccaggagcgtggagtctgaaggggttccagcaagttcagcttttcccttcatgaacttcacactgcctgggtttgaatctcggccccgccactcactggctctgtgaccttgggcagattagccaaccatcccgtgcctcagtttccccacatgtgcc

SEQ ID NO: 461681 - DNA, 160 bp, Homo Sapiens
tgtttctctttcagcatgtgagaatgaaaattatactttttaacacaagttttgtgattttgctgatcaaggaaaaagctcgtatcagtagaaaactacgcaagttctagtttccaagaccatttagaaatatcaggttaggataaagagtagggggggt

SEQ ID NO: 461682 - DNA, 371 bp, Homo Sapiens
gatccacagttgaaaccccttaaaaaaatcaatgtggcatgtaaatcaaggaacagtacatacttagcttagcagatgtaagcgtaaatgttaagacattgcttagagatccatagttactgagccagctagggaatgagctgtgtggtgatgttaagtatcgttaaccatcacatccagtcctggagctggccagaaaccagagtcccctcattatcttccatcccaccaaaatccagcctcccaatgttgccactgctgaggagtatggaaaggagtcatgagttaatcacttaggaaaaattcatagtaatctcttttgtatgcagagtgccttatggtttacaaagcaattttccaggggtgccgag

SEQ ID NO: 461683 - DNA, 322 bp, Homo Sapiens
aaggagtagagttgtcccacttcttatgtcttcttctgcctttgccttctctgtttcctggtaggtctttaggaatcccgcctagcgggacagctgggccaggcctagtttttgctcatggaacccaaggatagaagcagagagcagtagggggccatcctcgggaggacccaacattcaagttcaggaaggaaactcagtttctctcctgaaaggacttcaaatctaaaagggaggtaggcagcctgggcaacaaagtgataccctgggcattgcagcacgtgcctatggatagtctcaactacctgggaggctgagacaa

SEQ ID NO: 461684 - DNA, 471 bp, Homo Sapiens
  misc_feature (426)..(426): n is a, c, g, or t
  misc_feature (433)..(433): n is a, c, g, or t
  misc_feature (458)..(458): n is a, c, g, or t
gcaacaaatgggtttagttgcacagtgcccagcatgggctgctgtccggcaactaaagtcgtggttgagagtatggagaagggatactgttttccttccatttccggtagttgctcactaccatgaccctgttgttgtgatagctctttgctgtcctttctacctcaccttcaccctatcctcagctataataccgtttagctttgcagattaggagctgggtgaatataatggttcgagtgaatggatgaatgagaatagtcattgtagggcactgctgaggctttttcatacatccccacatttaatgtttacagtctaggcccctccatttacctaatggggtgactgatactcagaggagggttaaggtaacttgaccaagggtcacacagccagtagggaggtgggagattggggtttgancccgggnttcccgttttgacgatagctccttngaccctaggtggg

SEQ ID NO: 461685 - DNA, 116 bp, Homo Sapiens
tgtgtatgtggatgagcgtgggaaccctgaagggagcctctctgcagtttctgggacacaggttgcagttaacctaggacaaaaagtcagtagagtcctttatgggctgctgatga

SEQ ID NO: 461686 - DNA, 625 bp, Homo Sapiens
gtagtttttaattgggagcagggagtaggcaggggaagggttcacaggttcctctgaaaatctgatggaaagttattcattctctccccagataaacgaatacaagcacacacacataaaatgttgcgttggaaaatctggcttggtgaactcaaccagctcatgcaacccctagcaggcttctttctccattttaatcttgcctccctcattgttagacctgctctagggactccaggctgatttctaagtcactttcatgaggtagtgtcgtctacggcagccagaactctccctccctcatactttttggttagagtcaggttttcaaagacattcgtgaggttcacctcaatcataggctccttctggcaatgttctgtgttcctttctcaaaacactgtcagatttgtaaagcaaaaccaagcctttgtgaaactgggctgcctatttttatccaccttccctctcaccccatctcctgaaatacgttgttgttatttctctgattagcgttctagtcgtgcagagagacccaaggctcatggataaagaccaatcacgcagcctagcctcattgttagacctgctctagggactccaggctgatttctaagtcactttc

SEQ ID NO: 461687 - DNA, 153 bp, Homo Sapiens
actgcacccggcctaccccacctcttaataccatcacagtgaccatcagcttcagcataggaattctggggacacattgtgaccacagcagctaccttctggctacagtgagtaatgctgctgtgaacatgggcgtacatcccacaatcccac

SEQ ID NO: 461688 - DNA, 317 bp, Homo Sapiens
ggggtggggttaatagagggatgatgtagctgaataaatggtgaaagggagctaaaggggaaacgagagaatgagggagtgagcgtgccaccaaggtcattgctggggtcaactcccaaaatgggggttgcagaggggagtaaggggtagcaccaacaagtctggtcccagagacaaaaggggtcctgggaagtcctgcgcagggattagtgggcagaggaaacgaactggggccagaggcaggttagggggctgcagagccaatcggtaggtgcaccccaccctcgcagcactctgcgagcagttagcgcacctgg

SEQ ID NO: 461689 - DNA, 478 bp, Homo Sapiens
aaaaaaaccaaagcttttgatcattcccttgtcaacataattggcagatctactctcaaacacacttaagagtattccacacaacatgttcggaattcagatttattgatttccatcgtattgactttaaaaatggtatgaagctgactgcaagaaagggaactggtaattttaagttaaaattaagctaatggtgaaagtacatcacctctggcttcagtcaccacatcacctcagattgaatatagattttttatgaacaaagttccagaactctgaaatccagggatgctgcaggcctctcccggcaatgtccttcactttgggtcagtctcctgggccagaggtgaaagtgctttcaaaaatactgccatttccccagcacagtgtctttgattgcatccacatattgagttggaacccagtacacccagtagtaagaggcttccgtgggggccaactggaaacggccatcata

SEQ ID NO: 461690 - DNA, 555 bp, Homo Sapiens
ccccagactttatctattcagattgccctgcattctctgctgatggaggacttattggagaagaatccagattctaaatataagaacctgatggtgtctcgaggagcccctaagccatctagtttagcacaaaaagaatacctttctcagtcttgcccctcagtgtccaatgtggaatatcctgatatgcctcggtctctcccttcccacatggaagaagctcctaatgtcttccagttgtatcaaaggcccacctctgcgtcccggaaaaagcaaaaggaagtccaagacaaggactatcccttgaccccacctccttctccaacagtggatgagcccaagatacttgttggaaagagtaaatttgatgattccttagtccacatcaacatattcttggtagataagaaacatccagaattctcttccagttacaatcgagttaaccggagcattgatgttgattttaattgcttggatgtgctgatcacactgcaaacctgggttgtgatattagacttttttggaatcggctccactgcagacaaccacgca

SEQ ID NO: 461691 - DNA, 256 bp, Homo Sapiens
ctagcctcatggtgcagatctgtctgaatccagacaacgaggttgtgggcggagaggcttttgagaaccagggagctgagagcaactacatggagaagaaggagttggagcagcagggtgtgagcaccgccgagaaactgctgcaaggacagcgtccctgccctgctggccttggcacaagcctacgtgttcctgaagcagatccccaaggcgcgtatgcagttgaagcgcctggccaagaccccctgggtgctga

SEQ ID NO: 461692 - DNA, 318 bp, Homo Sapiens
cgtgcccgccaacaatctattaatgagagtgcagtcctcctctcctgcagagatttgtccactggggcccagagaccagagaggctacgcttccaactggatacaacagaaaaggttcttgggaatacatggtgtcttgagctgggtcatgaaggccacatagtagtcaaggagttccaagtggagagtcctgatgggcaaaagtttggaggcagacagagggttctgtgagcagccagcaggacagttagggcagtggatgtggggttgcaatagaagaaaaggcttaagggtggttgatgtggaccgtgggctgcg

SEQ ID NO: 461693 - DNA, 648 bp, Homo Sapiens
  misc_feature (110)..(110): n is a, c, g, or t
taccagccatacagttttctcgtatacctgttacttgcagccagcctcatatttagctagaaaaagaattcatggtcatggtcctaaagaagtacacagtctaattaagnaagacaagactgactcattcaaagcaaagtggttatattttagcacagatacggttaatgattctaaggttgtaaactcaaacatttagtagatagggtattctgtgctcttgttcacattctgtgtgagccaattactctgtcctccaaggaccacgtcaccattaccacctgaaccccttccttgaggcatctggcacatgggcatgcctcctctggaggtgaagaaagggaatgcagtccctgagtcgatgatacagttctcttaccattcagatttctcttgtttgaaaatgttttatttcctggaaacacatagtatacaactagtgtgaagtctaaaataaataaaggtatttaaggtattttgaaagtatgcgacagctaacttgttaagcaaaacacaatttaaggtatttttaaaatatgacacatctaacttattaatgaacatcttcatttaaaagaaatatattaatagcattaattaattctgcagatccttactgagcatatagtatgcatcagtgctatacta

SEQ ID NO: 461694 - DNA, 429 bp, Homo Sapiens
ccagccatgtcccctagaccccagccatgtcccctccgagtgtctagcagggcagtggcatcttaacctaccttctctaaagatgacggtaggcactggatcacaggagggaaaggcaaaatgagcaggtggggtgggagtggatttccgagccctgtgcatatttaatagttcagtgcccagtacccacatgaatacgggtacacagttcactctcccatcaggctgaaaggcctcagtgggaggcaggccagaagaggggagtcagacagagctatatgacactgggcattacttaacctctctgaacctcggtctcttcatctgtaaaatggggataatgacagcgctgccttacaaggctggtgtgagaagtacgtgaaaaatagtctgggccaggcgtgatggctcatgcctgtaatcccagaa

SEQ ID NO: 461695 - DNA, 454 bp, Homo Sapiens
  misc_feature (61)..(61): n is a, c, g, or t
ttctttcgctccttggcataaagatgggtcatttgaaacactacataccccattccacttnggacacttgcctcatacactagtggggtgaggtgggtatttagttccttatataaaccatatcttgaatatcacagcatggtcaccttgtggtggcttgtgaactaccacacaccacttctaggcaacttaacaatctgcttttatacagtttatatggttctgcatatgatttcctttgaaaagggccccatgtcaaaaagaaaaatatgaaatccactgaagcaggtaggtaaggggtaggaaatggttgaggccatctcttaaaaaactcttaaccttatcatcctttaacaaaagccattcctaagggacaggaagaaggtaaaactttcctcttgcgtctaagtcacatcttaaaaggtaaaacaggcaggccaggtgcggtggctca

SEQ ID NO: 461696 - DNA, 160 bp, Homo Sapiens
acgagccaacgtgcccggccacacttacttctgtataagaatgaaaatcaccctgttaagtccctagcacaatgcctagcacataaaaaatatccaacaagtggtagccattattataatttctaaatgacagcctgatgcagtcagtgtaacatgaggc

SEQ ID NO: 461697 - DNA, 313 bp, Homo Sapiens
cggctcgtaccctttcaattttccataccggctttcataatgggtactccttcgtcaaaggctgccgtatccgggagaaacataggtctggtagaactgcatattgcccatgcgggaactgggcagcggcgtctcgtccagctctgggatggtcttaatctcatttgcaagatattgctgaagctcgtcctgaacgtcctttaagcggccgacgaccgaaccgtagcgcagggcgagcgtttcccagccgttacgcttaaaggtctggttccacaggcggcgatgaacgcgcatcagcgcctcggtctcttcg

SEQ ID NO: 461698 - DNA, 578 bp, Homo Sapiens
  misc_feature (16)..(16): n is a, c, g, or t
taagggtcaaaaggtncagagaggctcacagtttccaaaagaactttggtacagagaagctggcaagatagagcaggcgacaacagttcccacccgaagaatgtcatgcctggagttctcatgtatgtaattcacacttccaggccttccaacgcaagagccatccacagccagtttcaccactaatttcaaggattacactaggaacaagagcaaatctaccactatcaccccagactatgcccatcatctccacctctcccgctggaagaggtgacaatctattgtccacacaggagccagagaaaataccttaaaacggatgtcgggtcctgtcagacctttgctcaaaaccctctgaggcttctgatcattatctgaataaaatccaaactccttaccatgacctaaagggttcatagcctggtcccttacccaagccctcctcactatactctgtccacagtacccttctttatttttcttccttgaatatgcaaagcttgagacttctgcttcctgacaaggagcaagaggaaccagatacaccctcctgcctgaatgaggtctagtgaaag

SEQ ID NO: 461699 - DNA, 277 bp, Homo Sapiens
aagctaaagtgattttcttgtgggcaacatagagttggttcttggttttctattcattcagccactctatatcattttactgggtattgataggtaaggatttactgttagccattttgttaatgttttctgactgttttatagtccttttgttacttcctctcttgctctcttcactctgtgatttgttggttttttgtagtggtatgctttgattcctttttctttatcttttgtgttatctatactacagatttttctttgtgagtatcatacg

SEQ ID NO: 461700 - DNA, 430 bp, Homo Sapiens
  misc_feature (405)..(405): n is a, c, g, or t
ttaatttattgtttaaatatttttcccttatctaaaaatgtctaaagtatatatttaatcttatccaattcaaaatatggcctctgttacttataattggattaatgtgggctttaatggttgttatacaaggtatcatactacaactcagaaatgtaccttagtaaaaatgccatttattctggtgtacaggggagcctgctgaatcctgccagtacatttggtgttaggctactagaactgtttatagtatgaccttcatctttcaggatgcttgtttaaagaaatgcattatttttgttaaattgtataattaattttgttttatgccaagtagagtagacaggtagaaaataaaaaagtaacacataaggccacaaatcaggacttctgacatgtgaaccnatataataattcatgctggtatact

SEQ ID NO: 461701 - DNA, 418 bp, Homo Sapiens
aatgttattttcatttagatgcctcccaaatcattgtccccgatcttttacaaaagtgccacatctgtatttccaactgatcactgcacagcaccacacaattattctacttctataaactcatcataagacagcccatcttatgaatgaaacactgtttagggaaaatagggcatcagatttccagaactggctatttcactaacttactgagtgattacaggcaagttacttactcccactggattttcttctacatgaaacaaagggattgggcattatcatgatgctctttatagctatacattctataatgcaatatttaaaaatgattaagtcttctccacctaccatctaccaatctccctaggttttccatacttttgtgaatgcaccggctgtatactgcacgctgccc

SEQ ID NO: 461702 - DNA, 392 bp, Homo Sapiens
  misc_feature (25)..(25): n is a, c, g, or t
atacagctacagccacgtgaccaantgcagaaacaggattgtaattgtcacgactatttcctccttattttgttaaaaatgtttgtgcatgttacacttgtactaagaaaacatcttcattaatttcctttctttttccattatcatgtgacataagatttattgattttatatcagcatttaaatgttgttaactttatgtaatagcatttaggttaaggattagtgtgcttctggttgtatgaaggatagctgtattacgttaggtgtaattatgaccttattatttcctttatttggagattaaatatgatttcaggagatgtgtatgggttcaagttgacaaggggttcaagttgacaaggacttgtgatgttaatatatcaacctga

SEQ ID NO: 461703 - DNA, 269 bp, Homo Sapiens
gtgttgttatccatacatggaatggggaggttaggaatcttgaggtctttgggtgcatgattcctgagccatgatttctaatcttgtggctaatttgttggctttacaaagacaatctggtccccaagcaaggaaggctttgtttcagggaggggctatcatttttgtttcaaaattaaactatcaactcaattcttctcaaagttagtttactctacaccctggagaataaagaaggcctggagctgctgaagactgctattgggaaa

SEQ ID NO: 461704 - DNA, 380 bp, Homo Sapiens
gtcacatctgttagagctgttgaggtgatggtttggctctctttctgtatatcatgctttgtgtgtcttacaaccagaatcccttctgtgctctctagctattgagacttcatgaatacccggtagcataacattacaaatctagattttttaggtaaagtttccaaatttttatatattggctcaaaattatttaatattgtataggccaaacaaggtttgtctgtgggctgtccattgtccaggagctatcagtttttaagggctctggagagctctggctcggagcccagtttagaaagagctctgggtcttctccagtcctcatcatctgtgaatttctgattttcctggatttagtatgagccactggaaggaac

SEQ ID NO: 461705 - DNA, 310 bp, Homo Sapiens
gaggcaggagccactatgtccagctaacctgtaactcttatcacgggattcttcttgggaacggctaggagcagctatcttatttcctgtgtttgggctttactacgtatgagacctgtaaccccctctacccctattaccactttcattcaacttagatctcaggccactgactgagaaaggccttcttttgaagagctgaaagcttgtaaggcatgttttcttgccatctaccacttgattactcagccagtggaacatactttcaggttctgctgagtcagccgtacttctagagtagctaagtaca

SEQ ID NO: 461706 - DNA, 443 bp, Homo Sapiens
tgtaaccatttcccgtctgcaccgagaggacacggtgtggagggggagctcctgcccacggcacttggaaggtgctggggcagaacccagctccagcgctgatgtgtggcagcatctctggaaacttccatttcctgctctgtctgaggaggcggggccctgctgatgtctctgtgtcttggagctcaggacagtcaaatctgcaccacggctgcctcccctcttgccgtgtgaacgtggcaggacgtccactccaccccacttcctgcatggacatggctccatggctgtgccctacctcccttcctgcatgaatgcagcaccacggctgcaccccccacttctgtggttgtggcatgatggctgcaccccgacttcccatttgaatgcggcaccgcagttgcgcctccctgccacttcccctgtggacgcggcatgatggc

SEQ ID NO: 461707 - DNA, 141 bp, Homo Sapiens
tcctcacacagctcgggtcgcagtttgtttggaatcagggcgtgtgataagcctgaggaaggagggctggtcggaggtcttatgtttggcttcacagagtgtgaataaagagccagctactgggctgagcgcggtggctca

SEQ ID NO: 461708 - DNA, 256 bp, Homo Sapiens
ccccgggtcgcagagcgagactccgactccgtctcaaaatataacttttacaagaaagtgtgatggtggctgtggagcagaggagtcttctttagctcgtccacgtgacgtgcaggagtacatgggagtcgtgtgctggtggacacacagaagcgactttttcctttgtctcatggtggaatgctggaggagcaagtgttcccacttgctgagccgcgagtgtacggctttcgcgacggataagcggtttctctca

SEQ ID NO: 461709 - DNA, 438 bp, Homo Sapiens
ccccataggatctcaacttaactcactcaccaggagccaggtcgctccacacctcatttcaagttaacttagtcaccaggagacaggtccctccatacctcatctcaattaactcactcatcaggagccagtcctctccatacctgatctcagttacctcactcaccagtagccaggcctctccagacctggcttaattctcactacacttaattcaattaattctcactatagccctatcagacaaactctaggatacacatgaggatacagagtctcagaaaggctgagaaagtggcttgaggtcacctaggtggtaaagtggtagagctaggagttgaaggccagtctgactctcaagtccacgctcgttccattgcactatctgcttttctttctccccaaagccacaatatgccacgatgcgacccgggctgt

SEQ ID NO: 461710 - DNA, 537 bp, Homo Sapiens
  misc_feature (107)..(118): n is a, c, g, or t
  misc_feature (423)..(423): n is a, c, g, or t
  misc_feature (500)..(500): n is a, c, g, or t
  misc_feature (516)..(516): n is a, c, g, or t
tttctgaactaacctgggaattttttatgggtttttattatgccaactattaaatcaacattacagttcttccctctgtatttctcctgtaaaacattaggcctgcnnnnnnnnnnnntctttttaaaaataattgccataaagtatttgctctgggcctactgtatgcttcttttctttttctctcttttcaactaagtcaccgtcaatttattaagatggccataactattcaaaacctatgctaagttcctcaaggcagggtcgcatagtgatgaaggttgggatggggctacggatagaaaccagaacaactctagtttatttaaaacctgtatttactgcccacttccccttagacttgaccatatgaccccttgctcccattctaaggcatagggggcaggctttatttttacaatnggtaataggtatgcacttgaggttttattcaaagagttgcggccggttggtgaaagtttcacaacccggtttcaggnttttgttttgtggccngattctaattttaccatgttt

SEQ ID NO: 461711 - DNA, 113 bp, Homo Sapiens
ccctctaccactcataaggtggctgttcctacggggtctagcatctgtttgactttctttgttctaggaaaggcttcttgtcagcactgtcctttccaagatctgcactgcac

SEQ ID NO: 461712 - DNA, 327 bp, Homo Sapiens
cacactctacatatttttttgtatgtaatctgttttatttgccccctctatccacctaatatattgtgggcaactttccatgtccataagtcatttatttgttaaaccatgtattaagtaccttctacttgctggtcactgttgtgtaccattatgctttgtaggtacagcaattccatcttatgactcacctaacacttattaggcagtgtctaccatcctccacgccctccctcaaaaagcctgataagcaggagacttcttccaagtcttcctaccttggtgacccataccgtgcgctcgactggggatgctctagatcgacca

SEQ ID NO: 461713 - DNA, 189 bp, Homo Sapiens
agcgagccgcacggtattgtaaatgttcaagagtgccattattacctctgttttacagatagtaaaccaggagttcaaaagacttgtctaagataaatgaaaactaactaactaactagcagtgaaacagtgatatctagtttctattctattcttatttcccttaccacatagttccatctccctact

SEQ ID NO: 461714 - DNA, 370 bp, Homo Sapiens
agctctcgccttttcgccatgatgcattaccgtgtgtagcctccgcctcccggtcacgagcattaccgtgtgagctccgcctcccgtcagagcattaccgtgtgagctccgcctcccgtcagagcattaccgtgtgagctccgcctcccgccagagcattaccgtgtgagctccgcctcccgtcagagcattaccgtgtgagctccgcctcccgtcacagcattaccgtgtgagctccgcctcccgtcacagcattaccgtgtgagctccgcctccagtcacagcattaccgtgtgagctccgcctccacagccacagcaataccgtggcggcatcgctggggaaactctagatcgaccaacagcagcaa

SEQ ID NO: 461715 - DNA, 138 bp, Homo Sapiens
gccagatggattttaaatctgccgtaacacttaaatatttgtcaagtcggctacgtttgaggttttcgcagacttgaagcggcattgtaacactttcataatcttgaatgctgtcatgactgtctcaacatacaaagg

SEQ ID NO: 461716 - DNA, 155 bp, Homo Sapiens
ctctgaaagggagacaaattgcccatcctctgaggacttggggtggattatctccacaccctccacaagcagcgtgttgaaggcagagggtggcctgcggcggcgcgagggtctatggacacataccgtgcgctcgctggggaacctctagagac

SEQ ID NO: 461717 - DNA, 177 bp, Homo Sapiens
agcgagccgccacgcccagcttttgttgggctttttgatcaccagttgtcatgggcacctatcgcctttttgtgtctttccccaggctgtcagatagctaataaaaaaatacatacaaaagtgcacctaggagttttaagggaaaaagtagtcttttgtgataccgtgcggctcgct

SEQ ID NO: 461718 - DNA, 168 bp, Homo Sapiens
gtggcgagccggcacggaatggagagagaatggggcgatgtttctcagggctgcttcaagcaggattaggggcggcgtgggaacatagagtgggagagattaagctgaagggaggtcttgtggtaaggggtgataccgtgcggcatcgcatggggatcactctagagt

SEQ ID NO: 461719 - DNA, 400 bp, Homo Sapiens
gtagctttggtgggtgatgaatgtatttacaattttgattgtggttatggttttgtgtgtatatacattccaaaactgatcacactgtatactttcaacatgcagcttaatgtatggcaattatatttctataaagttattagataaaaagcatgtgacagatctatataatactaaattgaaaagataagtgttaagaggaaaaggcaagtctcaatactgtgttcccatttttgcaaaagaatgtgtatattgtatgttatgagaatatgcaataaaggtttactacactatatccccactgttaacatgggaaaaatattaagtgattcaataaatatgttgtagaggcatattgattgacatgcaaagatgtttacagtataccgtgcggctcgct

SEQ ID NO: 461720 - DNA, 221 bp, Homo Sapiens
gccgccacggtatccagtggatttttttagtgtcaagaaaataattttgattggttcatctttaaggaatgtgttacgaataaagcatgtctacctgtcttcagtataccagctaactatagtaggaagaaatatagtagtctacttagatcaactataattctttaatgcagaacaagtttaaagtatttaccttatttttagcccccatccccttaagt

SEQ ID NO: 461721 - DNA, 537 bp, Homo Sapiens
atcgaccgactactgcaccactgcacactgccctggcaaaggcgaagatacaactcaatttagcctgatattctaatgtgccctggagaaagtgccctcataattaaggatttgcacaatttctattgggatgggggaggtatcgtgtgccacattatttatcaatatcacaagagttcactttggaattcagcagtctggagtgcctgccaactacagatattctcacccaatgctaatctcgagccacatttagcctaaatgcaagaggtttttattggcacatgtggtgcccttgggtggcattgattaccatcgggtttctagaggattatttgacagggcttagcacaatcagctcatgaactgccctcctctgctccacctctcccttttgcatcttgttggtacagcttcctgagaaacgctggttggtcatgctgccaatgtcagctcatccagtttgcagagtgcacaagctgccccttgttctccgtcggtgcagaccttcaaatacaggttgtccacccggatgtc

SEQ ID NO: 461722 - DNA, 334 bp, Homo Sapiens
cttgaacatacataagcatatataaggttaagacttgccccaacatcactcagatgtctctcctctaaaatcttgatggtttttcgtgcacacagaataaaatctaaactccttagcgagaccctccatgatctgaacttcacatcttgtaacgcctacccctcgcccgcaaaagcctatggttcagccagacattttccccagtcttcgaacacactgttcttgtcttcccacatcttcatgccttagcccaattccttggctttttcccacctagttttctggtccaacttctaccatcctttaagattcagttcaaatgtcactttctttc

SEQ ID NO: 461723 - DNA, 399 bp, Homo Sapiens
agacggtccttttctgcagcaggaggggcctaaactatgtaataacttttggataataaagaatatggagggctctttaagaacaaagtagacccctacccacatagcagaaagaggaggattgccataactctctcttaagcatgggatggaccataagaactgtctgtggaattgggacctgattgctcaaggattgggtgtgactcagggaggagccaggtcatctcatccagctcccactggcccagctccattctggagtttcccgagacagcgagattcttcatggggtggaggggacaggtactggggaggcagaggtctggtcacaggaattatgaaggatccaaagggtctctcgtgacacttacagagcaagacctggtttatctctcg

SEQ ID NO: 461724 - DNA, 244 bp, Homo Sapiens
cacagcgtaattttaaatatgcaaacctgatgaatttaatcagaatacaaatcacattaacatacagacccaccaagagaataatcttaaaatgtagaattgtagatattaactttccaggtagttagagaattcagtgaatatttcccatttacttccactccaagtaactgcagtttttactacatttcaaaaataaggtttgatgagagaagaaaaaaactttttaaagcaagaggaccta

SEQ ID NO: 461725 - DNA, 362 bp, Homo Sapiens
  misc_feature (163)..(182): n is a, c, g, or t
acaaagccacaggcgataaaattgcacagaaatataaaacccactcaaaggaattcatatgaaactgatgaactctgaataggctccgtggattgaagcaatgtcaatttcctggcttaatatttgttgatatgaaagacgttggtctgtgtttgaaactacnnnnnnnnnnnnnnnnnnnnataattaattaaaaccttttactttgtggtacattcactttgggtcagttatttataggtcgtgttggtataaaggcatatcttcctgtgttccaggctaagctagaattttccttatgattcaggattttgtgtgtgaatttgttagcatgtatttgttcccagccagtggtgcagagt

SEQ ID NO: 461726 - DNA, 199 bp, Homo Sapiens
cttttgagcaaagacctgaaggaggtggaggaggacggccatgccgatatctgggtgaagagtgttccagatagaagcactgtgcaaaggccaaggtatgattagagttgatgggctccagaaactgggaggaaaccagcaagactgaagcagagggaacaggaagaactgcagtggtgcagtttgtggtacccagcta

SEQ ID NO: 461727 - DNA, 489 bp, Homo Sapiens
  misc_feature (12)..(12): n is a, c, g, or t
aacccctccctnatggcaacgcaatgggggcccatgaaatgtcccagcagtctgtctctggggtcaatacatctcccactgagctttaggtttgactgtcccgtcgtaaccccccaaacagcgttagaggcgccccacagctggccacccagggagacccggctcctgcgcgtgtgccatggggacaatcaggcaccactggtctgcccacagagctgtacatctcggcaatgctgaggaagccagagccatcgtagcccccgcagacaaacatcttgctccccagggaggcggctccgtgccggcagcgcttgttgagcatgccagctgcagggtgccaggtggctgtgtggtggttgtagtgttccacactgctgaagatctgcaaaccatcatggccgcctgacacatatatcctgccctcaaagactgtaaccccagcagcactgcgattcgagctcatcgaggtcaccactgtccatttgtccg

SEQ ID NO: 461728 - DNA, 691 bp, Homo Sapiens
tgcttcccaggactactctctgatccatgtcagggcctaggaactcccccaacttcaccaagtctttcatgaactggatttaatgcaaagatcccagactgagagatatctatatatgtcagtactgcatgtgtctcaatttgtgtctccaaactgctattttgtagtgtaaacaagaagacatcaaacatggagacctaaaggctgttccagcagtaaacggaaacactcctctcagctgctcctgtcaccacggactgagggaaagcggggagatggtgcaggcatgtgagcaggggccagggtttggcaactggggatggacttttctggggtgagtttgtggtaaaatcagttgctggtcttactctctaaaagtaagcaggaactttcaatgtgctgtaggactcctgggtgcgattaccaacatgaaaagtggttattagacacttatgacaagcagggcgtatagctcaggggtagagcatttgactgcaaatcaagaggtccctgattcaaatccaggtgcccccttcctgttttcttttgttggggtgatcagacccaacaccaggtcatgggggtgacgaagtccagcagagtcaaaggaatgagaaaaagacagtttgaaagagaaagtgggaccagaggccatggcgagtctggaagctgcaagccccagcagtggtca

SEQ ID NO: 461729 - DNA, 581 bp, Homo Sapiens
aaggtgctggttagttgcacttgcctggtttcctttgttctcaaactctgcctggagatgacgctattgcgaagtcagtctcagcttgtgcttctaagttctgctccttacatatgcccccagaaagttgttccacgtgaaggcagcttaattaaaaaccacattcactcaaactgttactttgtttatgaaacagtgtcgagtggctggaaatggcaagaacaagcactgaagattactgctctaacttttttctgattaaaagtatgattgaggccattaagaaagctagctccatgaacccagggcaggccttaagcccaacattttgccatcttcatatacaattggggacagttgtaaaaccaaatagaacttctctctgcctagaggtttcctttcatgaagataaagtttctagctggaactggctgtttttgcagggaagcacacatgagacgagctttttggagtctctccaatacctgcctgtttcataaatggcacagtctccaaatctgatgctcactgaccagggtcaggctatggaactaattaaaatgtatagaacctccaagccc

SEQ ID NO: 461730 - DNA, 288 bp, Homo Sapiens
tgaccgacaatctgcaccactgcatttaaatctcagctcctaaagtgggctagagcctacaactgtgttctcaaacaaaagacgccccaggttatgaagtcagaaaactcccatcacttccccggctggaacatgacaaaggaaataagccccaggtaaagcactccccaggtggaagataggcgggacagcaaagaaacaaatccaaagttgagatgcaatgcctgtcttgttgaaggcatcaggcatcaggcttccctgattgctactcatgacaaattctacacc

SEQ ID NO: 461731 - DNA, 341 bp, Homo Sapiens
aggtttggaaatgtttgttacagcagttagcctaccttacagcatacagaatatacctgtatcggtgaaagactcaaatcatgatttattgaagtatttctaagataaatgcaactattgaggaatcatatgtataagaagagcttgcaggttaccatttttgccacttacctaccccattcatctgagtttaaaaccagtgtgagcctgggcaaacaaggtgaaaccctgtctctaccaaaaatacaaaaatagtagggcgtggtgttatgtgcctgtagtcccagctacttaggaggctgaggtgagaggatggcttgagcccgagcaaggccagcttc

SEQ ID NO: 461732 - DNA, 863 bp, Homo Sapiens
ctagtgaaaccctctggcggttttacacaggaaaatgtatgccactttgtgtgcgaggcctgggacgtcagtgtacacgtacggaggcctttggggatcaagcttggaggtacaggtcatgcagcagcatgcatcctggcatgcgcattgtctgtgtcatgagggacacaagccatcaagccagtcggcacatgtgcagaggtgtgcctctgctagtgggagtcctttgagcatgtggcgtccatattaggagggccccagggtggtggtgacttgggccagggttatgtggtatcctaaggactgtgtaatgggcatatggcgtggacagagcaccctccaatgctctcacacccacactgctgaccaccgtgtcgcaattgtattcagcaggcaacgctcccttttgcagtgtccatcccatgtcccctttttagtatgttcctctaattaggtcctgaggcttctgtctctggagagtggctgtaaattctagctctgtcccgaccaagaggagaggtgttctggtgtgttgggtgggttaggtacagaaaaggcaacacaacaaaacacatcaagtagcagaagcattttattccttacagatccgcgagaagagggttgcccttgaggtcctgacagcaactcaggagacagccgggtgctaaccagtgggtggggaatgagacagagaggacctgtgggactgtgcctttgttacggtccatgggccttatccctcaggctttcccagcgtggttgtggattaggtagacctgagcagtggggagaactgatttacatgactgatgttggccagtaggtttcattatgctcagcacgctgtggggtctgcttgggaa

SEQ ID NO: 461733 - DNA, 299 bp, Homo Sapiens
gcccgagatatgcaccactggggctggagcacttcttgttaagtgggggctgtcttgtgcctggtaggatgttgggcagcatgcttggcttctacccatgagacgctaatagcaacctcttcccagggtgtgacaacaacaaaatatgtctccagacactgccaaatgtgccccagtggcaaaattgcccatagttaaaaaccactaatgggcctagaggggtgttccccagtttatgcaccacgctcaatatttaaaggagattttctctctacaccatttttctatagtatttcaaa

SEQ ID NO: 461734 - DNA, 160 bp, Homo Sapiens
tttccaaaaaaatagaagaaagaaaataatgaagagtttagtattctggaaaccaaatgaagaaagtgtttcaagcaggagcaggtgataactctgctttttgaactgtgctttctgggaggctggtaacatggggtctggatcagctgtagatttcacg

SEQ ID NO: 461735 - DNA, 854 bp, Homo Sapiens
  misc_feature (195)..(195): n is a, c, g, or t
  misc_feature (347)..(347): n is a, c, g, or t
gtttctttctggtcaaatttattacatgataaattagtatattgttatacaatcatttcaatatagagtgtataacagcatgcacatctctgtcccccagcccaagaaacagcacattcagcatgcaccactgaagctcctggagtaaacctccagccctggtcctcggcccccgcctggagaagtaaccatgtngattcagcactcctggccctccgcactgctccatactttcatactcacgttggaaacaatgagtagtgttgtgttgtttgtttgaacactctggatacaccagcatcatattgggacatatacttcctgtgggccagggtggtcttctcccnatccttaatggtcttttatcctttcatccattttgacgtgtgcagctctagtcccatttatttttactgctctctagaactccacttttgggcactcccacattatcccctctcccatagatggaaacttagatgttttcataattacaaacaaatgccgcagtcaacacgtgtgcacattcatgcgcatgcccatggctggaactgtggggtcaaggatgggcacatcttcagttctactcagaatgcccctttgcattccagtgtggtgggattgatgcccatgctccctggcagtattggagaattcccactgctccacatcctcaccagattaccagattttctgttgtcagactttttaatttttgccaatctcatggatgtgttgcgccatggtaaaccaagtcctaacaagggccaagaggccttaggccaacaccatctggctgccacaattccacccccacaccaccccactgtacaccttcctacacttagttccta

SEQ ID NO: 461736 - DNA, 653 bp, Homo Sapiens
atgcaccactgcacccaacctttttctattactgattggttatcagactcacttttgaaaatttaggatttctaaacttacggccccactagcttcacctcagttgtaatgtgtctgctctctgtaaacaggttatctcagaagctcttctcaattgtcatccgtcattacctttttttgataaaattcaagacctggaaaggacctggagggtcatagttgtcctttcatgttgctatgaagtgctggaagtgaaagggacctccaagacattctaatcttctcttcctccattttatagggagaaaaccaagccactggccccgttacacagcaagttagtagtaagactgagattcgaaccctggtcaaacagactttccattttgttccactgactcagtcttctcttttacacttgaatcagacttttagttttattgtagtttttgagtccatagctgtcttcctgtactgtcttgactctttgactaaactgatttcacatctttaaaattatggctttccttttagggctcatttttaggctcagctgttgacagctatttttaaatgtaacatgacataatatatttcctaaataatttaaaataatctagcttgaggctgctctgaaggggtagtcagttggg

SEQ ID NO: 461737 - DNA, 799 bp, Homo Sapiens
  misc_feature (585)..(585): n is a, c, g, or t
ggttactatttccatccagcacctgtttcccatgacggttccgccaagagatccagcgagtgccatcccgactgtaattgatcttgtacatgggggcaaattggatgccatgacttcctgcatggcgccccttggtccccaccagagtgataaaatggagggtgtgcaagtcaatctgcagaaattccttcaggtcatcaggttccactggaatctcagggcaccaggctccatccctttcttctgagtccagccttccatatttggcagctgtggattctgaccactgactggaagctgtgatgtcctcatctggaatctggcctcctgacatgcccagaggatagcggcatatagctggattaacctgagcttttgcagaactcaagataggcagcagcaggaacagcaccaagagcattctgggaatcaggatcatctcagaagatggtgttggaactggagtatcaacgggtgcagagcattctctgtggagcaggatcctcaaaaatagctggcctctgcttctcttcaattatttcagcttctttagaataattcaagccacaaaccttggaaactttntagagcactgaaccccaggcaacttgtaggtctcccttgatggaggtttcatccaggggtgcacagttttggaaagaagaaaacagagctataatccactgcgtttccccaacccaaaaagaagaatttgttgtgaaacgcttctttttccactttgctggtgaaggagcccggtggtaggcatacatccacaggctgatgcaagatgcctttt

SEQ ID NO: 461738 - DNA, 503 bp, Homo Sapiens
tactgggccgacatactgcaccactgacgcacacgcatacccaggagccgggaaaacaaccagatggtgaagacccggacagaatgtggacaaggctgcaccatttagtaaaatgaaaaagttaaggcaaaggacaccttgaaagctatttattgctggaaagctagttctcagaatgctgaatgataacacacacaatgttaacaatctacttagaaagcagcagaaagattaggagaaaagcccagggatttaagaatattccttggttcttctcacaaaagccatccagaggacctagttttaactccacacccacgcttcctagttcctctacccctcaatttgaatttgtgtgacagccactgaaacaatccagaatgacctccagcttcaccctcactgttctcagaggtgtgaggattaaaggattagtgtgctcataactcacctagcacagtaactatcaagaaagaggcatcctctcaagtttagctcccagc

SEQ ID NO: 461739 - DNA, 665 bp, Homo Sapiens
aaagcctatatccttccatccagagaacactacgttgttagcttattataaaaaaatagcattggtagcctgtctctccaggctacccatcctggactagtcacaattttatcatcatttcgtaaaattcgacgcgcctgaaacctgctatgacctgtgccaaggagagtttatggcagggccagcacggagggcaggccaccatctccgccacacaggggttccttgcctttcagagtcaacagcggtcacttactggccagcatgcaaggcccagtgacgtcacatcatgaaaagtaaggagaccacctccatgtgtcatgcagcctgtgctcctggccgctagctttgtgcacgtatggtctggacccaggcagaggggcagatgagcctttattactcacctgcagctgtgactctgctgccctcttctccttgtggtcccagcagaagtttggggttcccaaagtcccatcccccacaaagggctgtgaaccagctcttcccccagctcctgtccaattggaaggtcccgggaagcagcgctgggtggagtcacacgccctggcacctgttccttcgcacggcaccatccatagagctgcgaaatgcatgaatagactcaacaacagcagccaaaccgaagacggtggacaggcccacgc

SEQ ID NO: 461740 - DNA, 527 bp, Homo Sapiens
tttttatagggtttgtagagctctgatccttggttaaagatccctgacaatgtctaatagctgttttgaaaacctgtacctccaatcttgaagctaaggttttagttttagttttagtatgtgaatatctgatgaaacgattcaatggttttgtagcattggattcaatttcagggttgggctcctttctaggaatagaggaatattcttatctcaggaaaaaaaattcagagtgtgggaagtacgaaaattattaattcaaaggtgtatttgctgtcagattggatggcagtacccacatccctaggggctcctgttcccaagactgttttcattgtttctatccggcgctgggcacgagccttgaagtggcgaattcatcctctgaagttgtgtgtccattgctgcaagaataaaagaagcagtaacagaatcatgcagcgcagtatttcatggtggcagttttatgtggttgtgtgatgttgcagagtcttgtaggtgatatctaccctttctggtgaatcaca

SEQ ID NO: 461741 - DNA, 542 bp, Homo Sapiens
ttcctctctcacggaatagaagggtgacagttatgaacaatgttctaataaacatccacttggtcttacatcttctatccacatgtcagtgccattccctgtgtgaggacagactgatttcaggaaacaagatggaagctccatagcaatgggcatgtctaggagatgacgttgaccttgcctctaggaggggagcagtgaacatggcaacattggtgccaatggggagtgaaaaggagatggaagaagaggtcaatcctccatgtgggcagtattgggcatagcagaatatgcagagaatgtagggtcacactggtgaacaaaggcccccgagttgggagaaatctaatcttcgctcaatactctcgtggttcatgatcctcacaagtcattggatgtttctgaagctccattgatctctttatttgggtatatttatctgtgtatctagtcagtgataccgttgaactgtaatgatttgatatccatttggcatgtttttgagcatcagttatcatggaccagtagaggggatgcaacac

SEQ ID NO: 461742 - DNA, 489 bp, Homo Sapiens
gacatccttactctctcacgatgtttgctttcatcaattgattaattcacttgatatctctacagtaacattattctttctctttgcagtaaataaccattttgtggagttcacactttgtgtaaatatcccattccttaaactttcaatgtattcatttacttatttattttaccatgggtccatagtttcctgttttattcagtgtgacataatcctttactatcctaatttgttttgatgctctaattgttccagatatgactagagggagcactcttactgcttttgtgtccttctgacatgttcccatcatgatcatgtttttagcaattccttactttttggcagaaaagatatttcaggttcatcttatactttccctgcctcagccccagaatcaggttatttcttcaatgagactgggttccttttagtgggcaatggtatttagaaaccaagatctgggcaccatgtgtgctcactgcc

SEQ ID NO: 461743 - DNA, 350 bp, Homo Sapiens
atcctccctctctcacgcacccaataaattaggcatctggatagaatatactaaactgaaagaaaggaagaagttttgcagaatgtcttagtgctgagccttgattgtctaggattcaaagtgatatccctattgggaactgaaattaacatgttgaagaggtatctgcactcccatagtcattgcagcattattcatgatagtcaagatatgaaatcaaccttagtgttcattagccagttgaatgaatgaatgtggcatatatacacaatggaatactatacagtcttaaaaacagaggaaacaaatacttgtgatacttaccttgtatacccgtgagagaagaagag

SEQ ID NO: 461744 - DNA, 690 bp, Homo Sapiens
atgatgacatgctacgaccacatcggatgggcagcggctgcccctgcaggttggtcaggtgctcttccgttggacacagattccaccactccctgtcggttgctccttgctccccatcatacataactgtatgggccttataggcatatgcttttatcactccctattatgacgttcacaacatgaaatgagagaacgatttggtaagttcaacaaaaggcatattatgcagtcaccatacattctttgtggaaagagaagtggcataaatcaattcataaattatcttaagttgtttcctctggagtgttgggctggctgttggatgaattcatctgtcttctagcagatggacaagaaaattgaattgtagtggcccatcaggtgtcgatcgcagcctttgggtccgtgtaggtgagccctcaccacagagagaatgagagctggctctaggacggggtgttgatctgtgcacagctgcccgggaaagggcctagaaagaggagctatgggtcctgcactgacatcagccttgaacatgaggctggcgtgtcagcggcggcggggtgggggggtacatgaataattcatatcgcagccagattgatgctcagtgagcttcaataggaataaattaccttgtgtgcattccctgcaaaaatgtcagtgtatcttttcacaagagcctgg

SEQ ID NO: 461745 - DNA, 613 bp, Homo Sapiens
tccacattggtttaaccagaggaaaaccgaaatctacaattgtcataaacacatttaaatgtgcgtagaatcagccatacaaattgtgaaacatacatttggctcatggtattattcactgttttgtggtggttagagtgactatagcaaacatttcttgaaagtagaaaataagaacccagcaccccttgagttaagtaatgtgccttctgtcctcaatattccttcctgggctccacattactgcccttaagtctggaaatattttggtctgagccccgtagtccaggcctcatgttcaggctttctgtccccagtgatgagaggagagacggcagacctgtctccggtgagctcagatgggcctcccggagtctcctggggtgcacaggatttcaaagatccaggaggcgctgccaggggctgtggagtctgatgaacctttctccttccctcccacacctgccgttttcctgtttctgtggatgcttttgctgtccttggcttcctggactccagacctcagggtcatgttttgcttctctctgcaaggtgccgagtctctcgagtttgtagaatgtatgtattgttattgagacggtcgtcggttcca

SEQ ID NO: 461746 - DNA, 501 bp, Homo Sapiens
agatgaaagcgtggaggtggaaagcatggaacgggcgggaaattaaaggaaataatcccagatgtaagcgtggaggtggaaagcatggaacggtcgggaaattaaaggaaataatcccagatggaagcgtggaggtggagagcatggaacgggcgggaaattaaaggaaataatcccagatggaagcgtggaggtggaaagcatggaacgggcgggaaattaaaggaaataatcccagatgtaagcgtggaggtggaaagcatggaacgggcgggaaattaaaggaaataatcccagatggaagcgtggaggtggaaagcatggaacgggcgggaaattaaaggaaataatcccagatggaagcgtggaggtggaaagcatggaacgggcgggaaattaaaggaaataatcccagatggaagcgtggaggtggaaagcatggaacgggcgggaaattccaggaaataatcccagatggaagcgtggaggtggaaagcatgg

SEQ ID NO: 461747 - DNA, 321 bp, Homo Sapiens
ggcatgggagacagtggagagtatttggattccagcctccttccttcctcagtgacaccctgagctctgcatttgtagagggtcctcctggtcaccagctacctgtccctgtgtcccttagcctgctattcttggcaacctcaacagttgctgccaggtggggagattatgtagcttaccaatagcagaaactgagcagtggctcactctacttcctcattctttcctgcggtcagcatcaaatcacatcttctgagcacctactgtgtaccatgttcttctaggcagtgggataggaaagtgattaagacataagtttat

SEQ ID NO: 461748 - DNA, 352 bp, Homo Sapiens
ctgactggcccaagtatcaggtagagctcctattccaaattaggaaactggcattttggtactcatcagctgaagtggtgctacataatccagcaagctgtttgcttctctgtattttccaagtttctgagtaagagaagagctaaactagccatggaaaaaaccaagactgatgtccaatacagtatcaatgagaaccccatatgactcagattatggtctctaaatacaattttgtaatacaaagaaccaagtctcctaagagaaatgaagactctaggtctgggtcaagaaatcttcaaggtaagattagaacatatgggcatcccaggccagatggagtggctcacac

SEQ ID NO: 461749 - DNA, 436 bp, Homo Sapiens
acctctcttatcttgagagtgtttccagcacaagattgggtgcaccatacttttagttggtgggatgaaggggtccatggataactgaatgcaggcttcctttgttgttaagcacattttcaaatacagctgtattacccaaagagtgactctcagtgaaagaagatcgttataaataacgggcttatatcaagaagatagtaattataccctcttctgccctgctgccgagataactccttttagcttaactgtagcccgttctgatggcttttccgtgtgtttgggaacatatgttttctgcaaagccacgtgtgtgttggctgcatggttctggaacttgcgtgtttggactgagcttcatggatgaatgtttacagagggtatgcagaggccaggccttgggagaatggaggctgtgggtcttggttccttg

SEQ ID NO: 461750 - DNA, 514 bp, Homo Sapiens
caaaccaaaagatcccaggagcggcaacaagggtggagtgggaagtttccagggggcagccggagcctgggggttctagccccagctcagccactgcccaccccgctcctggctggttacttcagtccctgtcctgcccgtggaagacgaaggaatggcctctctgacctcttggcaccatcctgtctcggacgggctaggactgcagcttcctgctgattgaattcagaggctcacttgacggtggtctctttctaaacctttgttctcaggagctccaaattgtggcaacaggaagttaacagcctctgggccgtccacagggcacacagaatggggaagctccgtagctaataatagtttcttgagtttgtatggcactttgtcttttgaaagcactttgtaatccattactgcattgaacaaaagggaagagagagcggggaggggtcgagaggtttgccagggacggacaccgttctcacagtggggcacctcttgtgtgtctgctcca

SEQ ID NO: 461751 - DNA, 398 bp, Homo Sapiens
tggggtgaggtggtgatctcccccaggcgccgagaagggcaggtttgcctgggctcagagccagtcagcacctgttctgcacctgtttgaggcttgtttactctccttatggcattttaacctctcatcattcccagtggcttctctttaactgcctgagtgtgaagagctcagatccagagcatgctgagtgagtccacgctcatctgtgcagatttttcaaatggcttccctgtctccacccataaaaacgtaggcaaacagaaataccttgctctgcaaacaagccccatcccccaggtgacagggcctgggcagatggactgcagctcagcccagcttgagagggagcggggagccctcttgggaagatgagcagaatatcacctgaatgcggt

SEQ ID NO: 461752 - DNA, 520 bp, Homo Sapiens
cccttatggaaccccccgaccgtcgggcggggactactgtatacacaccggatgaggataaggggggactactgtagacacaccggataaggggggactactgtatacacaccagataaggggggactactgtatacacaccagatgaggataaggggagactactgtatacacacgggatgaggatgagggactattgtatacacaccacatgaggataaggggggactactgtatacacaccagatgaggataaggggggactactgtatacacacacgggatgaggataaggggggactactgtatacacattggatgaggataaggggggactattgtatacacaccagatgaggataaggggggactactgtatacacaccagatgaggataaggggggactactgtatacacaccggatgaggataaggggggactactgtatacgcaccagatgaggataaggggggactactgtatacacacgggatgacggtcggggagttccataaggga

SEQ ID NO: 461753 - DNA, 392 bp, Homo Sapiens
ccttcttttattccgactgtcagctgatggccatgctttaaatattacccatgtgccaccagtctgttttcagaatttttgaatcttaatatgtaattcaatattagattcccaatttaggtaacccaaaccaaactcctgatcttctctgccaaccagccttttgcatcttatccaaggataactccatccttccagttacttaggcctccagttactctgggactctagccctcaactgactgctctggctctccatcacctcttcccctcactggctcttaatcctgctcagccacatggtgctcccttgccatctctcgaacacaccaggcacacccccaccttatggcctttgctctagccaaagcttcttgctggaaagctcacat

SEQ ID NO: 461754 - DNA, 538 bp, Homo Sapiens
aggtccttctccagctctccttctggcttcatcctgtctttcacggctctcctgtcccacctattctccctgccggtgcccaagttttagccttcactgccttcccctagaacacgccagggatattgcattctgtcctcactgtcttgaggatcttcctccccggctcatcactccccatgggcagttgccagggtaggcgctgtcaccttctgttgacaacagtcagtagctcctaaggactaaaactgttcagcccagcattcagctctttggaggagtccatctgtcccccagcacatccaggagtaaggattccgactggtccactcctcatcctggtgtcttcagcttctctgctgccatgttctttgctgggatggctgcttcccaactccacctccagaatcaaggatattcctccaagcccagctcgaatgcttgatctgcctggagccttcctggtcatccttgggtgacctggagctggtgctgttagagcacttctgctctgccctgatgtgcagttgttgtgaat

SEQ ID NO: 461755 - DNA, 473 bp, Homo Sapiens
gtggtaaaagcagagggggtagctggggtcttgatatcttgggcatttctcttgccgcttctcagcctatgtgcacgatgtctcacacgttcagttgcatctcttatcgttttaaaggcccacattgatgggaattcccggagagtcaaagaagcccaatcacatagagacagagcaagagaggaagcgggctccagtagaagtgggtgagtgttggggctgaaggtggtgtgcgagagagagagttagttagttacagagagacctctaggaagaaaaagagacagggaaataaaatatgttgtggaaaatcccaaatggaagtgcataggggtcaaagagtccagaaggggtcagggaggtagcagcttgaggtagtgtgttccttctgttttctctgtcttgacaacagcgttcaatgccactgtgtttctgcagcggacgttaggcgtttgcccacgccttgactgccc

SEQ ID NO: 461756 - DNA, 216 bp, Homo Sapiens
atcctagattcccttatcctttttcttggatcagatctcttgtttcctgagttcacatattcctcattttgtggtttaccccctcagtttgatggtgtacttcctttagtattttcctgagagaatgtatgaagaagtgataattttttagatttgtaacccttaaatgccttcaatcttgtctctcatttttgacattatgggcatgtaattcaa

SEQ ID NO: 461757 - DNA, 748 bp, Homo Sapiens
gatcttacaggagagagaactgaaacactggctataagacgagaaaagtgaaggcatcgatcaaaagatgtagcctttggaggacaaatttgtcagcattccccaagtgctggcagccgaagaagactcaagcctagaagccccacattcaccccagcaggcacctgtgcagacgctgactttggtttggagctgatggagggtgggagaggaaagccttttatccaaggctctggggaggtagggggaacagagctgggattgtgtccataaagccaagggctggggaccaagcatcaggccaagggtggaccctcccaggtaactggcttgtaccaccctgtccccggcccactgacttttactggcaagttgggtgactgtgcatttaacccgagagtgggctgggtccagcctggagcttgctcttgccatactggcaggggttgaggtggagacagggttggcttggaaagacttcaagtcaaatatgaagataatttgattcattcagctaatggccagttgggatgggcaattagtgcaattagtgtgagaactgagtggtgtaggaagtgtggtcagcattgttggttcttagcatagacacattccatttgaagatgacagggaacactgcacaagtcagaggtgctgagtaggtgacattgtccccacaggcacctacaggcctagcgtcctctcatctgagcatctctgacctcatgggtgtagtcctggggcagcc

SEQ ID NO: 461758 - DNA, 479 bp, Homo Sapiens
ttctgtgtcatgaaggatggccctgtggtaggggtgagggtaaggtggcaatggatatgtatagctaagaggcgatgaggcttgggtggggtatgtgtgatgggggtacatatatgaaggtttaagggcatggggcaaactgcatgtgtgagcgtgcagtggcaggcatgcatgtgggaaggtgtatgagtgcgtgtgagtgtagggactatgcagatatgagggtgtagttcaggtgtgaggctgggagcctgttgcctggattggagcagtgttttccaaggcactgagtgctacctgtacatgttacatccagcacatagcacgtggtaagtggcccccggcctggaagttgggcactgacccacacagatgcacaaggacagacatacccgcccctgtcctccctcttcctctcttctggcgtcagtggtttttaaaggagcctccgtgaaactgtttgctgtgcagttctctct

SEQ ID NO: 461759 - DNA, 303 bp, Homo Sapiens
agccgtgggcgacagagcgagacgctgtctcacaaaattgtattacggagaaaagagcaaaaccagaaatctcattctcaccttcactccagggatctcttaccctcaaagcctcctttttagcaaccacactgaactgtcctcctcggcctccacctccttcccatgagcttatctttgccacaggaacctggcctgcataaatccggcaaaagggcttccagcccaagttcaaatctacttactcagagtgttgtctaagcagtaccaaacctttctgaacctgtttcagttgtccagtct

SEQ ID NO: 461760 - DNA, 511 bp, Homo Sapiens
ctaaaaaaacaaaggagccaaataggtcaataaaagaatattagatttggagaggaggggttccggccgtttggaacctaattccattgagtctcaagcacactggtgtaggaaaaatgaatacctaaacaccaggaggaatagcagggctagagaaatggtttagcagaggttaccatctggctccagtaacctctttaatatggtctcaaagaagacccctctgttctcatgaattttttacaaagtcattgtcccatgaacaatcatgtgattcattcctgactctatatctactcctaatactgaaacctaaaatattatgtctctttgaaagcctaaggcaactcatataactccaaaaagcacattaatcgtcaagattctgatatcggagagacagaaacccaactcaggactagtcggacaacttaaacaaagcaaccaaacagctcccaagggcttcagtcactgctttaagaccaagtcaacagtggacagtgggtgcagc

SEQ ID NO: 461761 - DNA, 335 bp, Homo Sapiens
tgcagggagagagtgtggggagacagcaggtcactgatgagcctgcagtccgagcagagggacttggacagtgcgaagaggaggagtgtcattttgttggagctggaattgggtgccgctcctctctggagtccacctctcaatgggcactgagaacactgatgtccccagatacacttgtcccctgcctaggttaacacaaagagagtgcctatgattgtactctccagctcttttatgttttcattctatgcagatcctggcccaaggtgtctaggtcactctcaggagtagaccaggttactgtattcctcgtgtacagcccagttctctct

SEQ ID NO: 461762 - DNA, 714 bp, Homo Sapiens
tgcagggagagagaactgtacgaataaaagggctccaaggtgtgacagtacaaggcatatttgatgggtagaaagggctttgcagtgtatagggattaggacacaattttcccctatttattcacctgttcattttttatcgcatgcctaatcggggtctacactgggcatacagctgccaggtgaggattcctgggacttcctttagaagaggcctgtttcctccccaaccccagtccccgctggggcttcctgccagcaggtctgctgggagtggcagaaggtgtccctggaatgccttctttgcagcagctgcccgcacccaagtctgtttctctgactctttctagagtatgataggtgtgattgtgaatgttcccctgccccagtttctccaagcctgcctgtctccagatccctgttctccttggtctctccttacccacctcagtcccacttctgcctgcccagcaggaacccccaacctagccttctttggggaccttgctctgttctctcccagtggccaacccgcatctgcgagggatctggaggcagttccgcagtgagcatgattgctgcgatgctatcggacgtaatgggatttttaatatttagcttggatggggagaggtgctgctagccagctcggggtggttgcacgcacatgttgatcgctgttacagctcagactccccagttctcgtctaccat

SEQ ID NO: 461763 - DNA, 468 bp, Homo Sapiens
catttttatcacctcgtctgagagagcaaagggcctctcctgcgatatctgagtgctgccctgtagctgacaggtgtctctcctgggatagggctgacccactcccccagaacaatcctgtttcacagaagtggagcccattggcttttctgagactttgcagaaacttgtctatttctactgataaaagcaataaacttgtgcaattattaatacgcaatacatgtacaagtgagatattctatttggcgtggcccagtttcagtagcaagagagccatactttcctgggactgaaagattcacatattgtacactatagtttttaatgaaagtaggcactatttcaaagtttatcaaatataaagaaagtactagaaaagtatggttcctctttttcttttctggaacttatttttcttattttcaggtttcctttatctcttcctgctacccccggcccagttcc

SEQ ID NO: 461764 - DNA, 742 bp, Homo Sapiens
aactctatatcatgcggatccagttgggcctcttggttaacaatacttggagcgggataggctgttcacttgttggctgagagagagtccccgcctgtgttgggaggcaggctgagggctgcgacggctgcttgtggtgattgctgctgctgcatgcgatcctgcaggctccgtgcttttcgaatactgatttgcaacttcttatcgactagggctctgctgtgcgtgctacagctggcaccatgcagggcaagtcttagtttagagatagcttcattacagagagccaaagctgcagcacagtctcctttctgttccagatgtagtgacttttcaaacactgactctgcctcttgcagggacctctcaaagccgtcactcctcccctgattctgcagttcatccaagtccatgaagcggctaggatgagggttaaaccctttcgctggctctaactccttctcccgttttcttcgacgttcctgttcctgcgccctcctgggcccctcttcctgcaattcatccagttcacttttagaagatatctcctcaccagagaaaggctgactctttgtccagccacccatggatgctgtggagtctacctccaggatgctactgctgtgcgactttgggatatgacgccaggaaggaaccaacccagctgatctcttagcactgggatccctgtagacatttgagctctcagcaggctgcatccaggctgacaggactgctcagt

SEQ ID NO: 461765 - DNA, 371 bp, Homo Sapiens
tgcagggacttcgaagaaaacgggagaaggagttagaggcagcgaaagggtttaaccctcatcctagccgcttcatggacttggatgaactgcagaatcaggctaaactaagacttgccctgcatggtgccagctgtagcacgcacagcagagccctagtcgataagaagttgcaaatcagtattcgaaaagcacggagcctgcaggatcgcatgcagcagcagcaatcaccacagcagccgtcgcagccctcagcctgcctcccaacacaggcggggactctctctcagccaacaagtgaacagcctatcccgctccaagtattgtaatccaagagccacctgatccggcatgatacagagttgggccag

SEQ ID NO: 461766 - DNA, 568 bp, Homo Sapiens
  misc_feature (512)..(512): n is a, c, g, or t
tactgctgtgaaacggggtctccttcctctggaaactattctcggttttctaataagcgatgattttagaccaagatttttcccaaattcaacacctttaaagctcctctccttcatgtagacttttttgatggtaactaacactttactgaaaagtctgttctttttgccttgttgcttctctaacttatcttcatttatgtaggtcttctccaacttgaagtcaaatgtgccatcaattatgagttttttcatgacttcctgattttcttctttagaaactatggttccaaacaagctttcccatccgagatgtgcgccttggggaactccactctccaccatccagggttcttctccttgctctaactgggagatgacctttggcttggaaaagagaatccccagtgagaccaggatgctgtagtttctccagcatcacctcccggtacaagctctctggcagagtccaggtgcaaccactcgtcctggctgaagaacacggccacatncctgaacgtcacggactcctgtacatgggctgcatcaacctccttccagttctctc

SEQ ID NO: 461767 - DNA, 624 bp, Homo Sapiens
accgagcttatcaggagagagaactgaacctgagagtatagcagctaaaattgatttataactgttggaaccacgaggagaggaatttctttggccggttttcacatcctggttctggctgtggtggtgcagaattccttagcctcacattttccataccccagacccctttgggattcctcaccggttgactttttaaagttcatataaaatttgtcaggttacaaaggtataattttaatcgtttggttcaaatcatccatatttcatagttagagaagggtagaaataacacctcccgtaagatatacacattactcatcagattcactttgtgactaaagttaccaagccattggccgccttaaatacttaaagccatcctgaggacctctgcatctgtcaggcaaggctgaggcagttgagcagccagacagaagcatctatccggcccccaccctcaatttggcctagaaagaaaaacagtcattgaaaaagttctcaggctggacaaacacagcaagtcctctgtcaatggggatagtctgcccacagaacaagcagttgtttaacttgttgaaccacaggccaaatcccagtgggactctgttatctaacaccgga

SEQ ID NO: 461768 - DNA, 657 bp, Homo Sapiens
  misc_feature (532)..(584): n is a, c, g, or t
  misc_feature (592)..(592): n is a, c, g, or t
cagagagaactgagggcacgagcttggagacagaagatgcctgtgtccaaagggagctgggcctttggagcatggaggaggagcctgtggagggggctgctgccggggaacccgaaatgaagccatgaaattgcttcatctacatctgttttaccagagaagtgataatcctaattatagataattatagaaattcagaaaaatattgaacattaaaatttcactatatttctaccagccagagatcagtgatatcaatgaaatattttgggatgttttcttcctttatatccgtgagctctcaggcactctcaccctactgtccctagccatccacgctctctttcagtctcactcacacctacaactcaagcatgtgagcacatcatcacacactcacaccggggctcacaagtcccttgcccacacacgcagtcagctgctcactctcctgttctcatgcctctgcgcagccgcactcactcctgcatgctcctccatacacaagtacttacaacacacactcttgctnnnnnnnnnnnnnnnnnnnnnnnnnnnnnnnnnnnnnnnnnnnnnnnnnnnnntaatgatncgtccacactttctcactcgcacattcacacaatcactctcgtgcagttctctctcccgcagaga

SEQ ID NO: 461769 - DNA, 783 bp, Homo Sapiens
gaggtacctagaggatctcggcattgaggagagtgacatgtggccactgacagtggcctcgagagccagactcagcctgtgctgggcctgcagccgcacctcctctggggcctggcagccgaaggtttggagtgaatgcagtggatggccatgaggggccctcggggcaggcctgagtaaagttgagagtggggcgtccagctgtgctgttggcttgtctctctaagaggggaagtgctgagggcctgtcccccaccaacaccccgagtccttccctagtgagagttccctggcttgggagcacgcaggagatgctcggcttcagaggggccttgcttgagcgtggtgaggaagtcccggggctgtgaaagaggaaatgctggactctccctgcctaagggcctgacctagaattgggctttaacctccctggaggaggagagcagctgcaggtagctggcggctgcagagtactcctgggcaggctgtagggccatgggtcagtagctgaaggagccacctttcatgccctcccctcaccatcacagttcccgggcatgaaactcaggcatcagcacctcagcccaggccctcaaggagtggggttaagtgagcatgaacagagcaggccccctttgcctctgggagcctcctggcttcccaacaggtgctatcgctgaatgaagaggagggctgtccacagcagtttccccagccaaggctctgggctccagccctgctggtccctcttcctctgtctaccatcagctctgcagccggcca

SEQ ID NO: 461770 - DNA, 365 bp, Homo Sapiens
agttcaagtaggtacgtggcagggagaagacgccacggcgtggtgagctggacttgttcaattcaccaacatttactgagcacgctctctgggccaggagctgtgctggccactgcagataaacagagaggtagggcaagaacctagacctgggctgaccatagctgaatgagcccaggtcaggggcagggcctggcagagcaactcagcttggactagaaacaggggctgtgggactggcatcttttactgatgggaagaccttgaaagacccccctccacatgccctgctggggtccccaaataagtccctgcaacggccggcaagtatgctagctctgcactgcccatggaaatcatcggag

SEQ ID NO: 461771 - DNA, 222 bp, Homo Sapiens
cactcaggtatagagtcttccagacagtcaagtgggcctgtggccccgtccaaatggcagacacacctaaacctttcaaaactctctggtcctccagctgcaggtctgtgggatctgtcctcttaagccaccggctccctttctggttctctcttgcagccaagctgttccaggactcggggctttgccactttggtctcttccatgtatcataggcaagtc

SEQ ID NO: 461772 - DNA, 269 bp, Homo Sapiens
cttatgtagagagaactggaagagatttcaggctaccaaggctgccaggagctgtgtaggagccgagtaaaagaggctctttggaggcaggagctgggcctgtagacacagctgcgagagaggactgggactggagaagaggccgggaggcagcaactgcggtgggggaggccgacttgaggaatttctcggccttggagaggccaccaaaagggaaaagctgggcctaaggtggccgttgtgagaaatgagctgggcctaaagaggcc

SEQ ID NO: 461773 - DNA, 392 bp, Homo Sapiens
cctgaggggctcagggttggcaaggcctccccatctgggtggtgaaaggtgctctctgggctgcaaagaatccagacagctctgtgagcagcggctgccaattcactgacattgactgactctggggactctacccttttcatccccatgtgcccgtttgtccagcccctgcagaaacccctgtggggtctggcagtaagcgaggctgctgttccagggaatgtgtgtgctgaggctagccaggcagctgggctagcctcctcctgcacagtccttcttaggaatgtcctaagtacctattcagcctggcctgaagcaaaggaggcactgggtaatgaggactggaccccattgctcatggtccaattgtcgaaatgccagatataccgagc

SEQ ID NO: 461774 - DNA, 627 bp, Homo Sapiens
gtgggatggattgattttaaacaggatgaattttcattggtaggccctggtaaagaagaagaggaactttgtgtactgtcatgagtttcagtggattgattgattctacagctcaatgtatggcaggagagcacagtaaaattgatcacagttaacagtaacccagatgactctttcagtccttactctgggatagtgtaatgatgctttcattgcccttcttgatacgggggccacatccttgtcataatcggcttctcatgtttagacgccttcctcagcaccctcactgaagagagccatggaggactcagaagccaccatcactttcttattctgccagttggctttgcctctctcccaggacacagggtgcaggactcagagctgtccccactctcctaccttcagctcttgcctcttccatccccagtcccattcgaggatgtctggccttgggcaaccgcttctcgctgagccctgcccttctttctttctgatgaccttctccatccatagtagccactcccagacacctccacctcctgtgcctgagtcctgttctctccctctgacccacagttctgatttacgcgtctcccctcagttctctctcctatatagcat

SEQ ID NO: 461775 - DNA, 573 bp, Homo Sapiens
  misc_feature (539)..(539): n is a, c, g, or t
gtgagtgcctagcgtgatatggcaggcatatcagcagttactgcatcctagaactcctacaggcgcttaagatcccaccagctttgctagaggaccagacataaactagtttattcaggaggatcccagtgtgataatagtgcccctttgacagacaagggaacccagggcagagggctggggtgacttgcctaagacattagggggccagtaggcagagctgaagtcactcaggcatggaggcattggggcatctctgctcgggggactccagcctagctttctgggcaggaggcaggcccctggtctaggggagcccagcctggggagccaaggctccacctgccccccagggttgagtcagcaggtttcccacagctgacaatgagggatttcagaatgactttgcctgaggctgaggtgaatcagccatcacaaccaccactttccattttctcactgagaggaggaaaggctacagttttacagttctcagcaatgctgccatactgcagcggggtcacccatgggatttgtcnacctgaagccttcacattatgacctagcaccacc

SEQ ID NO: 461776 - DNA, 493 bp, Homo Sapiens
tgtgaatgcgtgtgttgggggacaggatgacaagaaaagggtcagaaaaggccttgcatgccacactggggtcaggcggtggtcaatctcaggtgaccaggagctcttgaagaggctttccttcaagccaggacagctggcggcagggtttcagctcccctgcccactgggtggtcatgaagaagttacttccaccgctccacttcccaactctcagagccgttttgaggacggaagaaggtgacaaactgaaagccacccctatagcacgtggtatgttttcaataccccgtgcgtgctagcacttcttcctttccttgtgagtaggttgatttttacaccgaacttactggaggggaaagaaaatccaatgcattaaaatctccatgtatatcattttacaatcccagagttcgggggtgtttcaaagctacactgagagagagctgggtcaggcatcacttcctaaccttcaggagggtaacatcaattt

SEQ ID NO: 461777 - DNA, 342 bp, Homo Sapiens
  misc_feature (119)..(119): n is a, c, g, or t
tgccagggagagaaaactgcaggggagaagggtggaccagctgcccgcctcagggctgcggagagcaggtctgggcagagaggagggaactgggagtgaagggggtacatgtacccacnttgtctgcgagcctggcctgggcctccagccctctggggagagacacctgggactagggggagacaggagctacacaagagaggaccctagaaatgatgcatagttttcactatcttgaagactctgttatttaacacatgcctcccctgcccccatgcttgaaggatgttggtaggctgtcgctcgtacttctgttcctgctctaagcgttctctgttcacg

SEQ ID NO: 461778 - DNA, 645 bp, Homo Sapiens
  misc_feature (53)..(53): n is a, c, g, or t
agctcgtaccctgcaggagagagactgctggtgtgaactgcttttcttgtagntttgaggcctgaaaaccaaatcttaatagacatgaggctcatgtttgcacagtgcgctctgcgggggatgggggctgtcccctggcacgaggctggagggatgaatgttccccttgtgagcaccggtcccggggatgacatcacaatgtgggagacgctacttttgggcagggcactcctaggctaatgtaatcatacgattacataattaacccagctgtctcattaaagaaaatcaactggaattcagggcataattaggtcctacgggaattagcatgctgatgagcgactgatgaaaagctgtctagatacccggcgtgccaggaccaccccggtcatggcaaactcggggcacaaacgacgcacctctccgctctccacgcaagcacaccgaggaggagtcccctagtcacatccagggtgttctcactctagtgctgtgtcgagggaccgggggaggatggatggagaagggaaagccttgggaaggacggcagtcggcaaaacctggcggcaacaggcctaacgcccatcttgtcatgcctgcttgtctttagaacagtggtggccagttctctctcctgcaagg

SEQ ID NO: 461779 - DNA, 198 bp, Homo Sapiens
cagtgaactcattaaccctacagctttgatctcgaagtctcggccgctcctggtctcagaggaccctggggacgtggtctttgatgcttgctttccccataggcatcacttcgaccagcgtctgtgtgggttgtgcagcagccctgagccaaggattaattacgtaacgagcccagatcccatcctgctaagctcctg

SEQ ID NO: 461780 - DNA, 416 bp, Homo Sapiens
cggtcttctttacactctcttgtattttccaaataatctacaagtaacactacttaaagcgatcatagccacagaggaaaatgatcaaacaggttggaggggctgaaaagacgaaagcacgctaagccctcctcctctcctcccccaagctgcaccacccggcgcacccaggctcccagggaggtaggctctgcccatgcacccagaaaagggtacatggccagcagcgagggcctgtcctctcaatggatttctctgcagcaagtagaaggaatgacacttttccataaagaacattcaaatgttttgggtacccacctgctgctccctgcacaggatacccctgagatatatgaatcttgtagagggtcctttcggaactgatcccaaccccagttctctctcctgcaagatcc

SEQ ID NO: 461781 - DNA, 287 bp, Homo Sapiens
gagagagaactgggtaatcaactagctttgaaaacttttgttttgaaagagatataaaatccacttttcaacactaacctaaatattccatcagctgctcagcagttatgatttccatcatcggtggaagtttcacctgaaaaacaaaatattatttctataaaattaaatgttttaggtgactaaagtatttcttgcagtcagaaacacaaatacttatgtctaattatgtatctactatacttatacattaacattcacatatattagaatctttatagccaggc

SEQ ID NO: 461782 - DNA, 490 bp, Homo Sapiens
cttctgggccagcgcccatttgacatgaacccaacaacgaaaaaagatgctctcaaatcctaccctcacattatttccagcctgtaccagggaaatgccccagtgactcagctagagaatctctgtcccaggttttcctgaatggatgggactgtcccatgggaacgcctcattttctggcttgaggatgagccctcagatagttacattcattacatctatggtggtctctcgccccaagcctcctaataagtcagatacccaagagaaggggggacaaatccaaacaaaatgtcacaggaaaaattccttttcccactaaaatttaaatttagactcatgctcccttagaagatggggcctgtctcatcagatgttcccctgttcagaaaggggcactaggaaggacacggccctgagctcctgctgcacaccaggccttggccagcaagctgagctgtgtcacctcagtctctctccctgtaagcat

SEQ ID NO: 461783 - DNA, 588 bp, Homo Sapiens
gtctttgcaggagagagaactgagaatcacacatagaggaaggacagaacatgatataagtgcgtccaggtaagacgaccaacatggctggaacagagaattccttttgaaaagaagagggagatatgcaaaactgggagggtcttggctcgtgtccagatgcctcgatctggtgctcaactagaaaggccattgttcactctggagcagtggcatgacataatggaggccgtgtctcaggaggatgcatcgcacattgatgtcccagaatcttggtttaggaagcatcctagagctcattgctgtgcgttccaagggtggaagggaaatcactgcagctggacccactgtccactgtatgactttgtcttaaagcagtgacaaaagcccttgggagctgtttggttgcttttttaaaaaatcaagctagtttgagttgggtttctgtctctccaaaatcagaatcttaacaattaattgcttttatggagttatatgagttgccttaggctttcacagagacataatatatcaggaaaacagaattaggagtagatatagaggcaggcatgaatccgatgattgttc

SEQ ID NO: 461784 - DNA, 453 bp, Homo Sapiens
  misc_feature (90)..(90): n is a, c, g, or t
tctagaggatctctgcagggtggcggtgagccggctgtgttggcgaggcaggctgggaagctgtgctggaggtgctagactgcttctgangcagcaaattttctggatttcctattgtgttccactgaatgagcgaaacctgcacaaagctctgcggagctgagagcaatcaaggaaagcacctttgtccatgcggtgccagggacaatgcctgggccagtgaggtggtaaagacaggaccaggcagagaacaattccaagaaggggcgagctcacgtgacttggctcgtatatgttgggaccacttggtgggctaccccttcccactttaaacctgagcctatgggatctgttctaatagggaagtctgtttcctcacatgtcctaagggggagacccctggattttaaagaactgccatcagacaggaaaggcccctggtggctcctcagt

SEQ ID NO: 461785 - DNA, 783 bp, Homo Sapiens
ccctcaggagagagactgactctgtcttggttgtattttgtatagtccgctggttttcacaaatgctgcttgtgctcccgattggttggactccagcaaggaggtgatgctttcaagagagcatcagctgatacaacctaaggtcgcctggataagtatttgggtttctcaggccataggcagtgccatagagctcctaagagattatgtcttttgtctgaattcagagtttttgttttttggctgtctcatggagtttgcagtggcaagccacttccttcaaagattctgtgaaatcttgtggctttcctgctgtgttcctgtggtggtttttggagctaaagttcacgatgtgagtttctacatgctgttctgtccttctgagtgggagctgcaagttagtcctgcctcctcaccaccatttttccctattttcagttttttgatgctaccacagttttataccactttgttctcaatccctcagtctcatcctgcagaagcccttgcctccaactctatggagaagaattaaggcctcccagtgagagtttcttcaaccttttctccaccccaggatttcagtttcccactgttcccctccccgccgccagcccaactgctgagggttctctcctggaacctgccacacttctttgacctgccatggttcatctgcccagtggtcttcccacctcctcattccgtcgtacgccaaatccatcctacactcagtgtcatatttgtttttctcagttctctctcctgcagagatcctctaga

SEQ ID NO: 461786 - DNA, 359 bp, Homo Sapiens
  misc_feature (280)..(280): n is a, c, g, or t
tgcaggggagaatgcttggcccagtacttgagatcttgtacacattcagcaattgttcactaccatttcactgtgttcagagataacgtgaagctgggaacaatagtgaacatgttggatgatagatacagcttcttgaaagatctcagcagacaagaagattggagcaaatgcagcaattcagagaacagcatcaagtcccacatgagcaggaaacgcggccctgaggtgtcacgtcctgcgtgggtgagtctctgtggacgcaggttccctggaaggnccagcagtgagggcaggatgtgtatacattttttataacagcatcgtagcagatgttacagccagtacgttctctctcc

SEQ ID NO: 461787 - DNA, 556 bp, Homo Sapiens
gggagagagaactgctgcaggcagagtcgggcatctgcgccagccatgagaccagtgcttggaagagatcccaaaatcacctattctagacattcagatggatagtgatctaaatgctatgaaatgctgtggcctacagtgatcatgacagcattgcaaacagcatcatctccctgggacaaggaattctttctcaccaccctccttcctagaagctctaatctcagtcatgagtacttagcaggaactatatttgctacaccttcagtaactcgtgtggtgtctggcagggagcagctgcttaacagctactgaatgaataagtgagtgaatgaaggaataagcgagtgaaagaatgaatcaatcaatgaacaacaggtccaggtctagctgctattcaggatctgtgcctctgtttgccatttgatgtcttctcattggcctgaggccaggggaggtgctggcctgcctgtaagctatctccctcagggtgtccccaggagtcccctgactgatgctgagatttctagagtctgcccttgtcctgtccttactc

SEQ ID NO: 461788 - DNA, 431 bp, Homo Sapiens
tgcagggaatggtcttttctgagaacatgcatgcctgtctggtgcctgcctcctgtccacagtgggatgtccatgtgtaaaattcagtgtgggtgttgtagctgggcctctgccatgtccagagtctctgggtgagaagaacaatacagctaacccctcaccagtcttgagctgggcgaggctgacaggatcttcaaaccacagcaacattaaagatcattttcaccaatctcccgcccagtacaaagatacccttttctttgtacccagtacaaagataccagactcacctcaaccactttacccaaaccaggacaagtttctccatccccagttactgatgacaacagctgtttaaaaacacccagcaaaaataaatatcacatgtgctgcacagtgtcaaccccagttctctctcctgaagggtcctc

SEQ ID NO: 461789 - DNA, 500 bp, Homo Sapiens
  misc_feature (453)..(453): n is a, c, g, or t
taaccctccaggaagagagaactggaacttcacagctgggctttttatatccctgggctgataggtggttcctgtggagaggaggcaggatccatgatccatagagccagcccccaagctggagttcttcttgaccggtcctacagttaggaccaatggccttccctagttgctcccacatcctttgtttatttttttggtggagatcctgtagttagatgacaattaaggttctagtctcagaactcactttgacttggcccaggtcaacctgggaagtaagacttcaacgggttccatgtctaccccatatgtaggctcttgcaccaccatctgacccagagctctcttccgtagatctttgggtcagagatgaaataggacaattttccctgaactcctagcctcaccactgaaataatgtgaagttgtcctctctctcgcctctgtggnccacaggcactcctctgagatgccttcagcgaggatcctcagatcag

SEQ ID NO: 461790 - DNA, 282 bp, Homo Sapiens
gcacaaatttgttttctgccttcaggtaagagatctagagtgagagaacttcctatattggaagtaattagtgactgaagctgtctttcactcccctctctgcttctgggaatttctaccatttggtctgtctcagttccacctgcaagtgttgggaccttgtgccagatatagctggccttgtgttcaccccatctgatgcctgaattcatcctgatcttttttgtgtgtttgtcttatgtatcttcatttccctttctgtggttattttgaatatatttt

SEQ ID NO: 461791 - DNA, 392 bp, Homo Sapiens
agagaggactggttggaaacctgtggttgagccaagggatggcggagccaatcgtgcatgttgggtattgaataaatgacttgtgtccatatagaaggctgggatttgagctgctgcagactgagacacataaacttgcggattctgttgctgctgggcaataagggaaggcatacagcttaactgtgaaaaatgacttgcagaaggcaggctgcttgtctgtaactgctgaggtttcactttacaaatatttggagggtccgatgtggttgtagattttgtgctcaaagaagaggtagtgtatgtaccagctcctgatagtgatgctgtaggagtgactgaagcaacaggaatctggggcatggatgcacttgagaacgaattgtaattag

SEQ ID NO: 461792 - DNA, 617 bp, Homo Sapiens
attagaaattggtaatgagaaagggagattcaatcctgagagctctatatacttaaatataaagccaccattgtatctaaaattgagtctgaaatatggataacgaaattgaccacagctattttccaacacatattgcagcttttaaaaagtacacaattgttaagtttgcattagaaatataagcagattacctactagttgaaaccatatagtattgttactaagctgatttttttaaaaaagtacaaagaaacatacattttcattcatttggaaaatgtaaaaatttaagtactaatatataatctcttcactttctctgatctacaaatggatagtatgcctagttatcgtcatgcagataaattcttcagtattcaattacctaagcaagcaacaaacaaaaaaaaccttgtcagtaatacacagatgaatctctttaacagtttctattctttagcagtctttgatgatttcagaatttgcagctttagctcttttatcatcatctctaacttctgtcttgcttcccgttcctgtctgagttcatcttggagttcttgcctatcgcctcagcatggtccaatctctgcctcagttctctctccttgtag

SEQ ID NO: 461793 - DNA, 486 bp, Homo Sapiens
atgacgtatcaggcataatccttgatgagagtttgctgcgtgcctactcagtgccaggcgctgggggacacagccgtgttcaggacagccttggtcctgttctccgggagccgacattccagggggagagaagtttcctgaagacttccatgctgcgttccctctgctcctgctcctggcgccatcctaggagccagccatgcacgcaagcgtcatgcctccagggctctgactgcccagcccctcaccgcaactccacctcagttgcacacacccttggcacatcctgaacctcattttcatgacggacacacaatttttgctctctcctgtccaagcctcatcctctggccgccacctctttccagctcacttcctatagtgcggccagtaccgccctctgcctaggcatgtcgacctgcagggaccctcttctgtcttcgaggcctctgcccacaatcccctaattgttctcgatagtcctcc

SEQ ID NO: 461794 - DNA, 582 bp, Homo Sapiens
gaactgttcagttttgcaacacctgttcgtatatctgcaacagcatcaatccctatggtcaaatactggaagagcatgaagcatttagccaggctaattaggcgggtacaggaatcggtgggagctggattggagacacagctgtcacccaaacagtcctgcagtgcgtgctcataagcctttcgcgctttcaaaatgtgaacagccaacacctgtcccagtgtaagggcccataggggctgctcctcaagtcagcttggttaatatgtgaaacagctcgaagctgtggcagcccttctcacttctggcgacagctccacctccagctcagcatagagcagactgagctcacagaggtcagagtctttcagttctctgcttcctgccatgccaagtgctgtgtcaaaaacttttctggcatcctccgtgttgccaagcaaccactccagatgtgcatactgcttccacaggcaaaagttgttgcagttttctggctccttaaggagattcttggctagttttttgcagttcttcccttgagactttaatctcttcttgtttttagtgcaggcaccaaatgac

SEQ ID NO: 461795 - DNA, 468 bp, Homo Sapiens
gaaacagctttgtgaatgatgagatgtgagccataagaacggggtgaagccaacagtgaggctctggtgtttgagctgggcaactggctggacagtgctgccattctcagatatgggagtcctagagggagtttgttttggtgatgaaccgcaataatgagagcactgagacgcttccccttgtctgtgtgtcttctaagatacatatcacaaatcaaactggtggaaaagcagcaacaagcacccacaggctgtgagcttttcagtcgcaaacccgtacacaagcgcgaggtactgagcacagctgctattgattctgttgatgtgaaaaatcatttatctcaaaagcctcatgcaacactacagaagcagccagcctcacctccatgctatttaaagaggcagtgaataataaaaccaggtgcgtgtggtgctgacccagcacgccgccgggaactggacccatat

SEQ ID NO: 461796 - DNA, 199 bp, Homo Sapiens
gcagaacagacacacatttgcagaagttgctgctgataggagtgtgttgagaatgagccacaagcactttaataactggcaataggtggaccatggacagagaaacaacgaatgcagtcttgttatagtttcctgatgacacagatttctcgaagtgtctcagaaaaatacttagaaagggtatgaaaagttatcttta

SEQ ID NO: 461797 - DNA, 950 bp, Homo Sapiens
  misc_feature (124)..(124): n is a, c, g, or t
  misc_feature (148)..(148): n is a, c, g, or t
tctgaggctctgcattgttggaggaagggtcagaggggctggagaggaagaaacaatgcaaatatgaggcagcagaagggaaatcgaggtactgggggcttccagctcatgctgcttgctctcntcctgaatccatcgttggtctttntctcctaatccgaccactccatcgccagcctccattcctctgaatgttgatagaagaagctccggactctttccagctttccagacttttccactcacacagactcaagggtcctcccaactgtcttgtgaaaagaggccatcccattccacaggaggggaaactgaggcttggaaaaggcacatggtcccatgtagcgtcactgtggctcttcggactcttccaggtccctctgcctgtcctgggcctgccattgttccacctccaggtctggcccactgcctgcacctctcctccccgtctcaccttgccctgcactgcagctgccacgacctccagcagccctttagaccaacgtcctaaagcgataatgccatgatgttcctggctttttcaaaacccttttcctagagtgtgttaaccagaatggcagtcccacgaggatctctgtgatgaaagggcttcatggtcaaatagtttgggaaacgtggcttcctttgtcccttccttctcagtttgccaaatttaattatgccacacccccatgcaccttcttttgttccatgatatcattatttaataccccattttggaatattatctaagaaatgtggcctgaggaatgaagttcaaatctctcctcttggcgtccaaagggcttcaccatcagatctcaaccttgttttccaccgtgcctctcttggacatccagagcccttgccctcccctcagtagtcctgtgtccacaaatctcatggtctcaccctcctgttcatgcccagtctcgctcccgcaaagatct

SEQ ID NO: 461798 - DNA, 350 bp, Homo Sapiens
gacagaaaatcaatggcacagccctggtctcagctctgccgtcactcaacttgtatcttgagcaagttcctccccatctcaggcctcagtttcctcatcgcatagagagttggtctttcctcaccgggcttcctacttgccctccagatttgcctgaagctcacatgagcgatagggacatgtacatgctctgccatctccctataggacataagtccacgctggagcgctgagcatcagactcaagaatggcttgcgtgtatattgcagacccaccaacaagggcccagttcggagttgggagcaaaactgcctagtgagaaccctacatactccctgtgtcatgcagc

SEQ ID NO: 461799 - DNA, 500 bp, Homo Sapiens
ccctgcccaggaaggcacaggaccccgctgaagagcagcagagactcaatcactgaggctcaagcacaaggcttttctcatttcagatacacaccactcagggcctttttctagattttggcaccacagaaacccaacctcagaacaaccaacttagtcaggctaacgcattcctggctgtctgaacaacctgaggggaaacgcttcttgtatccaattctgagacattcaaaactatcatttcaagctggcttgaatctgattgggaaaaggaagactgaatttctgccgctgacgcttccagaccaacagaggttccctgtacctgggagttctggatattcacaggcaactcacacaggagccggaggtaatagatttattgtcataggtagaatgaagggcctttctttctttttttctttagaaacagactcactctgtccctgggctggagcgtagtcacaggatcatagacctgcagcctcaccacccgacca

SEQ ID NO: 461800 - DNA, 434 bp, Homo Sapiens
agctcggtaccccccagctactcaggaggctcgcagaggtctggatgaatggacggctgcctacagccccattcctcacagacatggggtgacgaggaagaaagaggctcaagtgaccaggcctccaaggccaggctctcccttttctcattttccctggaaccccagatccccagcttctaccggcagggccagagggagcttttctgtgcaagccgtgaaggcagcgtctctgaaatggccagcccccggggcttgggcctagtgtgctggagtgaggcagtaagagaaaatactaggcgctaaactccccagacagaaagccaccaccatacacaagccccacccacccttggtacagcctgttgccatgtgcctgctgtacagcagacactatttatagtcagcctcctgagtagctgagcgatcctcag

SEQ ID NO: 461801 - DNA, 551 bp, Homo Sapiens
ccagctactcaggaggcagcttacttctccacattgattttcattatgtctgcctgcacttagagaaccttacagaaccatgtggctggtgggtgagaatgactcccagcataaacgggcctgcagtgcatgtgcggttctgagcctcatcctttccacaagtgcattctggagagccagcacagcgggccccctggggcccctgctcccctgtcctggcctcgggttcttctgtaacatccccttttctttcatataaacatcaacgcagatcagaaagtctccagggtgacgggcccctgagttccaagcattgcgagtacgtagccctgtggcctaaggtggtttaagtagttgttaatgtagacacggcctctgcctgtgcttcctgccacaggcagctatcccggctggacgtaagaagccaaacttctatgaggctacctaagggtatggcttttggactaagactcttgcagagtcagggaccaagtcgcgaggtcgttaatttggttaccatatttgatagcaactctgcagagtgctggtgc

SEQ ID NO: 461802 - DNA, 452 bp, Homo Sapiens
tttatgtaatacccgcatgccattttctcagaaaggtcttgcctgtccactctctctaaatatgcacctctcgccatactacttcctatctggtaatctcttaccgagttttatggtttgtttttcatgagaatttatcatgatctgactttattgtgttttatcattttttccttctaccccaccctagctaagtgtagatttcttaagaatttggactggatatattgtttattgctataaccccagagcctagaacagtactctgtacactaagatggtcagtagaaatttgtttttgaatttgtgaatgtctttatggcagagatattaacactacttggatatttctgtactgtcttctaaaatgctactatttaaagtaagtttttaaaaatttttgcttctaccgcatagacataatagttttaatagctggacatagcctcctg

SEQ ID NO: 461803 - DNA, 334 bp, Homo Sapiens
  misc_feature (169)..(169): n is a, c, g, or t
ttccagctaccatgaaaaactattaaggaactataaatagaaaagaaaaaatggactcataaagactttgttcatttccttctaaaatatccctagcttattaagtgtctccattaaggcttccgtacccactgacaatatttcttgattctcctgtaaatgacactanagaaaattctagatgctatagctcttcctaattagtaactacatggaatagacagcttaagttaggaaattacattgccttttgagcacaccagcaatcctacctctgtgtgctttgaggaaactagtgtagcacctcctctttttgtacaacttaacatatgtc

SEQ ID NO: 461804 - DNA, 553 bp, Homo Sapiens
  misc_feature (111)..(133): n is a, c, g, or t
cccagctactcaggaggcaatcatccagtttctaagaacttcggtaaactcgactatttaaaaaaaggaaacacagaaatctgaataaagtctactatctaattaatagtnnnnnnnnnnnnnnnnnnnnnnngattcctaatacatgagtagagtcctacgtgtttctactgaacctgccttctgatctccgactgggtctcagtatacagcagccaacctgttaggggaagatagatgtttgccaataatgccagaatattccaggcaaagtcctgatggctgtgacttttgagctgtccaggttaccagcttttgtgggattcagtggctccactgctttcagactatgctcaaaccaaaaggcagttgccttcagccccttgatgcagtgtactgactaccctgttattgtacactctgctgtatgcaatggtagctctcttctggaatctactgggcagttccttgcccctgggcctttgcttgtgccctcccacatcagggacactatgacagcttctcaacctctcccaatcatactcctgtagag

SEQ ID NO: 461805 - DNA, 468 bp, Homo Sapiens
cccagctactcaggaggctgagacgggaggatagcttgagcccaagagtttgcgactgggcctgggcaacatagcaagaccctatctctaaatcaatcaatcaaacaaacagtggtatgccacccagaataagtatcttttttgaagtaaaaaacaaaaagcgaaatgggaacaacaggtctggtagtggtggctatctgtcactgacaatgaggtctctgcagagccgttccctaccctccccaaccccctagacatcaggtccctttcctagataaatgtagagcacagaccttaggcccatggcctccaaacttttcttctcttctacttactagaatcaatcctctcttcaaatgaagtcttctgtgagagccgcgagatatgaagcaagcgagtgctagaggtgcctggttctacgtgggaccaggcttctctttgctaacctgcccgcctcctgagtagctg

SEQ ID NO: 461806 - DNA, 207 bp, Homo Sapiens
catcgtcaacattaattgataacgtttacgtttagttttttttatatttaatttagtacctattagtttattatcttaccaaagcgctattgtatgtttattgacattgaattgctatgaaaatgttactaacaatgagtgaaataataagtgctgttattacatcctcccaccccaatatcctttgaccctcctcctcccttcctg

SEQ ID NO: 461807 - DNA, 726 bp, Homo Sapiens
  misc_feature (662)..(662): n is a, c, g, or t
caaggggagagcgtttctttgggggatgacccttcccagcctcaaactacaataaataaagaacaattttccaagagaaaaaatgacacactggatcctgaactgtttgttgaatgtacagagtgcggaagaaagatgcatcagatctgtgtccttcaccatgagatcatctggcctgctggattcgtctgtgatggctgtttaaagaaaagtgcacgagctaggaaagaaaataagttttctgctaaaaggttgccatctaccagacttggcacctttctagagaatcgtgtgaatgactttctgaggcgacagaatcatctctgagtcaggagaggtcactgttagagtagttcatgcttctgacaaaaccgtggaagtaaaaccaggcatgaaagcaaggtttgtggacagtggagagatggcagaatcctttccataccgaaccaaagccctctttgcctttgaagaaattgatggtgttgacctgtgcttctttggcatgcatgttcaagagtatggctctgactgccctccacccaaccagaggagagtatacatatcttacctcgatagtgttcatttcttccgtcctaaatgcttgaggactgcagtctatcatgaaatcctaattggatatttagaatatgtcaagaaattangttacacaacagggcatatttgggcaatgtcaccagtgagggaggatgatatatcttccattgg

SEQ ID NO: 461808 - DNA, 198 bp, Homo Sapiens
  misc_feature (48)..(48): n is a, c, g, or t
gttccaggcatatagttcacaggcctgggttacctggtttaccttggncatcattatttttctataaaaagtcgaggtattaaacaggtaatttattcccatagtagagtcatgcaaatgtttaactttttttattgattagcgcctcatatcaggttaattggagtgtctagcgaaatgtctgctatttcaataagt

SEQ ID NO: 461809 - DNA, 249 bp, Homo Sapiens
  misc_feature (62)..(62): n is a, c, g, or t
  misc_feature (64)..(64): n is a, c, g, or t
ctggctttgtgaggtcaaggacagacttgatgttataacccccggctcctcagatgtgactntntttgaatagggctccctgtccccaggaaggcaagacgttgccatcattgtgatttcctacagtcctggcgcatctgggtgtcctcaccctctgctggaatctgtaaattattggtccagcttatctgttcatcttatgataaatgacatctccataccctgccatggccttggggtgggtgcagt

SEQ ID NO: 461810 - DNA, 307 bp, Homo Sapiens
  misc_feature (292)..(292): n is a, c, g, or t
caaaagtcatccacaagttctttgtctaggacttctagctgctcagaccctcagggtctttggattgttaccaaagtctgtcaaacagaccagtagtttaatacctgtacagaaaaatgtttctattatgcttctagtatctagaaattgcttgctacagcatggaggtggttctgcctttccctggctcctcacactctcatctgcaggattcccagctttgctcagtcttcatgcccaccagaggcaaaaaggcaaactaaaactgtcatgcagtggtaggtttgaaatnagctgctgcatcatg

SEQ ID NO: 461811 - DNA, 196 bp, Homo Sapiens
  misc_feature (112)..(112): n is a, c, g, or t
  misc_feature (129)..(129): n is a, c, g, or t
  misc_feature (139)..(140): n is a, c, g, or t
  misc_feature (143)..(145): n is a, c, g, or t
  misc_feature (168)..(168): n is a, c, g, or t
  misc_feature (170)..(170): n is a, c, g, or t
gaatactaacaaagtagtgaaagcagacgacacagtacctggcacactactaaactgtaaatgttttcaaatctgaatctgtagaattctgtaaggttttatgtaatatgangtcattagctatcatgnctctggattnnctnnnaggttttaagatggagcatctgngnatgtcagcccgtcctatctagaagtg

SEQ ID NO: 461812 - DNA, 165 bp, Homo Sapiens
aggggggcgcaagagagaagaacttcacacttctttattgctcagcctagatagcagcagctggggaatacgtaggacaaacaggacgtcgaacaaattactccactatattaatattcactcacaccacttattctttcttgaattgtaaacactaagtgtagt

SEQ ID NO: 461813 - DNA, 142 bp, Homo Sapiens
  misc_feature (33)..(33): n is a, c, g, or t
  misc_feature (65)..(65): n is a, c, g, or t
gggactactgaagactagagaacgcctctgtgngagtggtgcagacaaagacctcactaaagtgngcttaacagagtactagaggagagaacttggcaatagcaagtacagacaactatgtgagaaatactgctcccaaagg

SEQ ID NO: 461814 - DNA, 231 bp, Homo Sapiens
  misc_feature (38)..(38): n is a, c, g, or t
  misc_feature (40)..(40): n is a, c, g, or t
  misc_feature (51)..(51): n is a, c, g, or t
  misc_feature (59)..(60): n is a, c, g, or t
  misc_feature (62)..(62): n is a, c, g, or t
  misc_feature (167)..(167): n is a, c, g, or t
  misc_feature (175)..(175): n is a, c, g, or t
  misc_feature (188)..(189): n is a, c, g, or t
acggccgaatatggtactctagttacaatgagaagtantntagagccgttnccggcacnncnaagctcgacttttaggtttttcgatgccctaagccgccttcatcaatagcaggtagcgcatggcgaaaaaggtacgctgataaaatgcttattaagtcatacacnctctattnactcacagcctgnnagcactgagtaagccattgtatgcaaacggcgagcccgcgca

SEQ ID NO: 461815 - DNA, 239 bp, Homo Sapiens
  misc_feature (23)..(23): n is a, c, g, or t
  misc_feature (38)..(38): n is a, c, g, or t
  misc_feature (108)..(108): n is a, c, g, or t
  misc_feature (110)..(111): n is a, c, g, or t
  misc_feature (175)..(175): n is a, c, g, or t
  misc_feature (184)..(184): n is a, c, g, or t
acaaacaaacgttccaccattcnctacacttcgatganacacaccctaaggggtgggccgagttaggcacttgtcagaggacccacggttacggtacacacccagccngnnaaacaagtgcccggcaacaacgcccagtgaccgggggggtgcgatgatggccaaaagcggaccncccacaccnatttactggagggaggttttcttgtgtagcgctaggcagagctaaccccactctc

SEQ ID NO: 461816 - DNA, 591 bp, Homo Sapiens
  misc_feature (41)..(41): n is a, c, g, or t
ggaaatactgggcctgttttaaaaatgaagaaaactgaagnaagaatccagttaggtttcctagcccctccttccctataatacgccttagtcctttgcaaagcatagatagatagttggtttgaactagttatttctccctgccctcccccacaagaggcattcctgcttgccttcttgggcatctgtttaaaagcagtatgggaggaagggggatgttctagggggacaagatgtaatcataaaatctgaagccccaaaagaaaagtccagaggagggctgaaggaaaaaacaatcatgacagcaactctcctaaccacaaaaatcacatatgttatctttctttcaggactaataattaatatttaagaggaaagccacatcaatttctagggcccttcttggggaaaggttcatataatttagcatacataccatattcagtgaaaatgcattcaatataattacctattataaaaacaaccttctcagccttaacaaatgagataattataaatgctccttttgctttttattaaaatgtcacagcatgcctagagaacagtttatatggctgcataaagtctgaa

SEQ ID NO: 461817 - DNA, 158 bp, Homo Sapiens
  misc_feature (32)..(32): n is a, c, g, or t
  misc_feature (107)..(107): n is a, c, g, or t
  misc_feature (112)..(112): n is a, c, g, or t
  misc_feature (116)..(116): n is a, c, g, or t
  misc_feature (128)..(128): n is a, c, g, or t
  misc_feature (138)..(138): n is a, c, g, or t
gagaaccacgggctccatcctggcctcctgtncaccttcgaacagatgcggattagcaagcaggagcacacgaatcaagcccctccagccaccaaattttctaaacnggctnggcnatgtcgtagttngttgtcagtngatcggtagagataatcctg

SEQ ID NO: 461818 - DNA, 514 bp, Homo Sapiens
  misc_feature (376)..(376): n is a, c, g, or t
ggctttaaatgacatctgcctgggatgtaccacaaccatatgttacctgtatcttaggggaatggataaaatatttgtggtttactgggtaatccctagatgatgtatgcttgcagtcctatataaaactaaatttgctatctgtgtagaaaataatttcatgacatttacaatcaggactgaagtaagttcttcacacagtgacctctgaatcagtttcagagaagggatgggggagaaaatgccttctaggttttgaacttctatgcattagtgcagatgttgtgaatgtgtaaaggtgttcatagtttgactgtttctatgtatgttttttcaaagaattgttcctttttttgaactataacttttctttttntggttattttaccatcacagtttaaatgtatatcttttatgtctctactcagaccatatttttaaaggggtgcctcattatggggcagagaactttttaataagtctcattaagatctgaattttggttctaagcatt

SEQ ID NO: 461819 - DNA, 407 bp, Homo Sapiens
ccataccaaagtgagtttattgacattccttgaagatggtgtgatggaagagaaagcgcggcctgagtatcacgtgacatttctcttgctgatgtaagcaaaatcagcccaataacgtggacttctcctgctattgactagaacagacttttgaacaaaattgttgtagacatttccttggataaattggaagctgcaggaagtaggctaaaggaacaatatttactctatatactacctctaggcaccttttttcctactagaacaaagggactacatgtcactaacaggaaaataacactttctcttttcttttggaccttatgatggctggaacatccatcccagatttttatgatatagtattgcggtagttttaataatgaacactgaagtacgtaataata

SEQ ID NO: 461820 - DNA, 719 bp, Homo Sapiens
  misc_feature (95)..(111): n is a, c, g, or t
taatgctgataatacctaaagatgcattgaatgcttggaagaatgctttttgatgttgattttgacctgttcatgattcagaagaaaaacaaacnnnnnnnnnnnnnnnnnccctcaggtctgagtagcattgccttaaatcttatccagttagaacattgatttatttacatgatgttcagattttccagtgaaaaatacccttctgaacaaaacatgtacttactctccgaaaggcatctatctgtgctattgcaaacactccttgagattttaggggaattctaatgttgtaccctttcgtggcagctttgactgttggcatagcatttgttatgtagtggtagcgactttcctgctatgcagaatccctcccatgacgtgtatgttttacatgatgtgtgcctcttcacgcagtaaatagtttcttgttaatgtatgtttgaggagtttgaacgtcagtgtgcacttacccacaaagttattcaagttgtaaaaggttatacaataatttaacaactaccttttttattctgtcgggttactgacctcactttatgtaaatacttcgcatgacaaatttcagtaactcgtctattttcagccatggcattaaggactttttcactaggggaaactgataaaggtttgagttcaactaaattctgccttcatacttttattcaaggggggaccaaggctggtgtgctttacatttt

SEQ ID NO: 461821 - DNA, 592 bp, Homo Sapiens
  misc_feature (416)..(416): n is a, c, g, or t
tgattaatcaaggatttctttttattttaaagtgaaacaacagggggaaaaacagtctgtatggcaattttaacatttgtctctgtttatttttctttgagtgggcatttctatctatcattagctcaaaaaaacttaacattcatagaattaaaaattgcataagggaacaacaaaagaataacaactccttccaacgatagaactggggcttagtaatgtttatgggtgtgaatattgaggtgtcaaaattgcagaagagagtaggcaaaaggcctttatccaagatggcacactttaatgatagctcaccataatacttagcactagtaaagacctacaagtgcttctgaagtgaaatgtatcattacttccagtttccaaaacattctataagttgagcctggcttttgtcnttttgaatcattgtgccaggatgtttttgaattctcagctactcttgcagcaaatcaaccctttactatttaatgagccacgagtatatgaaaaatagaattgtctcaatcctaggaaaggaaactatatttctctgccttcatttcctcctgttgtccctgctttttcatttttt

SEQ ID NO: 461822 - DNA, 452 bp, Homo Sapiens
  misc_feature (421)..(421): n is a, c, g, or t
caagtgacaccaatctacaaggaggaaagatttgcaggtgtttctgcaactgtgatgatctggagccgctgcccaggattctttacacagagcgatttgaaaataaactggatcccgaagcatcctccgttaacctgattcactgctcacattttgagagcatgaacacaagccaaactgcatccgaagaccaagtgccatacacagtatcgtccgtgtctcagaaaaatcaagggcaacagtatgaggaggtggaggaagtttggcttcctaataactcatcaagaaacagcttcaccagggactgcctggatgtgggcggaaagcagggggaggagatcactcatcccttactcagatgcgtctctacttgcccagtgtccacaccatcatcctgggtttctccatggtacattacgtnggatttcacggggggtttagttcgtttttaa

SEQ ID NO: 461823 - DNA, 389 bp, Homo Sapiens
ccagaggatgtgctgtcaacctggttgcaccaagaaacaaacaggctgcaagagtgtgttgctacgtttagacctgtacgcctttggtggatagtccatgatttgctaagggggtttgaaatgggaaggttctcacaaaatgcttttattctgcaactctcttcctcctctcagaggattccaaggtgggcatcaccccttcacctcagagtcggctgtgggctctgcacccagcctaggccggggctctgagctcctctcgaccgccggtactgactctggccaccagagggcactcttgccttgtggagaccaacagtcttctgagtccgaggaacctggttcccatctttgccagaacatctggatttgctgaagcctttctctac

SEQ ID NO: 461824 - DNA, 121 bp, Homo Sapiens
gccgtgaaatcagtttctgttggttttcggttgtgtttggttttgtttgtttctttataaaaaattcaatcgggcagctcccttttccacaagcctctttgtgactgtagaactattgtag

SEQ ID NO: 461825 - DNA, 767 bp, Homo Sapiens
gggcagctgataggaacaacattcagctccgaggctgaaagggaaacatcagccgcccggggggagttaaaatgagtgacaacactactctgcctgctccagcttcaaaccagggtcctaccaccccacgcaaaggccctcccaagttcaagcagaggcagactcgccaattcaagagtaaacctccaaagaaaggtgtgaaaggatttggagatgacattccaggaatggaggggctaggaacagatatcacagtgatttgtccatgggaggcattcagccacctggaattgcatgagctcgctcagtttgggattatctgaagtgccagaggttctgccactctcaatgacatctgctgtaattttggttgcttttgccctgttgatctgccggagtcttgaaattcagctgattggaagtggtttctttgactttcaaggtcattccctatcagttactactaagagttctcttactgtcagaatctctcttgcagtacagctcaaaatagtggatgcatttcaaacttgaccaccttttcctaccagctagttagaagtcatcaatatttctctacattttgtttatctgtaagtcctttaaatctatttttgctaggcattcattatgattaatagtagacttttaagacaacatttatgtcactccccacctcctcatatttaataaaggagatatttaccttgaatgttggtgaagttgtattaaatgctacgtagaaatatctgatgctgtgttctgag

SEQ ID NO: 461826 - DNA, 414 bp, Homo Sapiens
agagtatctgagattattgcagactttatagaaaactgctcaagggagatccagattttctgggtatggggagggcaggcaggcctcaagccaatatattaaaggaaggtgacttcctgtgtgcagacgcagcacaggccagccattctgcctgatctagagggtggggagtcagggagagggggtcctctcccccactcaccaattgtgctttgggatcatggagaaggcaaggtgctgagcttctgaccctgaaccaggagggcttgtgcctgaggcaggaggaaagacctacttctctttcagaagatacacggggtgaggtggtggtggtagcggtggtggcaaggaatccccaagggcgaagagccacaggggtgggagagagcatagagaaatcgaagggcagcaact

SEQ ID NO: 461827 - DNA, 649 bp, Homo Sapiens
  misc_feature (40)..(40): n is a, c, g, or t
  misc_feature (108)..(108): n is a, c, g, or t
  misc_feature (266)..(266): n is a, c, g, or t
  misc_feature (372)..(372): n is a, c, g, or t
  misc_feature (423)..(423): n is a, c, g, or t
  misc_feature (518)..(518): n is a, c, g, or t
  misc_feature (542)..(542): n is a, c, g, or t
  misc_feature (544)..(544): n is a, c, g, or t
  misc_feature (585)..(585): n is a, c, g, or t
  misc_feature (587)..(587): n is a, c, g, or t
  misc_feature (620)..(620): n is a, c, g, or t
gtgatcgagctgctgcaggttgatgccccgagtgattacnagagggagacctggaacctgagcaatcatgagaagatgaaggcggtgccgtcctccacggagaggganatcggctcttcaagctgggccgctacgaggaggcctcttccaagtaccaggaggccatcatctgcctaaggaacctgcagaccaaggagaagccatgggaggtgcagtggctgaagctggagaagatgatcaatactctgatcctcaactactgccantgcctgctgaagaaggaggagtactatgaggtgctggagcacaccagtgatattttccggcaccacccaggcatcgtgaaggcctactacgtgcgtgcccgggctncacgcagaggtgtggaatgaggccgaggccaaggcggacctccagaaagtnctggagctggagccgtccatgcagaaggcggtgcgcagggagctgaggctgctggagaaccgcatggcggagaagcaggaggaggagcggctgcnctgccggaacatgctgagccaggntnccacgcagccttccctgcagagccacccacagagccaaccngnaacagtcattccacagagccaacttgcaagagncaacccacagtaaccatttttcaagagtt

SEQ ID NO: 461828 - DNA, 1026 bp, Homo Sapiens
  misc_feature (894)..(894): n is a, c, g, or t
ttttttccgtgagaagccaccttatctcctctttatttagccctgctctctccactctctggaaactgctgtctccatgctcagctgagctaagaggagcccagggcagagacggggatcatgttggcagccaggtgggcagcccagttcagcagccgctgttcctgcgcaggaaggggtggccccgcaggagacagtggagctccatgaaggtgagggagcccacggtgatggcgcaggggcccacggcgtgggaagctgaacctctcatagaagggtaccagcgcgtcctcgcacatgagcgcggcccggcgcacggccgcttgggtgcccaggtggtgcaggtagcgccacagcaggatggtgcccctgcctgactgccggaacggcggtgcacggccagcacatgcaggtgggctatgtggcccccagacctgtgcagcgtcagtgactcctgcatgagtctctccttgtcccagagcgagccgatgatgaaggccacaaggcagccctcctcgaaccagcccagggacagctctggacatagggtcaggaagtgccggatctcatccaggtacagggggcagacgcccaagacggagatgaaggcttcacgctcgatcttaaaggcctgacagcgtcctccggggtgaggcagcgaaacttactggcagggagtgtgtggcgccgctgacagctcggggacttcggggatcccaggtggcagacgtggggcctcaggtttcagggggtgggtgctctgcgtggacattctggccactggtgcctccttggggcgccccagctttggaagtgtcctcctaagccaaggagggcctcccagcacctggactgtggagaggatacccagtgttccctccacaaagccgctancctgggggcctgtccgcaggcacgggaaccagtaaaatccgggactccgggctgcaaggctgtagtagcagatgttccccgggcagcctgtggtgctgttagaggtttgtaatccccccaccccacctctcg

SEQ ID NO: 461829 - DNA, 216 bp, Homo Sapiens
aagccagaacttgtttattgaaaaagcactaaaacaaaatattttggtaagatcgagcaagaagacacaaatagagaatggaaaaatgaaaattttataaacgcagttgaaatttgaaaatgtgaggatattatgaacaattcatttgaaaactgacaaaatacacaaattactacgagtattttactcaaactaattgaagatagacatgtaatc

SEQ ID NO: 461830 - DNA, 942 bp, Homo Sapiens
  misc_feature (280)..(329): n is a, c, g, or t
  misc_feature (422)..(422): n is a, c, g, or t
  misc_feature (451)..(451): n is a, c, g, or t
  misc_feature (485)..(485): n is a, c, g, or t
  misc_feature (602)..(602): n is a, c, g, or t
  misc_feature (791)..(791): n is a, c, g, or t
ttttttcccagctcagcttgcgtttattggaaactgcttacccagcactccacaaaggagcttacagcggggtgacacttaggactcctatggcctaatcctgggattagcacagggccatgggctggtggacagagggaggggtgggaccgggcatgatgggagggaatgctgaagacccaggaagaaggaaccagtgggtcactacagatgcttcagtttggcagggagctgtgctgtgggcttgtgtgcaggcctttctcttggccctggggtggannnnnnnnnnnnnnnnnnnnnnnnnnnnnnnnnnnnnnnnnnnnnnnnnncacaggcgctcacgggtgtcatgtgagtggtaggtggagggaggacagctgaacagttggcatcaggcgttcttcatcttttccttccacttnttttgaggctcaaactggatcagtcgcanaatttccttattggccagtgtcccctcaatgaantctttctctgtaagtttatcatcatcattctttccaaagtacttccagatcttctcggctcgcttttccggcgtgttttcatcgtctggaaggagcttcacgtcctcgggagtgatnattttgaaaatagccatgacgatctccagcacttcattcttgctgatggtcccgttaccgtccacgtcgtagagggagaaggcccactccagcttctggttggtcttgcccgcggtggtcatgtgcagggcgatgacgtactccttgaagtccagggtgccgtcgaggttggaatcgaagctgcggaanacatgctgggcgtaggccttggggtcggtgtcggggaagaacttggcgtagatgctctggaactgctgctgggtgatgcggccagtgggacagtccttcaggaaggactggtacccagagcacagctcctcctccgagaacttggtgttca

SEQ ID NO: 461831 - DNA, 519 bp, Homo Sapiens
  misc_feature (381)..(381): n is a, c, g, or t
  misc_feature (397)..(397): n is a, c, g, or t
  misc_feature (426)..(426): n is a, c, g, or t
  misc_feature (431)..(431): n is a, c, g, or t
  misc_feature (451)..(451): n is a, c, g, or t
  misc_feature (458)..(458): n is a, c, g, or t
atttaattgcatctttattttgaaaaacaaatgaaaattgatggggtttaaagctacagaggcactgacctttttctagttattgtattgctacaatttaaatattaaaacaaataagagctttctcaacaaattagtccatctcattgatgtaccacagaaatccaaagctttgctgtcatcacataaatgaattaaatcacatgtgaaagggaacacacccaattttatgttaaggtgaaaccagcagtttgcttcttttattagtaatgtggattgatgttttctcagagtaactcgttgtcttttcgcttgaaatttttgatcttgtcctgaagactagctgctgctaaaacaatgctagcctaaagatacaggagntctgacaaaatgcttncatgttaaggggaaatgctgtttactacncagcnatgcactgtgatgtcatagncttgttnagttataatagttgcttgttttcttaattgatttgttaataatccttacacaggtaggaga

SEQ ID NO: 461832 - DNA, 411 bp, Homo Sapiens
aaaggtatttaccaagacaaccgtgagtaaagaaaggcaaatttattacagaaactatgaaaatacattgcaagaatgcaacatgcagcacagcagagaaggggctgtctgcaaagataaagggctggagggaagttttctaaggttgtgctggacggcgctatgtgcaggtgagcttgtgctatatgctaagaatatgttggaataattttaactgccagacctttcctcttctggtgcccgagggaaacgccctgctgcttttagctgtcttgtaacccacacgccttttcacttctgaagttgcaagaataacggctgtggttttttcacacaaaagggttgcagactggggttagggtccctgtttccgccaacctgggctgttttcccagttttcagtttaactta

SEQ ID NO: 461833 - DNA, 478 bp, Homo Sapiens
  misc_feature (466)..(466): n is a, c, g, or t
gtgtctagaaccattttaatataattatacatatctgccaaatccaggaagaaaaggtttatgcatatataacttttccatttaacatctgcaagcataaacgacaatgatctcagtttaataattcatcagggtcagagcaattgaccaatgtctctttactgctaggcttaccaacagtaaattacagatgaattagtgtccttttgcttctcttctctgactctctttgtccagagacattttgtcgtaaagtttcagtgcagctcacctccagccaaaggtaatctttttagatcaggtactcagttgactctgtaattttgcttataattataacctatttaatcacaggaaggaacccctggcaggagggtgggagtttcaaggttggcattaccaataacagggggttcacagtttttgaagtctaggcacaggtttaaaaaccacaggtgtacctttntaagggcacact

SEQ ID NO: 461834 - DNA, 461 bp, Homo Sapiens
  misc_feature (90)..(90): n is a, c, g, or t
  misc_feature (337)..(337): n is a, c, g, or t
  misc_feature (354)..(354): n is a, c, g, or t
ggcattcatcctgaaaactaagaaaaaaaggatattaacatagttaacataacaataacatggtcttgattaatatgctcaggaaatgcnagacactgatagaagcataaaaatacaaccctaattctatcctgcagcaaaaaagtttgctttttctttagcagtttgatcaaaaaaaagaaagaattttatttagatgaatgcctgattataaactatccattaagactatttcaaaggtttccccttctacccaacaataacaaatatgctccaaaatattcccttactaagccagacttctccatgtaagagtctctccttattttcctattgnaaaacccgaggcacagntcttaggagacacccccagtgattcagaagcagacagcaactgcagccctaaatcctaggtccagctttttcttatagaatactttccagagtttacgtagttttca

SEQ ID NO: 461835 - DNA, 610 bp, Homo Sapiens
  misc_feature (111)..(111): n is a, c, g, or t
  misc_feature (384)..(384): n is a, c, g, or t
  misc_feature (582)..(582): n is a, c, g, or t
aaacctgaaatcaaggcctcaggaataccttataccaagtcttggaatgtgggttttccgtataagcagctctcttcttttacaaacagctttgctgtttttgaggtcagnacaggagccctctttctcaatgacgattaaaataaaacttcagggcaaagtttttgaatcttagcaacacatggaaacatatgtcctgttgccaaaaaaattttaattgcctaatccaaaccagaatatttagatcaacctgtatactatatattatctctgatatactatatctctagtcctcagcattattcttcataaaaccaaatacccacttatttgctgagtggccagatctaagagggaggcttttctgcctttacaggggatggnccttttggaataattgaggcagacgaaggcattgggaatatggaaatatttgtaaatcactgggtcaggctctagttcaacctcttgggtgcttttgtttcctctgggtcccaggatgtggtctccggggcttctgggaaaggggaggagggccagttaggtagggttccaggaaaaggggaggcaacccaaccaggnaaacacctaaggtttttgaggtttgtgg

SEQ ID NO: 461836 - DNA, 382 bp, Homo Sapiens
  misc_feature (285)..(285): n is a, c, g, or t
  misc_feature (339)..(339): n is a, c, g, or t
ttctttgtgtatttctagcagaaaacagatgcttaagcctaagaaggaagatccgtccatgacaaaggaaagtggaaaactgaaccagttatctgaatacttcatgccaggacagttgctattagcaactgttttgcaccttcagggctttaaaatgggctctgcagacagcatttgcatatgcaagactcagtagccaagcctccactgccaattgttgaaggcagtttcagatcgccaccttttgagggtacatttctttaaggcacaagaggaagtaggaangggcctttgccttgttctccagtgggtttgtccctctgggtgcctcaggcaggntacccagagcttatttcttatggaccatttggggagtaggttc

SEQ ID NO: 461837 - DNA, 450 bp, Homo Sapiens
  misc_feature (30)..(30): n is a, c, g, or t
  misc_feature (53)..(53): n is a, c, g, or t
  misc_feature (60)..(60): n is a, c, g, or t
tgggaatccagggggaaaaacagcccttgnagagctgagagcccacaaacagnagtttgnaccccacatgtttaattgacagcaagccagtgataagcattgtttctataggttacagattcagctaaaagcattccttacgaaaaacaaagcatacttagagaggagtagagaaacagtctctggccgattatctgcagcaaaaacatgttgttaaggctcaggccactcatgctgttgtttgtggtttgagcagttttccgctccaggtgggccaggtgttccctaccctgctccagtaaactaacaacttctagcagtgggcgtcatagccatcaggagcacgtcacattcgtgcagaaatcctgttcatggtcagtttaaggcctgtttatgacaggcttagggcctgttcccagcatgtccccttttctgtttttgcaaagcgat

SEQ ID NO: 461838 - DNA, 308 bp, Homo Sapiens
tgggcgaaggcccgcctgagcaggttaagtcccaggcggcaatggtgagccaagcgtggaacagcccaaactaaagtcggggtctctgtgcggcggcacgggccacttcggcacttcagtgtttaaacttctgcatgcagtgtaaagacagacagctggccacagtgctgccctgcagtaaagaccagccaccgtgaccggctctcccctgcctccctcctcccagcccacagtcagacggagcctctgtggcaagctcaggcccagtccagggccctcagagtgtagatacaggtggaggcctttcc

SEQ ID NO: 461839 - DNA, 468 bp, Homo Sapiens
attttactaaaatagtttattgcaataagattttcactgtattcaaaatcaatacaaagtaagtttttaaaattatgtacaaatgattaaaactatgtaattaggtgagtaaacagcatcaacacaattttagcctctaaaccaatatgtaactttctaaggctttttaataaaaccttaaaaaatatagtgaagaaatagcaaagaacatagttcatcatagttgttggaattcactatttccataagaataaaaaagtcctccatcaaggtatatttgagacaaataatttattattttgaaaggtagctggagaaaagtctggattcacttctgtttacagcagtctaggggaacattataattaaataggcatatttttccaaacttcacacatcctagacctatgtctccaacagatttttcctcagtattaatatggtaaagtacactgaattttggatttt

SEQ ID NO: 461840 - DNA, 704 bp, Homo Sapiens
  misc_feature (319)..(319): n is a, c, g, or t
atgtagagtttaatgtcttaattattatttttcatatgaattgggttttttttactttgttttgaaggaaagttacccaatctctatgaagggagactggcaggcaggttgaggggattcacaaacaaatactaaagataactaaaatgtattttattgcaatgcccccttcactaaagcttcattttttgcctatttaaggaaataattcaaaaatgaaaactaaaaagaaggggaaaagtacaccaaaggaaagacttaccacagggttgaggattgtgcagttttaggaaactaggtgaaaatgggtatcttttcnatcttcattgcattgctcccaaaactttactagacttttaactagagtttaaaatgctttatgtatttatgaaattactcagtatctttttaggtaattttataaaattactcaatatctttttctgttgaaagtcaaaggtctgttttaggccatatataaattcatgtttgcttaggcggcatctgtctttgaaaactgtgatataaattatttctgttttagagatcaaaaggcaaataacagatttgatataaacccaattgcttaaaatatcttttcattctttggtataaaacaaacctgctaccagcactaacattgtatttgatttaaagtatatctctgtagtcttaaaaatgcaaataaatatggcttaaatttg

SEQ ID NO: 461841 - DNA, 523 bp, Homo Sapiens
  misc_feature (311)..(384): n is a, c, g, or t
  misc_feature (437)..(437): n is a, c, g, or t
  misc_feature (501)..(501): n is a, c, g, or t
aaagccagatagtattcaatttatgtcaagaacaaagaaattgcccttttaaaagcatgtacgtgaatgctttttgaggcacagaagtatgctaagctttaacattttgtatttatttacaacccttttctaagggaaggttacttctcagtgcagatggagaaactgaagcactaaggataaatggattagttttcaatcacatcatttttttccacagacttgctgggactggctttcaggtattgacagccagccccatatattaaggtaaccaggttgaatcttccaatttgagaacccatgtatgnnnnnnnnnnnnnnnnnnnnnnnnnnnnnnnnnnnnnnnnnnnnnnnnnnnnnnnnnnnnnnnnnnnnnnnnnnagaaggatataataaagttaatatataaaccatgtatgtggttaggaataaanttcaaatttcaccagtctccaatgggtgattactttttactacataggaaaaaaccatttttangtgactttaccagagggttttt

SEQ ID NO: 461842 - DNA, 369 bp, Homo Sapiens
attcctttcttccaaggatcctggttttctgccgtacttaataatatacatgaaaaccaagtttgaagataacctgtaagcctgataccatttaaaatatttctttttgtgaacatgctggataaacttttgtaatgttgtttgaaatttagcatatgtaaattacatcagttaacctgattgaaagcaaaagtataaatgaaaaaactaaactgatgtaatcacttattaaaaggacataggatagccaaataactttgtaacaaaagaacaaagttgggagacttgtttcttcactttaagacttactataaagttacagtaatgaagacaatttgctattggaattagaataagcatataggtcag

SEQ ID NO: 461843 - DNA, 443 bp, Homo Sapiens
  misc_feature (62)..(107): n is a, c, g, or t
  misc_feature (192)..(206): n is a, c, g, or t
  misc_feature (212)..(279): n is a, c, g, or t
gaaacattcaattgttttaaaaatgttctatttatttttcagaaatgaggtgttgccttctnnnnnnnnnnnnnnnnnnnnnnnnnnnnnnnnnnnnnnnnnnnnnntgaattcttgggctcaagtgatcttcctgccccaagcctcccaagtagctgggaccacaggcacgtgccaccatgcctggctgannnnnnnnnnnnnnnaatgtnnnnnnnnnnnnnnnnnnnnnnnnnnnnnnnnnnnnnnnnnnnnnnnnnnnnnnnnnnnnnnnnnnnncatagatttgtctgtgttttctctaaataggttataaataccttgagggaggaatcacaaataactaaaagaaacttttgtagggactatcagagtattatttccttgtggacacagtaaatgtatgatgatgagaaatcataataaactacaacattttctcc

SEQ ID NO: 461844 - DNA, 750 bp, Homo Sapiens
tttttggttttttaaatgagatccaacattttaattggtttcactctgtgggtggacagagaagggggacccagaggccagtgtgtggggaagaggaggacagataaggtgacaccttctcagggaggctcctggcttcttccttctgtccccacctgccttgtcactcttcctggctttaggacgtagaacgtttgaaatcccctgtgcacagctggaagaaccaacactcaggagcccagcccaggaaaagcaatctgtaacctcctagctggatttggctccctgccctctccggctcctggtggagtctcagaagaccccaggatcaggctctctcgaagtcttaccccatcggcctgtgatgggggccccttggccttcactacttctcactccttcccagaaccttgcatgcatccttcagtccctccccaactcccatcaagtttctatgacttgtttgcacaagacacagcctccccggtgaataaggagaagattctcttccacgcctgagtcccggcctccagtgcagagcttccgtgtctccgaagaatgaaacttatagtggattctggtcccaacgtttgcacagacccagggcacaatattgtctcatccctgcccctcccgtgtgaattttgtctagctcccccagcctccccagtgacatatgttgtcttcctctgtttatattttcatcccacactggactcttgagccactcctgggttatttttgttgttg

SEQ ID NO: 461845 - DNA, 254 bp, Homo Sapiens
  misc_feature (31)..(31): n is a, c, g, or t
catcatcctcaaataaaatttttgatgtccnaggactataaagctttcagggcttccacaaacaattttgttttagtgtcataattctatagaacactgttcagtaaaaggttttgctttacatttttttcctcaaacatgtacatacaaaattatatccgatggttcaagagaaatcacttggtaagtgctttgcaggaagcatgcaaacgtttggtaaaggaagtaggaatgtgcattctagctagtcccag

SEQ ID NO: 461846 - DNA, 242 bp, Homo Sapiens
atgtatgcagatttatggatattatcaatgagaagacatagcatgtaacttctcctatatctctactgtccagcatgtattgttccaaatatgactccctaaaatatatacactttgcagaagctctaggccctcacctcaaaccttgccattggttgccgtatttcaaggtcaatatagtttccctcactttacacaatcattattcttcaatagtggaccatatccttcaccaggtatcc

SEQ ID NO: 461847 - DNA, 332 bp, Homo Sapiens
aggtcaattgaattcaatatttattgatgcccagctacccatcttctcacaatcttggaaggggtatgttggacaataggcaaggaacataccctttgccttttagcaaaaggaaccgatgacaaaagttagaactgcgtggccttttctgggtctgaaattctccaagagggagagtgtttggctctatgtttgtgcccctgcagaatctagtacagtgctatgtgccatgcaccacttaaattcttactgctagtgaatgagggccccctaggactcagatcctcatagctccagctccgtttgcccagattaatgttttccagacccaa

SEQ ID NO: 461848 - DNA, 217 bp, Homo Sapiens
cactgagaatgcagctttctttcatttggtcacttcacctcttcatcgaccccagagagggagtggggaccctgcatgctgccccctccccgcccccggggtcttctggcaggactggggaagggagcctctcagggggtggcggtccacgcccagtagcacctgggagctgtgggggccgaggcagtccgaaggtgtggggtagctctgagctcat

SEQ ID NO: 461849 - DNA, 378 bp, Homo Sapiens
  misc_feature (43)..(43): n is a, c, g, or t
ccaagaatgaaagattggttcaacactgaaaatcagtataatnaaaaacaaaaactatgtgactatttcaatagatgcagcaaaaggcatttagcaaaaccaacgtctattcatggcaaaaactctcaacaatctaggaataaaagggaatttcctcaacttgataatgggcattttttaaaaaccctagctaacatcctacagaatggtgaaagactgagtgtttttcccctataataggaaacaagcaagggtgtctgctttcaacacttctgttcaaagttgcactggatgttctagccggttctgttccacgttgcactggatgttctagccggttctgatccacgttgcactggatgttctagccggttctga

SEQ ID NO: 461850 - DNA, 424 bp, Homo Sapiens
  misc_feature (404)..(404): n is a, c, g, or t
gcagagaaacagatatttttatttttaaattatcaagtgcattcacaagacagaaaaaaacaagcttgtacaagagtgactcaagctggctgggcccagctgtacctgacacacagacttatacatccagaacaatgaaaactcagtgccatcagaacagacttttgggcggatggctgtaggcttcaccagttatcagtgccactcaacactttcaaaaatgccttttttttaaagttctacacagcgggacatgtttaccaatttttatgcctctacatgtgcagggataagagccaaatatatttttattaggaagatatttcacactggggtatacatctggggcaaaatttacacctcaatgcccaacattgtttttctcacttcttattttaatgggnttgactgtctaatttgggta

SEQ ID NO: 461851 - DNA, 332 bp, Homo Sapiens
caggcagaatttcaaagttttatggcaacttttacagaaatcacagaaaagagacagcgactgatgatgagctgggggagagaagggtagcgggtaacgggtctgggatgttggggctgagcacaacaggacgatagaatgctgaaaacctgtgggaagcagaaagttatgggggtagttgggtcatcctaggggcccaaggagtgggtggacactgcccaaatgtgtcctttgggcaggaaacatcaacagtaaggacaatgcagatggcctaccgacagatgggaaggcctccaaagtttaaaatgcccacccagatcccttggcccagt

SEQ ID NO: 461852 - DNA, 453 bp, Homo Sapiens
  misc_feature (25)..(25): n is a, c, g, or t
  misc_feature (74)..(74): n is a, c, g, or t
gcctgccttgtgggttgccttctgnccctggtccacaaggattaatgaaactaatgaatgcaaagaaccccaanccaaggcacttcccagcctttgtggctcaggggaaattcaaaaagccaaaagcttggcaatcccttccttggattatttttaaattccagtcctcccgaaggcaagaagaatgaccttgataattcttccacgtgggtccccgagacctccacatgggaggagagccggccgtagcagatgccaccatggatacctgctggttctgtggtccagcttctcttgtccattgggggaatggccctccccaatcctgctgcggcttctgcagggaatgtcaagtcacgggaccctagttccttgccagtgtggcccacaggaataagcatgtgactcgagctgggccaatcagagcattccatgagatttgagatggaaaag

SEQ ID NO: 461853 - DNA, 422 bp, Homo Sapiens
  misc_feature (181)..(181): n is a, c, g, or t
  misc_feature (380)..(380): n is a, c, g, or t
aatagatacataaccatccaatttattttctgaatattttccatctgctgttgccgaatctatagatgcagagtcctggatacgagagccaagtgtgctttgagagtagggtaggtgaggttgctaatgagtacaggggagcaggtgttgatcaggagggccctgcactggggcatctggnacgtcctgcctcaggacttgagactccagttggatggccacagacagactcagccccaggtcaaagccgtccccttgaagtttcattttatcccaagctctttctggaccctggaatttggcatcccctaggccctgcttggggatgaggttttggggagggggaacaaagatgtgccagcagcccttcctgatgcaanattttccttccttgtagtccccgtcttttctgcattggtgca

SEQ ID NO: 461854 - DNA, 502 bp, Homo Sapiens
  misc_feature (21)..(21): n is a, c, g, or t
  misc_feature (32)..(32): n is a, c, g, or t
  misc_feature (49)..(49): n is a, c, g, or t
  misc_feature (57)..(57): n is a, c, g, or t
  misc_feature (63)..(63): n is a, c, g, or t
gaaagtcaatccataaaaaangggaaactttnacttttggtgaactatnaccttccnattctnacccacctttaaaaaagaggtttgtcaattagtcaaaaaccagttccagccagatttaactggcccatcaccctcccacacactgctgtatttcaagtgaattgtgatcccctaatattcaggacacagctttagaccagaaggccaaccaaagcacgaactgcaacttccaataatacagaccagctgggtagcagtctcttaagaataaacttccagacgccaacatctgagatacagcacagtaaatgtaacccatggaaacagcaggcagatgtggcccccacatgatgcctactcagaccaagaggaggctgtgtgtgctgaggtcctggggccttctgcacgatgaccaacctatctcaagtggaacggtcaagacggtcagcctggccccgtgagcttcacctcaatcagtcatgccacccagtaacacaga

SEQ ID NO: 461855 - DNA, 715 bp, Homo Sapiens
gatcaaacccaacaccaggccatgggggctacaaagtccggcagagtcgaaaggaatgagacaagctaatagtacacaaagtgggtccagggggccaatgctagtatagaggctgtgaaggccctgaactctgggagcccacaccatttattggagattaaacaaagaagcaggtggtgaggacgtgctggtcaaaaggaagcagtcacatcaagtgtttagtttatagctgtgtcggtctagcattttctttgaagcatatggaacatgttctgctactcgagataatgaacatttccttctacctcaaggtacaatcagtttatgatcctgggagagcaagaagcaaggagccagcaagtctggacacattccagaggccacgaggggttttatgtcctgagtcctggattccatccaagccatgaggggttttatgccctaggcttaggttgtagtgcggcggggcagccttccacccttaagcacagaacctggtgttccataggccacaagaagttttaaactctggacccaggacatgttccaaggctcttttcatattatgtcagactagcaagtcttgcctcagcttttctcccaacaattggactgatgggttgctccactgggcacaagcatcatgggttcttaaaacaaggccctgaacaagcaccaaatatgttcctgtcaccacctgcttctttgttaatct

SEQ ID NO: 461856 - DNA, 638 bp, Homo Sapiens
  misc_feature (513)..(513): n is a, c, g, or t
  misc_feature (530)..(530): n is a, c, g, or t
  misc_feature (549)..(549): n is a, c, g, or t
  misc_feature (627)..(627): n is a, c, g, or t
gactgcctcatcttctgcccaaaagagggagtagcgtggtgaatgggaaggaaccctgggtttggggttccagtgctgactctgccacatagagtcatctgcttctctctcttggccatctgtgaagtgagggtttgggtcagtggaaggctgcttcttcaagccaatgtttcttccagaagttgccgtggggattgaggagaaaatgaacagagctctaggatgcttgtctggatttatttattacttttttaataagactcacctaaaaccaccaccacctcctcctccaaatactgggagggtagggttttcatgaatggagattcctgtgttcatgccacaggacatcttagctcctctcacttctttcctgggaatgtagggacctgcctgctccccatctctgtccccttagttaccatttccctctctgtggtcctcacaggtcctgggatggaaggaagcccaccggggggtaagctggaggtgaaggtgaggctgcgggacctnctgagtggccagggatntgcagatgggtcactgagnaactgggctggttctggagcccaggggtttgttgaggtgggcagctttctggggccttcagaaccttttgccccttcntttaattcaat

SEQ ID NO: 461857 - DNA, 348 bp, Homo Sapiens
caataggcaaattataatattttactgaaataattaagtccatcctcaaatgtttctttttaatcatctaaccacaactttcgggtcaactgaaaaaaaggtcattttaaacccccttctgttgtctatggatttaaattgtgaggaaaaatctttaaaacttaattttggactaattaaaatgaaagcaagaaagaaaaatcagcttgcagtcagatatgaaatgaaggccaacaaagttcttaaaaccaatcaagagttacatcaggtagaactcagagactggaaactccagttttcttctttcctcattcctgttggtaattccagaagtccacagcctgcttc

SEQ ID NO: 461858 - DNA, 505 bp, Homo Sapiens
gtgattttgacatttattaaaaagtatttgtcatcagtaaccattttggatacttgcaaatattacagtaaaactctgccttaattcacagggcaggagtagaaaatcaattatgtaaaatacagtgttccatttttgcaacattaaccagaaacattgtttatcagtttgtactgatatttaaagtgcacacatgggtacatatacacacacacaaagctaaacttcagcagatggtataatgtatagagaccaaacgttaagaaatgcagcacatctctgctcaagatggaacaaagggtgggaactaaccccaatagggttacaatcaaattaatgttatttcagatcatcataatgcttattgttctacatttcaaatatttacttgaaatgattttattaagattacttgcaggatttctcctccaaatacattttaagttttaaaaaatgtgcttaaaaatttcaaaccttttacctttacatacttttagttatttag

SEQ ID NO: 461859 - DNA, 446 bp, Homo Sapiens
tttttttgctttagatgcttctggtcccatcactgggacctaaaagaagctcacatgtggtctctggaaatgctgaagctgtggactgtagacattattttcagtccttgtcctggtggctgcataccagatgctgctccttccctgtgtgtggccagctgtacacagtgacatgctcccaaggccgcggcacaggcggtgatgggaactcctccccgggccagcctctcaggctgcagccccacggcaccctgaggccctcatctctgctcggcagctaaaacatctccttcttcgatgctctgcaactgcagcctctggctcacaagagttctgctgcctcggcggcccccgaagccgccccccgggacagtccgtgctgtaaccaagacccctggcaaagcctcctccccaaataagttgattttggcttcggcctcaatggc

SEQ ID NO: 461860 - DNA, 236 bp, Homo Sapiens
  misc_feature (215)..(215): n is a, c, g, or t
atgagccactgtgccaggccaacattgtttttaatatatgacttgtaaggcaagttggggggcattaattccttatttaagatgtactgagttggaattaaaagcccctccaaccatcaaccccccaaaatatatgtccaagtaattaaggttccaggatttgtggaatgcaaactaatttgggataaagagtattttgcaagtaatttaagggnaaggttttttgaggttaggat

SEQ ID NO: 461861 - DNA, 456 bp, Homo Sapiens
ttctataagcacttgttgcattaacgatatgatttctatactgtccctctttgcgtgatgaattatattgttttccttgtgtctagttatgcagtacaagaacaaaactctgcttgttcataggaaaattattttaatgtgatctttttttctatttactagagtttttatttagttattatagccatactcataaaaaatcattgtgcatatcttgtctgtttttggaaaataagactatatttgccttatgaggtagattgaaaagcataacattcttacctatttttggaaagttccaaaacattctccaacaaactcattggctataggcatctttgaaaacagtaatcctaataacatttcactctgttgttgtaagttgtccattcaggtttgctatttcccgatacctctcttttatcctcttgtggtcttgaatttttatgtgggaag

SEQ ID NO: 461862 - DNA, 484 bp, Homo Sapiens
ttaggtgtgagccactgtgcctggtcaaaagatctcatttttaaaaacaggtagaggttttgcagtttcaaaaagcttgacctaccccaattccccatgtttcagatgggagactcaggcccagagggatcaactgcattgttggtgtcctcgtatctgctgggagtgaggagaataaatatctggttttgctgatttcgtgatgtcagagtggagagacaggtgaggcagaaccttgcagctcaggatttcagaaaatactctgagtcttgtttggccagaccatttatagcttctgacaccagagttgctgtgggtctgttgaatgttaattaactaccaaagacctttaggggctagttgaaaaaccttccaccttagataaaaatctcttctctctcaatccacttctttgggcttccacaaaacaaacacaacttgtaggaaaactgactttgctgggaccccaaggactatggattat

SEQ ID NO: 461863 - DNA, 427 bp, Homo Sapiens
  misc_feature (315)..(315): n is a, c, g, or t
ggggcttatgttgatttaattttcacaaagatcagattggatgccctctgatgtggggctgtggagacaacctgacagatctgggatggaggcaggtatagcagcattgggttttggtatcaccatcacctgtaataccaactaatctccaaataaaacccaaactctgtaccttaatctggattgttgtgctctgcaaacgaacggggacgagggccgtttgccatgggaaatttatctccatcacctaatccctaaataggggccagggttccacacaggatacctcttgggtggggagggtattacccgggngttcagctgggggattaggaggggatagtttaatttgaaggggtttagggacttctggacttgacaagaccctgggggggagatgaggagcctctgttttaggcacccccca

SEQ ID NO: 461864 - DNA, 363 bp, Homo Sapiens
  misc_feature (236)..(248): n is a, c, g, or t
  misc_feature (263)..(263): n is a, c, g, or t
  misc_feature (269)..(278): n is a, c, g, or t
ctaataaactgtttctttttttgccacaatttctttcctacttcctttctacttctcaatctaccttttctcttaaaaacttttaaactttttaatcacaatgaacttctatgacaaaatgatgtggaggtagacagagattggcgattatttctgtatatgttgtttttaaacccatagttttgtattcttgtttctcacagtacatgacctatatagcataagaagttttattnnnnnnnnnnnnnatcccattcctgttntaaagnnnnnnnnnngcacagagagattgaatccaaactactcatggagtccaaatttttccagatcccttttccagattttaggacctagaaatccttt

SEQ ID NO: 461865 - DNA, 381 bp, Homo Sapiens
gaacaacatagactttatcattccaaatgagcaatggcccttcaaagcagtccccttgttaggatctgccttcaaagagccttcagagccagccaagaagctgtagcagagagacagcagtctcatcacttacaattcagactgtgagttctgatcccaaactgctttacatggtatattcaccccatggtttggtaatgaaatgacttttggctgtatccaaacattaaatccattctctgagatggagatgtgctatttcagagaaagtgatattcaaaataacaagctactttcaaattagggaagaggagaacagattaaaggttcttgctcttgcttctcctttaacaaatgaattagggacagctacccaaactg

SEQ ID NO: 461866 - DNA, 379 bp, Homo Sapiens
aatatttggtttcatcacacctcattaaataaaacctgtgctgaaaggagaacaggaagtgtttctaaaatcacatgcagttctgaaaacaaaatatgggtgaggagtctctagacatgatctccagagccaacttccctccagcaggctcaggccagagagtggctgccccaaaggcacagctggctctatttatgcttgctgtgaattgtctcttggtacagtaggtgcatgccgactcccctgacattctccactgcctccctgtgagcaggtgtgtttgttggagatcaggactattacctaagcactcaccatagagttaagtaacacaacatttcccacaagcagtcctgtgatagtcagtggagtatgggca

SEQ ID NO: 461867 - DNA, 639 bp, Homo Sapiens
ggctacttctacacgggtgccgagatcctgggcctcatcgacgagaagcaccgcgagctgcccgaggacgtggggctggacgccagcacggccgagtccttccaccgggtgcacacagccttcgagcgggagccacctgctgggtgtccaggtgcagcagttccaggacgtggccacccgtctgcagacagcatatgctggggagaaggcagaggccatccagaacaaggagcaggaggtgtctgccgcgtggcaggcgctgctcgatgcctgtgccgggcgccggacccagctagtggacacggcggataaattccgcttcttcagcatggcccgtgacctcctctcctggatggagagcatcatccggcagatcgagacccaggagaggcccagggatgtctcctctgtggaactgctcatgaagtatcaccagggcatcaatgcagagattgaaacccggagcaagaacttcagtgcctgcctggagcttggcgagtccctgctgcagcggcagcaccaggcctcagaggagatccgcgagaaactgcagcaggtgatgtccaggaggaaagagatgaatgagaagtgggaagcccgctgggagcggctccgcatgttgctggaggtgtgccagtt

SEQ ID NO: 461868 - DNA, 1006 bp, Homo Sapiens
  misc_feature (221)..(221): n is a, c, g, or t
  misc_feature (242)..(242): n is a, c, g, or t
  misc_feature (255)..(255): n is a, c, g, or t
  misc_feature (280)..(280): n is a, c, g, or t
  misc_feature (297)..(297): n is a, c, g, or t
  misc_feature (911)..(921): n is a, c, g, or t
  misc_feature (990)..(990): n is a, c, g, or t
caacgcgctgctggtgctcctggccttggggcctgggcgtctcgctggctgcgtaggaaactgcgggctaggcggaagggcggggcccggtccacgttcggcacatgtactccacccgacggcccctgcgctccatgggcaccggcgtgtccgccaacttctcgggattccagtcgcaccggccacgcaccaccgtgtgcgcgctcagtgaggcggacctnatcgaattcccctgcgaccgnttcatggacagtncgggcggcggcgcgggcggcactgnaggacgggaggaccgtntcctggcagcgatttgccgactaggtccagggcatatagagaccatcttattggccctaaggagccgcctctccgtgagcccaccagcccacctcaggggaagtgccgttttgtgcacttgccagagaggccggtggggacagagggccaattcgggcaccatcccccaattcccaatactcgagaagtaaatggatggtacttggtggtcagagccagagtaggggacaaatggatggtgggatgctgaggtcggaggcttcgcttggaggctttgacacagctatgcgaatggcttttgtagcactgcaatgcagaagccaggctttgggggtagaaagggggtgcttgtgcccccaacatggccagaaatatttgggtgcatgctttttgtttgctcagtgtcaaacagagaagttttgtttctatttaaggaaggaacttattaccattacaaaggaggcttggccagggactccactggtttggtgatctctgccaagaagggggatgtaaacaggtggtaaagtttaacatacccgccaaggaactcgtttatgttgggctgatagagcatttcagggataccttaaagttttaataaggagacgcannnnnnnnnnncaaaaatgttgaaaagctcttgacattttaacggaacttgacccattaggacttcaagggaccgttttnagtttggactggggcc

SEQ ID NO: 461869 - DNA, 187 bp, Homo Sapiens
cccggcatgagccactgcgcctggccgacaaaggctttgatatcaaaatgacctgtcaagggaggtgctggagagggattaacctgtgctgcctgggaccctcagggtcttaggttggggagtgtgaataggagtttgcagatggagaataggaagggcattccaggcagagggaaacctgtgcaga

SEQ ID NO: 461870 - DNA, 496 bp, Homo Sapiens
tggtgccacacacacatttttgaacagccagatctcaggagaactcactcactgtcgtgaggacagcacccagggtatggtgccagaccattcatgagatatccaccccatgacccaaccacctcccaccaggccccacctccgacactggggattacgactcaacatgagatctggcggggacaaatgtccaaaccatcccagtctccctcacgttctcccagcggacattggcgagccgctgcccagcgtcaggtgctgggcactgagatggtgaggacccctgcccagccctcaggagctctctgactgtgtaaagagctgagtcatgatcaatcaaaggtactccgctgggagggttgcgttagggcccagaaaagggagttgcttgctcgccttagggtggagttggtaaggggaggtttcccagagttaagttgaagccaggttctgagggatgagtaggagtttgacaggcagaagaagcaactcgagc

SEQ ID NO: 461871 - DNA, 679 bp, Homo Sapiens
  misc_feature (132)..(132): n is a, c, g, or t
  misc_feature (145)..(145): n is a, c, g, or t
  misc_feature (158)..(158): n is a, c, g, or t
ttcattcatagtttctgtaataagtttaagattctgctgccggatattttcaaactcttgctgttttttccgcatatgttcttcagttactgcacagcgatcacataagcctgctcttaaccgatcttctanaactttaatggtntcatgaaggactntctgctgttccctcagctgttgatttttggtgaagaattcttctagtctttgtgcatctaagattcgttcctgttttagcttggttacttttacttgtaaaccttgtacttctctatcatgacattcttttagttttgtccaaaggtccttaaagtcactagatgtatctgcagagttagggcttccacagctgcttcccgagatgttcatcttgcttaatatgctccacacttctacttgcttaatattttctgaccttttctgttacattatagaggtatcaagtcgtctttggacaggtcaaataccgcctccgagattgcctcgggattcgcgaaagcccccgaagggaagcgagcactttctgaggctgtgaaaggacggctgctcgcttttctctttcgcccttttccctcaccagagtgccaaatcctcggtgggaaagccgacccctccggacagcccgcgctttaaggccgggggctgccggccgggctcggaggcggccggacccgccggg

SEQ ID NO: 461872 - DNA, 935 bp, Homo Sapiens
  misc_feature (826)..(826): n is a, c, g, or t
  misc_feature (862)..(862): n is a, c, g, or t
  misc_feature (898)..(898): n is a, c, g, or t
  misc_feature (914)..(914): n is a, c, g, or t
  misc_feature (919)..(919): n is a, c, g, or t
ttgacttccaccagctgagtacaaacaagtgtaaagaaaaactatgataaagtatggaggtcttgagaattgttcataatgaaatctttaatctgggttatcagagtaatgaaatcaccaataaaaacattccatttatcttggatcttctgtggttagcagaggagtatggtctagctatgttagcagcttgaaggcacaacgtaaaaggaatgagctttcacaaggtgcttacgttagctgggtagtattggtcaaaggtactctgaagagtgaatgcagaaatcagttggctgtgtttgtaatcttgtcccacatggaccctaacctttagtagacttcagtcttttagtccagtagaagacaatggccctgaatatgtgttttctgctttttggtggaaggtttcctgcaggtggttgggtggtttttgggttattggctactgttcgttcagtgccatttgaagacctgttgtttcttaatcctttttcttggtgtgactggccaggaaaaagtccattgagtcctttttttctccctggtgtcttaccccttctgtagaataatccatattttaaaatttgtttcacatctttatagcaaacctgccacagacttgcaagcagtgattttatctttccttcctgaggaagggtgatctcacttttgatgtttggggtcacctgtgggacacctgtggttcttttgagtctcaagggcttatagcttttcacattgggcttgggggaacaacagacttgtgtgtgggttctaggagttgaaatggggcagtgtttctgctgggtcccccagtcctttgagnaggtcttaggggcaacatcctaggtatagtggggantttccgagggtcaaatttaaccatttaatataatcnccctttaggttccatngaacngagggttccaaaccgt

SEQ ID NO: 461873 - DNA, 212 bp, Homo Sapiens
tgagccaccgtgcccggcccgggaccttttttcttaaagaagaaattatactgtatgtgtgtatgtgtgtagagagtgtggtgaggcttaaagacaatgggcttcaaagtctgccagaagggccccagtcaagttattcagcctcagtttgctcacctgtaattgggaataattatgtgtgatggtgttatgtaaacacctggcacagtgcc

SEQ ID NO: 461874 - DNA, 766 bp, Homo Sapiens
  misc_feature (681)..(681): n is a, c, g, or t
tgacctccagccatattcttttgtagacaacgttggctttaacaggctgcttgaatacttgaaacctcagtactccctccccgccccttcctacttctccaggacagctatcccaggtatgtatgataatgtgaagcagataattatgtcccaccttaaggaagctgagagtggtgtgatccacttcacgtctggaatatggatgagtaaccagacccgtgagtacctgaccctcacgggccactgggtttccttcgagtcgccagcccggccgcgctgtgacgaccaccactgctcggcgctgttggacgtgtcgcaggtggactgcgactacagtggcaacagcattcagaagcagctggagtgctggtgggaagcgtgggtgacctccaccggccttcaggtgggcatcaccgtcaccgacaacgccagcatcgggaagacgctgaacgagggggagcactcgagcgtgcagtgcttcagccatacggtgaacctgatcgtcagcgaggccattaagagccagcggatggtgcagaacctgctgagcctcgcccggaagatctgcgagcgggtgcaccggtcgcgcaaggcgaatgagatactggccgagctgcagagggagtacgcgctgcctcagcatcaccctcatccagacgtaccgttcaagtggagcacttncttccacatgctcgagcggctcattgagcagaaaagggcccataccgagatgtccgtcgagtgaaacttccgagagctgacatct

SEQ ID NO: 461875 - DNA, 607 bp, Homo Sapiens
cggtacatcacaggtgcattttccgaacatatgggtagtataacctgcttcttttaggagctggggcaggagtttttcatccagaggaacacagctgggctgacagggccagattatttggtgctgtacacctgtacggatctggtagcggccagtgagcagctggctccgcgacggcgtgcacagcggctgcgtgtagtagttgtccaggagcaccccgccggccgccagcgcgtccaggtgcggcgtgcggatgcgggagccgtggaagccgacgtcgttccagcctaggtcgtctgccagcaagaagaccaggtggggcggccggctggccccggcgcccgagcccggcggcgccaacaacagcagcagcagcagcgggaggacgacggggaggagcagccgccgaggtccggggcctcggggcaagctcgccgcgccgcgcggacccatccttgtccgcccgcggtcccagcgcctgtggcgccaccagccccttgtaccgctgatagaatgaggaactgggctgccggggcctgctccgccccggcgcgggacggcacccccagcgggccgtgggcttgcgaggccgggcgctcggcccccc

SEQ ID NO: 461876 - DNA, 571 bp, Homo Sapiens
gcttttttctttccaaacagggaaaagtgttccacgaagcggtagcgcctttccgcctcgcgttttcctccctgaccctggtcccggctcccgtccgggcgccagctggtggggcgagcgccgggagcccatctgcccccaggggcacggggcgcggggccggctcccgcccggcacatggctgcagccacctcgcgcgcaccccgaggcgccgtgcccagcttgcccgaggtccgtcggaggcgcccggccgccccggagccaagcagcaacttgagcggggaagcgcccgcgtccggggatcgggatgtccctcctccttctcctcttgctagtttcctactatgttggaaccttggggactcacactgagatcaagagagtggcagaggaaaaggtcactttgccctgccaccatcaactggggcttccagaaaaagacactctggatattgaatggctgctcaccgataatgaagggaaccaaaaagtggtgatcacttactccagtcgtcatgtctacaataacttgactgaggaacagaagggccgagtggcctttgcttccaat

SEQ ID NO: 461877 - DNA, 265 bp, Homo Sapiens
tttttttatagtacatttttatttctatttcaacaaatataatatcagattaattgtatctttgattatttgttgctgtaagtttattcataccagaaaaatggtcacatttaaaattctcaaaatagttttggcacaggtcacatcttctcattttgctaagtccctgagcactttgaacaggctgactttatgcatcggcctcttccccagccaccctggtcccctctttccacaatgccttgctacctgctctggcctcaag

SEQ ID NO: 461878 - DNA, 619 bp, Homo Sapiens
acgaaggaattgttggaaaattttctcggaggtagaagatgttgttagcccaaataaatcgagattctcagggaatgacagagtttcctggaggagggatggaggcgcaacatgttacgctgtgcttgacagaggcagtcaccgtggcagatggtgacaacttagaaaatatggaaggcgtaagcttgcaagcagtaacacttgcagatggttctactgcttacatacaacacaattctaaagatgcaaaactcatagatggccaggtcattcagttggaagatggttctgcggcctatgttcaacatgtacccatacctaaaagtacaggggacagtttgcgtctagaggatggtcaagcagtacagttagaagatggtaccacagcatttattcaccacacctccaaagatagttatgaccagagtgcattacaggcggttcagctggaagatggtaccacagcttatatccaccatgcagtgcaagtcccgcagtctgacaccatcttggcaattcaggctgatgggacagtggcaggtctgcacactggggatgctacaattgaccctgacaccatcagtgctttggaacgtatgcgccaaagtgtccattgatg

SEQ ID NO: 461879 - DNA, 930 bp, Homo Sapiens
  misc_feature (27)..(27): n is a, c, g, or t
  misc_feature (37)..(37): n is a, c, g, or t
  misc_feature (60)..(60): n is a, c, g, or t
  misc_feature (84)..(84): n is a, c, g, or t
  misc_feature (129)..(129): n is a, c, g, or t
cggtaacacccattggtggttaaaaantgggggaatncaaaggatagccttacggtattnaagtattccaccccagggtccagnggaaattgagagaaaacattctcccatttttttaaagggataatngaaatattaatttttcaatagttttagaaaaatcacattaaaataagcattttggttttttgaagttacaacacttaacgacaggttaaaatgtttacctgatttattttttgtggctaagatttcataactatttttttaattagcccttgaatggtttaaggctataagtgttttatgaagcatctcttgaattgaagaccaaattggaaatacacatcatgaatgaaacctctctctagtcactggcattagtttgaaagtataagctacccacatttttcactttcatcagagaggtttcaagctgccttgtacttaaagctgcttgactttgtctgctgaaggacagctccctccttgccatacagatatgaagcccaggaaaacatccagagtggcaggtagctatgcactgagaccttagggcctcactggcacgtaagaataagctgaatgtgatgaccagtgagcatattagaccagtctgtcttctaagtctcatttttatctggaacgcactttggtaagagatttcagcctatatttgagatctaaactgaactagggtccagtttctccaaagggctttctccttggtccaacttgtgttttgtcacagaggagccattaacagtcatgcttgaagctagcccttgttttaaaataaattgctgggagagaacaagacagaacagttataaggtgatgcaagatggaagtggtgatgaagcaccctagagcaagtcagcttcagaaaatgatttagaaagatcccgcgtacctcggccgcgaccacgc

SEQ ID NO: 461880 - DNA, 511 bp, Homo Sapiens
cagtaagatatgcagtatttaccactgaaataatacatttccaatacagtaaaagtcatgtgtggtgtataggatacgaacaacatacaataaataatttttttaaaaaaaaggtctcctccactcttctcatgaggaaactgctttgctgagaatgctgggttgttagacacaagctgaaaagtgacttccacaacttggcattcaatctgtatgttttctgagtcgcctcttaggaacaattctattaaagctgtaacaaagaaagattctggaggtttctacaataaccatgaacacatacttcccatctgcagggatcactgaagtgtgagcagcagttctgtgccttggtatagacagcaataccccctcctttctccttcctttccctgtgcttgcccgggactattaccaaattaaatgccatatgttaaatgggatgaaaatgtttccttgccactgtatcttttatttctataaaatgaactatgtgtcttcctgtccccag

SEQ ID NO: 461881 - DNA, 999 bp, Homo Sapiens
tgagccaccgcacccagcctagcctggttccgtttatccacagcactgaggttccttacctggctgatgcctttgtgtgcctggtcatagtctttctcccctgcagagagggttgcctgcgtgggaaccttctgtgctgtttaccctgcatctcagcgcctagctctgtgcccccacttagtatcgttgagtgaagaatgagcctgcatttgttatctgctcagccttggaacagagcccatcaaaggccttctcccttctctgaacacgggaagacaaggaaagtccctctggggccctagatacttggtggtttagtccatggaactttgacaagggaacacaaaggaactgagaaccgagaagaccttaagcagcatccctcggctaaatttctgtcaccaagcgagcaagatgtgtgtccaaggaccatgtacccaggtgacagatttaggttggttgcatatcaactgaatttcaccaccctcctcctactcagagttttacagaagccacagagtagtgacacggggagccgggcagtggagggaggattcggtcatcagaaacctggcccaggttggccctctgatactgtgaacatgtcaccattgcccatcaagggcccgtgggtgctggggcgtgacccacttcccacgctcccacaatggtgcccctccccatagggcgcacagcgcatggagtccttgcttctgcctagataataattcacaaggaagaaaacaactctggctgctgcctcggggtggctgccagacaagggtgttttattaggacacatcttccgattttatctgcgggcccaggtaattgtcatagagcagtttgtctcccctttagaagctataaacgattgtatttgatgaaaatatgcctttcatttccttggatgagatattaaagtagtgtataaatcagggctaataggtgactagccactttggtgtatttttcttcttccatatggctcaaaaaaaa

SEQ ID NO: 461882 - DNA, 347 bp, Homo Sapiens
  misc_feature (227)..(283): n is a, c, g, or t
gtacaagtctttggacctgtagagcttgatggtggctccggtctccttcacacgcagcacgatgctctgcccgcccttgccaatgatggagcccgccgcgtagctggggatcagcaccttcaggaagtattcgccttcctctcccgtgttgctgcgcttggtgcagaccacctcggggggcgtttcgaggggcctcttgcgggaatccggggcctcgggctccatgnnnnnnnnnnnnnnnnnnnnnnnnnnnnnnnnnnnnnnnnnnnnnnnnnnnnnnnnncgagctgctgtggcggcgggcgaccgtctgcttggggaggactggggtctcgcggcgcgccgag

SEQ ID NO: 461883 - DNA, 332 bp, Homo Sapiens
gcgctcgccgttgctgtaggtggcgtaaactttgccatcgtcatcaacctgcacaccattctgagtcgcggaggcgtagccgttggcggcgttggtggtgaccgaaaattcagagccgtattgcgtacaggtcgagtaatcaacggttaagtcgatgggtgcggcagcgtcggtttgaaattcaatggtctgcggcgtggttggcgaggtcagcttcccggtgttcgggtcgaaggttaacgtcgtcgccggaacgccggtctgctgctgaccgtcgaaggtgtactgcacttcccaggagttgtcgctggttttggtgaagtactggcatg

SEQ ID NO: 461884 - DNA, 542 bp, Homo Sapiens
ttttttttagagttgcaaggtaaatattttattaaaatacatattacaagaaagctaagatttacaatgaacagagttatgaagcttctcaactgtctttaaacgtttaacaacacaaagggactagctgtcctcaataaagtaacacagtaacaaaacatgtaacaaattattttaagcacagtttaaaacaccctatagctaaaacactcatactatgtaaatccacataaactctgaaagaagaggtatttttccaccaccactccaaggaacacgtaaattggcatagctatatggtagtctcatatatgaagataaacaaatagtaatgcattatttagtacataattattacacacaaaaggtaaggcacagctcaagcttatctaataaaaaatatttaaaaatgacaattcataattgcaaacaaaacactgaaagaaaaaattcggaagaatttaataaaattttgaatatttacaaattgcaaatgtgagtacttgttataaaactacttacacccatgtagaatgtgcatt

SEQ ID NO: 461885 - DNA, 476 bp, Homo Sapiens
aatttgtacaggaaagaggtttaattggctcacagtttggcatggctggggacgcctcaagaaacttacattcatggcagaaggggaagcaaatatgttcttcttcacagggcagcaggaaggagaatgagagccgactgaagggggaagccccttctaaaaccatcagatctcgtgagaacttactatcacaagaatagcatgagggaaactgcccccttgattcagttacctcccgctgggtccttcccaccacacgtggggattgtgggaactacaattcaagatgagacttggattgggacacagccaaaccatatcaccaactgtctacttctcattgtatcctcacatggcagaagagaactagctaggtctctggcccctttttgtaagggcactaatcccattgataaagggtccactctcatgacctaattaccttcccaaagttccatctccatataccatcacat

SEQ ID NO: 461886 - DNA, 436 bp, Homo Sapiens
tttttttggctttgggcttaaggactgttgctaccatgagggaagtgctcgttgcttggcctacagcaagtgatacagcctgcgaggcacagtccccaaaagtctagctgcaattctattggtggttttccccaaacagcaataacaagatgttacctggaagcacaccagagccaatcatgactcaggcctgtctagatgtttagatgtctggaaatatatttaaaatgtctcatgccttgcctcttgctgctggtgtgagaaccagcagacttcaagagcacagataaccagtatgatggcaaaatcacaaaatataaaacttatatcagtaactaatttgacttcattttaaaaaagagcctgtgaccctggctaatatctggcaccaacactgtggtttaaattcacattggtcttacaatgatttacataa

SEQ ID NO: 461887 - DNA, 1008 bp, Homo Sapiens
taaaaaataatgattaactcatggtcgtagaagttatttaaatcttcacttaagtaacataatttgtctatctaagcaccagacttatcacagatatgttcttttggtcattattttaatttaggatacctttatgtagaacatatactcttgaattcggcagagataattcaattccctttaaaataattgtaccttgaacccagttgagtttgattttcagatttaaatattctgttgcttaatgcatgaaattattagagacttgtgctcctggacaaaataatttgaacttgaatcagcccacagaagcaacagttctataattcgttgttatatccacttttggctaaatactgaagatgtctaaagcagcttgtatagtgttatatgtatatttaaaatattttgaatactcaaatgaaatatttgtctcagattttaatatatcaacacctgtgtttatggtgaggaaaatgtttgcctttagtttataatataactgattatgcttacctctttgtcttgttgactgagaagaaaaactaattggtatgtcatttctatgaatacaaacagagttttaagacattacttattgtgaaaattacaccataattgttttgatttgaatttgaatgcctttcccagtattttttgacttacaaagccttatacaccatggatatttagaaataaaactaagacaaaagccataacttggcttatgcaagtggcttattttttctttcctttatattctacatcatcaggaaactagaagggagatagaaagtggtaagtataaaagaaggcaacttctactggccagattttcgcaagttagtaggaacatgtttctgtagaaccaggttatactgaagttatctgcagagctcttccgtcttgagatgcttaaatattttattcagtgactttggtggatttgatgtggaaagaaaaatgttggcagttttaatagtttatctcacattctgcccagattgg

SEQ ID NO: 461888 - DNA, 1051 bp, Homo Sapiens
tttttttattaataaataaagaggtttatttggctcagtgttctgtaggatttacaagaatcatggtgcaacatctgcttctggtaagggcctcaggctgcttccactcatggcagatgaaagggggcagtgtatgcagacatcacatggcaagagaggaagcaagagggtgaggaaggaggtgccaggctcttttgtacaaccagctctcataggaactaacagagtgataattcaccccccaatccagagaggacattaatttattcatgagggatcttctcccatgacccacacacctcccattaggccccacctccaacattgggatcaaacttcaatatgagatttggaggggataaatatccaaactatagcagcatatcacttttgtactattataaagctgaaaattataagtcaaaccattttaagttggggattacaggcgtgagccaccgtgcctggccgtgatttttaaatttgtacatacttggtttgtaactttaacaaatatattaaagtgttttattatgtttgcaaagggactctgacttccaacatagtactgccatgattgcatgatgatagagtttcaccgaaaggctgccagggatctttctgacaactcttaatgatactaccgggatgtgcaatgacccagaaaggagttgtgctaggttaatacccagggacctctgctgatttcaaagaagaaagttcaagagaatggatagaaaaaagatgaaactggaaataaaaaataggaacataagatttgaaagccaagttttatataatcttgttttataagttgtataacatcattgcaatatcaatacctgaaaaatacttggaaaattataactttacttatgattatagatgcaattaaatggtaaaagatagaattaagtagtctattgaaagaataatcatctgaccagggtatattcataaaaagaagaaagctatcaatataaattatcactttatagatttttcaacacaatggaataaaatcacaaaggattattcttaatcttaaaaa

SEQ ID NO: 461889 - DNA, 643 bp, Homo Sapiens
ctcctaggagatgaaatatattgttttaaaaatgagttactccaataagatatgaataagcaatatataaatatataataaacataacagaccagttagatatataatagacaacagattaaatactgctgactaagcacaacttaaggggattatataattaaatgtatccaaaaaaaccattattgaattgacctgtcactttctaatacatctttgttactaaaaatttaagcaacttagtaaccatgactctgggtcatctgatatcataatgtggttcaaggtccaccaatcttctgtttctttgattgtatttcccttgtttcaggacaggtaaaaatgttaatatcataataaagaccaaactgtccaattaccaaaactgtgaagcagcaacaatgtcaaagaattacaaataaaaggaataagaattttttgaaaagcaactaaaattgagaaaattctttttataagtgaattcagtatgttcactgagcttgtaagcaaggaaatagtctatggatgccttctctgcttttaaaagtagtaggtgatttttaaatttttacataattggtttgtaactttagcaaatattttaaagtgttttattatgtttgcaaagggactgtgacttcca

SEQ ID NO: 461890 - DNA, 538 bp, Homo Sapiens
gcatgagccacgaccatggcctatttcttcattttcaactttagacattttctcttcactgtagaaagtcatgctttagctaatccatcccccactccaatatcttttacaaagaatcaaattgtctatgaccttgcaaatctgaaaatatttttactccgaaattcaaagttgggttaagcatgcaatcttaggttgaaaatcagattcactttgtattttgaatgaacagcttcattagagtctaagtttccactgttcctaatggtaagtctaggactattctgattcctaaattttaaaggtagtatgctacctgccttccctcctattgccccctaccccagacaggaactttctgggagttttactttatcgcaaaagttctaaaatttcagtcagtgtggcaatttttacattttttaagctagtctctctcaatggtgtacctttgcaaactgaaggctcctgctctatcagttcaaggaaatgttcctgtctttttgaaagtttctcttctggccgggcacagtggcac

SEQ ID NO: 461891 - DNA, 433 bp, Homo Sapiens
tttttttcaaggtgatctcaggaacctgaggatggtgggggatgcaggtaaaggaaaattgttactggagggtcctggggagtcattgctacaaaagaggccaaacaagaaagactctatatatgaaaatgacttcctccagccctgtaccactgagctctgagcttcccagccttcattaagtgaaaagaagctctggaagtactcccacctcccaaataagggatccagccctcaagcatgttgaatcagtgactccaaatgtttccatcactttgccctcgctgatggactatttgggatgcttcatcgaccaggcagcagagatgctaatctttgtggttatgaccaaaaactgtagaaccatatccccaggccctccccactcagcaatctctggaagatccttctctgaccccttagaattcagaag

SEQ ID NO: 461892 - DNA, 459 bp, Homo Sapiens
taatcaaatttatagataatttcttaaagacacatttggtacataaaggtttgcctgttcccataggaaagactgacagttggttaagggaagattaccacggatgcagttaaggaaacagttgctgctatttcatagtaggtggtccactctgatgtcattgtagcagggttgaaataaaacatttcaaccacgtattttctgaacacgcctaaataaggtctggtccagctcagaaccacggccgtaggacccaaaggatagagcattaaatcctttattcctgtgggaacaatagcaaatgtcacaggatctgaaggtggtccaatcaaagggcctttccttaggtatattacaacctggtactgggcaccaggaaccagattttcaataataggtttgcttgagttcacctgagtgcagtactgcttttcaagcctctggctctccttttgtttc

SEQ ID NO: 461893 - DNA, 390 bp, Homo Sapiens
agcctccctgctagccccttgaggatagtggaggatgaggagtatgaaacgacccaagagtacgagccagcccaagagcctgttaagaaactcgccaatagccggcgggccaaaagaaccaagcccaatggccacattgctaacagattggaagtggacagcaacacaagctcccagagcagtaactcagagagtgaaacagaagatgaaagagtaggtgaagatacgcctttcctgggcatacagaaccccctggcagccagtcttgaggcaacacctgccttccgcctggctgacagcaggactaacccagcaggccgcttctcgacacaggaagaaatccaggcccagctgtctagtgtaattgctaaccaagaccctattgctgta

SEQ ID NO: 461894 - DNA, 187 bp, Homo Sapiens
tacttttagtagagatggggtttcacctatcttcttttgtattgtttactttacaatttggtggttttttaaatagtcataatgtttgattcctttttctcatttgtgtttctgttctattagtgagttttaagcctttgtttgttttcatgatggtagataccatcctgtctatatatgaagatca

SEQ ID NO: 461895 - DNA, 450 bp, Homo Sapiens
ctgggtaatatttattgctcttcaaagtgatttgcatttacaagaattgttaacacataacaagcatcctagatttgttttaagaaagaagggactttacaatttttcacttttagttaactttgaaatactaagatttatagaaaagttgtaaggatagtataaagggttccagtaagccttccacccagtctcccctaattgtagcgtgttatataaccatgacacatttatcaaaactaagaaatcaacattgctacactattgactaaactatggactttatttgtctttttgccagtttttccaataatacccttttcctattcaaggatccaatccagaataccacgttgcattcatctgttatgtcttcttagtctctgccaatccgtgacagcgtcgctgtcttcccttgttactcatgaacttgacacttttgaagagtat

SEQ ID NO: 461896 - DNA, 395 bp, Homo Sapiens
ctggtgagtgtgagaaggagaggagccaagttggaatccaaggtttcagtctgagcaaatggacaaatgcatttgccaagtcctatttatgttaacttgcagataagtatcatctgacatatctactcccttagccctagttcacagtgtcatcaccacttacctgagtaattataccaatgtagatgccctgcctgttgtctttcgtcagtttaggatgccatgaagaacctgtaagaactatttagtaaggcataactcttacatgctagttgttgcccctttccaactcacttgctctcggaaaaaaaggactggcatcgcagagctaagctacaaagcaaagacttgagccccaagcctcagttcttgagtcctacattaaactttcacac

SEQ ID NO: 461897 - DNA, 589 bp, Homo Sapiens
ccttggattccaacttggctcctctccttctcacactcaccagcaaatcctccaaactctgccttcaagatatacccagaattctaccaagattccccaaagatcccaccttgtcatgtccagcagctctaacagatgaaaatcattttctaagtgttttccacactacatctccagtgattctttcagacccaagtctgtgtaaagctcccgagtcacaccccacatcctcagcggcaaaagtagaaatccttccctgatacaggatgctcaccaggcctggctcctgtggcctctctgagctccattcttagccctcatcctcagcccactttgctattccaccccagcctctgcccacgtgggacgcacacatagacttttccggttgccattggcactgcctggagtgcccgtcaccaagaagctgaccagcatgtcttgctctcttgcttccactggatctcagctcaaaccccactcatcagaacaaactgtcctgacctcccatatgtgcacaatcccctttatttttctacggaatttttgccaccatccggtatcactgtctgtggttatttagttatta

SEQ ID NO: 461898 - DNA, 531 bp, Homo Sapiens
ggggaagctgtgacttgttcagaaagttgcaagacaaatcagttatggaaagcagtgtgcctcatttcctgcaaatggctgagtgaaaaataactggcaggctaaaaagctgcaattcctcacacctggagtatcatccattccttttcaccatggcccagtctacgctgatcggagtaggggtttttatttccctttaggttccagcatattgggaaagattcctggagaggattcttattccaatctgtcaaggctcgaagaggttgaaatctttggggctagagagctggacgtgaaaatgccaattcctatggcaaacatacatgggctcttccattattagctaggtgacgtgagccaggtcacgtaacccggattgtaatcgagtagctgggattaaggttaagtgtaaaatgaagacatattagtagccaccgcttaaggacattgtgagaattacaggtaattagcactgtgtagaattcacgctaagcactcattgaatggctaccacagtctgatgatgtg

SEQ ID NO: 461899 - DNA, 485 bp, Homo Sapiens
cattataaagttcttacctagtaggggcaagttttttattttaatgtattctttcaaaacctaagaaatctttcctaaatgaaaaattcttgttactactacaaatattctttccactcatgacattttacatagcatcatttaagcaccagagaaaagttctgtaaacaaacttttaaccagtaaactaagggcaaatatctatttgcctttattacaatatttaaaaggccatgatatgagtctctactccctacaatgacatttttataatgaaaatccaggcatatttatacaaacaaatggaattactgtacattttgggagaacaaaaggcagatcaacagactagaactagaacttttgagttaataaagcaagcagaaggaactagaaaaatgtatgccatgtataaaaattcagtttttttaaagtttcattggaggtgttaataattattaaggataaaagatggtagttccact

SEQ ID NO: 461900 - DNA, 230 bp, Homo Sapiens
atgagccattacacccggccgaccatagctccaatttttatccgatgatccaattttctttcattgctagttcaagagagcagggggggccctcatcagattccagagattctaataagacttcaggaacctgatgaatcctaagctacctttcagatttattaaatggtgtgggtgacttaccaccttctggctggatggctgctgaaccaattttatgttccttataa

SEQ ID NO: 461901 - DNA, 471 bp, Homo Sapiens
agataccagaatgaatggcgccatgtgtgtgccctgcaggctccagctgaaggacaggagtgagaagggcgggaggggtcccacccaactttcccgtgggcaggggctctgagggggctctgccacagtgagcttggtcctctgcagagtagccaggaggcaggaggccctaaaacttggcttcccaggacagcataggggtcctgtgtgttgttgagtaaaaggaaatctccctacccagcagccggcagggagagggctccaggaaagcccagatgcgttttagacaaaatcatcacatttcctctgactctccacagcacttgtcttctttaatgagcatctttcacgctgatcctagtctccccttcccaccgcgctgcctgagtgaagccctagatcctttggatggaagtgctggagagcattgtccaatccatgccccattgggacaccctcctaaaccagagt

SEQ ID NO: 461902 - DNA, 515 bp, Homo Sapiens
  misc_feature (26)..(26): n is a, c, g, or t
  misc_feature (44)..(44): n is a, c, g, or t
  misc_feature (55)..(55): n is a, c, g, or t
aatttttataagcttgcaggttccgnttcttagaattcctcttncctctggtctnggaatttgccagagccatctgttaatggatcttggaactggctgtagaagccagagtagggttcctttgagaactgataggtccaaattattctcctatccttgggtgccagatacgttgttccaaataagcattagtttgaatttgtaaagaaaacagctttgtacagtagtcattctacaaatagttttaagcagcattttgtatttatataagacaccatcctgctcgaccttcccctgggcacaaagctcacacctggtttacccttttcagagaggaggtgagtcacggaggtagccataataagtgttagaaaagagtgcctcctgcttcagctgaggaagacatttatcatcctccttttgtcctttaattcacgtctttgacatttggaaagtatttggaaagccaaaactacagaccaaaaattgtgcccttaattgagtgtgattgttaa

SEQ ID NO: 461903 - DNA, 572 bp, Homo Sapiens
caggctgcttttctgatactgcagtcattgaaaatacctcagggtgaaaagtttccgggtatggaactttgtgccttaaaggtattggcagaggatcatcaaagagatagtcatcttcctcctctgagtctcggtgaactgttctagctctcttcagttttcccagtggtttatactttggctccgtactttgggaagaccggcataaaggctttaagatttcgacaactttatccatagttgtgccaactggaatgacatttggatatgcgttcacaggacagaggtagctcaagaaatctttaatctcactgtaggaggagtgaaaagaaaaacaagctctgtatgaactctctccagtcctcacaattacatttgtttttctgctcctttctccaaaccacatggtggatggcttaatgctgattatgtggagtggaattctatttctggaagtaattccacagggtaatttgctccactgaaaatattcctctgccttgggatgccggcatgcatggatctgagtgttgcggtctgtctgtgagatgatgaaggatctcaggcatgct

SEQ ID NO: 461904 - DNA, 584 bp, Homo Sapiens
  misc_feature (101)..(101): n is a, c, g, or t
agggagtgttcttctgggtggtgaaagaaaggcaggggcgttgcagcacctgacagaagtagacttgaactggttggcctcagagatgttcatcgcccatntgcacatctggaggctctcccacctgtcgacaggctctgactgcttcaccatggacagcacgttcacttccaatatttcgtgcctcagctccaggcatcttgtggagttatattcaaaaggcccctcataaaattcaaagtacctcttaatgtagttcctgccatacaggatctgttgcagcaaggtcaccaaggcaaaggcgcagatgaagatgaagagcaaagttcggctccccaacaaatcccggttggccgaggggtccgcgtagcgcatcctggctaccggggcgccgcgggcgctggggtacggggcggccaggcaatgactcgcggggttccggggccccggggggcgcgcggccgacttggcgcctcacggtgcggtcaggcaggcgggggacttcgaggggcaaagtttctggttggcgcggccggagctgacggcatccaagcgtcgcaggcgctgggacggcaagcaggaca

SEQ ID NO: 461905 - DNA, 163 bp, Homo Sapiens
  misc_feature (111)..(123): n is a, c, g, or t
attctggcttgggtcttggggacgaagatactaggggaaaaggcctagaggccgaagatcccagtatctttcctcctctcccgccacgcccccttcccaaggaggcggaannnnnnnnnnnnncagcaggggttggtcacctgagcccaacccgcttcagtca

SEQ ID NO: 461906 - DNA, 173 bp, Homo Sapiens
atgagccaccgtgcccggccaagaaattcctttctgatgcacgcttaaccatttgagcagggaagaggcgattccttgtccctacgcattttgctcttccttctcatcatacacaagagaatgcagtttttgtaatataagaagggggttgttcttttagcttcaccttcaat

SEQ ID NO: 461907 - DNA, 455 bp, Homo Sapiens
tttactgttcgctatgcaaggttgctgtcaactttgcctcgcagctggaggcgcacaacagtggtactaagcacaaaaccatgttagaagcccggaatggaagtggcactatcaaagcctttcctagggcaggagtgaaaggcaaaggacctgttaataaaggaaacacaggcctccaaaataaaacatttcactgtgaaatctgtgatgtgcacgtcaactcggaaacgcaacttaaacagcacattagcagtagaaggcacaaagacagagctgctgggaagcccccgaaacctaaatacagtccttacaacaaactacagaagacagcacatccactgggggtaaaattagtattttcaaaagaaccttcaaagccattggctccacgaattctaccaaatcctctagcagctgcagcagccgcagcagcagtggcagtgagttcccccttc

SEQ ID NO: 461908 - DNA, 453 bp, Homo Sapiens
ctccttttacccggccagattctccaccatttggccgctcgcattctacgcagctgttcggaacccgggttcctgggctcctcactcagctcattgtctcttagtctcctgtctcttcgaggaacaaggctcagctgggaggtcgcagcccaccccaggtgcattataacgtcaggcgcgtagggtgccggagcaaatctcagccctttcacgccagggagggaggagggatgtttgggggtcaggacggcccgccaaaaccacccacggaaggtgcatggattgagttggcaagaaaggcgccacagcgggttggattcaaggtagacagtgggacttccgtgagggagaagcagcatggctaatagagaaaggtatattagagacccagcctcgactgagaggtcgaaataggtacagagaagcagagactgaaacacggaactcttgttt

SEQ ID NO: 461909 - DNA, 476 bp, Homo Sapiens
cttctccactttataccttggcacacaacacaggaattttgattcatatttttaaaacaaaataaaagttccacaccttaggagaaaaagcgaactggctggttcttccccacaataatatataataatgcttccttctttattcagttaattataaaacatgtcattctggcctcatttatctgcaaagtctcctttcacaattaaatacatcaaatacctctgtgggttttatttcatggtatcttcaaagcatcccgttctctgttttcccctgcccacacccccatcccaacccctgtccccaaataaacactgtttgcggtcagaccagatggaagtttgtatcatttcagtctagtttgcatgcaattcccctaaaaggaatcagaaacaaagaccgtgtttgctcatttggttttacttatttgtaccatgtgaaactgaacaacactgtgcgcaggaggggcccagcg

SEQ ID NO: 461910 - DNA, 795 bp, Homo Sapiens
  misc_feature (671)..(679): n is a, c, g, or t
  misc_feature (718)..(718): n is a, c, g, or t
  misc_feature (782)..(782): n is a, c, g, or t
aaatgagtgtacattattttgaatttaacttaactgttttgtggtgggtgtgaaaaaacattagaaatatattatctttttgtgataatactctctgacctcacttaaagtgatctgccatgaggtatccatgatcaagtttatgtttattctaatacctaaggaattcagccaactttgtttctatcatcagataatctcagaaaatagtgtgttttatctatattactgcctcttttcaatatttaagagaataattgtcttctggtttctactgagcctagtaataatcactaaagacctaaaaaaggaattccttctgttaagagtatttggatagcccattcacgataatggtggtgtgaaaatcaatcatcccagcttttctgacatatctaaattttgaataattaatttccacttccaaaaaattcaaatgttttctcaaagcagtcactacttatttgcattattcctgcatattcagtgaatgtgaggtcatatttggtattgtattagaagtagtgttggtcactggtcttgcctctttgaacattatttttatttgtaaaatgagggagttggtttgttatgatgggaaatgagtcagttttcagggtcctgagaaaattgcttcattcatggctgtgtttgagataactaaagtaaannnnnnnnncaggtatttggtgtcatgttttggagttaatatttagtncttatatgaatttttaagttattgggtatatattttggatgagggtactaggtattggattgcncacccaaaccagt

SEQ ID NO: 461911 - DNA, 568 bp, Homo Sapiens
tttttttaatgcctcaaacttttctctggttatttctgtatatctttgacgtgctctaccagttatatctggggagggtggaggtttctcacataatggaggtttttcatcctttaaattcagaacagggtgtttaccatctttttgttgtgtccgctgtggtgcaggaggggagcctggaaacccatcttgatgagaaatattttcatcgtcttcactgttcacctcatgtaacaatggcacctgatttctgtgtggcacagcgtacaggtcatcactgtggcctcctctgtcctcccgggcactgacatcccccaattccttgccgctggatgacagctgagtttcaatgtcctcttcgtccccatagtccagtgtttcaaaggatggcaaagaagatcttcttcccatctcactctgccaatttggtcgaggcctcagctgtgaggtggtggcatagggctcgatgaagctgtcctgttcaacactgctcacatcactctcagaccgggacctctggcgaggctgaggaatagcaaccgtccgcccagtcaatgttgtcgccaga

SEQ ID NO: 461912 - DNA, 787 bp, Homo Sapiens
cactgggcgaattatatgcggaagggtcacggatgatctggagcgacggcttctgggcaggtcatcttcattcatgtagccatccacggtcttcctctttctcaccaacatgtacttatcctcttcctcctcctcctccatgggtagagcgtcaagggacccgaggatccgggaccttgacctggtaagaggacgagctctccgttcagggtttctcctggaagcaacacccgggaatgtacgccttcgcggtctccttgattgtgagtcggagcctgggaggggatgtcttccacggaacgagccagggaagctttctaattcagacatgagttttgcaagcattgctttgttttgctttatatttaaagcccttttctccaaaaaattcattccactttcatcttctgaatcggagttggaatcagtcacagaattctctgagggctggcgggactctgcttttttgttggttgctcccctggtactccgcgctggaaacttcatcgccaccctgagaggtccagagtgcctgcactggctgcgggtcctacagccttcccgaactgactgcagcctcgtgtttgcaaaattatcagaagcaaagctgtcacaactgtcatcagaggatgacgaggtttccatggaaatcaacttcacatatctgaatttctttaagttcttctttactctgagatctttctgcggcacgcggcgagcgtccatgctggtggcgggtgcccagatcggcgcttggagcggggagagcggagcagccgcgcggtca

SEQ ID NO: 461913 - DNA, 517 bp, Homo Sapiens
cagccctagccgagcactggctcgatggcatcgatcctctacaaggccggcacttctgaggctgaggctcagcgttaagccatggcccaaggccacaggaagtggccctgactgggatcagaacccaaacagctgactctgagcccatgtgacaggcactaaacaaatgtttgttgaatgaatgtgcaacagagcaactctcggcggagcataagcacccaggggagttcctaggtcaccatggagagctcccggagcccgcagtggcagggagaacctaggtaagggccccagaattgctgccagtcatcagggttggaggcatctgcctccctggagcctccctgtaatttacaagagtgaatcactcctccccagctggagcctaaccttgaggacagaggaggccacagcacagactcctcaggccacatctggctacctgaggtccccatgacggcaccggtttcttccccatcagagcctgcaccttgggcagcctgatgcccagaggctc

SEQ ID NO: 461914 - DNA, 363 bp, Homo Sapiens
  misc_feature (320)..(320): n is a, c, g, or t
gcttttcttcttcctccatttccaaggcttgaaaatccttcccaggttggcaaacttacttctcctgcggatgggtggggtgtgggtgcctgggacgagggagtcagaacgcatcgccgccagcctctccacttcctcagctgcccccaggttaaaggagatcctggcctctgcgaggtacggcgtgtcgctcttggagcgcactctccggatgggccgccggtctatatcatcctccgaggatgccgccattaatgtgggaggcaggagcagggtcgcccggcgagctgagagggacaaggatacggagggagaggganacagccgcaagcgggaggaggggagagaaaaaggctcgcgccc

SEQ ID NO: 461915 - DNA, 755 bp, Homo Sapiens
cgcggccgacagcgcatacacgaaggccgactcccgggtccctctctccaggtcaagcaaatagttgggggcgagctcaatggaggagcagttccagcgcatgtcggcaaaggcccggcgacaggccttcatgacctcgcgggcggcgtgcaccaccgtgtgcatgagctccaggttgctgcggcacagctgcacctgtgcagacaccagaccctccagctgcttgcagtgttgcgtctggttcagtgccagggccgatggtgtcttggacagcgccagccacttgatgccatagcacacgccggtctggagcgccagggcgaagagcagcgcctcgcagacctgcggccgcgccctcatcgtcgcgcggcgggcgcgcccggggtcacacccaggaggagccgcgccgaagtcctccgcctgcacggccgccgctggtcctgcacgccgcctgcagccggggagagcggaggcggcgggttaaggcggcgcgcgggcgggggaggcgttttattcaaattacaaaggaggggtcggggcccggggaggccgagcgcggcgggcgtcccctcccgctccgcccggccgggggacgcgtcccgcgcctggctcgaattaggcgcggccgaaggcgtgtctcccagcgtggccccgggccccaacgcgccttcgagcccctctggccggggcagccggaaggagggacaggaggcggcagaaccggagaccccaggagagaccgggcagacacagcg

SEQ ID NO: 461916 - DNA, 550 bp, Homo Sapiens
agaggtctgcctttcagaaattgcaaaaaaattctaatgatactcatctgtttcaaagagaaatgacatgaaaaatctcataaaatgtttcacagatatattacgtattaatatcagttctcatttccacgtaagtataattttgaaagtactcttacacaagatatcatattctagtcacataacatgtctgtgagtttggcaaagcaaaatgattatccacatagcacagtaaaactgctgactggagctggggcttatttgctcctattccaatccctttccaatgtaccacaatgtcttcttcaacagataaacatccatgtattgctaacaaataggggaccacggcccctatgaatcaatttctgcagttgatgttgagtggggacagggaaactatggaagctcctccatgggccaattagctaatacccagtgagtctcttggctaaatagactctgataccagagtaaaagtctagcaagaacaactctggtggggtaaatgagaaggcacggggggaggaggattaatttaattaaggat

SEQ ID NO: 461917 - DNA, 826 bp, Homo Sapiens
  misc_feature (21)..(21): n is a, c, g, or t
agggaaaaaccctttggtgtngatgagtgtggtaaagctttcagaaataattctggccttaaagtacataaacgaatccacactggggaacgaccttacaaatgtgaagaatgtgggaaagcatacatctctctctcgagccttataaatcataaaagtgtacaccctggggagaagccctttaagtgtgacgagtgtgagaaggccttcatcacataccgaacccttacaaaccacaaaaaagttcatcttggggagaagccctacaaatgtgatgtgtgtgagaaatcttttaattacacatcgctcctttctcagcacagaagggtccacactagagagaaaccctatgaatgtgacaggtgtgagaaggtcttcagaaacaactcaagccttaaagttcataaaagaatccatactggggagaggccctatgaatgtgatgtgtgtggaaaagcctacatctcacactcaagccttattaaccataagagtacccaccctggcaggacaccccatacatgtgatgaatgtggaaaagcttttttctcaagcagaactcttataagccataaaagagtccatcttggggagaaacccttcaagtgtgttgagtgtgggaaatctttcagttacagctctctcctttctcagcacaagaggatccacacaggggagaaaccctatgtgtgtgataggtgtgggaaggccttcaggaacagctcaggcctcacagtgcataaaaggatccacacaggtgagaaaccctatgaatgtgatgagtgtgggaaggcatacatctcacactcaagtcttatcaatcata

SEQ ID NO: 461918 - DNA, 588 bp, Homo Sapiens
tagcacagaataacatcccttcattgcacacactgtgtaaagaatgactcctgcttatacacaggacagcttactcaggacagcaacatgatctggtcactgtctaaacaacttgtgcaagataaggtgacttaaatgctatctgagagcagtggtgctgtcacactataggtgacacagctcaggtcccataatctgccttgaaacatttcttcctacactcctcgtatttgctgtgatttataatccgtgctgccctgggtggccaatggtgcttaatgctgtgaacatggcatcttagcccgcacacacaggttcagattctggctttcagatgtgctttctctgtgagttagggatagatatgtaaacctcttcagccctttgttttggtatgaaaaggtgcgataatttacctcaagaggatttacatcaattagtgctgttagagaccttagtaacttgcatagcatttagtatgctttgaaaagttacctttatgaataagatatgtcaagtgtctgtcatgtttcttatgagattgacctttgccttcattatatcttacatattttcttttttgtaatt

SEQ ID NO: 461919 - DNA, 558 bp, Homo Sapiens
  misc_feature (446)..(460): n is a, c, g, or t
aattaaggggaacttctaaaaatcaatctataaatgttattttgaagattaaaataaaatattggacatcttaggaagagtaagatagaaatgaaccacctaaagggagtatatgtgacaaaatgatgtaaaataatgctggttttacaataaaattttgtaaatctttgaaaaatacatcactaaactttctttgaaagttacttatattgcccagaactaagtcattaattttatgtaattcttatctttttattttatgcaccaattaagaaataaaactaagttacatggaggattccactttacatttatattttataatttataaaactgtcatatctatatataataaggttgaggaagtgatactgacattaaaaaaataacttcctgctgctgtgaagaataataccaatctcaattttgaagtcaaatgctagtannnnnnnnnnnnnnnctaatcttggatctaatatagaggaggtagatgaagagcaagcaatgcacttttcttcatgataataccggggggggagaattaatttaattaaggat

SEQ ID NO: 461920 - DNA, 252 bp, Homo Sapiens
tgagccaccgcgcccggcttactacaagtcatagtttcttaaaggcaatgtagactccgaaaacttaatgcactcttatattgttaatacattaaaatccactggcctgtcttacacttttgaatcaatctttgagccatgcatgattttgtaacatcacgtactggtcacttggaaaaatggttcattgaattcttccaaatgaaatgcatttcattatacaaatcacatttgttaatatccccaacaata

SEQ ID NO: 461921 - DNA, 544 bp, Homo Sapiens
gatttaaggaatttctttattggaattccactttacctcgccacaaggagctggctttcatgacaaagagagagtgagccctgaacaaagtattcgttaacattttacaacagacaacatatacatgtcctgcatgacatctttacaataacacattccaaaaacaatcaaacatttaacaggattattaagaaacattaatttccttctctctagatgactggtactttagctttttagcttctgcaataaaatgcgttccttctcagcatttctattcataggaatccctgaatcacttctgtcatgtaaggtgcgaattcatgttgacggtgtgttccattagttactgaatgtgtcaaaatcctctccacggtagaaccttttattgtagcataatgtgtgaataccacttccaggttatccctcatcacaaattcatcattcattatgggagttcatctgaaactttaaaatagtttcatccattcaactaatgtatcacaatagtacgttcatcaatttgcattttttatgagtgact

SEQ ID NO: 461922 - DNA, 499 bp, Homo Sapiens
aaaggtggtaactaaaaccgcccaagcagccaattttattgatagtacattacaaacaatctaacacaatgatgtttttacagaaagccagtatctgaacaaccttccatcgttcaaattgtattttgtaagattaaaaggcttttagtttctaacctattatttacatcaaaaagctttcaaaaagttagagcataactgttaagacataggattttgttcattttctcagtggagagtacagagtacagctgacattctagtgggtctttggaagtacagtaatcctgcaaacatttaaactccaattcacaaacatgaatcaccggaaatcctttgatagtcatacccaacaatacaggtagtctttatcctttcgttaacactgagggaaaaaaacagttgctgttcaactacaacaacataaatctagaaacagaatgaaacctgttccaaatgtttctgttcttataacaaggtgaacactacaggtgttttg

SEQ ID NO: 461923 - DNA, 756 bp, Homo Sapiens
aatatctccaatatatgcatatttatttataagttagatttatgtacaagtctactaatatattatgtgtcttaaaaaacatatactttaaaaaggatgagatgaaattagatattaatacaaatacaagattgaaattttcttcctgtactccaagggaacatcttgcaacctctaaggcatgtgcctcccaaccttgggggctattgctctacactgtgggggttaaacaggaaaaagaccatcacgatttccaaatctgagtctgggtcctgttccctgatgtatcttcttcacatcagccagctctatctatcacaacatacttttttgccttcctggcacttatcacaactggcagtcatcttgctcatctgtgtgttcatttgtccaacatctttctcccccaactagaatacagcttcctgagaggcaggatcttgactgacttgttcattcctaatttctcagcatctgatggttttccacacgtcgaagccatccagaggctttgtgccattggtgtgtcccctggccagcttcatgagtgttggcagccagtcagagatgtggatgagctcccggttcttcacgcccttctgcttcagcaaggggcttgccacaaagcccacccgtcggacgcctccttgccacaggctccattttcttcctcgaaggggccagttattaccccctgccaaaagtctgccttcgttatctgtagaaaagatgaaacacccggttgtcccagaccca

SEQ ID NO: 461924 - DNA, 291 bp, Homo Sapiens
tgagccactgcacccggcctgactgttgtgtttttaagaaaaattatctaaacttggaaatagacaaaagaactacagaacttggcaatttacaactctgtaggggcaacttgtagacctctgtctagtagagatggaaataatttatccaccagttaaacagatgaccccaggaattagtctgcgacttcgtagctcgatgtcaaatccagcaatactgtacagttactcgcaccacacagctttctttccagctttcttgcctgctgtgcctggtacagtccaaagtag

SEQ ID NO: 461925 - DNA, 598 bp, Homo Sapiens
ttttacatgagaggaagaggtctttataaataactcctggtttaaatggagctgaaaataggaagacaaaagaggaagccaattgctaagcacttattgagtcaataacattggcttggaagccatagtgcaagtggctggtttggtttatttccttctcatcaaaagagctaacgcaggattgaacctgggggcaccaagaccgcatgtgtgtccgaggatgtgtctgaaaggatgtggtgcttctcagatgatgatgtctcgactaagacataacccaggccttgggttagatctctcggtgtcacagaagaacctgtcgggtggtgtggcttggctgttaagtccctggacctcttgagatcactttcttcactggaaggtctagtcactgggttggcttctaagctctgagatttagatagcaattcatagctaagtcttcgatataaaacacaggaaccaaaagtgtgaataaaatcttgactgtgctcaagtgtcctgtgaagtgtcctgtctccactctcaattccattctctgtagggtcttccttcagctgcaacaagggcctgcagtttgtgctctctctcggatgac

SEQ ID NO: 461926 - DNA, 517 bp, Homo Sapiens
cccagcataaatttagttgtataggcattggttagaggacactgttttcactaaggattatattcaacaactttctcttgagttgttactaaaattctgattctgaaccttatagcttataatggtgccaactattagaaatgggaaaatctaattcagtccaatgtaacatgtattatgatataatagatgaagggtatgtctacactataataaaaaataaacatatttttggttatttaaagaccatcttcctaacctgtaactaaaataactgtatttgatttaaacttatttaagtgcagtgaattatggaaagctaacttaaaggtttgaataatcaattatgagtaaggaacacctgttgacagccccgtgacccttcagaaccaggcatttgctgaaaaaaagaaatcactagcattgaatatagcccttagtcacgtgagagattaacttcatgagcaacccagcatgtagaggatgaggtggactttcccagccacccactccttga

SEQ ID NO: 461927 - DNA, 249 bp, Homo Sapiens
atgagccactgcgcccggccacattggttaatttggttgagagcgggctcgatgtgattttattgatgataatgtcttcaatttgccttgccctcagtacaaagcagcatgttgtaccaagggttctgggctgagggacataactagggaagactgagctgtgaatttgtcccctcagtagaggatcaccctggccaagttccagttcatcttggagccttattttacatcagatgggaaaagaccttg

SEQ ID NO: 461928 - DNA, 343 bp, Homo Sapiens
atttctgtatttagcaaagaagaaaaaataccttatctcatccaggcttgggtagatccatttaataaagaggataaaagcaaagcgccgtttaccgttattccgccagtatcacgattagaaccttcgcaagaaaaaatattacgcattattcacaccaaaggtgtgtcattgcctgatgatcgcgagtcagtcttctggctgaatattaaaaatattccgccatcagcgagcaacaaagcgacgaactcgctggaaatagcagtaaaaacgcgtatcaagctgttctggcgaccagcaaatatccgccttattcccgaagatgctgcgccgaaagtgaaat

SEQ ID NO: 461929 - DNA, 278 bp, Homo Sapiens
tttttttattttcatcctcagtgttagaactggaagagacgttaaatctggttcaaccgatgctcaaaagtgaagtcacttgtcagctctgcctggaacctgctccctgcttccctacccagagctttatgattcatacagcagttcctccagtaggagagcgagaggggatgaatgggggcctagccatctgggatgacggggcaagcagttggatccattttttccaaaaggtgcagcagcatcggtgtcagccatccagaatcctgctgctaact

SEQ ID NO: 461930 - DNA, 457 bp, Homo Sapiens
atgagccaccgtgcctggctgggtatgaggctgaattagtggtgagttcatttctataatgtgattaaatatatcaaacacaatatataataaataatttgataaactgttttgggaggagctccatctacccagctatttgagccagaaaactgaccattccttcctcctttcatatctcatgtatctgatcaatcaagttctattgattctattgcttaaatatctctcaaatcaatccacttctcatcccctttgccattgtcttctcctacctagaccactgtgacaaacagactggtctgagacaccaatctattttccacacgcaaacagtgatcattctaaggaggatatgaaatattattatgtccctgctatgcctgttacatataatggctgattattacccttaggatcaagttcaaaacatttaatatggtttacattgtttttt

SEQ ID NO: 461931 - DNA, 494 bp, Homo Sapiens
aatttaaagtccgtagaaactttttgcgtttcttcaatccgttcgcatagaaagacccaaaggttttcaacttggaaacaaatttgaggtgaaatgcatatggttcgcaggtccaaaagatgctgcctagcaaactagcaattccagcgctgttgtgatttcttctgcggacgcagtcacgagtccagggcgaagcaggcagggaggcaggtgggcctcggtccgccgcaagctcacacttaggaggaccacgggccgcatgctgtcgtcgtcaaggcaacgacctcactctgtccccaaccataggcacaaagtcttgggagacagatacggcccaggtcagaatgcgttcacggcaggcaccaacacctgtgaaggccaagggctagagagcaattagctgggtgagaggcaccacctcccagctcgtaaggcgcccagtacctggagcctgggaacctgcaccgctccaactacccctgggccgggggggg

SEQ ID NO: 461932 - DNA, 810 bp, Homo Sapiens
tgagccaccgcgcccggccaagtcacatttcttgacctcataaggcttataatctagttcctgttctgtgttctatttcactggcgacctaggtgttgatatccaaaagagcttcttcaagatcccaaagagtaaatcagatgatactgcatttcaggtgggtccaagacacctgcctacccagccctcagtccaatgcagtccccagaaacgaaataagaggcccagattcctcgtgaaggagttaataggcagagaaggatagggcttgacagtatcaccaacttctcacttcaactggcagggggcctgggtctcaaccctccagtcttcaaggaaaggggtctggagggggcaagtggtaacgtggcgtcccaggaaagatgactagggtccccaacgttggtgaaagatgatgaaagtccacaggaagaggcggtccactaccatggccacaaactgccagtcctccttcagcgcatcgtggtcctcctgttcctgcagctgtcgagcgatgtagctgatagaggagacgacctcccgtagctccggaagcagggccacagcccggtttggaccatcgataaatcgccgcagatcaggggcagacagttcaggctggaacctggaagaggagtgactggccacgcccaaacgcaaagacagccagtgccggcgacccaggccccgctccagctgcctccaacaacttgccagttctcaaaacccgagagcccatcatgcttttccctccagcagtgatctctctagccttgtgcaacttcttccaccgcctctgttttagtttcc

SEQ ID NO: 461933 - DNA, 222 bp, Homo Sapiens
ttttttttacatgcaatacttttattttagacatgcaaggaaagctatttcagaatctactaatttaaagcaagcagctgtatacagacagcaaaagaagcaacattttgttacagcttagcacaaggcatccaacacaaacaggcatgagacaatgcatatttatgtagcattaaaaccagatgaataatatattgtggggcaggaggaggaaaggagggg

SEQ ID NO: 461934 - DNA, 363 bp, Homo Sapiens
  misc_feature (128)..(138): n is a, c, g, or t
  misc_feature (155)..(155): n is a, c, g, or t
  misc_feature (157)..(157): n is a, c, g, or t
  misc_feature (162)..(163): n is a, c, g, or t
  misc_feature (174)..(174): n is a, c, g, or t
  misc_feature (183)..(184): n is a, c, g, or t
  misc_feature (186)..(186): n is a, c, g, or t
  misc_feature (255)..(255): n is a, c, g, or t
aaacaatccaaagccgcttgcttgtaggctacatttgtgattaaaaagggggagtctcccctttccaaacactcagggctcagtccggcatttgagcgaatccacattccctgagcacaccccggccnnnnnnnnnnnaggggatgtgggtgttncngggtnnggggggacacnaggcccttnncngggagacaaaaccgtccctggttgtaaacatcaccatggaaactccacaaacccttgccagtgaaaatntttccccttttcccaccctgcgcacaggaaagggagcttgcccacccccacctagaccgggctttccatcacccattgggagctgccaaaagaccccccgggccccca

SEQ ID NO: 461935 - DNA, 566 bp, Homo Sapiens
  misc_feature (66)..(66): n is a, c, g, or t
  misc_feature (477)..(477): n is a, c, g, or t
tttttttgctatccttgtctggtttggttgctgaactgttcccacaagctgatgaagcactgtcanggagatgtggggagtccagggagaacggtcactatccggccactgggctcagcctccagagaagcactggtgatgcttggggaagtcagtggagcagctgctgcacaggccagaggggcactggctcgactgatactgatggcagcagtttgcgtggctgaggctggcatcagaggcgcaggttgtggggaggccagcgagttatgggacaggcccacagatgcagggctgaggccggcggcattctgtacctggatgggtgtcactgctgccgtggggcgttcctggttgtgcgctgcaactgtcctcacagcattgcgggcctggttgactgtcatttgccccgtcatgtgcaacaagaccttagcctgaggacttgtctggatgtgagctgctgataccacagctgcngggacaacactgggactcccagccacgccatttccctggagcttctgggcaggccctcctgccgtggaaagactgaccatggtactccc

SEQ ID NO: 461936 - DNA, 577 bp, Homo Sapiens
ataactctattcctttctttattcccagtgtagcttcacctcggcgggtgagcgttattggaatggaaggcagggagtgatctgtactggtctctctgctgcctgctcgcccctctcaatctctcctttgctttttgctttaagatcgctcttctctattgcatgcagggagttttcttgagctgggtagcaggctgattccattcatttctacagtgccttgaatatcttcaatcgcccacaaagacaatgttttattctacgaacacaccttttgccaacatctcactgctttctgtacaaaacagcctttttgtcgaacattgaagtgtctacaataataactatcaatagggaaggaaacaaattaacatccaacgaatatagggaaatgtggccctgatacaagcacttggtttttgcttctaaagaggaaccccttcccagactcacctcatcgagagggagacagagaagtctatcaagcttagcaaacatctgtagtccaattactgtcaacagtttacaggtgttgagagcaaacagtcacttatacactacctcccaaatgcattct

SEQ ID NO: 461937 - DNA, 599 bp, Homo Sapiens
ataaagaaaatgattggggattttccaattttatggcctggagtgaagtgaccgatcctgagaaaggatttatagatgatgacaaagttacctttgaagtctttgtacaggcggatgctccccatggagttgcgtgggattcaaggaagcacacaggctaccgtcggcttaaagaatcagggagcgacttgttacatgaacagcctgctacagacgttatttttcacgaatcagctacgaaaggctgtgtacatgatgccaaccgagggggatgattccgtctaaaagccgtccctttagcattacaaagaagtgttctatgaattacagcatagtgataaacctgtaggaacaaaaaagtttaaccaaagtccatttggggtgggaaactttagatagcttcatgccacatgatgttcaggagctttgtcgagtgttgctcgataatgtggaaaataagatgaaaggcacctgtgtagagggcaccatacccaaattattccgcggcaaaatggtgtcctatatccagtgtaaagaagtagactatcggtctgatagaagagaagattattatgatatccagctaagtatcaaaaaaa

SEQ ID NO: 461938 - DNA, 392 bp, Homo Sapiens
tttttttcatgtccttgtcttggctttgactaggaggaggctgtgcgccggcctcctgcgccgcctctagctccgcgctctccagcgtggcctggcggctccgctcctcggcgaggcacagccgcaggctgcacaggcggtggcgcaggtcgcagttctcggcccggagctgcgccacctcccgcgtgaggcacggcccctccgcctggcagctgtagggcgagttcagctgctcgtccctcaggcgctcgacctccgaccacagccagcggatgtcctcctcctgccgctccaggcgcgacgccacggcctccgccgccagggcctcggccgccatcgcggcctccctcaggcaccgacgccgagcggggtgcccgcgactgcggcgaggg

SEQ ID NO: 461939 - DNA, 794 bp, Homo Sapiens
  misc_feature (623)..(623): n is a, c, g, or t
  misc_feature (652)..(652): n is a, c, g, or t
ttttttttataaataatgaattcgtaggtaaatttattatgttatgtaaccatgaatttacaactaacacccatatggggctggcctgcctgtgaatcaccattgccttcattgtcctcacacatcactacaggcggtcagtggctatcagtcctgcaatattcaccatcaacagatgcagaccgaactgagtacgtctcagggcctgggtgtccaatgctcggggcctcctgaacgacatgggccttcgttcgcccgtgtggtcatccacatcttcggcatctgccactgccaacccctgtcctgggcatacaacagagaaggagggggacagaacccagcaacacacgagttaagcacttggaagaagctcttcacccggaggtaactgacactgaggcgcaggacagaaagcttgtccagcttggagatgatgtcaggcgggaagggcagcaggctggccaggtggtccaactcggcgttgaggcggtcccggtgtcgcttggaggggttggacttctctgcccccacggcgggcctctgtttctgcaggggcctcctccgcttccggcccgcgtacgtgcactcccccggcgggatcatcgtcctcggccgaggagccnccggggccgggtcacgcctgggcctcccntcggtgtcaggcgggtcccggcctcccccagagaagccgcctgctctggagcctggctcagggcgccgtggcgggagaccggcgtcctgaggaggaagccatcgaggaagccaggaacgggcggggcggggcgcagccaagg

SEQ ID NO: 461940 - DNA, 306 bp, Homo Sapiens
tttttttatcaacaaagagaataaatgctttttattcatttgtagttatcaataaaatgaaagaaagacctagcatttttaaaactccactgtaaaacataggttaccataaaaatgtatttaatgggttaatatttcaatatttattttttaacagaaaacactcatcacatgcaaaacctgtcacttcacatcttcaagtttcataagttgataatacctaatcaaaaagtacatgtgaaaagaaagctttttcatagttgaactttaagtcattcaaaattattcaataaaatggatgtaggt

SEQ ID NO: 461941 - DNA, 179 bp, Homo Sapiens
gaacttgagggtaggatatactccttgtttaatataccacgatatagccatgcaaatcatctaacgatgaggccaaataagcacacagccatttatttaaatgctgtgaaatcctcaaggaaaggggcttgtaaatgcaaacttctctgagaggtccacactggaggtcagcttctgct

SEQ ID NO: 461942 - DNA, 615 bp, Homo Sapiens
  misc_feature (61)..(164): n is a, c, g, or t
tttaatagttcttaaagtgtctatttattgaaaggagagatgtccatgatgttaagtagannnnnnnnnnnnnnnnnnnnnnnnnnnnnnnnnnnnnnnnnnnnnnnnnnnnnnnnnnnnnnnnnnnnnnnnnnnnnnnnnnnnnnnnnnnnnnnnnnnnnnnnaaaagctgaaaaagagtatatattgtgatttctattttttatattaaaagcgtacaagttgtttgtatagagaaaacattctgatggacatatatccagcatggtaacagtggctatcactgggtgtgttttggaggcgatcctttttttcttttgtattattcactagcattttatttctattttgcaatgagcatgtattttataaacagtagaaataaaactattttttaaaagatgccaatgtgagagggtcaggtagatattattggcctcaataggtagactttggagcctgacagatcaacagtgacatgcagcaaagcacataacacagggtggttcctgattgcagggcagagggcgctactttctgcctgacttttatctctcaccagacgtttgtggtcatgtctcctcctgcattatatggaagttaaaggaatgtcag

SEQ ID NO: 461943 - DNA, 811 bp, Homo Sapiens
atgaaaataaatgtttattataatacttgagaaggattacatgatcttgagtttccttcaaaggcattatataaattcatttcttttattcacataaccatacaaacagtgctatgcatatgtggtcaaatgattttagacaaagtcatcaagatacttcaatagggaaataacagtcttcttcaacaaatgatgtgggaataattgatatccatggagtgagaggatgaacatttatttactttctcatttcatatacacaaattaactcaaaatttatcactgagttaaatgtaagggctaaaagtacaaaatttctttgaaaacccattttttaaaaacttcgtaattttgtggtaggcaaatatttcttagctagcacataaaaaagcatgaaccataaaagaaaaaagttgataaatgggcttccatacatttctgttcttcaaaaaccaccaagaatatgaaaagacaagccacagactagcaaaaaaatctgcaacacataaatctgacaaagaatttgtatccaggatatctgaagaagtcttactattgagttgtcacttaataaacaaatcaattaaaattgggcaaaagattcaaacgtacatttcacaaaagaaaatatacaaatgaccactaagtacaggaaaagacagtcaacaacatttgtcatcaggatcatacagcttaaatccaccacacaccaagtttgggttaagacgaacaactgcaactcttgtacactgttggtgggagggtagatgctgtaagtactttggaaaaacttaccatacaacaaagcaac

SEQ ID NO: 461944 - DNA, 230 bp, Homo Sapiens
ctgggggagtatctacggctccgctagccaatcttgtgagcgcccttgacctcgttcgtggggctcctttggccgatgccgcacccggccaatggcactgggccgaggaatggcggatcgacatgatccagatggttcgcgacatcggggtcgaggtagcccgacgagctatggagataagagacgttgagctggcatctcgggcccttgccagggccaccgtcgcctgt

SEQ ID NO: 461945 - DNA, 461 bp, Homo Sapiens
  misc_feature (319)..(319): n is a, c, g, or t
  misc_feature (424)..(424): n is a, c, g, or t
ttttttttactgttttggaaaacaacttttaattatcgaaaaacaacttttcattatcaagtaaagctgaatgtgatctatgacccaggtaaatcacttacacagatcagatgtgcagccaagaatcagtatacaaactttcactgttttcattttataaaatcgtaattacacaaaacaatgtaagtaatgaaaaactttatgaaacaatgatggcaattagggcccatgttaaaaactttaagtacacttcaggtcctcttcaaaacaatcctgggagtaatatgggttattaccgaaattttacagatggcaaaanctgggtgtcttgaagggtatgttaaacgggtccccggggcactggacaggtttgacttgctagaaggtcttacagacttaaacatgtagttgtaccatggactanggtttgttacagagaacggttacacgtaggattcact

SEQ ID NO: 461946 - DNA, 440 bp, Homo Sapiens
  misc_feature (125)..(295): n is a, c, g, or t
  misc_feature (310)..(319): n is a, c, g, or t
agggcctgcggcttcatttccttagtcagccagaccaccaacccacagagaggaacaaacgactgcagacacgccacctttaagaactgtaacactcactgcgaggtccgtggctttattctttnnnnnnnnnnnnnnnnnnnnnnnnnnnnnnnnnnnnnnnnnnnnnnnnnnnnnnnnnnnnnnnnnnnnnnnnnnnnnnnnnnnnnnnnnnnnnnnnnnnnnnnnnnnnnnnnnnnnnnnnnnnnnnnnnnnnnnnnnnnnnnnnnnnnnnnnnnnnnnnnnnnnnnnnnnnagaccttctcttacnnnnnnnnnntgtgcggaggagagctccatttccctttaggagctttgtagcgggtatcctctgcctgctgggggtgacaataagaaatgctactctttaaattgccttccttatttcagagaccaagtga

SEQ ID NO: 461947 - DNA, 373 bp, Homo Sapiens
  misc_feature (296)..(297): n is a, c, g, or t
  misc_feature (301)..(302): n is a, c, g, or t
  misc_feature (305)..(305): n is a, c, g, or t
gaggtgtagctccggtcgaacggagcccagaggcgacatcctctttacctgcaaagttgcaatcttcgggctgaagtgatgggatccgaggactgacggcgcgggtgccgtgcggggtgagagcacgcccggcaaattccaatggaattcccttagtcgctgctgagttttggagcattccaaggaaaacgatcgaagctggagcccacgcagctggcaccgaactgggcggagtgaggatgctctgaaagcgaagccatgggaggcgggggaggggcggcccgggagggggaggnnaccnncangggaggagaacctctcccacccccgcctgcacagatccctctggataaagttaagagttcccacggct

SEQ ID NO: 461948 - DNA, 639 bp, Homo Sapiens
catgggtccctgcatgggtttatccagcagtcaagataataggcaaagaaaaaaagcgaaactgctctggcggtcgggcgggaaagcgcctctcaaagtcaggaaacggagggttcgcccaaagagcgggcgcgggccgggtgctggggaaggatcagagggaagactcgccactcaccccggggccgcaccggtcagttcagcgcgatcagcatctctccgccacgaaccgtgcgcacgtctcgggcggcgcggcctccctaggcgcggtgctccatcccgggctcgggaagcgagccgcttggttagcacgtgggctggggaaaagtttgccgagaccggctgggagcgcctggcagctctggaattccagcggccgccgcggggttggcgacgccaggcaggagcgcggagcggcgggtgcagccactgggatgctccgtccccgcccgcgagcgcggtccccaggcaaggggtgcgcccgctcacactctctgcctccctaaccaattgtgtcgcttcctgcgctttctccacggtcacttcacagctaagatttctttctttccgagctgtagaaggcagaacgctctcgggaggacgaagtgatccgaagggatgtggcaagcgcactttccg

SEQ ID NO: 461949 - DNA, 651 bp, Homo Sapiens
  misc_feature (17)..(17): n is a, c, g, or t
  misc_feature (30)..(30): n is a, c, g, or t
  misc_feature (39)..(39): n is a, c, g, or t
  misc_feature (90)..(90): n is a, c, g, or t
  misc_feature (101)..(101): n is a, c, g, or t
  misc_feature (123)..(123): n is a, c, g, or t
atttaaggatgcaactngcatccatttatngtatcgagnttcaaatctgaagactgtatcaactgccgtttttccttttgtatcataatnactctgtccgnccaaccacatagagaaaatttncaatgaacgcgatgccatgctggtaccttggggcatccattggggctaacgatttccattcttgtgccttttcatcatacatgcgtaattctttactgacaaccagctgctgcctcagtactcctcctagtgtaaccaagtgagtggtgtcagatctaatggcagttctgtctgactgcatcactggctgcatatatggcatcatttggtaattgctggcttccaaaagcaaattcacgcaggtattgtctgttctcatgaaatctactgtttgcacgtaattgatgagctcctgtggtgtcatcagtggaaatcgtatgttcttcattaattttgcagcatagtccatccgagggtcttccaagcttagccagcgacaggttgccttaaagagttcaagttcggtacagtgcttaagactattactggaaagcacaaatgcaagtcgttcaaaagggagttttagaaactccccagtactcaataaagcaggaaagttcttcaggatgaaattattaacatatttat

SEQ ID NO: 461950 - DNA, 546 bp, Homo Sapiens
ggattctgattcagtagatctgcattgggccccgtgagtctttttaaacacagtcccaggtgattcatgcagatgcctgtgaactgcgctggtagatgggcctaagaggcttcaggctgtgttttaggttttggtaagccaggcagattcaagtccttttataactgtcaattttgtgaattggggatgcagactggttttgaaggcttaaagttcaaaaattataagaaagttaagaattttgcttaagagccttttaaaaatatggacgatttattttttaagtaggcagactaagaatttccagttataaagaatcttattgataaggcaaagtagacaaagtattttctcatgagtatttgtgggttatgtttttgttaatataaaagttgatttctaagtattagaatatatttagtctctaaataaatcttgccttctattatggatcatcgttattaataaacatggaaaatcaacactacccctaatattaatctggcagttaaatttagtagtgctataatgaataagtcagtctag

SEQ ID NO: 461951 - DNA, 499 bp, Homo Sapiens
  misc_feature (78)..(78): n is a, c, g, or t
ggccaagctgatatctttgagctgacttctgtactcagggttcttccaaacaggaatatgctttctctgcctaagatntgggttccatgcccatctcaacctcaatccctccttcaaggaagtttttcctaactcctcggccagacatcaataatgtctgaagggaggatttctcccgagtgccagacttggaattcctgttgtcttcaggagctctccctggcgctccctccttcccccagggcctttaaactgtttctcctccagtctgcccacttgatccatgtgggtagacatgttccatggccttcagaataagatcttttgtggggtactcagtccataaacagaaaattgccttcatcttggatgctggtgtttctggcctgtgttgtgccagaggttctgatgataggcttataggcggtagtttcctcagtgtccgtgggtcgcccccggtcccgggttggatgccccgcggtccagcaccgaacctttc

SEQ ID NO: 461952 - DNA, 193 bp, Homo Sapiens
cagagccaccatgcctggttttcatcagcagtgtttcctgaggttacagaaagatttataatcctgggaagaaacactcccttgaagcaaaagtgctctccccgcaaaaatgcaaggagctatcttcttgctagccgggcagataattctcaggttttgccccactgaatctctatctaaaatagagcagtgc

SEQ ID NO: 461953 - DNA, 894 bp, Homo Sapiens
  misc_feature (538)..(742): n is a, c, g, or t
caggggcaaatcactgtcaatgttcagcttcagtgctgggtgcaggaacactggcatgaaccaaggagtacaatgaatcaaattctgggcccctgtggcccaaaagtaaatcaattaaattggaggggcaactatttctccatgtggagttataagtgatatctattttcatctttaaagttttctacattaccaaaatagtacctaataatcacgttagttttacaatcagaaaacggtggcagcaagcaatgacattaaactgaacatttttattccaattattcaagtttttgctgcacagtattttcaaatgttttattttcaaaatgactattacaaaaaatgtagtttccagaatgtcatggctacacctcaacctactccactcttgcagtgggggcaacagctttaggagcagggaccgtgtgtgggggctgcacccttgcagtgcgtggcctggacacggcccaagccctccgccgcccacagacaacactttcacattgataaatatgcatgcccatcaaatcctgcnnnnnnnnnnnnnnnnnnnnnnnnnnnnnnnnnnnnnnnnnnnnnnnnnnnnnnnnnnnnnnnnnnnnnnnnnnnnnnnnnnnnnnnnnnnnnnnnnnnnnnnnnnnnnnnnnnnnnnnnnnnnnnnnnnnnnnnnnnnnnnnnnnnnnnnnnnnnnnnnnnnnnnnnnnnnnnnnnnnnnnnnnnnnnnnnnnnnnnnnnnnnncagactctctgtagcaataagatacccaattcaacgggactccggtatagcatcacatgacacatagtagccccgaaggaatcaaagtattttacctcaaaatatatttccttgacatatgttgaaatggcccttgcaaagctgtctctcat

SEQ ID NO: 461954 - DNA, 257 bp, Homo Sapiens
  misc_feature (170)..(171): n is a, c, g, or t
tcgggttatgtatgattttgctgctgaacctggaaatcatgatctgtcggttgatgaaggataaatggtgtgtgtcacaaatccgtatgtatgtggatgatggctggaaggaagaaatattaaaggataacgagggttgtttccgacagactacgttgaaatcctacccnnttctcgataggatcgagtggggtgtgggaattcagacgctgaccaatcattacttgattctctctgaggcagcacaggtcaagcca

SEQ ID NO: 461955 - DNA, 505 bp, Homo Sapiens
  misc_feature (32)..(32): n is a, c, g, or t
ctgcccatcgcaactgaactgccaagatccantgctgtgtccttcagctttctgctcacaagacatcctggcctgcagggtgaggggttcccttgggtgtgtaaattctcccagctgaatgtcaacgcagttgctctgtaagtatgtcccaccacctctcctcagtactgggttctgtgctttcccaggccgttgtgacatttagtttccttccccaggggactgacaggtgtgactgtcttgttgccacagtcatagtgaagaaaagtcttttcatccacctggccttgaaccgcacaccaccgtggtccaggtctgaacttagggatgacggtgatgtcatagcaaagagagtgagggtcggctcgcccagcccgggaccagccggacagcaggagcagaagcgggaggcacagaaggatcttggtagcggcggctgctgccattaaggacccagagcgctagggaggagagacttgatgcccgcagagcctggaagatgaat

SEQ ID NO: 461956 - DNA, 574 bp, Homo Sapiens
tttttttacttttggttcatggtgatgaacagttctgaactgaatatttgccgaacggcagtgctcctcataaccatagagatactttttataagcagtttttacattgtagggagcagctgaattcacaataggaatgccaaggtccatatacatttgcttccatacagcaccactatcaatattgtcacatccaccctgatgataaaccagtctgaagagtttgaagagattgagatctttatagcccaaaacaggtggtttgttgattggagtacctctgtcttccataaacttataaagctgctggaggaagttgtccctctcttcaggatcaagttcttcctcaggctatatgctgcattttctttcaaatgcaaagtggttagattccccttctacttaatcagtacagggtctggacatttttcagtttgacttgcaaatatttgctttccctcttagggcatagcatccgcagggttatacagcactacttacattctcttccacataaaaatcagacattacatgaaaggaaaagccccgcgtacctcggccgcgaccacgctaa

SEQ ID NO: 461957 - DNA, 613 bp, Homo Sapiens
  misc_feature (47)..(61): n is a, c, g, or t
agtaatgttactctgccttttttcctaagtctaaatacagtagctcnnnnnnnnnnnnnnngcagtttagtcatgctttagaaaatgttctcctaaagaacatttaaaataaagtactcttatagtgaaataaagtttttttgtttcattttacagaccatagccactaatgctttgcttttgttcatttcttttttcttgatttcatgcacatatctgttttaatatatacaatatatacaaacagtacatccacatttttctcgctcattcagacaaaactatacaaataattttatcttgccatgttattgacctttgtgaataaaatatttagcaattaatataatccctttcaaatattttctcacttttcatttctaccttctatatatacacaggaaactgctcagtttgggatgaggatataggccaaaaacatggaatttactgggccagaacgcagcaccacactgatcgtttaggtggcaaatgtccaggcaaggttcatgattccttagaatttctacagcttccaaggttactaaaaaaggctacatgcgttaccaattcttaagtaattctcattgcacatgaaagtaaggcaaaaaaa

SEQ ID NO: 461958 - DNA, 558 bp, Homo Sapiens
  misc_feature (324)..(324): n is a, c, g, or t
  misc_feature (470)..(470): n is a, c, g, or t
  misc_feature (500)..(500): n is a, c, g, or t
  misc_feature (514)..(514): n is a, c, g, or t
  misc_feature (521)..(521): n is a, c, g, or t
ttttttttgtcagatcagtcacgtgggacccaagcacattctggaagccattgctaatagtcccgatgctagattctgtctgggggctttgtgggtatctggaaaggtggggcgcagcttctttggggatcaagggggtcagggtccatttccccttctctcccaaggaaaatgccttcttgctcatcacttgtgctttccaggggggcggcggggggtacctgctcttgcagcaagaatgagccaacctgtgtttgtcaatcactcagcctccacacagttgggcagccaaggtcactggttcctaagtcccggaggacgganatgaggggtgagctattccctctcaattcctgcggaagtcacttccagctgggggctacatggcatcccttgggcatggggagaccagggaccttctggaatcttcaagccgtgagcttcataagccaccatgatgggggacactnacttggcattggggcctaggataaaatttntgttaacagggctnggaattngctgccttacaaggaaggtttcctattaccaagacat

SEQ ID NO: 461959 - DNA, 525 bp, Homo Sapiens
tgggtagaaaccccagggatgattcttcaaagccccctcctccatgagaggggactgaaatgctgcagctgaggctggttcttcagggcagaaaatgagtacttctttgaaggtggcttttctgcgagttcttctgcctcctgctggagaacagagacccttcaagaggtgagggttagatttcattggcagagagattagccactgtgcaggagtagggaggaaaaggagttctgggagaggcgccgccttcctgttttctgggaaaggctgcaggattcctttcctaacggtgaccttcttcttgctcccagtgacctgggaagcaagcccaccctccccaggggaaaatctaggagaatgcattcctctgcagactgctagagagagatggcaagaaggaagacacagaattctttctgacagcctaggagttatcttcccactgtggtaaccccccatgtggcacccagggactgaaggacacagtgcgtggagacggccctgagctagcggcattcctta

SEQ ID NO: 461960 - DNA, 700 bp, Homo Sapiens
tttttagcatcctcctcatttctgtagtaagacttcagtaactccctcccaagagtctttggatctcttccccggcttccttccccagccccagtaaagcttttttcattcctcttgaggcacttttgattcatgttctccgatagagtttgtggcgatgggctggtgaatgcacgctgatgggaaaagcctccgccaggtctttagtagtaagtgcccagatgagaaggcatatggctggtggggagcctagtgttggggtatatacccccagttggtgaattccagtatgggtttggggcagcaaaaaaactggaaagatgttcacggggagggctggagggtggggcgccaacaaagttcatcttctgtgggtgggcgtgaataggagccccatgtacgggaggtctgaggggtacttgtacagagatgactccggggggtggggctggagggcctgggcgatcccgtggaagtcgaacttgtaggcgtagcgcttcccatggaccttggtcatgatgttcttgtcatagtagtaacggagggcgcggctgagcttatcgtagttcatgttgggtttgctcttccgctctccccagcgccgggccacctcgtcgggatccgtcatcttgaactccccgttggtgccttcccaggtgatgcagctggagttggagctgtccgacaggagctcccaggc

SEQ ID NO: 461961 - DNA, 577 bp, Homo Sapiens
  misc_feature (290)..(290): n is a, c, g, or t
cctgtttttcctccgtatttaattcggtatcacaggagcaccaataaatagtttcttcccgcccctgcaatcttcctcctgccccgggcagggcgttaggggccggcgatcccgtcgggggcaaggcacctgcaacccagaacgcagcagctcaggccagctgaactgccgcgcctgcggaattcccgggagagttccaaagcggtgcgtccaagttttccggcagtgggcggggcctaggaacgcccccgcgccccgcgccggcggagcctcgaagggacttccccccnaagagggcggggcccactcagggggcgtggttttcgtcagcggctgtcacgatgacgtccatccaaatgcgcatggcttcggggctcggagcccaccatgtagaaaaggcgttcgtaggttttgacgcagaaggtcaggcgggggttggggctcttgaaggcacagcgtaagtggtcataatagacttcctcaatggcctggaagtagatgacacctttgagcttggtctcttccttgtccgcatagtaggccaagcggcgggcttggcggtcaaagcagaaccatc

SEQ ID NO: 461962 - DNA, 724 bp, Homo Sapiens
  misc_feature (114)..(154): n is a, c, g, or t
  misc_feature (188)..(206): n is a, c, g, or t
cttaactccaactccaaaattacatcaccccctccctcaaccaacacccttcagcggcctccccctgcacatcaggtaactcccaagctctggctgggcttctgatgcctcttnnnnnnnnnnnnnnnnnnnnnnnnnnnnnnnnnnnnnnnnngagatggagtcttaccctgtcacccaggctctcnnnnnnnnnnnnnnnnnnngctctgatgtccatccacctctggcttcctgttgcctttggaataaaatagaaattcctcccactgtggaccctccctatctcaccttcctctccttccccggcacacaccagggtatgtcttcaccggccttaagttcctccatgttccaagcttgttcgtgcctcagggcctttgcacttgctgaccttcttgctgaatctcagtgcaaatgtcccttcttctcatagtccttcctatccccccaaaccagttaccccacaaatcaacacccatctcagctccgttttgtcatctgcactgcctcaaattatcttgatcatttatttacttgtagaaccagtttattggagaatctcgaatccatgggctctgaaacaaaaccattttactttttcctaattacttttttccatcaagctctgcagaggtccccttcctgctgggtcttcctagcaggctgatcccgacacgtttcagaccatcctagtcactgaaaggcaggccaggccagctca

SEQ ID NO: 461963 - DNA, 683 bp, Homo Sapiens
aaaattacttgctttatttaggaaaccccatcaaccccagctctttggctcaggcaaatgaacgtctctcttttgtgttcccaggatgcccataaagagaaacagtttgtggctcatgcatgggggcgtggctagtggaagcccctgactgaagcaggaaggcgtggctgaagcacgactgataagtgggggtgtgattagtggaagagctaggctgatgaatgggggcgtggttagtggaaacccgtaattgacggatgcgggcgtagcaagtggaggagcttggctgatgaatgggggcgtggttagtggaaaccccacgactgaccaatgggggccatggagagtggaggtgcgtggcttgtggaagcccatgactgatggatgggggtgtggctagtggaagagctaggctgacggatgggggcgtggctagtggaagctcattactgatgggggcgtggcgagtggaagagcttggcggctggaccccggcgctgctgctatatgtgggtgtgtcccgcagacgaccgcgggccgcaaaaacccagattacttggtttaacagttgcccaaatctcagtcagagaccttattagccccctcctcctgaatcccagcttcccacgggactgtttttcaggcagaatttcaaagttttatggcaacttttacagaaatcc

SEQ ID NO: 461964 - DNA, 475 bp, Homo Sapiens
  misc_feature (11)..(11): n is a, c, g, or t
ccgggggaagnctaaagctgttccctcgttgctgggccccccgtgcctgcctaactccctaaccctgtgaacctttgcaacaggtcaactttaagctcctcctaatgtgtccagctaatgtcaagcgggacctacagctgctgtgaaagatgaaatgactcggcttaaccccctgcgaggcccatagtgagctctgcatcttagcagggagacagctagacctctgggaacaagggagccctcaccatgtgtgacctcccattcaggggcgtgccccgtcgagccccgtgcttcctctggggaggaggtgctggcttgggggggtgtggctcgtggccatgctggcagtgggtcgtgttcgctccagtgccaacactgggcagattccccccgacatcatttagacgtgtgcctttattcagtaccagggtaccagggccggcctgggtgccaggtagggaggcaggagcaagac

SEQ ID NO: 461965 - DNA, 664 bp, Homo Sapiens
  misc_feature (15)..(15): n is a, c, g, or t
gtaaccgccgccagnaaagaaaaaagaatcaacccaccaagcagtggtgggaccagcagctcacctattaaagcaattttccccagcccaacttcactggtggcgaccacaccaagccttgtgactagcagtgcagcaactaccctcacagtcagccctgtcctccctctgaccagtgctgctgtgacgaatctttcagttacaggcacttcagacaccacctccaacaacacagcaaccgtgatttccacagcgcctccagcttcctcagcagtcacgtccccctctctgagtccctccccttctgcctcagcctccacctccgaggcatccagtgccagtgaggaccagcacaacacaggaccacctccattcctttgtcctcccctcttgggaccagccaggtgatggtgacagcatcaggtttgcaaacagcagcagctgctgcccttcaaggagctgcacagttgccagcaaatgccagtcttgctgccatggcagctgctgcaggactaaacccaagcctgatggcaccctcacagtttgcggctggaggtgccttactcagtctgaatccagggaccctgagcggtgctctcagcccagctctaatgagcaacagtacactggcaactattcaagctcttgcttctggtggctctct

SEQ ID NO: 461966 - DNA, 742 bp, Homo Sapiens
  misc_feature (471)..(496): n is a, c, g, or t
gccagctgacctgaatgcctgtctttgctattctcggggaagcagtcagtccaatctgcatgctgcatttgtttggacataaaattggattcctgcttgcacagacagctctgccatgaatctgtaggaactttgactggcaacgagatgggattatagctcctgcatcctcccttcatatgggaactataattttacctgccaaggcagtcctccagagccatcccttgattctcccctccaaacacacacctcagacttctgcaggctcaacacaaacccaccactgaccaactcccaaggctccggacttaggaccacccattgccccggaatacctagctgctcagagccgccaacccttatccctccccaacgtctcaatacacagcaggggtgaggaaatactccaatcaacacatggattaatttcaacacgcttgataaagagagtcataaagtcatgtggtnnnnnnnnnnnnnnnnnnnnnnnnnnccagactctattaccagcacctcaattgttatctgcttaaagttgtcaagcggtgttaagtgaactcgggtaatagtacctcaaagtacttgcagagatgctggtgaacaatgaggcttattggcaggtagtcattttcggaataaaattaaatgcaattggagtggtgggaggcctttaattctgtgtacctgcccggggcttggagctgtaaataatcagcaaccctaagcctttcttctcccc

SEQ ID NO: 461967 - DNA, 498 bp, Homo Sapiens
atgaaacggacctcactggacccattcttttttgcgtagccctgggagccaccttgcttctggcaggaaaagttcagtttggttatgtgtatggcatgagtgccattggctgccttgtgattcatgccttgctgaacctgatgagctcttcaggggtgtcgtacggctgtgtggccagcgtgctgggttactgcctgctccccatggtcatcctgtctggctgcgccatgttcttttcactgcagggcatctttggaatcatgtcatccctggtcatcattggctggtgtagtctctcagcttccaagatcttcattgcagccttgcacatggaaggacagcagcttcttgttgcctacccttgtgccatactttatggactttttgccctcctaacaattttctaaagaatgtttgagatggcatttcaagactctgtttgctgtccagattattttggaaatatattaacattcaaatttggggatatgaattctg

SEQ ID NO: 461968 - DNA, 645 bp, Homo Sapiens
  misc_feature (159)..(187): n is a, c, g, or t
acacatttatttctcacagttctggaggctgggaggtccaagatcaaggtgccagcagacatggtgtctggtgagggccgtcttcctggcttgcaggtggccatcttctcatcgtatccccaggtggtggagaggaaaaacaccatctctcccatgtcnnnnnnnnnnnnnnnnnnnnnnnnnnnnngacggagtttgggctctgtcactccagctggagtgcagtgtcgagacttacacctgggaacaacagatcactgctccaagtgctccacaggggacagggccacctggctcccggggctgtctgtccagctgggatttacataataggaaggccccggggagcctggccagcttccctggctacctctagctgccgctccctttctctgagctctacagtctgaaagcatctgtcagcagcactggctggcagcctttgcacctctggcatgaatacaggcagctgaggttgggaagacggaaggcaaataaatagcacagcagacaggccctggtgtggtgggttcacgaagagagagagacgagcccagatagtcccccagcgctaacttgttcccgaagccgctgcgtccgacaggaacacgtggatgtcattttactgccccctcgttccgaatt

SEQ ID NO: 461969 - DNA, 821 bp, Homo Sapiens
  misc_feature (665)..(665): n is a, c, g, or t
aggagattcggcacaggatattctgaggatgccaaatattttgtcctcctcaatatcctggttcctagttgtccctcagttcctaggttaacagtctcacctgtctcacctgcaggcttaatgggggtctttcgtaatgtagaaaggatacccttttctttgtaaaggctgagcctgagggcttacaattccctggagaaggagagtaagacatacgggaactccctctgggagatagagggatatgccaggccaagagagggttggaaggagaagagagaaactgaggtcctgtagaagtctgccaggggcagggaccaattccggcatgcagcctaggagcaggagggcaagctctagcacatctggaaggagcagctggattgttgagctgaggcagttctcctggggaagaatccaaaagtgtcccagtaaggggcctggctcaggagacaaggctatcctaagtggggatttcacagccagtagcaaatacctggaatcaagaacttcagtgacagccagagacccaaacagctggacaggactggtacccccagtatgaaggcctgtcccatgcccagccccactagtcaataccagcaaggagccagggaggacaacgagggtctggaacatctgcccccaatgcacacacatgcgtncttccccacagccccctggaggccaaggctgtcctcatcctaaagccccctcaccctaagtaatttttaaaggtaaggagtaggcagggtgattcgcatttatagggatttcactgcaggggagctgaggaaagacttttcatggtccgggcttct

SEQ ID NO: 461970 - DNA, 860 bp, Homo Sapiens
tttccaagctcacccggcccattttgtaaggtctgagggtgccttggaacatacccttcgaagctaagtactaaatgaaatttttgctgctgataattttcctggctctaggagttttgatatttgctaccatgatctactatgccgagagagtgggagctcaacctaacgacccttcagctagtgagcacacacagttcaaaaacattcccattgggttctggtgggctgtagtgaccatgactaccctgggttatggggatatgtacccccaaacatggtcaggcatgctggtgggagccctgtgtgctctggctggagtgctgacaatagccatgccagtgcctgtcattgtcaataattttggaatgtactactccttggcaatggcaaagcagaaacttccaaggaaaagaaagaagcacatccctcctgctcctcaggcaagctcacctactttttgcaagacagaattaaatatggcctgcaatagtacacagagtgacacatgtctgggcaaagacaatcgacttctggaacataacagatcagtgttatcaggtgacgacagtacaggaagtgagccgccactatcacccccagaaaggctccccatcagacgctctagtaccagagacaaaaacagaagaggggaaacatgtttcctactgacgacaggtgattacacgtgtgcttctgatggagggatcaggaaaggatatgaaaaatcccgaagcttaaacaacatagcgggcttggcaggcaatgctctgaggctctctccagtaacatcaccctacaactctccttgtcctctgaggcgctctcgatctcccatcccatctatcttgtaaaccaaa

SEQ ID NO: 461971 - DNA, 529 bp, Homo Sapiens
aaaatgaggagattttttattgaaggaagtggcaaaaaagcacaaggaaatatgttcaatatcatcaggcattaggaaaatggatattaagaacacaagctacacaacttttggcatagttaaaataaatagttacaacaccaaatgctcacaaggatacagagaaaccgagtctcacacattgctggtgatagtaaaatggtattgtgggaaagtgtatgatgttttcttaacaaaaccaaaaatgatattaccttatgaccaaggcaattgcacacgtgaacatttatttcagagaaatgaaaacttacatctacaccaaaacctgattgttcataggcagctttagaaccatgtttgctcacagtagctttattcataatagccaaaaactggaatcagatcagatagatgctcttcacaaggtgaatgactgaataaactatgatacatccatatcatagaataaaaggaatgaactactgatacgtgcaacaacccggatacatttcaagggcgttacgctgag

SEQ ID NO: 461972 - DNA, 458 bp, Homo Sapiens
  misc_feature (377)..(377): n is a, c, g, or t
  misc_feature (388)..(388): n is a, c, g, or t
  misc_feature (405)..(405): n is a, c, g, or t
  misc_feature (411)..(411): n is a, c, g, or t
  misc_feature (432)..(432): n is a, c, g, or t
tcactcagcgtaacgcccttgaaatgtatccgggttgttgcacgtatcagtagttcattccttttattctatgatatggatgtatcatagtttattcagtcattcaccttgtgaagagcatctatctgatctgattccagtttttggctattatgaataaagctactgtgagcaaacatggttctaaagctgctatgaacaatcaggttttggtgtagatgtaagttttcatttctctgaaataaatgttcacgtgtgcaattgcttgggtcataaggtaatatcatttttggttttgttaaggaaaacatcatacactttccccacaatacccttttactattcacccagcaatgtgtggaggacttcgggtttcntctgtattccntgtggaggcatttgggngtttgnaacccatttatttttaacccnggccccaaaggttgttgtagggcctg

SEQ ID NO: 461973 - DNA, 441 bp, Homo Sapiens
  misc_feature (15)..(15): n is a, c, g, or t
  misc_feature (24)..(24): n is a, c, g, or t
aaaccctgggctccnaccctccgntggccaaagtcaacgccaaagcaagtttgcggttaacaggacgggtgggggcctctgcatatgtgcagagtacggagggcccagggacgcgaggctccccgatgggcaacctcccctgcctttgcttttccccagagccccctcctggcctgcgttcggcatcttctcgggtcgtcatcgccctctgcggtgcctgcgctcggggtgagggtttttgtcggcttttgttacatcaccgatgtaacagtgcctggacgtagtaggtgctcaataaatatgttgttgaatgcgcttcagtctccccgaatgcttagtcttccgggcgctctcatcgctctcctaccttccccgctacacagctcgaaggtcccctctccgggaagctcaccctgtcccacttgccaggaagaatcaagc

SEQ ID NO: 461974 - DNA, 479 bp, Homo Sapiens
caaacgcaagctggaggcaccagcaactgacaacagcgatgggtccagttctgaagacaacagggaagaccaagatgtgaaaaccaagaggaaccggaccgaaggctgcgggagtcccaagccagaggaggcaaagagagaggacaaaggcacaaggacgccgcccccgcagatcctcctgcctctggaggagcgtgtgacccacttccgagacatgctgctggagagaggggtatcagcattttctacctgggagaaagaattacacaaaatcgtgtttgacccacgctatctcctgctcaactctgaggaacgaaagcagatatttgaacagtttgtcaagacaagaataaaagaagaatacaaggaaaagaaaagtaaattgctgctagccaaagaagaattcaagaaacttctagaggaatctaaagtgtctcccaggaccacgtttaaggagtttgcagagaaatacggccggg

SEQ ID NO: 461975 - DNA, 226 bp, Homo Sapiens
  misc_feature (34)..(34): n is a, c, g, or t
  misc_feature (36)..(36): n is a, c, g, or t
  misc_feature (112)..(112): n is a, c, g, or t
  misc_feature (214)..(214): n is a, c, g, or t
caccttggtccactttatccgaggggcatctacngntacgcttggccgtggctgtcagggtaaagagacagggcagggccacccagtccgccagcgcagcctgcactgaccnagaccccagcttctgcatgtggagccccctttcgctggcatcggtgatatcctgtgtgccctgttccccagccacaaagagcagcatctgcagcatcaatanagccaaggccca

SEQ ID NO: 461976 - DNA, 522 bp, Homo Sapiens
  misc_feature (12)..(12): n is a, c, g, or t
  misc_feature (33)..(33): n is a, c, g, or t
  misc_feature (40)..(40): n is a, c, g, or t
  misc_feature (65)..(65): n is a, c, g, or t
  misc_feature (114)..(114): n is a, c, g, or t
  misc_feature (122)..(122): n is a, c, g, or t
  misc_feature (482)..(484): n is a, c, g, or t
  misc_feature (488)..(488): n is a, c, g, or t
tcaatcatctgnaaccctccccttattgaacanctttgangtcaatggggttatcaatccctccnttctcaattctgggcctgcaaaggttaactgaacagccttgggcaaagnaacccccnggaacaccctctgctgccccattttccctcttcagaaacggacgtaggggatgtgtcaggcactgcgctggcacgaagagggtgggatggagaactgtgaattctaccttcaagggggaggcaaacccacatggacagagaagacacaggaacagggcccagcggcacaggggagacttggctgatttccagcatgggaagcagatgcccctgcagtggtagagacactggagcaagatggttacagggccccagagacagactcagccctccaagcctgtgggaggggagggccactctactggggggcccatgaccacagagggggcagggcctggctgggtgggcgctgctgggctnnntttntataggggcaggtctgaggcagttctgggagcgt

SEQ ID NO: 461977 - DNA, 404 bp, Homo Sapiens
gtaatacgtgctcattccatcttcaatggaacaaatgaatgttgctgcatcgagcatctgtttactcacttcttcattctctaaccactctattgattctttatcttgacccgcaagcatacttacgtctcatcttggtgacaaagagccctcccgtggcccaggcacctcgctgaactgctctcttatttttaaccgcactgactttgcccactcaacacttcaactctgggcttttggtcctccagggcatcttgctgaaactactctcttgaaggccgccagtgagttcctacaaagtgttactgtctgtctgaaatccctaaaatttccaacaatttaaaattgttctcccctttaacattttcttcttggattgcccggcatttttggagcgaggcata

SEQ ID NO: 461978 - DNA, 430 bp, Homo Sapiens
  misc_feature (30)..(30): n is a, c, g, or t
  misc_feature (42)..(42): n is a, c, g, or t
  misc_feature (47)..(47): n is a, c, g, or t
  misc_feature (276)..(276): n is a, c, g, or t
aaggcacaaagctgttctgacagcaacctncaaagacaggancgtgnccgtgcatccctagcaggctacagactgaggctgaaaagacaggagtgtggccgtgcgtcccctagcaggctgcaagactgaaggctgaaaagacaggagtgtggccgtgcgtccctagcaggctgcagactgaggctgaaagacaggagtgtggccgtgcgtccctagcaggctgcagactgaggttgcagcgagcgcgccatgcagtcgcattcctcctcccaaaancgctgcacgctgattggggggaaatgcagacgtgtcattatgcaggtgccactgacagctgggactgctggactggcagaaaggagacacagctgccactcaccagtgagaagaagcaatacagcctggcaccaaatgtgacctcgttccgaat

SEQ ID NO: 461979 - DNA, 335 bp, Homo Sapiens
  misc_feature (41)..(41): n is a, c, g, or t
aagctcctacaaaacaataccattattcttggcctgtggantggctattctcctaagtgttcacaaccaccactgattttcccacttaagatgttctttccttggttgcttgcaaaacaaaatggttcacaagaatgacctatgaaaagtcattacagaagcagaatgagcataacaatagaatgcctttgtgtggccctgtgctcctacatgcactgttttgtttcttcctcatattttcacaatcctctgagaaggtgccatctccccaactttacaactaagaaaactcaatattctcttaacatacgtggattagagtaacttccttttcc

SEQ ID NO: 461980 - DNA, 548 bp, Homo Sapiens
  misc_feature (36)..(36): n is a, c, g, or t
  misc_feature (40)..(40): n is a, c, g, or t
  misc_feature (48)..(48): n is a, c, g, or t
tttcatgtttgctgaccagacgttctgcattgcttnaagngagtgagnggctgggatttgcttttacagagaaggaggccttgcaaaagagaaatagcttaaatgccacttcattgggcacctaaagacctgctactttctttgacttaatatattgagtccagaaagaaatgcctggggcactttgaaaacttcacaggcccactgctgcttgctgaaataaaaaattgaagtgaattggtacaaaaatctccctcttcctcccaactccccgccacccccgcccctgggcactccaccctcctggctttctggccttctccagaccatgtcaccatgtcacctcgctcacgggtaaatcctcgcctgcctccctgctggctctgcgtttcccaggtcacaggccctggagactcctttctgtctgaaatggcgccgcatgtagaggaaaacacagccaaatattctcggtttaaaaaaggagatggcatgtcagcagcagaagataatattattgccattaaacagagcctgctattgagaatcac

SEQ ID NO: 461981 - DNA, 474 bp, Homo Sapiens
attcaatggtcgcgtccgtagcctggtgaatcgcgcggatctgatcaagattcagctctcgcgccaacaatctgcgtgaagcaacatcagagaggaacttcgctttttcaactgtacgaatgtcgcactgctactggcgtgcagttcaatcggcggaatatcaagttccagaatccccatatcctgaacaatcagcgcatcgacaccggtctggtagaggtcagtaatcagccgttgcgcgggttccagctcatcatcatgcaaaatggtgttaagcgtgacgaaaatttttgcaccataacgatgggcaaacggcaccagctcggcaatatctttcaagctattactggcattatgacgggcaccaaaaccagggccgccgatataaacagcatcggcaccgtgcaaaattagcttcgcgtggcaatgggcgggcatcggttgccgggctttaaacagtttcaagtcgatgag

SEQ ID NO: 461982 - DNA, 477 bp, Homo Sapiens
  misc_feature (392)..(392): n is a, c, g, or t
  misc_feature (435)..(435): n is a, c, g, or t
  misc_feature (462)..(462): n is a, c, g, or t
gaaaagcctgtgttcaggagggagttgccaaggcctcaagaaagatccctcctgagtgccagggattacagattcccaggggactttcctaaggcctcggctggcccctccagccctgctcacctcggaagctcagctcactgtcactaaccccacagtcctctgcagagctctccttctcctgcttgctgctgccccggctcctcttgacgctcttatagaactgcccccagcggtgccgccctgcatccttcttcaggcgtttctctttggcccttctgttctgaaaccaaacctgccacacaagcacaagggacatactcagggggcgtccaccacaaacccaaagcccccagggaccccctagggcgggcggctgggaagcaggactngaaggcctgaatgggagcacaggtttggggagtgcgatggggncccacccgtttttcccagggtggggcntcagaaattttgtgt

SEQ ID NO: 461983 - DNA, 316 bp, Homo Sapiens
ctttagatgggaggatcttttgaggcccaggagttccaaggctacagtgagctcatgatctcaccccatgtataccagcctgtgtgacagagcaagatcccgtctccaaaaaataacttaggagagacaacaaaaatatgggcaaaataaggagttaaaatggaggacaatacaaatggtatatacatacatgcccatacacatatacctataatctctacacacgcatgtatgtatatgtgtgcatgtgtaacttttgcttatctttcattctggcaaaaatgtaaatgaccaggccaggtgtggtgactcatgc

SEQ ID NO: 461984 - DNA, 480 bp, Homo Sapiens
  misc_feature (21)..(21): n is a, c, g, or t
aggaaacccctgaatacaaanggaacggatgccgaaagtaagaaagactgaaggaaaaacacaagcctgccatggtggaagatgaataaggcccctgtgcaatgacgaaactggccgagtgccgccgacctcttgtagctgttccgcccgtgcaccatgagcagcctgcctatgtgccggaactgcgtgatggagaagtcggccgccagcgaggcctgtttaccctcctttccctcaatcccaatcccacagtctgctgcctgaatcatgctgacatcatttcctccatcaccgatggcgcaggtgcgtctccctgtgtgctgctgcagcagtgtcacaatgcgggccttctgggtgggtgagcagcggcagcaaaccacggcagggcactggcaggccagctccacaaattcatgctcgtagtactttagacaaacctccagagagtccccagatatgactagtgcacaatcatgcttc

SEQ ID NO: 461985 - DNA, 534 bp, Homo Sapiens
  misc_feature (57)..(57): n is a, c, g, or t
ctccctgtgttcaccaatgtctgtctcttgcttaaatgaacacccacaacttcctgncctggtttcctgcatccgccctgaccccctggctgtgggatctcccatacctcaaatctgactgtgtccctgtggaaaggtttgggtttctgacctgggcagctctatgtccggcacaggggttctgctgatagcacaggccacagattggcaaggagggaccaggttaggaaggagcagctgtggttcctagttgggagataactgaagcctaggaaatcctggaataagatagaccaatgcatcgataaccctcagctccaaatctgagctgcaccaggacaagctgactctggtggcaacgttctccagtctctgcattttcagctcgctgtgtgccaagagagggctggcaggtaccagcagctttcactttcattaggaaccgggacgaataatccaactgagctgcctctgcaccagaactgctgggacgtgaagactctcccctggctccccaggccagccactgcagcc

SEQ ID NO: 461986 - DNA, 651 bp, Homo Sapiens
  misc_feature (537)..(537): n is a, c, g, or t
  misc_feature (551)..(551): n is a, c, g, or t
  misc_feature (566)..(566): n is a, c, g, or t
  misc_feature (582)..(582): n is a, c, g, or t
  misc_feature (621)..(621): n is a, c, g, or t
gttttcattccaaactggtagtggtatatagaattaaagataataatgttgcttcttattcaaactgttggtcatatgtacagtatataaacataaaacacacaaggaaggtattatgtatgcagtagtatactagagtttaggaaaatgaaaattttagaaaatatgttttgtcaccctgttggtcagaaagatgtctttctggttttaacgcatgcaggcatgtaaatatttgtctggagtcacagtattaatgaatgagatcttaagcatctggtgacatcaggaactctgtgtgcagccacttttatttgtatattgaaccctaggctagtgccccaagctgcactattgggaatggattgtggctgaacagcaaatcaaaacaccagaaatatttttatatgttaacgtcatattatgttaatgttgctgaaaacaaaacctaacaaaccttgatgtaccagtccaataccatgtgcgctgagtgataaagttaaatgtgctgtgcttcccacccttgtcagagggagggtngcttgtgttatttnactgcttttgaagtncaggatggtttacttngtgcggttactggagtagcggcaacagtcttttcaggtnaggtccctccctttgtttgatcttgggttc

SEQ ID NO: 461987 - DNA, 488 bp, Homo Sapiens
  misc_feature (11)..(11): n is a, c, g, or t
  misc_feature (47)..(133): n is a, c, g, or t
  misc_feature (251)..(251): n is a, c, g, or t
  misc_feature (462)..(462): n is a, c, g, or t
  misc_feature (468)..(468): n is a, c, g, or t
tcggcacaggnattcctagtgcccaggtctctcacccttgcctaccnnnnnnnnnnnnnnnnnnnnnnnnnnnnnnnnnnnnnnnnnnnnnnnnnnnnnnnnnnnnnnnnnnnnnnnnnnnnnnnnnnnnnnnccatagtgggtcatatttcagttaggatgaaagactgctgaggaagctatgacaggtcagtaagaaccatcagcctgtcagctttgtttccagaagtgaccctgagccctcaagcttnggtacccacatcccacatgagccacttggccctcttgggtaattgtgttggataaagattagggtcggacccttgctcttttttccttgcttatctgttactcagctatgaacatctgacacagaaatgggagaggttaccagccccggtgaatgttcctggtaaaatcttgccctcgggaaagggtttgggattttgggtgaggagtttnggcctnggctaacacagggatttttt

SEQ ID NO: 461988 - DNA, 252 bp, Homo Sapiens
  misc_feature (47)..(47): n is a, c, g, or t
  misc_feature (57)..(57): n is a, c, g, or t
  misc_feature (120)..(120): n is a, c, g, or t
aacagactagtctcaaagtacagcacaaaatctcttctctgccttcncttgtgatgntccagagagcatctgtggttgtgatttggaataagtcatatttatttggtttactgtgcctantcagatctctgtatgttgtgtgtgtttctgtgtcctggaattggatgcgtgggactcgttctgtccgcggagtgcactctttttttcagtgtggcccacatctcttgtaaatgtttgctgaagagttgtgtc

SEQ ID NO: 461989 - DNA, 380 bp, Homo Sapiens
tcctgtatgccttttctaagtgaggggaggcgtcaggaccagggtggcttagcgtcaaaagaatgggggaggaagtacatttgtagtcccttctccaagccagtggttctcaaatgggggcaattttgccctgcagggaacatttcgcaatgtctagagacatttttgggggctgtcacaaccaggggtatggttgggggatggcactactggcatctggtgaggcccgggatgctgctcagcatcctacaatgcaggggacagtcccctcaaaaagaatcacctggccccaaatgtcagtaatgtcgaggtggagggtcaatctctaagtcaatcttcagccatgtccagaacagtcccaaaggccccttgcagaggag

SEQ ID NO: 461990 - DNA, 450 bp, Homo Sapiens
  misc_feature (437)..(437): n is a, c, g, or t
ccgggcattttcctaggcactagcaacgccaggctgctggtttcgtgtcacatgttccaaaagggaaggctcaccataaccaaggggatgcagcggggacatttccggttgccccagaattggttaccagggccacagctgtggacaaagatgctaaataaaccacctcctaaagagatcatggaagcttagggccagcccccttccccatggccctagtagaggcggaagaattggtcctgctgctgtgagctccccttccccctactccccactcctccctgtctgtataagattggaatggtcaagagagatgggagtgagggtggccactgtgttggtgagtgggtgcccccccatcacccccttgccccgccaagggaaagggagggcccaagaggatccttcttgagacaggatgttgccagggaagaagngggttggcaccac

SEQ ID NO: 461991 - DNA, 468 bp, Homo Sapiens
  misc_feature (309)..(309): n is a, c, g, or t
  misc_feature (326)..(326): n is a, c, g, or t
  misc_feature (331)..(331): n is a, c, g, or t
  misc_feature (344)..(344): n is a, c, g, or t
  misc_feature (382)..(382): n is a, c, g, or t
  misc_feature (391)..(391): n is a, c, g, or t
  misc_feature (396)..(396): n is a, c, g, or t
  misc_feature (422)..(422): n is a, c, g, or t
  misc_feature (455)..(455): n is a, c, g, or t
aattgtgctgggtggttggcaaagcaggcattttcaggggcttttctgtgatcttatcctgtctcttaaaagcagctggtactcctgactccctactctaggttatgccaaacagaggttgaggcctgagacagacatttgtcctcttgccctgggagctaagcaatagcttctgtattgtgtttgcccgcagaggaccacagggtgttcactcagtcaccttgggccagcgccacttagaatgcatctgtaccgagcctcacttatgcctcctgccctcactgccctcactggaagcaccttccccanctgcccctcagaaaggnccccnacaggacctgggngctggggctttgaagaggtcctggtggccctggctggncattccatnccagnccgcaccgtcaggcgagaagtcactnttgaccggaccatcatgcccgatggcaccattngtcaccacagtca

SEQ ID NO: 461992 - DNA, 464 bp, Homo Sapiens
  misc_feature (34)..(34): n is a, c, g, or t
  misc_feature (45)..(45): n is a, c, g, or t
  misc_feature (50)..(50): n is a, c, g, or t
  misc_feature (69)..(69): n is a, c, g, or t
agggatggttttgggatattttgtgaatcccgtnaattctcatcnccgantctgcccccagggcaaagnctgagccaagcaggtcaagcacgatctggaaagacgaggcttgtggagtcttcctttattcttgtgctctctgcagcaagaaaacaaatcagctccgtatttcacgggactgccaagatgagtttcattttagatgctgtgactcccgctcctctgatattttaggaagaaagacaggaacatggaagtcgtgcctgcccaaatatctcatatatgttaagtcctcaacagttaaggaattgtgaaatggctgaaaaggacatggctcaaggacacaggaatcaattccagtccaaaggcgcttttgagaggataacacttgtccttacattgcaaaccacgcagcttaagaaaaccctatggagaatggatgtaacactgtgtcctggacagtt

SEQ ID NO: 461993 - DNA, 457 bp, Homo Sapiens
  misc_feature (212)..(212): n is a, c, g, or t
  misc_feature (425)..(425): n is a, c, g, or t
  misc_feature (444)..(444): n is a, c, g, or t
ttttttttgctttcacatttaatccaaggaaaaagaaagaaaaccaatcagtgagaaaactcaagaattggatggctgagggagggaacagaggaagcgcactggggctgggactgaatatggacagtggatggtagggtcctcactctcttgaggtccctcaaatacaagagtccacaatggcagggagggagaacagagtcatagagctntggtgggggcacacacctgttccaacccagccccagccctgttccagggtgagccaaggactgacagcctctgctaggtacctggggagggctgtgggagtgagggctcaggcaggggaggtagggaggctgctcagagaggaaagaccgaggaagagacagggaggggaagggccccaggcttgcccctttgaggcatccctagcagttaanggtgccttgaaggccaggnacccaaccctttt

SEQ ID NO: 461994 - DNA, 416 bp, Homo Sapiens
  misc_feature (313)..(313): n is a, c, g, or t
  misc_feature (397)..(397): n is a, c, g, or t
tatttttggtggcagttttaacaaaatgctgatccacagcatcgagctacctccagcagatgaaagcaaggatgtgccgctggctctgtggcgcaattagcattctcctaaacaaacgagcttcaacagagctgttattaagcaggcctgtaattaagtatatgccctttatcataacgatcatgcttaaaaatgggcatgatgcatgggaactctgttattaatgctgtaatcccaaactgaagtgccagtacataggaaatcaggcatgtcagggcctggtcaccagagtgtttgtaaaatacattaaagnaaaaaaccagaaaacaatgagctcattcaactgttctttttacaatcagggcactacaagtcaagggggttgtgaatgcttacnggtttctacaagggtttaa

SEQ ID NO: 461995 - DNA, 541 bp, Homo Sapiens
  misc_feature (27)..(27): n is a, c, g, or t
  misc_feature (65)..(65): n is a, c, g, or t
  misc_feature (74)..(74): n is a, c, g, or t
  misc_feature (94)..(94): n is a, c, g, or t
  misc_feature (102)..(102): n is a, c, g, or t
attgtcctgtcctggttgttcaattgnaacctctggtgggaaacaattaaccctgcggtgtgttnaattgtcangccacatagattgtaaatangcctaaanaatacaagctgcaaatcaatgggctttctcccttggaaagagggaaagggtccaggaggtgctgggaagcagtgaagggaagagaggagggtccccaagaaatcctgcagctctgattctaacaggtgccctgctccatctccccacttccgctccctctcttttcctctggttctccaagtcccaggtcaggcaaaggggccagttggaagtggtggagggaagggaagggccttttccttttcctaccaggaatcctagatttggacaagggagaggttacaatccagggcagaaggaggagggttaaggagctgaggagagcctaggccctgtccacttctgttgactggtgtaatgactagatttgaggctcacccttttaactgcattgccccaagagagcactgagctcctaattgggggtgttgagaaagtt

SEQ ID NO: 461996 - DNA, 474 bp, Homo Sapiens
  misc_feature (14)..(14): n is a, c, g, or t
  misc_feature (70)..(70): n is a, c, g, or t
ttgctaacttcccngggctcttggcaagggccaaattctttccactttattaatcccttgaggagggatnaacccgggctaggatcctgagcaacacatgcccctggagaaggcccgagataggataccccagagcctgtgcagccccaccctagagccttcccagcctccccaggcttcctaaacccattttccccaaccagtgcccgtaggcaggactatgttccatctgagccatggctgtcatctccctagtcactcatccactaggttccctagaagtgcaggctgcaaatgtctatcccaaatcctccctaccatagcaaagtaggatctccccttggtgaacgtcagctagagctgccctggaccatgccacactggctgtaaagggctttttcctggtctggattacatagaccaggaaaaagctactgcactctagcctggatgacagaaggagaaacctgtctc

SEQ ID NO: 461997 - DNA, 440 bp, Homo Sapiens
  misc_feature (323)..(323): n is a, c, g, or t
  misc_feature (383)..(383): n is a, c, g, or t
ctttggacccatgcccccacaaacggcctccaaaagtccctccaaggtttcttagagggcaatatttcctcattggcagtcggccacgtaggtgcccaggtggcagaggatactgctggccctgtcccctgtcttctgtgtgagttgatacggtagggggtgggtgtggggctggcattaagttctgatgcccagctacaacgtggatgaactttgaaaacatgttaaatgaaataagcccagacacaaaaggacaaatatgattccatttagatgaggcatctagaataagcaaattcagagtaccagaaggtagaggttgnccagggtctaggggaagggtggaatagggagtgaggctgcaaacagattctctgggatgnatgaagatgttctggaaatggagagtggtggtggttgcataacattgtgaatgtact

SEQ ID NO: 461998 - DNA, 639 bp, Homo Sapiens
attcggcacaggggttgctgttgcgcacggctgcctccagagccttctggcgcgcggtagaagtgggagaacttgttgaagatgatggtgatggggagtgctaccaccaggatgccccctaggatgcagcctgaggtgcaagcttgccagccaccgtcactggcaccacatccccatagcccacggtggtcatgctcactgtgccccaccaccagcaggctgggatggtgttaaagcccacgtcctcctccttttcagctgtgtaggccacaccagagaacactgacacacccacagccaggtacagcagcaagatgcccacctcacggtagctgtgcttgagcgtggctcccagcgagcgcagcccggtggaatggcgcgccaacttgagtacgcggaagatgcgcatgaggcggaacacctgcaccaccttgcccaggtggccgaactccttgccgccctggtcgcccagtgccacaccagccagcagcgtgagatagaagggcagcacagacacaatgtcgatgaggttgagcgggtggcagaagaagttgcgcgtactgggcgccagcaggaggcgcgacgacacctcgaagctgaaccaggcgatgcagaagtactcgaggcgtcgcagcaccg

SEQ ID NO: 461999 - DNA, 259 bp, Homo Sapiens
  misc_feature (228)..(228): n is a, c, g, or t
tttttcacggtgccttcaagctttattgccacacacactcccccagcccttcctgaatggccctgtgcatgggaacaccagcttagagaagcaattcagggctaggcaagggccagaggactggatttgggactggggtgggtaggggggatctggagaaggaaagtgctaagaccaaagcccacccccaccccaggtttccctgagtggtgtccacccccagggttnttgggggctggcttttgcattgggggaaggg

SEQ ID NO: 462000 - DNA, 535 bp, Homo Sapiens
  misc_feature (523)..(523): n is a, c, g, or t
aattcggacgagggattccctttctctcacatcagccctgggaggaaggtcggaagattattgcttagcaaatcttgcataccagctaaagaggcaagtacaatgctatggtacttcctcccaggactcatcctccttccctccaggactcatctttgattgctgactcctgttggatgctcctagaaaggaaccacagctgagatccagagctcctatatccaaatctcctgtctggacccttccctggctctgaaagggatttcttatcttgtggatcaactctggggatccatgaatcaccaaaaaacacacgcaaacttcatgagggcagaagaaagatgggagtttgatgggagcattgctccagggcacaccaacaaggcccagattccaaacctggacttttgccacttcttaattgtgaacatctggggagaggcattcgttcatctctttaggccttgggtttcctcatcttgtgaagttggggataatttctctttcttccaacacaaagggncaaacatgattt

SEQ ID NO: 462001 - DNA, 410 bp, Homo Sapiens
  misc_feature (317)..(317): n is a, c, g, or t
  misc_feature (320)..(320): n is a, c, g, or t
  misc_feature (333)..(333): n is a, c, g, or t
  misc_feature (353)..(353): n is a, c, g, or t
  misc_feature (363)..(363): n is a, c, g, or t
  misc_feature (389)..(389): n is a, c, g, or t
gggggaccttgaaatctgggactggatttccagtactgtaccctggaacccactcttggggacctgaaccctgggattcaggcctcaaattccaagatctggactgtgggattccaaggggcctgaacccgagtttgggcctgaagtccttgctgcagacctgagtgctgtaaatctggggcttgagacctcccaatcttgactcagcaccccaatatctgagtgcagaaccccgggatcggatctcagactctaaaccccaccgtttggctggcttagcatcccaagacttggacctggggagaccctggaccctnganacaacccaaactnggacccgtgaaaactgggancctaagaagncccaatattttagggggtgtgggaanccccgaagtatttaaggtctg

SEQ ID NO: 462002 - DNA, 480 bp, Homo Sapiens
  misc_feature (32)..(32): n is a, c, g, or t
  misc_feature (61)..(61): n is a, c, g, or t
  misc_feature (164)..(164): n is a, c, g, or t
  misc_feature (400)..(400): n is a, c, g, or t
cgaatgaaatttaactacctgaaaaaagttgntgttgttccccgcttggccccaattttgnaaaaaaacgaacgtggaaaggctcccccccgcgtgctgaaaaagcagtggaacgtccttcctgaaaggcgcggctcaaactgctctgtacccggaaaactccnatttctacttcaacgtgctgcaggctgtcacgggcgtggtcaagcctcgggggccggcccgtggtcctggccgttttttccacgcccagcaacagcatccctggctcggctgtctgcgcctttgacctgacacaggtggcagctgtgtttgaaggccgcttccgagagcagaagtcccccgagtccatctggacgcgggtgccggaggatcaggtgcctcgaccccgtgccgggtntgcgcagcccccgggatgcagtacaatgcctccagcgccttgccggatgacatcctcaactttgtcaagacccacttcag

SEQ ID NO: 462003 - DNA, 374 bp, Homo Sapiens
  misc_feature (20)..(20): n is a, c, g, or t
ggccgtaacaggtcaggtcnacatgaaaggcagttggggaactggtggtgtgaacatcccttgatcccatcaagtagccccctgggaaagccacgtagtacaaggatgtgagtggaattggtatctgccacatgtccctctgttaagatcacaatttccatgacagagtcgctctctaatggagcctgtcaactcggcttaggccccagtggctcagagcacacttccacgagagaggcggtgtgggatctgaggcattaactgtgccttgtactgggaggaggcatagggcggcagaataccttttcgaagtccccttggaaaccagtacccggcacctatcatgcctgccatctaattacccggtaattatt

SEQ ID NO: 462004 - DNA, 351 bp, Homo Sapiens
  misc_feature (124)..(124): n is a, c, g, or t
  misc_feature (277)..(277): n is a, c, g, or t
  misc_feature (321)..(321): n is a, c, g, or t
tgggtcagtttctgtaaatgaaggacagttctggtcaaaggttttgccaaccttccttcctggccccacttcaaggtctccgcctgtaagaggatgtaggaaattgacctccagaatgtctctncctaacttcaggctcacagaaaacgtgcctgccagaatgtgccgctcctcaaaggttcccaagggattctaccttcagtctgtttttttctcccacatactccccacccccgtccaaactactgccaccttccaagacccctgtgatcccttnaccctctgcccacttttctctctccagcctgccccaggggcctntacccaggcagtctgaggggaccattcctt

SEQ ID NO: 462005 - DNA, 505 bp, Homo Sapiens
  misc_feature (49)..(49): n is a, c, g, or t
  misc_feature (102)..(102): n is a, c, g, or t
  misc_feature (149)..(149): n is a, c, g, or t
  misc_feature (408)..(408): n is a, c, g, or t
aaccaaacagggatcccattggaaaggaagaaccgtagtagtcgcttgnctcttgggccgaaccccaacggcccgcctgcttgggaggaaagaaaaagaacncccccgctgaacaatttaaggccagcccattggttgctctaggggtnaaggaccgaggcctcccctgggtgtccactggagcagcccacacgtgggggatcagccgacttcattcgatcgctggcgacagacccggcgacccgtaggaatgcgcgctggggctgcggctggagggcgtggcgacggcaacaggcgggtggctcgagtgggtgcgactctgggcgcgtgggactgagaactcctccgccgtggggaagatttttttcccagcagagcttatttattcagtctgtgggcggactcagnactgcagagcaccaacctcttcaatttctgccctctagactccaaatcttttgaaattagggaccaccattttatgccaaacatacagtaggcgcta

SEQ ID NO: 462006 - DNA, 510 bp, Homo Sapiens
  misc_feature (21)..(21): n is a, c, g, or t
  misc_feature (23)..(23): n is a, c, g, or t
  misc_feature (177)..(289): n is a, c, g, or t
  misc_feature (366)..(366): n is a, c, g, or t
  misc_feature (394)..(394): n is a, c, g, or t
  misc_feature (412)..(412): n is a, c, g, or t
  misc_feature (489)..(489): n is a, c, g, or t
  misc_feature (499)..(499): n is a, c, g, or t
gatacgaaatagacacttttntnttttgagtcagagtctcactctgtcacccaggacagagtgcagtggtacgatctcaagctcactgcagccgccaccgcctgggctcaagtgattctcctgcctcagcccccgagtagctgggattacaggcgtccaccaccatgcccagctaannnnnnnnnnnnnnnnnnnnnnnnnnnnnnnnnnnnnnnnnnnnnnnnnnnnnnnnnnnnnnnnnnnnnnnnnnnnnnnnnnnnnnnnnnnnnnnnnnnnnnnnnnnnnnnnnatgagccactgcgcccagcaaaataaacacattttataatttgtatgtggaaacatgttactatagaaagcattttnaaaggtacgttttaaaggtccactgttnaaatagtaaagaatgaantccgttagcgaaaatgtttttaggggagaacagctggatcaaaagggttctttgggattaggttgtttttagtaacntctgtttccnaaggaaacaca

SEQ ID NO: 462007 - DNA, 408 bp, Homo Sapiens
gcagtttttctcttctctttcacatcatcatctttgccatcggtcttatcctgaagatgtttttttaatcttggatctctcttgttcatatcagacaacctcatactttccgattcttgatttttcaagtcttttgtgtgagataatttgtttttcaaaggtgagggtgatttcgatttcgatttcgatttagaatctaattggtcaagttctttcttggttattttttcacctgatttacttttttcttgcttggatgaatttagtttttcagagggtatagttttacttgtcttagtatcagactggtttaatgtgttcattagaaattctttcctgtggactctggatcttttccatgagaatgttgggcttatcctgttcagacgaggatcccgggttagttcc

SEQ ID NO: 462008 - DNA, 476 bp, Homo Sapiens
  misc_feature (21)..(21): n is a, c, g, or t
  misc_feature (29)..(29): n is a, c, g, or t
  misc_feature (39)..(39): n is a, c, g, or t
  misc_feature (107)..(107): n is a, c, g, or t
aaaaactctgattcacttatnccgggagnaccccagcangcttgttccaaaagaaaaactggggacggggaacctgttttaggaaccctggggcatcccaaaaactnaccctgggcctggctccgaaggtcgctgaaccctcatcaccctggtttagggggctggaaccacctcgcctcatctgatgcttcacccaatgagctgggccagagggcaggtgccccattggacccagcaggaccccagcatggaaagcggcagccccaactcccaggcccggggccaggctgcagccccaggtgggctctcaggggtctgctactgcagcttagcccctgacgagatttgccgctgcccaccaacccactgcatccagactggactcttcaccctggttcctcttagtaacccaggactttatttgtttgccacctctgtatgctgcccacagtgttatttgcttactgtttttattt

SEQ ID NO: 462009 - DNA, 476 bp, Homo Sapiens
  misc_feature (17)..(17): n is a, c, g, or t
  misc_feature (38)..(38): n is a, c, g, or t
  misc_feature (63)..(63): n is a, c, g, or t
  misc_feature (119)..(119): n is a, c, g, or t
  misc_feature (124)..(124): n is a, c, g, or t
ccttttcttaaaaggcnccattcccacctctgagaaanaagctgaatattttaccttaaggcnataattggaacttctcccatgccacaaagaagttggcttgcctgccctaaaaaatnaaatntctatgcagagcttgtgtaggaagaatgaaatctgcaatttgacttttaggagtgtcgttttccgggtcaggcagattggtattcagcgctgctctgccatctatagcctgtgtgaatttaggcaagtttataccttttaatgtttcagtttcgctgtcttttcctcacacacctttgaacagaatattaactacaagaaaacaggacctagtcttgtttaagaaagactccctagtccccagaacaccaaagatccttaataaatatttgttgagttaataaatatataaaatatgtattttgaagagtataagaatagtaattatataatagggatattttgaggataaa

SEQ ID NO: 462010 - DNA, 405 bp, Homo Sapiens
  misc_feature (21)..(21): n is a, c, g, or t
  misc_feature (42)..(42): n is a, c, g, or t
  misc_feature (49)..(49): n is a, c, g, or t
  misc_feature (56)..(56): n is a, c, g, or t
  misc_feature (97)..(97): n is a, c, g, or t
  misc_feature (154)..(154): n is a, c, g, or t
aaaaaaagccttaaatccccnttttccaaaggcccctgggtnctcgctngggaaanaacctaggggtgaaactaataccccaggctgtggtcgaccnaccaagcttctctggtctcaacagccgcaggtgctgggagaacaaaaatcccccctngccatctcaggaacttgacagaggaaaccgtggtgatccttgcgtgaaagtcagggaaactgaggcacgggcgaactgtcttattcaaggtcacacagtgcagtctttccttctctaataaactcgtcggttcttctaaacacagaggcacgcaaggccagccaggaaatacaggtggggagaggggtcagacaagagccttcaggtccccagacccccgggagtggggtcctttgggctgggtaagccag

SEQ ID NO: 462011 - DNA, 369 bp, Homo Sapiens
  misc_feature (151)..(151): n is a, c, g, or t
ggttagttagatttagttatgtttgattagttagattcagtcctaatttaatttaattaacttccgctgtgaggtcctgtaaaaccctacactttccctatcataggaggcaatacagtgatacttctgcaagttcagctcagcccttggnccatacaatcctggattcaaattgcacctctacctcctagtggagtttgtcaagttacttaacctaagttcccctttccttatagatgaagtgagattaataaaacagggttatagaagagcatgtatattaagtgcctatacagtgcctgagacatcgtaaacaataaataagtactagatgctgtcatcatcaccatcaccatcaccatcaccacc

SEQ ID NO: 462012 - DNA, 503 bp, Homo Sapiens
  misc_feature (43)..(43): n is a, c, g, or t
  misc_feature (54)..(54): n is a, c, g, or t
  misc_feature (77)..(77): n is a, c, g, or t
  misc_feature (114)..(114): n is a, c, g, or t
  misc_feature (126)..(126): n is a, c, g, or t
gagatctaacttcactggactccaacctgtttcctaacctccnaactgtcctcngtttcaatccctgggccataggnctgaaactaactttgggaagaaaatttagtttaatantttaaaacaaancgaactagattgccctttgtaggactaacatttagcccacaagattagaaattacggtcttaaggagtccatgccagctggaggctacaagattctgaccctccctaaactgctcctaagaccagtgcttgagatattttacagaccctgcatttgatagagcagctggccccacccagactgataaactggctcatctaatcttgtggctcctcccacccaggaactgactcagtgcaagaagacagcatgtacccactacgattttatctctgacaattcagcactcccgggtcactggctcaactcacccaccaagtagtccttaaaaactctgctctccttggccaggcgtggtggctcatgcctgtaatccc

SEQ ID NO: 462013 - DNA, 307 bp, Homo Sapiens
  misc_feature (16)..(16): n is a, c, g, or t
  misc_feature (36)..(36): n is a, c, g, or t
taaaagggcaccgaanaaaagtgggtttgaaccccnaaggggttttgttaactgaaaaaaccccagtgtgagcttcctcatcttttcatataccttctaaccccgggtactcattgaatcattgatgaggtatcctcaattgagatttgcaaggactttgatacccatttgaaatggaaaaattttgaacgggctttaacatgtttaagaaatatggatggggccggcccacaggtgtcacgcctgtaatccccagaactctggaaggctgaggcaggcggatcacctgagatcaggagtttgaagc

SEQ ID NO: 462014 - DNA, 416 bp, Homo Sapiens
  misc_feature (128)..(145): n is a, c, g, or t
  misc_feature (375)..(375): n is a, c, g, or t
  misc_feature (384)..(384): n is a, c, g, or t
acttttcatccaagaagtgtctttatttccgtttgtttcccaaagatcaggttagttaaaacaaattagttccatctcattatttgaagacagggaggtgtatgcagatggaggggaactgacctctnnnnnnnnnnnnnnnnnngcctgtgagggagctggggctatagagatggtaggctaaggggttaaacccttaggagccaccagacaatgtcacttgaaaacacaaggtatgaaatataaataatagtcagctactttccttcaatccatttctaaggcagttgtgtgatcgatccaatttattaaatcgattgggctaactaattcaccttcttctgctgccgctgccaccgcctatggcccggggtnggggtcagnccagctttttggctgggcaatagggggaaggg

SEQ ID NO: 462015 - DNA, 418 bp, Homo Sapiens
  misc_feature (31)..(31): n is a, c, g, or t
  misc_feature (245)..(245): n is a, c, g, or t
  misc_feature (254)..(254): n is a, c, g, or t
  misc_feature (322)..(322): n is a, c, g, or t
  misc_feature (327)..(327): n is a, c, g, or t
  misc_feature (354)..(354): n is a, c, g, or t
  misc_feature (376)..(376): n is a, c, g, or t
  misc_feature (382)..(382): n is a, c, g, or t
  misc_feature (398)..(398): n is a, c, g, or t
ttttgaacatttaataatgtgctgagcaagntgtgaagcacttcacatacattattttattcagtaggtatattattatgcccgttttatagatgaggacactgaggcttagggaagataagagcactgtccatggtcccaacgctagtttaaaagaattggcatacaaactcaggggggatagacacatgagtgaccagaggcacagaaaattcccccgccggaaccactacccaaccctgggngaatgtccntggaagggaaggaggaggccctttccgggggcttccgacaaagtgggctgacaccttgatccaagggntcttncggggcctttattcacatgtcccgggnaaaggcagctgcagcctggggntttccntcagggccagggaccnaggccgtacttcaggaagtt

SEQ ID NO: 462016 - DNA, 211 bp, Homo Sapiens
ggtaataaaaagttgacttttttatttgaatttgtcttttttatttattggtctgaaaggcatttcaaaggtattataataatatattggtgtaatttaattggtgcaacatgctttatggctcctgtcaaaattggttttcactcatttgattggtttgagcccagaacagcctacaggggaaaaacaagctggataaccacccaaagtg

SEQ ID NO: 462017 - DNA, 557 bp, Homo Sapiens
  misc_feature (101)..(134): n is a, c, g, or t
ggaactgtgagcctaccctagcttcaggcagctatgggtaagtgttacttagggttaagattcctatacacgtggggtgggtaaatggggataacctaagnnnnnnnnnnnnnnnnnnnnnnnnnnnnnnnnnnattttaaatcatgggtgctcctttggagtcagagttaaaactattatggtgtgtcttaatgctcctcaacaagtctgtgaacctgctgatgctttctggaagcttgctgtgccttctaaaagccagtggtgggtaggcattgcagttgaactggggcaacatttctttactttggaaagggccacctgtatcagcatcaccacactggctctgcacaaatttataacccctgggtttgtgcatgtcagaggaaaatatctcgggcggagagtccagggctgtgaagaaaatcttcaggacaaatccgtggtttccagagtcaagttcaacctgatttacatgattcagcggctgctccatccagtttttcttgtctgagtaacaaacttgcaaacttcccggcaagttcgtgtggcaagtttt

SEQ ID NO: 462018 - DNA, 409 bp, Homo Sapiens
  misc_feature (388)..(388): n is a, c, g, or t
  misc_feature (394)..(394): n is a, c, g, or t
ataaatactttattgcaaagtctgtaacttaaaaggtcttcatctgagggagacgaggttacactgaggcagcctttggttgtcacctttcaagacaaccttttctctggaaacgttcgaaatgcccaatcatgggaggaaggttgactcgttacagcacatccgtggggtggaaggcccagcagcctctccaggtgatgtcgggtgtagaagagccagtcatgggttgttgccccagctctgatgcagctttgggcaggttctctgtgaggtggctggcatccagatgggacagagcactggctagttcacagctgggtagagacacaagcatctccagtgggtcagctttcccagagattccttctccacagctccacctgggttnaaacanccggaccagtcactt

SEQ ID NO: 462019 - DNA, 446 bp, Homo Sapiens
tcagcagaacctgtggtagccaaggtacagaaaaatcagggctgtcccaggggtgatggtccaggattcctcagctctcacccttggtccaggctccttagtcttgagaattcttacaccgggtgtcatctgagcctcctaacagccctggaagacaggcaggcctgtgatgactgtttccatttcacagagagggaaagtgaagtccagcaaggaaaatgacttactccagagtttagaggaagccaggggaagatacaccactaggaaccaagtctctttaatctagcccggggctcccttcttttctctctgggataggggcaaggttaatagctaggagtggtctagggcacaatgtgggtgcttttaacttagtggttaggagtgtgcgtaggcttcttggaaccaaactgcctccctgctctttctaagctgaaggtact

SEQ ID NO: 462020 - DNA, 572 bp, Homo Sapiens
  misc_feature (209)..(209): n is a, c, g, or t
  misc_feature (472)..(472): n is a, c, g, or t
  misc_feature (530)..(530): n is a, c, g, or t
tttctgctttcgatagttttattggaacacgatggtaacacaaacatggatttggggtcccaccacagatgttcctcctccaggcagcatgcaccccacttctgcagccagcagaggctccaggaggcctgcagaaggtggaggcagcccagagacagacgtggaggcgtcttctgcagtggcgggtggtgcgtgggcccctcggcagnaggctctgaccagctgagtctgtgaacagccagactggtttgttttcacttgaggtcatgtggccgtgactgagagacctgcctgcctcagactcctggggaaaacttccaaggagggggattctggggattccagaaggaattcagccaagagactaagcacctctggggggatcaccaggggcaaatcatgcctttaggtttatttgcagatacactgcttgaaagcttcttgttttggccactttctgcactctcttttnctctgatcattcatccaacacatattttttaaggtcctaccctgtgacaaatttcctntaggggttaggcaggcaacggtaccagaacaggcagggcccc

SEQ ID NO: 462021 - DNA, 393 bp, Homo Sapiens
  misc_feature (34)..(34): n is a, c, g, or t
  misc_feature (370)..(370): n is a, c, g, or t
aaaatccatgccctttaggttttattggccagantacactgctgaaaagcatctgttttggcccactcctctgcactctcttttctctgatcatttcatcccaacacatatttattaagctccctacccatgtgacaaactctcctctaggggttagacagacaacggtcacccagaaacagacaggacccacagccctggtgaggaggagagacagacaacgttcaaggaatcacgcaaacagccatgccagtgccttccaaggagagctctgaggggtgtggcagggggcctggtttggtgtggagggtcaaggaagacttcctcaaggaagtgacatttcagggcactaaaatgagcaggaggagcnctttctcacggaaacagctttga

SEQ ID NO: 462022 - DNA, 442 bp, Homo Sapiens
  misc_feature (420)..(420): n is a, c, g, or t
  misc_feature (431)..(431): n is a, c, g, or t
ttttttgtagtgcagtgtgtcccaaatactttaatttcaaataatggaaataaatgttgagagtaaatatgccctacatatttaagtgtaagtacaccccagatatttttggggagaagagttgtttgctttttgtggcaaaatatgcataacaaaatatgccagtttaaccattttcaagagttcagttttcagtggcgttcagtccattcatgctgttgtgcggccgtcacccccatccagctccagggacccttttcatcttgtaaaactgaaactctgtccccattaaacagtaactccccatttcccctctccaccgccccgggggcccgccatcctttcagtctctatggaatccgactcctctagggggacctcacataaggtcggagttttgccgtattctggtcctttcgngtttggggttntttcactcagc

SEQ ID NO: 462023 - DNA, 424 bp, Homo Sapiens
  misc_feature (394)..(394): n is a, c, g, or t
ctcccttctttattgttctctggctatagcaggggtctgggaaaccaagggcaggggtgagtcacatgcgtctctgcccttctcggggtggggtagggtggaagtaccagggtagcaggtctaggagaccatggatgtggatttcgcatgaacagggcccactgtacaaatgcatggttggtatttacaagaaagaaggagggcagtcacctgggactttggcctttcctggggcaaggtgggggcaaggaggagcctgaggagaggaaggggcaccgcgcctgggctgggttctctccagaggacaggaaggcagcagccctgagccccttttccatctgccttttcaccgactacccctaaacttgtcttcaggggaggagctttttaagtncccgcagctgggccaattttgggacctgga

SEQ ID NO: 462024 - DNA, 411 bp, Homo Sapiens
  misc_feature (18)..(18): n is a, c, g, or t
  misc_feature (24)..(24): n is a, c, g, or t
  misc_feature (64)..(64): n is a, c, g, or t
  misc_feature (100)..(100): n is a, c, g, or t
  misc_feature (361)..(361): n is a, c, g, or t
ctcggtcgcgggcccatnaccttnaaacgcagctggttcaccttcctcgcggtcgaatccggtncaggacgctaagccagccggacgtctcgttcaaagncgcaagcagccgcctcaccgactcggtggccgccccgaacacgtattcgatctgcccgttgacccccacgtccaagtcgctgcgcgcagttgcaggatgggggtccccggggcgctgttctcagccaagtcggcctcgtacacgctcttctcgaagcgggggctgttgtcgttcacgtcggtgatgaggacccgtaggatggcctgcgaggagcgagcgggtcgcgccgtcgcggactcgcagggtcagctcgtaggaagntggctgctcgcggtccagcgcccccttcacgatcagctgcggctgcttct

SEQ ID NO: 462025 - DNA, 641 bp, Homo Sapiens
  misc_feature (582)..(582): n is a, c, g, or t
gtagcagtaatactagaaatggtgactatctggatgttggcattgggcaggtgtctgtgaaatacccccggctcatctataaaccagagatattctttgcctttggatctcccattggaatgttccttactgtccgaggactaaaaagaattgatcccaactacagatttccaacgtgcaaaggtttcttcaatatttatcacccttttgatcctgtggcctataggattgaaccaatggtggtcccaggagtggaatttgagccaatgctgatcccacatcataaaggcaggaagcggatcacttagaactgagagagggcttgaccaggatgagtatggaccttaagaacaacttgctaggttcgctgcggatggcctggaagtcttttaccagagctccataccctgccttacaagcttcagaaacaccagaagaaactgaagcagaacctgaatcaacttcagagaagcctagtgatgttaacacagaagagacctctgtgggcagttaaagaagaagtcctgcctattcaatgtggggagatgctgaatgggaggccaacgcatttgactatgtggntacagggagaagcctatttgaaaagtttttaatgagtatttattttgcttttacaaagg

SEQ ID NO: 462026 - DNA, 558 bp, Homo Sapiens
  misc_feature (55)..(55): n is a, c, g, or t
  misc_feature (64)..(64): n is a, c, g, or t
  misc_feature (80)..(80): n is a, c, g, or t
  misc_feature (98)..(98): n is a, c, g, or t
  misc_feature (119)..(119): n is a, c, g, or t
  misc_feature (124)..(124): n is a, c, g, or t
  misc_feature (155)..(155): n is a, c, g, or t
  misc_feature (216)..(216): n is a, c, g, or t
ccccttgaatttgaagcctgtttttgttccccaaccccaaaatcaatcccctttncaattgccnaattctcttaccccancctgccaccttgggccanagaacccaatgttcctaactnccccnaccttgggcctgccaaattgtaatacctgtnctggaagaagtcccacctggttggtgaactttacccaaggttggaatccacagggaaaggntgtaattggaaaaggctccctccttcaaggagaggtagacaaagggaaggagtagaggatgggagctgctgtgaagggaatacggaaacagcagaaatgggtcggcagagccctgaggaaaaaagatgggacaggggaggggagagaaggggatgaaacaggccactgcttccatttctattcacaccttctgattccagtctcagaggatgcgaaaaccccttcagggctggactctgggatgtctcattgtatcctggcattgagaaccacaagatgttgtggcagtgtcttgtttatgctctgacgttcaccaagttttcctataattagcagaaccta

SEQ ID NO: 462027 - DNA, 610 bp, Homo Sapiens
  misc_feature (28)..(28): n is a, c, g, or t
  misc_feature (34)..(34): n is a, c, g, or t
  misc_feature (42)..(42): n is a, c, g, or t
  misc_feature (55)..(55): n is a, c, g, or t
  misc_feature (73)..(73): n is a, c, g, or t
  misc_feature (140)..(140): n is a, c, g, or t
  misc_feature (154)..(154): n is a, c, g, or t
  misc_feature (230)..(230): n is a, c, g, or t
  misc_feature (591)..(591): n is a, c, g, or t
aagtaagcctaaaacctggtgggaaaantggccnaaaactgnacctcccaaaagnaagctggaaacctagggnttcctttccgggaaaacggaccttaaaccttggtaccccaagcagtaccctgccgtaataacaccanggtaatgctttcangcaactcccaacaaaaaaacctccccctgcctggccccaggttccttcccttcctaaattgtaaagatgtctctcncctcccgtcctttaatattttgtcttccttagtcctaaatcagaacgtaaaaccccctatacaattggtaacagtttttaattgtcattgattatgtataccttgaataggaatgaacattctaggaatgttttaataaagcaaaatgcagtgaaggttaagggaaagaagaagcagcgtacacagttgattcatgaacttcctgtcccaggagtatttgctatatgcacggggagagatttgtcctgtttaatctaataagtggggaaggagctaacagccaccaggcattgtacatgcctgagtggcgagcttctcaaggacacagtttctcacctttgtatccccagttctagttcanatcctggtggctgttagct

SEQ ID NO: 462028 - DNA, 402 bp, Homo Sapiens
  misc_feature (353)..(353): n is a, c, g, or t
  misc_feature (368)..(368): n is a, c, g, or t
  misc_feature (377)..(377): n is a, c, g, or t
cattgatttttttaatacaatttatttctagaacaatttggggttcacagcaaaattgagcagaaagtatagatttcacatgtatccccttccccctacatacacataagctccctcactatcaacatcccctgttagagtgattcattgttacagtgaaccaacactgatgtatcattatcccccaaagttcatagtttacattaggcttccctcttgatgtatgttctatgagttttgacaaatgtataatgacatgtattcaccattaaagtttaatacaggaatactttcactggtcctaaacatcctctgtggttccacctatcaccccttcctccccacttaacccngggggaaccactganctttttccngtctccctagggtttggccttttcc

SEQ ID NO: 462029 - DNA, 475 bp, Homo Sapiens
  misc_feature (30)..(30): n is a, c, g, or t
  misc_feature (47)..(47): n is a, c, g, or t
  misc_feature (101)..(101): n is a, c, g, or t
  misc_feature (110)..(110): n is a, c, g, or t
  misc_feature (252)..(252): n is a, c, g, or t
  misc_feature (446)..(446): n is a, c, g, or t
gctgtaatccccctttttaaaaaatcgatncccccgaaatttcatgnccggttggaagaaaaatgaatgaaacggcttgaaagggtcccaggctgccgaanaactctcgnccgttcaggttcccaggacccagccctcgtaagcaggagcacttcacgctgaacttgttctggtcgcacttttggctgcatttgagatgcttggcacagtagctctggatctggcaggtgtggttgtcgggccccagctccncatcccagagggcaggaacacacaatgccttcgccaggtgccactgagcagtttgtgctgcagccaccgttattcagagagcactggttgcagagctcgccctcatctgagccgtcgccacagtcgtcgttgccatcacacagcttgtcagggggcaggcagactgaggtgttgttggcacaagggtgcgaggngtgctgcaggcccgggactcgcagttctc

SEQ ID NO: 462030 - DNA, 390 bp, Homo Sapiens
  misc_feature (357)..(357): n is a, c, g, or t
gtaaaaggttggtttaatgtcccagtgctctgatgagaagaaactctagccaggtagagcaaggatcgggatggccctgcctcaaccacaagttccagcctccatgcccacagcagccatgaccagtaactggctagccccagggaagggagagcctcaggagtctgacccccacagcacaccctcctggcagaactctgcgtgagaagaggacagcaaaagcccagccctcaccatgatttgaggctactgaggtcactgatgaccatggaagacatcatctttcactggggtcccatggccaggatttcatggttagaagccagaaaagcccaatcctgcctgccgcttaaaccntgacagtggcaggcagagaatccagctggctcg

SEQ ID NO: 462031 - DNA, 210 bp, Homo Sapiens
  misc_feature (14)..(14): n is a, c, g, or t
  misc_feature (23)..(23): n is a, c, g, or t
  misc_feature (125)..(125): n is a, c, g, or t
  misc_feature (162)..(162): n is a, c, g, or t
tagtctcccttctnaagggaaanggtgggcgaccgaggtgcgcctggagggcccccatgtgggaagggaagacttgcggaagggcaattcttccagtgcggagacgaggaggccagcccagccgnacttcggtgtgccagggtccgcctggtggtccgcagncccttccaggcggcttctccgggtggggcgtgctagtccggggctaac

SEQ ID NO: 462032 - DNA, 359 bp, Homo Sapiens
ggaatctctccctatagccatcacagctgggaatgtactgggtctcacctgaaagccagcatgtctttgagtctcacccaaggcccacagcgagtactgcccagctaccactgctgaaagttcaagcccaagggctcttttgtcagcagatgatgaatcctgccaggactgggttctccccttcaaggcagtggattcccttttggcccagggtgtgtctagaaatgtcatcctggaattaaggtctgggatggggccctcaggactctgcctagtgccctgtctttctgtggctaaactggtatccaagtggcaagtaaagtcctctttactcttccctatcctctcctaaggtggcc

SEQ ID NO: 462033 - DNA, 502 bp, Homo Sapiens
  misc_feature (11)..(11): n is a, c, g, or t
  misc_feature (25)..(25): n is a, c, g, or t
  misc_feature (35)..(35): n is a, c, g, or t
  misc_feature (61)..(61): n is a, c, g, or t
  misc_feature (78)..(78): n is a, c, g, or t
aatcccttcangaggaaaacctccntcttcttttngcaaagtacttcaatgactttattcnacttatgcaggttgacnaaacctctttcccattgtctgccaatttttcttccctgccaattttcttccctaagactaaaaatgcctatgggagtggctggttcctcaagaatggttttctggtgaatttgttcataataaaacaaggccctacctgtcaagccccttgtgcttgtagctgtggacttctctgtttggtgtcaggaaaagagcccagagggtgaaggcatacttgtgctcaggctgcatgcaatgtattgggaatacagacatctgaacatgcacctgactcatttaaaataaaatgtagcttgctcaatgtagagaaacaagctcatttcaatgaccattaggaagaaagaaaatagaggtataacctggcattttacacatagtatagaaaatgtccaacttgcgtttcaagcatttacagtttagaaat

SEQ ID NO: 462034 - DNA, 267 bp, Homo Sapiens
gatataatgaaaggaagtggaaaagagaggaaggtggagagggagaatatgaatttctaaactgtatccttcttaacacttttaacactttatatactaaaaattaatcacattattcagctgctttaaaaattaacacgatttgaccaggcacagtggttcatgctttgtaatcccagtaacttcagaggctgacgtgggaagattgcctgacgccaggagtttgcaacaccagcctgggcaacatagcaagaccctgtctctaca

SEQ ID NO: 462035 - DNA, 541 bp, Homo Sapiens
  misc_feature (23)..(23): n is a, c, g, or t
  misc_feature (28)..(28): n is a, c, g, or t
  misc_feature (63)..(63): n is a, c, g, or t
  misc_feature (72)..(72): n is a, c, g, or t
  misc_feature (82)..(82): n is a, c, g, or t
  misc_feature (200)..(200): n is a, c, g, or t
  misc_feature (483)..(483): n is a, c, g, or t
  misc_feature (485)..(485): n is a, c, g, or t
ctggtggcgttgataatccccangtccncgctgcccacgacccaattcatgctgaaagggggncgaacttcncccggtggcncgccctcggtgtcaactcacgcctgtcggggaaaatgggaaaagcgggcgttaatatccctggcctcacaacggggctcccccaaggcagctgcggggaaaatggagcctgttatgtngagtgggaaatggtccctcccttttcaatcctcaaggactggccagttcacgtgatccccgcagggtggaggctgcaaattgggcaggatcgtggtggccgcctcgggtcccacggcgtcgctgcacctgcgtcaaccttctaatcgaagattttaatagtctggtgataatatagctccgtccagattccccccccttctgtaaatattagttgagtgaatgaatgaacagagccacgtggaagtgatctgagagtgtgtttatcaggcacctttgcaggcncncctctgctggaggcaaaacaccggggctagtaagcaacatgcagctccctggctcc

SEQ ID NO: 462036 - DNA, 489 bp, Homo Sapiens
ttttgattttattttgtgcttgctttctaatgaaaatttagttaaaaaatcagaatttgatcaaagacttggtctccttattacctggtagggaggttatagggtggtagctaacccttacacaacccagacctcagtggctcttagtatcggccaccataaaccaaacgccatgacggactgaacaggcatgggcccaggtgtttccgggctccccacatctgcagcacgcgtgggccaggtttttccaggctccccacatctacagcacgcgtgggccgggtgtttccaggctccccacatctgcagcacgcgtgggccgggtgtttccagggctccccacatctgcagcacgcgtggggccgggtgtttccagggtccccacatctgcagcacgcgtgggccaggtgtttccaggctccccacgtcacaggtcttaactctgcctcgcaggggttttggaaactgttccttcactttgtgggaatc

SEQ ID NO: 462037 - DNA, 548 bp, Homo Sapiens
  misc_feature (339)..(347): n is a, c, g, or t
atcaaagaagtttatttgcatgtaaataaacaggttattttgtaatgtttcgggaaaaaaatcccacaacagatttcatctactttcaaaaaaatgaaaaaccccaaagtatttacaaaacggccatatgcacagaaaaccaaatttgaaagatttttttaaaaaaagaccctccccagctgctcctgatgtacatttttaaactcaaaatttaaagctcagttcttatagctgagcatgtttcccaatctagcttctgagatgttaagtacttcctgcccctccaaaactaactcaaggatagaaatgtatgggggggcggggaggaggggagaaggnnnnnnnnntgagattgcccaaggattgtgaataatgtttcgtatactgacatctttaagtgactcaactgtggatactgtatgactcactggctccctgaaagggcttctgagaattcatgatattgctgcacttaattttctgatctaggcctgaagaaagaaaatctttcaagagtcaccaacctcaagcctggttttggcaattat

SEQ ID NO: 462038 - DNA, 499 bp, Homo Sapiens
  misc_feature (11)..(11): n is a, c, g, or t
  misc_feature (27)..(27): n is a, c, g, or t
  misc_feature (37)..(37): n is a, c, g, or t
  misc_feature (71)..(71): n is a, c, g, or t
acctccttcanaacacccggaaaagtntggccaaagnggtcaattacttaaaaaccagaaagcaaaacaancctttaacactgtgctgaacccaaccgtttcctctgtttgggggacttgtaaaatgcacctttgctccttgttagtattaatctgcataggcaaaaagttgaagggctttcggttttcactaagctgacgtttgttgttagcagctgttgctctaccttgggaatcacttccaatgcttctctgatctaaatcactgaagtttatccgctgtttcagtttctctaattctgcctgctctgggacagacatctgactcatgtatctactgtgtgggaacgtatgtggagtctttgttcttcgccttccaactcctggtgacgactccggagaaatatcattggttactcttttatcactttctacaccaaactttttcttattcttttctgatgatctatttgctttcttctgttgggcaccccaatcc

SEQ ID NO: 462039 - DNA, 443 bp, Homo Sapiens
  misc_feature (25)..(25): n is a, c, g, or t
  misc_feature (33)..(33): n is a, c, g, or t
  misc_feature (41)..(41): n is a, c, g, or t
  misc_feature (204)..(204): n is a, c, g, or t
  misc_feature (427)..(427): n is a, c, g, or t
gtcctaatgggcgtacagaaattgncataaganacttgttnagaatgtggatcccttggcctaacctcaacttgttgaacaaaaactgttgaaggaaaaatctctgggggtggagtctaagaagctgcaattatataaaatgagcaaacaaaaatcctccctaaggtgtttctgatgccagtgatcagaggaaacaccactccnaaggccatgcctttcccattttatgcctgctcagcaaatgcactgcgggagccctggttacagctgttgggaccatgccagcacagacttgtctgcccctagtccttatgccaagcattgtgccaggcttgcaggcatacagaggcatctgaggcctcagggagctttcaacctagcaggagagttaaaacacacatcaggcaaagctgtatgcaaggaattnactatgtatgcttccc

SEQ ID NO: 462040 - DNA, 636 bp, Homo Sapiens
ggattgaagtgggttcaagtcatttatttttagactgtaccagcatgtttggttctggggtccaatccccaaattccagaaaaataaactaaagagaaccacatgcactaagaggaggccattccgatgagtccgtgatcatgcggtgagtgggcttagagtatagaacagggacccctggtatggagcagggccttccctccccagacagctgacagcagctggctctgagccctcatcggggctggggagagggccaagtcctggtcatttggaccctgtccccgtatagacccgggccctttattgctacatttgctactttgctactttatggcccctgggtctagcccaggggatggccttatcactgggtggtactaatgagtaggttgctggcatctgctgttgctatggttacacgagcacaggcctctcttcagagggtcccatggtgagttattagtgattcgtctggccactattcaacttatcccatggtctttgctacatattcaacttgggcagctcctttttgaggctggtggtgcattatctccccccgagcccagagtttcccagctcctggaccttgcagcaacacctccctccaatacattgctacctcgtgccgaa

SEQ ID NO: 462041 - DNA, 397 bp, Homo Sapiens
  misc_feature (24)..(24): n is a, c, g, or t
  misc_feature (32)..(32): n is a, c, g, or t
  misc_feature (38)..(38): n is a, c, g, or t
  misc_feature (59)..(59): n is a, c, g, or t
  misc_feature (62)..(62): n is a, c, g, or t
  misc_feature (68)..(68): n is a, c, g, or t
  misc_feature (74)..(74): n is a, c, g, or t
  misc_feature (83)..(83): n is a, c, g, or t
  misc_feature (92)..(92): n is a, c, g, or t
  misc_feature (100)..(100): n is a, c, g, or t
  misc_feature (112)..(112): n is a, c, g, or t
  misc_feature (135)..(135): n is a, c, g, or t
  misc_feature (157)..(157): n is a, c, g, or t
  misc_feature (246)..(246): n is a, c, g, or t
  misc_feature (335)..(335): n is a, c, g, or t
aaatgtgactgggttgacacctgnaaaccagncaggtnctctgagttcaaacccaaggnctncaaggncaagtnactgcctgnactaactgnctaactgnactattcacagnctcagggtgttcatttgttctgncagataatgaatcttcccaggnactaggttcttctcttcaatgtagccaagtttccttttggcccagacagtgtcttgaaaatgtcatctgagagataaggcctgggaatngggacctctgtactctgtctggtgccctatcctacagtgggctgagctggtattcaagttgcaagacaaagtcctgtttactctttccnggggttttcatctaggcagaaggcaagttcatctctcttgggagctgtggaggtctgctgtt

SEQ ID NO: 462042 - DNA, 508 bp, Homo Sapiens
ctggttttcagcaagatcctttatttatcttctgttccccagacatgtcacatgaatgcaggtagctaggtacctgcgcgggctgttggttttgtaaacgcagagcagagcagtcacgatgtgtagaaatcatgcacctcagtgattctttaacaagataatgagtaaaaagacttcaggtatgtttgaaatgtctgccttttcctgcattctcatcactgacaaatatctgtgtagacattttactcaaatgtagacgtgctctttgcacacttgctagtacctgcctgggtgcatttcaactgtgttttcttccaacagttgtacctcttagaagctgctgttttccatttgggatctaaacactgggacctgcacctggggaccagctgtatattccaaaccactcctcggctttataaatctgacactgctcataatacattattcagaaaaggcatctctagtgtggctggccggctacgctttcacacatcagctaacacag

SEQ ID NO: 462043 - DNA, 449 bp, Homo Sapiens
  misc_feature (36)..(36): n is a, c, g, or t
  misc_feature (47)..(49): n is a, c, g, or t
  misc_feature (52)..(52): n is a, c, g, or t
  misc_feature (303)..(303): n is a, c, g, or t
  misc_feature (327)..(327): n is a, c, g, or t
  misc_feature (411)..(411): n is a, c, g, or t
  misc_feature (429)..(429): n is a, c, g, or t
gggactggccatcctgctcctctcccctctgcaaantggacagatannnctnctcttcctgctgtgtgttgcccgttttgaaatcttactcccatccccaaagtatgcttttggataccaggtgaaggggaaggatggtgatggtggggaacagctgttttaatttgcctcaggcctatgaatctccctacctgaaccccagcttgccatagagtctaactggtccgtggtcagaaggtgggctccatagctgtctgggggttggggcttcctcccccatttcttgagcattcccagggtttngggagtctgcttatgattcttctngccagaggcacggccaccaggccctggagtgtgggaaaacaatggggacagatgggttggttcaaggcctttgggcagctggtngttggtcttggagagctnggaaccccttcctagggagg

SEQ ID NO: 462044 - DNA, 459 bp, Homo Sapiens
agtacctaatttaggcttcttcaactacatgttgaaaatgtgcacggggtatattttctttttcctatacgccactgttgcttcccacttcccacctccaccccactccttagcatctatcacggcagagggaagggaggaaacagtgcagggaagggagagggcaggaggagaatcagggtctcagtggggagtagacatggaagggcaaaccaagtccgtataaaccacaaaccccattctagccataaaagctttgcatccctttgatagcagaattgagacttttgaagtacccaactattgccaaatatctttcatgaaaagaagcataggtgaacgaggggaagagaaggagagaggtcgcggacgcagtagctttccaagcacaaggctccctttgcaaccctggtggctgtgcagaggctgagagctggaggagcaggactggagaagact

SEQ ID NO: 462045 - DNA, 501 bp, Homo Sapiens
  misc_feature (371)..(371): n is a, c, g, or t
  misc_feature (414)..(414): n is a, c, g, or t
  misc_feature (436)..(436): n is a, c, g, or t
  misc_feature (463)..(463): n is a, c, g, or t
  misc_feature (477)..(477): n is a, c, g, or t
cttaatgaaagaaagtaacgatttatgggataaaaatattccagtggtttgtatttgcttcatacttcaaaagtgttagtccatttattgtttaaagttatattgaaactgatattttcactgctgccaaagcagtacctgacagtagataggtatccacagtcttatgttccttagagttatagaactatgcctctgaaaggggttttaatactttaataaacctggcctaaactgttttatttctaagttgaagaaactgattgtcaagtactttgacttgtccaattctcatacaactaactatggtacatctagagttaggatcttcagtatccaggggtcccagtttgtattctgcttcaccattnccacaattttcggatatttgattaaaacttttcacacttaacnttttggaactgtgggttattanttaattttagttggattcctgtccccntattttattctccntaactcctccactggctggccttc

SEQ ID NO: 462046 - DNA, 431 bp, Homo Sapiens
  misc_feature (15)..(15): n is a, c, g, or t
  misc_feature (56)..(56): n is a, c, g, or t
cagtggagatctggnttctcattcataccaaaagcatttcttgggtaatgacctcnatatttagagatcaggggaacaacttttagtgagcagcaaccaatccactcaaacagtctgccttgtgctttatgcctgactttttcttgtgcctacctcagcaacccccaatgtaaaactgcttttatctttgaaaattttttgtcaactttgaaactattttagtaacggattctactccaagcattgctatctgaatccactggcatcctggaaaacaattctgcgaagaaaagacatttgccttggtccaggttccatgcaaaaccatttttttaaaaaaatggatccaatttggttctgtattcttagatggcttcttgaaatcttatctttaacctgttcatgattatcccaagttgcaccttcctttt

SEQ ID NO: 462047 - DNA, 544 bp, Homo Sapiens
  misc_feature (49)..(49): n is a, c, g, or t
ttttttgaggctgaaaggggcacccagaatggtctttaaaccatgactnggggccttttcagaatgtgacgccaggttatcgctctctggctgggactctgtagtgcactttgtgggaccacacggagacagattcgaagtaggatggatggattctctaggtccttgagcatgttccagttaggcaagaggccagaggagatgcatagcttactctgagcatcttgacggtggaccctcatggaatgtctttcaagcttccccatcttcatgttttaaaaaatccggttatctaaggaacgaagtttcagaccccaccagaactgtagaagggcatcggatccttggtcagcagggtctcactccagttcttcggggtctgagactctctggaagagccaagaatgtgggctggggagtggagggaacagatgcggggcaccagtggatacctgaagaccccagcctgtgcctcctcaccagccaggaaagccagagatttttaacaaaaagttagaactttgtgtcaagcccttcaagcaaa

SEQ ID NO: 462048 - DNA, 407 bp, Homo Sapiens
  misc_feature (329)..(329): n is a, c, g, or t
  misc_feature (346)..(346): n is a, c, g, or t
  misc_feature (356)..(356): n is a, c, g, or t
  misc_feature (365)..(365): n is a, c, g, or t
  misc_feature (373)..(373): n is a, c, g, or t
  misc_feature (378)..(378): n is a, c, g, or t
actgcgcccagcctgcaaagttttctttcttaaacaattttgaaactgttactggaagatatcaatatgtggccaggtcttgggtacaggctaattcattatattatcctctataattttccatatgttttaaatcatttattaaggatacgtgcacaccttggggaaagagagtaaggcccttcatgacgggacccacattgaacatgccactcattttcaataaaggtaaaagggcgggcgtgggtgaggagctggcacacattccactttcctggctggaagtcttccttttcaggaacaggtcctggaccccgggaaaccacttnacccttcacacaccggncccccgttcntaagggctnaggattcnttccngggggtagggggtttcccggttggggttt

SEQ ID NO: 462049 - DNA, 375 bp, Homo Sapiens
  misc_feature (15)..(15): n is a, c, g, or t
  misc_feature (46)..(46): n is a, c, g, or t
  misc_feature (62)..(62): n is a, c, g, or t
  misc_feature (71)..(71): n is a, c, g, or t
  misc_feature (77)..(77): n is a, c, g, or t
  misc_feature (140)..(140): n is a, c, g, or t
  misc_feature (274)..(274): n is a, c, g, or t
cattgaagcttgganacctcgatgttgtcccggcctttgtcgcacnagtacagttgcaaccnaccaagtcnacagcnagcccatcggggttgctgaggcctgtacggtgtaggacctgcacattgctcccgttaaggtgncacttcggatcatgctgccctgggtggtcacatctgtccagtagatcatctgctctcggtagtcaaaatccaaggcaacggcgttgttcaggccctgcttaagtaacgtgtagttggacccgtccaggttgaanttgcgcaggtagtaccggttggcgaagatcagaaacggttcctcgtcagtcacagccttgcagctgtgggggtgccgccgcggggtgcatagccctccaca

SEQ ID NO: 462050 - DNA, 363 bp, Homo Sapiens
tctgtctctgggccaggcactggaagtcagcggcggaagaccaagagcggttcagccccaatcctgcccttcaagaaactcagaactgtggggagagacacgattccccgcaagagcccccacattcccctgggaaggtccagttaagtcctgctggattcgagtcagtctgactgcccacaaggcagcaagaagggcattccagaaggactacggcccgagcagggccaggaggcaggccgtggaaggcacagagcatgacggggtgagggggagcagggtcacctcagagcctcaaagcctgcctaatcctgtgctctcagttacagagagggcggccacgttacccaaggtcacacagcg

SEQ ID NO: 462051 - DNA, 377 bp, Homo Sapiens
  misc_feature (12)..(12): n is a, c, g, or t
tgcacattattnccgaagtattctcccattcccagtcccacctctacagctcttttaaataatcgttacatataatgctattttgtttgtctcttagccgttataaactctaattttattctgaagtacaactcaggacgctgtgcaaaaccttggtagtgttttctttaatattttaaagcctaataggactcactactcatttgacacatcattatttatcacttgtgttgaaactttttgattttacacgttcttttcttccaaaatatatcataaatgctctgagggcacacatattattttatttctctttagagtgctcttgccatgcatgcagccttataaacatattaagtatttttaaattatagggg

SEQ ID NO: 462052 - DNA, 439 bp, Homo Sapiens
  misc_feature (20)..(20): n is a, c, g, or t
gggtatcctaaaatttaaanttgggtggtaagggaaacaaggggaagaacaaaaggcccaacatgccacacttctcagaaacccaatatatcaagtccaaggtgccagaaggggtaaatggtgctgacttgcccaacagacaatcccagcacagccatgataaagaaagtaatttgagtgagaacccacaaaagaaatgccacagaaacgataatctgtccatgacaagattaagtaacaacaatggcaacaaaaagcagatgcaccattgctctcatgaatctggcagggctgtatggaagtggttactgtcctcagagcattgtccctagttccccttgggtatgtgccatttgtctaatccaaacagagaggagaacagcagtgatggaagaacacatccatttttctcatgctgtcacccgctctcactgtgctg

SEQ ID NO: 462053 - DNA, 178 bp, Homo Sapiens
  misc_feature (77)..(87): n is a, c, g, or t
ggcgctttctcctgaccatcatgggaagtgtctgctggattccattttctaagagtttctgagggtgaggctcttannnnnnnnnnnaagggatcctgtctatttcctgcacttcgagaagaatcaaaatgttcctgaatttcaaatacctcatgcaaaatgtctcctgaaataaggg

SEQ ID NO: 462054 - DNA, 450 bp, Homo Sapiens
  misc_feature (329)..(329): n is a, c, g, or t
  misc_feature (424)..(424): n is a, c, g, or t
  misc_feature (432)..(432): n is a, c, g, or t
gctcaccaagagctgcctcgcccgccaagcccagctccttggacctggtgcccaacctgcccaagggggctctccctccatctcctgccctgcctcggccctcgcgctcctcaccgggcctctacacctcccccggccaggacagcctgcagcccactgccgtgagccctccttacggcggtgacatctcccccgtgtctccctccagggcgtggtctccccgagccaagcaggcccccaggccttccttctctacccggaacgccggggattcgaggctcaggtgtggaagccttccttctgcttcaagtaacgaaccccacggggtncccactggccggttaagttcccatccttgagggccagatggagagcagatgtggcaggaaatggcacagagctgagtgagggagaatggggaatncatggttnaaggtccagatgcggcca

SEQ ID NO: 462055 - DNA, 347 bp, Homo Sapiens
  misc_feature (202)..(202): n is a, c, g, or t
ggaagaactacgtcatcaagcgggagctggcggtggtgcggcagcagtgcagctcggcggctgaggacctgcagaaggcacagagcacccatccggcagctacaggagcagcaggagaacccccgcctcacagaagacttcgtgtcccacctggagaccgagctggagcagtcgaggctgcgggagacggagacactggggngccttcgggagatgcaggacaaggttctcgacatgggaaaggggaacagctcgctgcccgacgagaacaatgtggcgcagctgcaggaggagctgaaggggctcaaggtgcggggaggccaggcggtggcctcgacgcgaggggt

SEQ ID NO: 462056 - DNA, 813 bp, Homo Sapiens
tgaaacacggaactcttgtttattcggctctgggcgtcagtgttcttcgcccagcctggtcccgtgtgcttctaggtccaacctagtcgcagcccggggagggactggggaagacggtttcaggggctggagttaggggagaagaaatgtggagtagaagctccaacatacagataggcaaactgaagccgaggaggggacgagccgtgcccgaggtcacccagcgagctgggcactgcgctagccccctcgctgcaggccggaatcctgggaaccgagccgggcttccgcctcgcgccaccggcggcgcccataagctgtaaggggtcctggggctccgtggctgggctttcccgagggctccttggttggagacaagcgaatccagtatatgatctccgccaggcggtgggtccggcatacgcccaggtagcagacgtgcccgcggtgctgggggacctggtgctggcctcgcctggctgcagtgtccaggtccccttgggcggagaaggcgaggagcaacagcaggatgaggatgtggatagtcatcgtgggcagggcgggtcaggatccgtggcccgtagttgcggccaccccgccccgttcccgcaccgggctgatcgcctctgggtgcagctctggagccaggtaccagggccagttcccacttcccaggcggggaacactgaggccaaaagtctgtgggaagaggccgcaccacaccagaggggcaggattcaaacccgggtccccgcttcccgcaccgcggctccagagacctcactgggtgtgtggggtcacaccaggctgctg

SEQ ID NO: 462057 - DNA, 581 bp, Homo Sapiens
  misc_feature (67)..(128): n is a, c, g, or t
caggaacttctctgcctcggctccggttgccgaagagaaaggggatcgcgcgtggtggggaggagannnnnnnnnnnnnnnnnnnnnnnnnnnnnnnnnnnnnnnnnnnnnnnnnnnnnnnnnnnnnngtctagttcccagctttgtacctggaggcaggttcacccctcgcctctctcccctcccccaggctcatcccacttgtaagagtgggacattcttgtgctcacactagcaccagtagaggccactacacacctcattaaataaacaatcagacggccaattcattaattttcaggaaaggggagggggcttgagctccctggttccctggcccagggatttcccagcttccgaagtctcgaggaagagctggctagtctcgagggactcctcgcgcggggattggagcccgagtctgcggaagagcgggggtgtcagaggggcacaattgcccgctcacaacccctggtgttgatttaacgatgaggacgccttggagagcggctcggagtgatcgtatctgttagtgtttccgttatgaaatgcctcttctttcctggggattcctcgtgccg

SEQ ID NO: 462058 - DNA, 557 bp, Homo Sapiens
  misc_feature (272)..(272): n is a, c, g, or t
  misc_feature (386)..(386): n is a, c, g, or t
  misc_feature (404)..(404): n is a, c, g, or t
  misc_feature (428)..(428): n is a, c, g, or t
  misc_feature (453)..(453): n is a, c, g, or t
cgaggaaacgcgaacgtgaggccccgtgactgcactcccacgtgcaccaacgctgccagtgtgagcagaagcgtagcccgcagagcgccaggctgcgcggggagatgcatcacgatgaaaaactgcgccagagcatggcgggaactttccgagagggcgtgttgtttccaggcggttccaccttctaatatgaaacagtcttggttgattttccttgatactactttatgctcggcctggttgttggcaagtagctgcccgcgtctgtacgncgcccttgattagtttccactgcatgtgttttaacacagtcctcctttttccacgtttatttgggccaaccctgtctgcaaagatccagtttaataacagatttgagtctacgngctatagcctggaaatgnactaaagacactacaacatattgntgaaagaatagaatctttattctgnatgcaaagcggacacctagtaaaaattctggaataataaaacaagcaaggcttatgtgctcagttttggggacgctccaatttaaaggcttagtcattgtcacg

SEQ ID NO: 462059 - DNA, 674 bp, Homo Sapiens
gctccccttggtgacttcctctactcacatgggtttagctacaaatcagatgttcattattcctaagtgtgaacccctagccctggctttccttgcaagttcagacctacacagaagacgatcacagctgacgggtccacttttgatctggtctcaccagctggaatcacagtatcttcttccctgtttctaatcctgtgtgtctgttcaccacaccctaccacatttatcccccagtgtttctggaattacttcctccttctccataaagtgaccatccaagctcactttatttcaagccctcatcatctgttgctgggacatcaccatgacctcaggcgatgccagggtcttcatgagcatggaaccaaatcaacatggaagaacaggtcatgaggagccaggtcacctcagccatggagctccccacagactcccacgcatgcccacaacatctctaacaacagcgattacaggaaacagcaactattaacattgcacagctcttctacaaagaactttcacatgcattcccttaggcctcaaaatcataccttacagaagagaaaactgcttaagacattctgtgactggtcaaacctcacagaactacccaaagccatgcctggctttcgctctgagtatcctaagcccaacctgatgcctcttcaacg

SEQ ID NO: 462060 - DNA, 920 bp, Homo Sapiens
  misc_feature (15)..(15): n is a, c, g, or t
  misc_feature (245)..(259): n is a, c, g, or t
  misc_feature (435)..(435): n is a, c, g, or t
accaatcagcatctntttatttttgaaagttagctccccttaggttccatgcattccacttctttctggatctctggtttcacaggcaagatgggacaggcagagagaacctgggcatgtgcctctgtggagaaagtgacttcagaaaccgctgaggctctattagcctgggattctaaactcggggggacatgaaaaactcaagagacgagtcatcaggctctatattcataagactcttctcnnnnnnnnnnnnnnnctcttttcaaacaaatagcactgcgcagcatcccttagagactacagccaaatgtccttcatgtattttctctgcattttcaagaatctcgggaccatgcttcctatctaatgtgtgaccttgagagttaaaatcaaggggaaaaggtcaccgaattcgggggcaagtttgagttncccgtcaccagccacaatttctatatcaaatggaggacaacacaccacctgggcctcagccaggtttgcctgaagcagggccaggcagcctcaaggcctccatggtaggctggggacatggggacgtggggaaagggggtgcagggaaactgggaactaggaggggagcgtgagaaagagggaataaatgcgtacgcggatgaagaggaacagcaggaggagatgaaggcggcgcacagggcagaacggcagacacagggctgggaaggtggcagggccggactccagaacctcagctgagcgttttcttctcctgtgtcccagggatggtgtgaagtgtctacaggcatccgagtgaacccaaagggagagtttggctggcacacggggagacgggccaaggcgcggcgggcgagggcggcacaagcatggcgctgcgacaccactgctgggagcagggctgaaaggtgtcttttgctgtaagg

SEQ ID NO: 462061 - DNA, 527 bp, Homo Sapiens
ctaagttttgcgggccaatgcttaatttagtgaacaaaatttgaccgaaaacagtattttctaaacatgttttgtaggaattccttatattctcctaatccctagggtctcgtcctgcccaagaaaagacaaccataaagagggaaggactaacaactcaagttaaaaatgaatcagatttttacttttggggtgaatgaatcacttccagaaacttggggtggtgcctctaaaatatgtacacgggttaaagcttctctcggtttgtttcactctcctccattccctcgcacactgatctcatgttctctctttgctggacgaattcaagttccccaggcgcacagtgtgacttccaattgcgggtcgggggcacacatgtgggcggcgtggcgtgcacacggtacttcgtcctgacacctgggcagacacctgggaggcacttccccgctagcccaaggttccctgcacgcccggagtccgctctgcggcggcttcccattcatgcttttgacaactctgcggcc

SEQ ID NO: 462062 - DNA, 426 bp, Homo Sapiens
  misc_feature (80)..(80): n is a, c, g, or t
aaatccctaaaatctccctaaacccctagggtctcgtccctgccccaaagaaaaaagacaacccaataaagagggaaagnactaaacaaactcaaagttaaaaaaatgaaatcaagattttaacttttgggggtgaaatgaaatcaacttcccagaaaacttggggtggtgccctctaaaaatatgtaacacgggttaaaagcttctctcggtttgtttcactctcctccattccctcgcacactgatctcatgttctctctttgctggacgaattcaagttccccaggcgcacagtgtgacttccaattgcgggtcgggggcacacatgtgggcggcgtggcgtgcacacggtacttcgtcctgacacctgggcagacacctgggaggcacttccccgctagcccaaggttccctgcacgcccgg

SEQ ID NO: 462063 - DNA, 700 bp, Homo Sapiens
  misc_feature (245)..(299): n is a, c, g, or t
ctgagggagggcaggagagtggaaaggcagagagagaccttggttctgaggcttatttctgagacattttaattaaaaatacccagcatgccaaagcaccatattttggggtatagctttttgaaccccaacatttaggacttacatacttatacatatatgtagcaactactgaaatatcctgctgctgaagacattaatacttcagacagtataatgagtactagatatttgtagtacgtacnnnnnnnnnnnnnnnnnnnnnnnnnnnnnnnnnnnnnnnnnnnnnnnnnnnnnnngactcttgaagtgggacacaaattggttccaataaactcagtttctatgtccattgactaacctactttatcttccctcatttcttttcttttttaaactctttgccatgttgttagtgttaagaaattttgctgctcatgatactgttgtaggctcaaaaatgtattgccaatcatgtgtacaaagaaaatttagctgctttactgtaacaaatctattttattttcagtaaaccacctattctgaggtggtgtagggaattacagttgccagttcatgttattttagtctcttctaattttaaatgtcacttttggatgattctgtttctctcaggtgaatcctgagtcagattttctgcttctcctgctgttctatccaatgtggcatcaggatataa

SEQ ID NO: 462064 - DNA, 372 bp, Homo Sapiens
aaaagctgttctttaccatggtttaaacgctaaaatgcatagctataaaaacaaaacactgagctaatctgattacatccagcttttgcactcaatagcccttgaccctccagtcataagcaagcctgtcattcgcccagccctgctatacattctcattatagtttcgtttcaaatccagtgttacagaaacaaaacaccaagccctcaatcatgctatgcgtatctttatgtgtgcatgtcttatgtatgtttaaaataaacatttttaaatgttttagggccgggcttgggtggctcacggctgtaatgggttatattatccaatttaatatgtaatagcatctgtggtttctgtttatattcattcag

SEQ ID NO: 462065 - DNA, 522 bp, Homo Sapiens
ggccgcacacccaccatcactgatcacactgatcacgggcgtctgacacactgggttcgagttccctctctgcatcagactcacccccattagttcattcgcctcacaaaaatgtgactctgcacttcaaatagatgaatttttttcaaaggcctatggggaagttttaatattttatgtaaaaacccagaagagaggactctggaaggcttcctagaagagggggcatctgaactggggcctggaagccgagggatcctcaggtggaagggaagaaagaacattcccaacaaaaggaagaacaacgacaagggcaagagaggggtggcgcccgcgtgtccgagccattggtgatacgaagaagctgcgccacggggaacgtgagagccgcggtggagaaactgctggaaggtttccctgaagctgcgagttcagagtcagccatgtgtcctcgcacctcagcgagggtccctgccgactgagcggaggaaacccctcggtccagccagggcacacacccgg

SEQ ID NO: 462066 - DNA, 530 bp, Homo Sapiens
  misc_feature (517)..(517): n is a, c, g, or t
aaagatgccaaaaaagacttaacaaatatataatagaagaagaataccccattcattgtgatttacagaacgtgacaaaagaaataaagatgtcagtgacaccatgcacggaagggtgtcctggggactgaggcttctttgtactcatggagggcaccaccaagaacttcctcttcaatttctccctgtagccgccccacatcagcccctggtccttggaggctgctgaaccacgattatgctgcaatcagtgaaggaagctgaaattgtgaaagtgaaacaccatggctggtcatgtgcccagatgatgttgtgttctgcaaagtatctccaatccctgggttggatccagtaggtgcacttgggcacccaaaccggaaacagggattcttgttccttaaacacaagacattccaatgagaaagctgctcttagatgagttgcagatcagggaggaggagatggaggtgtccttggcttcccagaattgctgaaacttgaagaccaaggccacctnctgagaggcagag

SEQ ID NO: 462067 - DNA, 513 bp, Homo Sapiens
  misc_feature (25)..(25): n is a, c, g, or t
gtcgaattcccccttgctgcaaggnaacagcaggagccagagcgtaaggtaaacgtgtctgttgcctgcctgagaaatgaagtcagagccgtgcctgagcccaccattcagggagcaaactgtgcacccaactttggttccgggtctttggtggtagagccagcatagggtagttgccagagctggcatgtgtacttttcctgttgcccaccaccgccctggagtaccctggaccggatgcccacgttcctccccctgctgagcaggatgtgttaattgtcttttgcccggccacttccacctctcctctgcctcccctccatgcacaccacacagacaaagtaggaatatgctttttgatgttggctggttttagaagtttgcctcccacctttttttctctttccaaaggagaacaacctgaatacccacacacagtgttatctagctctgactttgaagaggaatttctccccttagggctctattcctggtatagcataatctaggaga

SEQ ID NO: 462068 - DNA, 482 bp, Homo Sapiens
  misc_feature (341)..(353): n is a, c, g, or t
attgtataaaacagtatgtatttagattggcacagttaaatacataagggaaagagaaagtctttgccctttccacaattttccttcactataaaatattatacaacattcattaaaacctccatgtttattttaataactgacctgaaactagtaaaaaataaagcaatattctccacgggagaattaaatgaaaatagtatcttaagcctacaagttatctgtgtattcccaaattgtcattaactgcttaagaacattctaggtaaaaggaccattaaatgggctaaactatgatcaaaagccactgcaacttactcgaaaccttatgaaaagtgacnnnnnnnnnnnnncacacatctgcaaatttacactggaatatgctttccacaacatagttcctttaaccaaaagcagcactttcaatccaaagtgttgcctcagaagcagtaccattcaggtactgtatcactcatctgttt

SEQ ID NO: 462069 - DNA, 542 bp, Homo Sapiens
  misc_feature (63)..(63): n is a, c, g, or t
  misc_feature (316)..(370): n is a, c, g, or t
  misc_feature (401)..(401): n is a, c, g, or t
  misc_feature (439)..(439): n is a, c, g, or t
  misc_feature (449)..(463): n is a, c, g, or t
  misc_feature (478)..(478): n is a, c, g, or t
  misc_feature (486)..(486): n is a, c, g, or t
  misc_feature (515)..(515): n is a, c, g, or t
  misc_feature (522)..(522): n is a, c, g, or t
ctgggtcccgaactcccatactcaagcaatgcacccaccttgggcctcccaaagtgaccgggnaccacaggcatgtgtcactgtgcccagccactgactgacttgttcttaatgaaagccatttcctagtgaaaaggaagagtatggaaagcactcacatgttagagctctaacctaagtcttaaaggagtttgatagttcagctctctgttagcataacatttgcactagttttcactattttcatttatattaggcttattttgatcattacataaatgaaggcttattttatattttcttgagagaggttctnnnnnnnnnnnnnnnnnnnnnnnnnnnnnnnnnnnnnnnnnnnnnnnnnnnnnnncgacctctgggcccaatcctcccacctcagncttccgagcaggtggaccacaggcacataccaccacanctgcccaacnnnnnnnnnnnnnnngtagagatggggtcnccgtgttnccagggtggtttgactccgtgcttaagtnatctccngcttggcttcaaagggcggg

SEQ ID NO: 462070 - DNA, 576 bp, Homo Sapiens
  misc_feature (94)..(138): n is a, c, g, or t
ggccgcctcagctgacatcactctgtgcttttcaagacttgagccaaaattctatttagaaattctaaatgtccagggaggcgtttgtaagcgnnnnnnnnnnnnnnnnnnnnnnnnnnnnnnnnnnnnnnnnnnnnngcccccacaggaaaatacagccttttggtttcaaccttagacagggagaagcccagctgctattaaaactgagcaggaaattgcatggatgaccagacagcgattcttcttctccatggaaatttctcctaaatgctgaaaattcagggaaagtgagtggtttgggacacgtctagaaaccctgaatgtgtcccccaccactgagagatgcaagtctcctcagaggctgatgtgaggcccacaaagcaatgcactgatttgtctgttttatctgtgtgggtgtgcatgtatatatgtgtgtgtatgtgttttgtgttggggtaaggaacctttacagtaagagaatttttcctgcaaaaagtccttctcccatcttctttctctaccactaggacggttttccgaaatgcagtgcttttgacatttgggactaatcat

SEQ ID NO: 462071 - DNA, 541 bp, Homo Sapiens
  misc_feature (63)..(294): n is a, c, g, or t
ctttctttctatctatttatgtatttatgtatttatttctgacacagagtcttgctctgtcgnnnnnnnnnnnnnnnnnnnnnnnnnnnnnnnnnnnnnnnnnnnnnnnnnnnnnnnnnnnnnnnnnnnnnnnnnnnnnnnnnnnnnnnnnnnnnnnnnnnnnnnnnnnnnnnnnnnnnnnnnnnnnnnnnnnnnnnnnnnnnnnnnnnnnnnnnnnnnnnnnnnnnnnnnnnnnnnnnnnnnnnnnnnnnnnnnnnnnnnnnnnnnnnnnnnnnnnnnnnnnnnnnnnnnnnncagtgtgagccaccacgcccagcctctgtttttctaacttgtgtttcatcactgatgacaaagttataatattgtctgatgttcccaatgtataaagagaaaatatttaagagaattatattataaatggagaggtaatgaatcttaaatggagggacgctttctatacttcacttgaactggtaaaatgtcaagatcaccacagcataaggaattacgtaacacttaagagtaacccattaaaaat

SEQ ID NO: 462072 - DNA, 662 bp, Homo Sapiens
gaaagtctaaagggggtaaagtgagtagctatgctgatattctctggtggaaataaatgttctctagccacactccaaattagagaaatttctccaattagatgcaacttggtgtaggacatttaacaaaatctcaaaagctaacagaattggggtcttacaagaaaaatgacacacttgcctgtagcctctaccgagatctcttccaacacccttgccagctattgctcaggcacaaaatgtgatgagaacacaaaatagccagacctccactcccactgtaacttggtgtgggaaaacaaaatgattctaggcacaaaggacaaaggtaaaccagtcacatggcgttatatcagagccaaatagaatgtccaattgagctgcccaatcatgagcaggatgaaagaatttagtaactctgtaagaatgccgcaatcaaaaccagaaagaagcgtattattgtaatctaatctattaagcacctggtatgtattaggtggtgttctaatgttttatgcatacatattttagtccttttaagaaaccctataggtattgttattttatgtacagtttggaggtttaataacttgcctaaaatcatacaaatgatgacagagccaggacacaaatcactggtgtctggctccagagctcatgct

SEQ ID NO: 462073 - DNA, 638 bp, Homo Sapiens
tttttcagattttggaatatttgtatattgtcctttgagggagtacttgtgtgagggaatctaggtgatatggtttggattcgtgtccctgcccaaatctcatgtcggattgcaatccccaatgctggaggtgggcctggtgggaggtgattgcatcatgggggctgatttcccccctttggtgctgttctcgtgacacaggtctcaagaaatgtagttgtttaaatgtgtgtggcacctcccacctctctctcttcttcctgctccggccacataagacgtgcttgtttgcccttcaccttccactatgagtgtaagtttcctgaggcctccgaagttatgtttcctatacagcctgcaagaactgtgagccaattaaaactcttccctttataaattacccagtctcaggtagttctttatagcaatgcgagaatgcatatagcaatgcgaggactaatatactatgcatgtatacaaagatatatcacggctaaagggggttgagagagtctttttcccttagggacactgaataaactatgtgttgtgcccctacactttgtgccccatcacataaggtgtggaactttccacttgtggtgtcctgttggccctcaaaaagttatgggtttttt

SEQ ID NO: 462074 - DNA, 701 bp, Homo Sapiens
  misc_feature (100)..(100): n is a, c, g, or t
  misc_feature (362)..(370): n is a, c, g, or t
cccgagattgtcacttgaaaatgcgccagcctgggtgtaaaaagaatccctcttttgtctctcctcagttgggagagccgaggtgttcctcagaggttancactggattatacacggggtgcggcgcgggggagctcgcccttcttttccgctcccatttgtttgtggcttctgcccattcagatttatgctggctcaatgcccttttctcctcactcagggttacatcccagattcacaaatcactcatagccaacaaattaagagagctttaaacagaacattagttacagactgggcattaaatgaagatcaggtaaggtgaaggggaatgtactgatggacaacttgggatgctgagnnnnnnnnntaaatgaagggtacaacacatcgagcgtgctggtctgttaacacctttcaagaatacctaatgatgtcattatgggggtcttgggccctcacctccgaaacccctcaaaaacccttctaatagtccttcttggccttcaggatggaaaaatggctagaatgaggttaaatctccccaaaggctatactgagacagttaactgccttgagccaatgaagaaccaaaaccaaacccaactgatatagattttctttttttgaagggagggggttttaactgttcccattgtgattatatatgcccgtataaacatttacatgaagaaagcatt

SEQ ID NO: 462075 - DNA, 566 bp, Homo Sapiens
  misc_feature (30)..(30): n is a, c, g, or t
  misc_feature (58)..(109): n is a, c, g, or t
  misc_feature (384)..(384): n is a, c, g, or t
  misc_feature (454)..(454): n is a, c, g, or t
  misc_feature (501)..(501): n is a, c, g, or t
  misc_feature (508)..(508): n is a, c, g, or t
cggcacgaggtaaaattacttttaaaagcnttcttgcttttattaaaatggactttcnnnnnnnnnnnnnnnnnnnnnnnnnnnnnnnnnnnnnnnnnnnnnnnnnnnntaattctaaatgcttcatgtaattgagggacattatgagaagactagaaagtatctcatcagataatcctaagggctgtaacttctacttgccataaacaaagtataattaagagtgagtagcaattggtttggggagtcgtagttatatatgaaactttcttttgtttctcatgatgtatgtaaaatgtttgcagaaggatggtagaaaatgttactaatgaatttagagtggtttgggagaatacactgatacttcctcatttgaaaattatnaagggagttgacatggggaactaagagccagaagtggctggcctctagcttttcaatacctgataagtgntcttggctatgttttgaacacttaaatttctcaacaaatggctatgnctatatntatgtaggggccacccttgccctacttgcatgccactttgacttttaactgaaatcag

SEQ ID NO: 462076 - DNA, 391 bp, Homo Sapiens
tatcccgcctctttattacatcccttatgcatacagaattcacactgatttcagttaaaagtcaaagtggcatgcaagtagggcaagggtggcccctacataaatatagacatagccatttgttgagaaatttaagtgttcaaaacataaccaagaacacttatcaggtattgaaaagctagaggccagccacttctggttcttagttccccttgtaactccttataattttcaaatgaggaagtatcagtgtattctcccaaaccactctaaattcattaggtaacattttctaccatccttctggcaaacattttacatacatcatgggggaacaaaagggaaggtttcatatataactaggggcttccccaaaccaattggctactca

SEQ ID NO: 462077 - DNA, 909 bp, Homo Sapiens
  misc_feature (546)..(546): n is a, c, g, or t
ttttaattctcaaaacaaaacttgtaacagtgatttttatgatgatgatgtcatccactaaacagaaaatatagtctttctaacaaatgcaaaaaatattactttttaaaaatttgtgtaaaaccaaaaatttctatgatttattgaatggctgttctgttccagggcacttgacttaactcttttaagctttgtaacaaccctgcaaagaaaatttcccccattctcagagatgtgaagttacataattaggtaaatgggctgaaggcaggaattccaacccaggatctttcaggattccaatggtctatactcttagtcactgggctaaactgctttgctatgaatgtttttgttttagtttttaggaaaaagccaagaaacatactcctttaagagtcctaccctgtgtgttccctgatttcttctatgtggaccagatctaggaaacaggtatgagaaagtccttattagaaaagtctaggctaatagttcctcctcttgcagcaaaggtcccaagccctgctctcccatgaatacacctgncctttcaaatccataccccatcctcagaaaggagtgggatgtcatcaatgaccacttaaaaagttaagtattagttttccccttggccaaggccctggagcctcaggtagcagattctgctccaagcatctttggcttgtataaaacttggggtattgagtggggcaagtggattacagaacacagtcattccctgagatcttagtcaccctataacagctatgtaaaataattactctatctgccttttgtaattatcttgccaaatggtgatctagtatcactttttcaagacaagagtctccaaggaagaaaacttacccctgaagaaaaaaatgagacatttgcagatgtgtttttcca

SEQ ID NO: 462078 - DNA, 279 bp, Homo Sapiens
tgtgcagaaatttattttaaattttattgcatcacattatacaagcattaatcatggcttcatattgatgactatttaaatgtgaaaattcactcatgtcagtactttttggctatttacaagtaaggaatttctatgtactttatatatctctgtatttgtatgtacatatgcaggaatacatgactatacatatgtacacacagaaatacatctatggccatacacatagctatagatatgtcatatataataatcttctcagaaaggtctaaaatt

SEQ ID NO: 462079 - DNA, 549 bp, Homo Sapiens
tcaaactttaaaagaagtgatgactgtataccaaatgctgtgcttaatgttagtgacagacagataaataggatgcgtctgtttgcccttaagcaatttacaactcactggggaagaaacagacatgcaaacaacgagataaaacacaattagatgagtgctacaataataatctttttgtaatatttcaggaacagatagaatggaggtcctgaaaccatccctataaacttcataaaattattcaggtaagaagggagggggagaaacaagaaacaaaaataaaccaaactttcagcccattcaatgttaaacactaggccagcttgccctctgacctgcttccccatggttgtttggggcctattacctcagaatcacccagaccctgttacaagattatttccccttagctgctctatagataacttcctgaacattatgaaacattgttttccctttgagatattctttcaggtcctgcatactagtaaaactgctgatatcagctgctctgtaggaccctattgacacaagctggtctgaaac

SEQ ID NO: 462080 - DNA, 588 bp, Homo Sapiens
atttttcaaaaaggcttcatcagacttaccttgagcaagatgatcctcaatgttggtatggcaaaccacatagtgttagcatgataaataagtgcctgttaaatgggaggctgccttctgaagatctggcccaaaacactcatctctgaattttcctcagtcaggcataactaaagcaagttacatatctgcaataaaacccacatggaagtcaccacctcaggggaacttttacaccattactaccaccatcaccactgtccgtgacaacaaagcaacagcaacagcaaacaccttgagtgcttaccatgtgcttggctctgtggctcttggaatttaaagttgaataaggcaaagaacctactcatgagaattctatgactttgtagagagaaggggagacttttaccaaatacctaacctgagaatacatcctatgtaaaggaagattcataaggattcctaaactgtcggggctggagaactagagagggcattacagatgaggtccagataagtgattgactaaagcaatatcacctggatgactctagacttccatccttaagtcctgtgctttttcccctc

SEQ ID NO: 462081 - DNA, 661 bp, Homo Sapiens
  misc_feature (54)..(101): n is a, c, g, or t
cagattctttttctttcaaggacgcattttatacaattttcaacatttatactnnnnnnnnnnnnnnnnnnnnnnnnnnnnnnnnnnnnnnnnnnnnnnnncagaagtaatacaattttaatttcaatattttaaaatacagaaattggaaagaatactaaatacaactttaaacaagtcacttgtcctcccctataataatcaatgtaagctacttaaagacttacaaatttaaagtaaaacagaaacaaaataaatactgtacactttccctgcctgcaggcaaaagatgggaaatactgttatgaatcagcaaagaaatgctcttcaagcttcagcaccccacctcccagccacaccccacgccattgtcacacagtgggcttccggactgaaaggacacacatgtcacacacattgactgcctatacaaacaagacgagacgctattccgcagacaccccaaacaagaagaacagtcccctcggaccgtgggcataaaaaccagtaagaaaagtcagtcaggctagcaaaacgttactacaaaactagtaaataccagagccaacaactgtcccctctccaaagttcacagatttgaaacctctaaaaccaatactacccctccccatcaccccccaaaaaaactacctgtgccgaa

SEQ ID NO: 462082 - DNA, 435 bp, Homo Sapiens
  misc_feature (100)..(100): n is a, c, g, or t
  misc_feature (152)..(152): n is a, c, g, or t
  misc_feature (424)..(424): n is a, c, g, or t
agaaacctcctgctcaacagtcaaccaggtcaacagttccttctgaactcggctgtaaatgaacaggctgtccttgggggacccccctcaacaagtggangcccctgccatcccctgctgctcctcccatccctctttcctctgcccccctncctcttctcctgcctttttccaacatttcctggtgccttctgtgggccaggcttacagaagaagctgtaggtccggagacatgacacgaggtccctggtctccaaaaccctgcgtattttgtgacaacagattctggtacatgctttcacagtggtctgtgcaaggcccttggggagcactgtggagggaacacccaaatctgctgggaggagcaagacccaaggccagcaaagagtgggtagagctctgggctaggaaggggtctgagtcnctgtgccgaaa

SEQ ID NO: 462083 - DNA, 553 bp, Homo Sapiens
  misc_feature (16)..(16): n is a, c, g, or t
ttttatctaattaccntcaacactgaggtttaccagtacaaatacaatatcttgcctcaaaaggccttaaacagtacggaaatgtgttatctaaattaattaaaggttataaagtcaagttggctccagacatggtacaatgaggacatctggacagatataaaagagaactctgaacccctcatatcctcctaaacctttctaagaggcagtcctctcaaatccccaaccaagctgctctgcattaaacatttcaatgacttaacctggagcaatggcctcacacaggtatgcagcttcttctcagcagccacccccttcactgctctgaaccctccaggcccagagatctcagcatagcccctaggataggcagtacaaggtctgatttaagagataaccaagcatcttgctaatttccatagggaggaatctgggacacatctatgagtgggaattctaaggatgtctgtccaaggagaacgaaatgtttgttaagatcaggctatatctttatgggtgcacttgcccaggatccgcctcgttccgaatc

SEQ ID NO: 462084 - DNA, 416 bp, Homo Sapiens
  misc_feature (65)..(65): n is a, c, g, or t
tattaaaaagaggaactctgaaacccccttcaatatcctccctaaaacctttcctaaagaggcantccctcctcaaaatcccccaacccaagctgctctgccatttaaacatttccaatgacttaaccctggagcaatggcctcacacaggtatgcagcttcttctcagcagccacccccttcactgctctgaaccctcccaggcccagagatcctcagcatagcccctagatagcagtacaaggtctgatttaagagataaccaagcatcttgctaatttccatagggaggaatctgggacacatctatgagtgggaattctaaggatgtctgtccaaggagaacgaaatgtttgttaagatcaggctatatctttatgggtgcacttgcccaggatccgccctcgttccgaatt

SEQ ID NO: 462085 - DNA, 691 bp, Homo Sapiens
ggtaatctggattttggttatagctccattggtagctctatagaaaccagggaaaaataaacaatctggttttatgtctcctcacctgcaaaatgaagatgctggacttgattggtccaaagctatcggatacctagtagtttaactttagatcccaaactttgaggcacatagccatctgcttagactaaggggagagaactagaatgaatctactctttttcaaatcctcggagacatgtaagatctcaaggtccgtgtttcagatgaaaccattcaagaaataggccaaaaaaaagcctgtgttcattaatcatctaatgatgaattagagtgagggagtgttgaagatattaaggacagtcaacaggcaaatgaagaatagtccccttggcaaaatttggcagactcatctaagaacggaagttcctttaaaagagaaataaatgtgtctctggttggtatgatgaaacacacgttcagaaaagagggaagaatacttaactcatgtggaatatggatcttatggagaggtagacagttgcctttccatcttctgcctcctcttggttttatttttaatgaaaggcagaaatgggcaaaggtcatagtccaaggcatccagaacctctgtctagtaatgtccacatctagcctgttgaatgcaaccctaaggattaagaagtaatga

SEQ ID NO: 462086 - DNA, 844 bp, Homo Sapiens
  misc_feature (161)..(185): n is a, c, g, or t
  misc_feature (338)..(338): n is a, c, g, or t
  misc_feature (741)..(741): n is a, c, g, or t
  misc_feature (748)..(748): n is a, c, g, or t
ccccagttttgaagtgggagagtcgcatttcctccctcccaggatcacggtacagtaaagagcttagcactctgcctaatacatagaacaagcagcaaatgttcactgccgttgcgatgacagtgccctggcaggtgacctgtgctcaaggcgtcccagtnnnnnnnnnnnnnnnnnnnnnnnnngggtagggcagcagatgggacacacgccctgccacaggccattttaaggagtcggggtgggtgaggacccaggcacggtggaggaaagagggaggcaagaagcctttttcagcttccttggtgtcatctcacagtgcctccctcaggaggggnaaaagggaggggagttagaaggctgtttagctgtgttccattactggctgtgcttcacacaaccggccccaccccgacaggactccttggggacagaacgggagtgcattctcaggcacctaaatcttacaggctcagtgcctgcacagggagacgggtccgcagcccagggtcccgggcagctttcgggcttgggggtggattgacacacagcccgatggtattcacacccattccttcactgtcgcgcccggtcctgggggacggcatggcaccagccaacgtcacgggttgggtgtgagttcatggtagattctcacacgccagcctcacaagaggcactgccgagaccaggcttgctgccgcctactgtatggccggccctgtgggcacagctgtcctncacccgncttccaaggcaccatcgggcccagaatgtgcccgatgagtcacgggcccgggtctccccagcatgggccgcagcaggggggctgagtccgcctgag

SEQ ID NO: 462087 - DNA, 703 bp, Homo Sapiens
  misc_feature (315)..(315): n is a, c, g, or t
  misc_feature (534)..(562): n is a, c, g, or t
gttgttacagacaggatcagtaagatgaaggctgagaattgagaccattgaatttagtggggtggggttgttgcagacattggtgagcagttttggtagagggagaaaggtgaattaaagcatggttggagtggtttcaggagacaaggccacagaaggaattgagggaaccattgtagataacattttcaaagaatgttgctgtaaaagagagcagagaatgggaatttttcttaagagagccactagcaacatatttgctaatgacaaataagggagatgagagaattgctgggaacaattagtatttgcatnggtgaattttcagtactttcccttgttttattctagtatgcagttgtactgtgtaagtttgccatgttctctttaaagaaaataattgtagaattgactgtcaggcgataccatttcttcctgtctattcctcggactctacctgaaatatcaaaatagcagaaatagataagaataaggtatttggcagggttttcatattgacatttcagtctcagnnnnnnnnnnnnnnnnnnnnnnnnnnnnnactaatagtcgtatatctctaaaagattttcagaggagttgataacaggaatgtcagaaaacagtatattactgtcaagtgtaggaaaatagctttttgtcaattccttgatgaatttaacacaaaatgcttttacatttt

SEQ ID NO: 462088 - DNA, 743 bp, Homo Sapiens
caaacctttattaggggaaacactacagaagattagagacagatgaggcagcactgggcaggcagcgtaaaatgtattggatacttttccaagttatgtaggagccacagcatggctgtcacagctcaggggcctcttcaaatttcagcttgtccaagtggtgtgcatggaggcagtggtcgtgttcccagaggccacccaggcagaggaggtgtctggcagcccacaaatggtcctgaagagccagccatgcagtagagcaagtagggcaatcctgaaaaaggggccctcccaaagccatattgacctctttggggatgattctctatgccggggttgtccactagctgggctcctgactaatgtgtctctccagcactctctgtttttcaaatcatttccctatctgtgctgcttgtaggcagccttcttctcttgcatctccctctgcgaggcttaaacacagagccagttgtcgtaagcctttctttcagaagtggcgatctggcatctgtagtagtcttctacccaattctgctgctcttctgtgtcttccatcattttccttatacttaagcatttcatcagagagaatcttgtgttgtttcttagtttcttgaggatgtttctttgatccactgatcttgatatactgaaggccttatctttgaagatgacgggttgatgggttcagcaaaccaccatggcacatgtatacctatgtaacggcagcactgcgaggc

SEQ ID NO: 462089 - DNA, 514 bp, Homo Sapiens
tacccttcaaaagaagtcggaaatactcagcagtgggaacaaaaagcccattgcagttctgaagtgtggagtctgtcttttacaagtcccatgtgaatccataatatatggaatgttgatgaggttttagagttaaaatcttaagtccattaaaaaaattattacattagccttttggagcaaaggtctaaaatataatgcattttggtttacaaataaaactagtatgataaaaaactaaacagaaacacaaggataaacccacaactttcaatgatccttttgaagaaagcggtacctctaatctcacaactgtcactgcgattaaatgtagtgagagcacatatcaaaaatgagtactgccatgagggactttagccaaagtgtaaagtatgctgtttgtcttggaaatgtcccacctcttggcaaattctcttaatctttgcccaggcatccagtaccctcatgcttccctcttttttctttgcctccaggttttccctcatgccgaatt

SEQ ID NO: 462090 - DNA, 651 bp, Homo Sapiens
gcaaccactccatgattttgcagtcaggacaagcctgtggtgaccctgaagcttcagagccacttagtaaccatgctccagaattggcgtgcttggggccagttagaagaggccaagtgacccagctctccccatgggagtcaaggaccacagcccaggacacggtttcctggacagcttcctgcagagggcaggtggtcctctgctgtccttgcaacccccgggtgggcactttgagccctgcctcttgggttgggacaggcaagcccacagggggcctcaaagctgggcaacagcccaaacctgggtcttccatggggagtgggaggggaagttccctcttcatgggagaggcacccgggaagccctggcgaaaaggggagaggcctgagcacaggaaggccaggagcaaggttgggctccatgcagccttcaccccaggcactagcaggtaacaccttgagtcaaccgcctagcagtctgcctagcagctctggggcacaggagggacctaattccccggatgctcagtgggtgccaggtacctgacgccacacagtgggccatcccatgtaggcagaggctccctgaagctgggagcagggcagcccttggcctctcctagaggaactggaacgcaggaaggctcca

SEQ ID NO: 462091 - DNA, 385 bp, Homo Sapiens
accatgttggcccaggctagaagacagagagggccttcagtcccacaagaacttcccagatcctccccttctaggtcccaagtgccagtgtgctaccctggggtcctgtgccagccactggaggatggggaaacagctgtggtgcacatgagcttcgatccaatgaccctcttcttaccacgtgcccttctgtctttcccagcaagagaatgctggcaggcaagcctccttccttcccccgcagtaagatacctcactacagggctctggtatgaagaggccccagcagaagtcccagcaggccactaatccccaggtatcacctcatgcctcattcctccctcccaactcccagaggcacagagaggcacacagggcacttacg

SEQ ID NO: 462092 - DNA, 731 bp, Homo Sapiens
  misc_feature (507)..(525): n is a, c, g, or t
atggactaatacattatctcactgaatataattgctgtaatcccttagtgtaaatctagtaacaatcgtgttttcacagttccctctcataatcatttaattaatttgtttgaattgaaattcataaaagatacagagattgagattcattgacacgtcccttaagtctcttagtttaaaagctctcctaatatatcccacatccccttgtattttatgttgaaatacattttgactccattgaaagaacaaaatcatttgtcctatataattgtacaggtctacagtttgattattgcatccttctgggtatcatttaacttgcttctctgtgtttcttgtacttcctggaaattattaattatatctagaggcttgattagattcaggtggaattttttaaagatttattcctggtgactgtgaacttccatcagaaggtacatgtctgattttctctccttttttggtgctaacagccagtgaatataaaattcactcctgtcnnnnnnnnnnnnnnnnnnngctggaattattctaaaaagagaaatatttttcattacatatttgattaccatgaattatgattgtatagaaaaataaagtaacttactatttcccctttatagtagtattcaaaatagtaaagtggtggtgtatcactttacaaaatctcacaaatcaccactaaagaacttatttatgtaaccaaataccatctgttccccaaa

SEQ ID NO: 462093 - DNA, 339 bp, Homo Sapiens
  misc_feature (102)..(115): n is a, c, g, or t
gtttcataatactattttgtgtagaaaccattactgtttgttttgtatttgtgtaggtaaaaagtattatgaaattatgtaattacagtattcactctgccnnnnnnnnnnnnnntaattataactcgggtatctaatgattgaacatttagtaattcttccctgacaaaaagagaaaaatattataactcaggtatctaatgattgaacatttagtaattcttccctgattataaaagtagcacatttatactttggaaaataaaacagcatgtatgggaaaaagtaataaacatagagaaattccatcacctcccttcccctctcctccaagaaaaa

SEQ ID NO: 462094 - DNA, 795 bp, Homo Sapiens
  misc_feature (728)..(728): n is a, c, g, or t
  misc_feature (736)..(736): n is a, c, g, or t
tcagcctcgatgcccgcagcagtctttccacaagtgaggtggactttgcctttctggtgtggcagagcttcccagagcggatggtgggcttcctgacgtcgagccatttctgggacgaggcccatggtggctggggctacactgctgagaggaccaacgaattctccatggttctcaccacagccgccttctaccataggtattaccacactctcttcacccactccctgcccaaggctctgaggaccctggcagatgaggcacccacctgtgtggacgtcctgatgaatttcatagtagcagcagtcaccaagctgccccctatcaaggtgccctatggcaagcagcgccagggaggctgctccactgggcgcctgggggcccggggcagggccaaagccgcctgccccagcccccgactgcatcaaccagatagcggcagttttcgggccacatgcccttgctgtcctctcgtctgcgtctggaacccggtgctgtttaaggacccggtgtccgtgcagcgcaagaagtaccgcagcctggagaagccctaggggggcgacccgcggagaccccagcagaggtcgcagcccagctcccagggggcccggcgcctgccggcgggctccgctcttgggacaccggagaacctatcatgtcagccagcgggcccacacgtcggaccccggttggccaatcacaacaggggggcgtggccttaccttctnctgctcgncctcagccgcggagcctctgcggaggctgagccccgcgaccggagcgccgctctccgct

SEQ ID NO: 462095 - DNA, 724 bp, Homo Sapiens
  misc_feature (654)..(654): n is a, c, g, or t
ctcagaaacgtgcttagaaaagtgcagatgcattgttattcttggccaatgcagctgagccaggtgtaggtggatgattaccccaggatgttgagctgagaaacaggatctcagcctgaacccaatgtagctcagcagatgtttgaattatgtgatctccagcttttgggaaagatctgaatgtaagaggaacttaagagaattagcatgatattttaaagagaataactgcattacattctaacagcagacctgagtcggaaaacaagtaaagaatcgatgtattggtttgccgatgggaagagcttcagtgagatctcagaccctgaccctgcagtgaggccttggcaaatgattgacagggaagtttgtagataacgcagaagtagattagtgtgccactgctccaggctgaaaatcagaaatgaaagctaaaatacatttgtacataagctataccttcaattgatagagcaagctgtgtgactcaaaacagcctgtacagaagtacgatggaccagctggaaggtatcaatagaagataaggaaaagttaactcttgacaccagggaagtcaacaaatttcaggacaacagtgaccaatggttaagatggtgactaagtgtaatcagaaaaaaatctttaactccaagnttagactagccagtttgtttaattggatttctctggtcaaaacctaaactattggtgctttctaacctgt

SEQ ID NO: 462096 - DNA, 541 bp, Homo Sapiens
  misc_feature (527)..(527): n is a, c, g, or t
tttgaagttctactttatttttctttaatactcatttgaatgttacgttaaattcatattttcatagccaatagttgaaaagattgaaaatgccaataaactaattgacaatataaaatgtaaaagtaattatgtcacacaggctcatgaactacagtggatttaaaaagctgaagagctcaatgcaagtgccctctacccgaagtgtgtgctcttgagggcacattccgcatggccaagcctttgtggtgtcgccgggcctggcgtcctcagctagtggcgcacatccccctggactggttgtggacacgacagcctcctcagattgggaagcgacctgagaagcggtgctcggaagacagaggaggctggcctggcgctcttcaggctgaactctgcctgcgttgccttgcggtgggttccacagcagacgcttcccccttaagggagatgttgtgaaaggaaggtgctaactgtcaggggaaggtggcggtgccaggctttctggctccagctttggctccttnctcgctgttgttct

SEQ ID NO: 462097 - DNA, 408 bp, Homo Sapiens
  misc_feature (290)..(290): n is a, c, g, or t
  misc_feature (382)..(382): n is a, c, g, or t
taatttttctttaatactcatttgaatgttacgttaaattcatattttcatagccaatagttgaaaagattgaaaatgccaataaactaattgacaatataaaatgtaaaagtaattatgtcacacaggctcatgaactacagtggatttaaaaagctgaagagctcaatgcaagtgccctctacccgaagtgtgtgctcttgagggcacattccgcatggccaagcctttgtggtgtcgccgggcctggcgtcctcagctagttgggcgcacatccccctgggactggnttgtgggacacgacagcctcctcagattggggaaggcgacctgaggaagcgggtgctcgggaaggacagagggagggctgggcctggggcgnttctttcagggctggaacttctggcc

SEQ ID NO: 462098 - DNA, 503 bp, Homo Sapiens
  misc_feature (463)..(463): n is a, c, g, or t
  misc_feature (473)..(473): n is a, c, g, or t
agaacaacagcgagaaggagccaaagctggagccagaaagcctggcaccgcaccttcccctgacagttagcaccttcctttcacaacatctcccttaagggggaagcgtctgctgtggaacccaccgcaagcaacgcaggcagagttcagcctgaagagcgccaggccagcctcctctgtcttccgagcaccgcttctcaggtcgcttcccaatctgaggaggctgtcgtgtccacaaccagtccagggggatgtgcgccactagctgaggacgccaggcccggcgacaccacaaaggcttggccatgcggaatgtgccctcaagagcacacacttcgggtagagggcacttgcattgagctcttcagctttttaaatccactgttagttcatgagcctgtgtgacataatttatttttacattttattatttgttcaatttagtttatttggcatttcaatntttttcaaanatttggctatggaaatatggattttaattt

SEQ ID NO: 462099 - DNA, 763 bp, Homo Sapiens
  misc_feature (334)..(334): n is a, c, g, or t
agatccgacctttccatccaccgcgggacccagaggcgtcactctgtgtggggccctgggcttcacgactgaacagcatagcagcaaataatattaataaaataagagggcagaaattcagactccccaaaggtgggcaccttatgcagaaaccctttttcctttcacctttgcttcctcctgggaaggaggaaacctgaggacagctctccagggcccgttgtgttttgtttgattttttgactgaagggtgagtagcaacaagagcatggtcctgagtgtgctggggtggagggtgtggcagctatgggcactgtctgccatctggcagggngcgggcacactttgggcacccaggaacctgtgttagcttggcagggatgccgtttcaggccctatggccagcctccagaagccagacagggagaaaggactcatttctgttttctggctttgtgtgaagggcccaggggagggacctcgaggtagatcagattgccctggaatttctatcagcctctatgctcatgaatgaggaaaagaattcattccactaaaaacaaacacacactcacaaagcactggacagatacaatggggacaacactctctgtggtactgtcaccacgcagggacagcacgcacaatagttgacattgtgaatgtgtttattttgtaccagtctaagtagttctacaggcattatctcattcagtcttcaaaactggcctgcatggaaggtgatattacccctcgtgccgaa

SEQ ID NO: 462100 - DNA, 440 bp, Homo Sapiens
ttaaatctttactacaactttgaattttattagtggttggttactgactctgcccaagagttacagaatgaagggcagagagttaaggactggaaaactggcaggaaacacactgacagccgtcatccctggaggaaactgctccaataaaacggctcccatatttacttctctggtcacggttcatactccacgattttaacaaaggagtcgaggaagctagatactgtaagtggaacggtgtgtctctggaggtaagcaggcttgctgatttcttgttttataattcttttttaattacaatgtaactactaagagcttcagttcccactggagtggtgcacacatctcattactactaaaaccacaggaatgttccagggaaacagactatcatcactgagcgaggtggaatccagccaaaaccccaggctaacatc

SEQ ID NO: 462101 - DNA, 796 bp, Homo Sapiens
  misc_feature (324)..(324): n is a, c, g, or t
  misc_feature (628)..(628): n is a, c, g, or t
actcccgggcccggagcaggccaccgggccaccccaccgcccacccggctcccggtgttctcctcccggccgctctacccagcaactttccgtgctttgttccccgactggaaatgctttacggaagcgtcttggacagggtctccgccaggcgacaagagctcggtgctgagatgtgttacgttctcatctccccatcaattatggatggaaacaaataaggaagagtcaattttgctgagccccttctccggcaacgagagggcgttctgcagccgggagggagccgccgctcgcgccggcagccgctggcaagggggcatnggtgaggaggaaggtagggaaacttttatttcccgtcttgacagcggcggtgtttgtccctggtctgcagaaactgatacagtagcctccttccttgggtaatttaggagggcttgaagcttcttctgtcatgtgtaattccttggattgaaatgaaaggtcataaaggacttggaagtgtgcacgagaattgggtttgaaaaatttgtgctccatccactcttgggaccattgctgtcaggtgattgtttaaatcctgaacttgttaaaaggcgaaatgtcagggagctggcgggggtggggngtgtggagggggattgaagtcccggtatgaatcgcagcgtttgaggaacttagggcagtactccctgttctggggtgaccattcggtaactgatgttccagcatcccgagccctcagcgccgtcagctggatgatctcacagggaaggcgcagctcagtaacagtccg

SEQ ID NO: 462102 - DNA, 714 bp, Homo Sapiens
ggccatttcaaaatgtatttgtattttcagaattgaatgcaagtcatacttagagctcaattaaaatactcttgcaagaaaaagcattaaattctctttgagaattccgtgaaatgcaaattaagggaaaaataggttttaagcagtagcaaaaacacaccgctaaaaatggcctttgaattctcagagctatggaaaaatgtgagaaactaaattgtctcgagatgtcaagatttttctatctccagttgctattggcctgtcctactgttgtctttgaatatttcctgtattccaccccaaaagatttcaacttttagtttttctatcactgggcaaggtcagactgggtttataaaacaatatattggcatattgtgattctttgtaattgactataaattggttttgaaatgtccaaacatacgttgtgtgtctttatattgtactgtgtgttttaagtaactggcagaaaaagaattggaaatgaaatttccaatcagacaatgtagtattaaagaaaactttgttttaaatatgcggtaccatgtaaaattactcgtggttaggaataaagtccactgttgaagttggatgtcactaagcttattatgttaaaaggaaccagtgtgattaggaaaacctaccagaagccagatacagtgtggtacgtgcaacatttcatgcacattttgattttgtttgtcattcaaa

SEQ ID NO: 462103 - DNA, 536 bp, Homo Sapiens
gttttacacattcagtagattagaagtagttatttaatctttggttagcataataaaagatcttctagggacattttttgcttgcagtggaaggctagttaaatgtgttcattagtcatgaatctgctttttctatagctgttggaaacgtagctcccctgtgatacagttgtagaatacagaaatctcgttttgctgttacggtacggtagtctacttactttcttccaaaccattaatgttatagttacctttaattgcgtaggtcctatcacccctcaattttaagactctaagcctggcattttatcttacaaaatgaaatataaagacttgtacctcagagtatgtgtgtgttttccatatacccattcctaaagtagagaaagatgagggattcgccagaaactgatttctaataaattatccagaaactgaccccttctcacctcttctgttactgtcactgtggtttcagccacagcatcctttgctgcattgttaccttagtttcctgactgtatccttcctcacac

SEQ ID NO: 462104 - DNA, 848 bp, Homo Sapiens
ggcaaaaatccgtactatagaggtttattttctccatttggaagatttcattttactagacaaagtgtatgggatcacaagcattactgtttgcaaaattaccagtataaccaggaaagtgttaccagctcaaattaaatacgggaaagcaatcctaacatcctaatgtagctagttttattttccctacatttactcgattcgctaaacatttattcaactgcatgttgaaccgtcatgtttttaggctgtaagatctttcacaacgaaagatcccaagtaaaagaagtgtttcatttgcctgcatagactctgaccagtaagttctccatcaatacttcttatgaacagcatcatcactatcataactaggggtttaatagtatctcttaattgaaaaggcctgttttttattttaccaaattaacataactttcttctttaactgaaaacttacacgagcgagtgatcttttcgttctgttatgtggaactttgccataagaaattttcccaagtatattcctacacattttttagaatggcgtgatactttccctatagtcctaattcagtttttttaatattgctgtttaaatgtgaaatcttacacaacgataatttgtatcttttcaggcactaaactttcttctgttattaaatgtaacatttagctgaaacatacgtaactccaatatcagtaaagaatcaaagattttcaaataagactaaaggaaaacattcaaacataatgttattgtatgctgaaaatatttatatgtgtcagaaagtaagttcctttctcccttaatcaaacactcaagaatcggactataatttatccacttc

SEQ ID NO: 462105 - DNA, 295 bp, Homo Sapiens
  misc_feature (267)..(267): n is a, c, g, or t
  misc_feature (271)..(271): n is a, c, g, or t
actgttaaagtcttaaacaaggaagatattaagcagcccgtaatatggtatatttgtaaaactgtagaaaataactgaataattttgtagctgtgggtgatgaaagtggaaaacctactctaggaaaatgcctaaaattgtataaatagtattaaaataacttatatgcatgtttctaaatagatatgaagatatattctcccagtgcattgcagataagttggaggagggcctatactgatcttagctggcaaatttgtgcagagnatgncctggtggttgacttactgaaccc

SEQ ID NO: 462106 - DNA, 381 bp, Homo Sapiens
  misc_feature (163)..(163): n is a, c, g, or t
  misc_feature (178)..(178): n is a, c, g, or t
gggctgaggcatccactgaaatgccttctatttccaccaacagttcccggacttgagtcctcaagccagtgctgaggcaggtgggaagagagagggcccagggaatgatagctctgtcagtgagacaaagtgagaaagtttcatttagcccaacaattatggnaatttgaggaaagancacagggtttaaagccatgcagacttgagttggaatctgcttctatcacttaagcgctgagtggccttggctaaaatacttattctccctaaaataacccaactgatttgaggaagcaagggtagggtaggtgcacaggggcacgaaggcagtgggctgggctggacagggggttttgaaaaggcaagggtttttttgccccc

SEQ ID NO: 462107 - DNA, 441 bp, Homo Sapiens
  misc_feature (415)..(415): n is a, c, g, or t
attgggatgattttcaaataatgtgtatatttaatgtggtcattaaaaacatgaaatcaatggcatttcttacaagcaataatatcttgcaggtaaaatgtgattttaagaagtgtttctttaaaaattagttcatgtaattagtatggacacttaagttcgtggtagaaaatagccaattcattcgttcattcaacaaataatggagtgtttacgatgtcgccttggcaacaagggggtaggtgaacagcagtaaacaaaagcggcaaaaatccttgctttcaagcgcctgtcagccagccactgcttcgtgccctgtgcacttacctaccttgcttcttcaaatcagttggggttattttaggggagtattaagtatttttaggcccagggccactcaggcgccttaagtggntaggaggcaggtttcccactcaagtc

SEQ ID NO: 462108 - DNA, 580 bp, Homo Sapiens
  misc_feature (367)..(412): n is a, c, g, or t
ggacatacgccgcagagtgacgtctcgagaacccagggaattaaaggccttagctttctctttgtggtaggctgggctgttgttcatttgactataataattttccagatagggttggctcttctctgtttcttcctttgattatagaaaataggaacaccaaattgaggaatgtgactatatgaagaggtttcttacaaattttacattttgatttctactttactttacttgtatgtcaaggaattaggaatttttaaattgatatttagtgaatcagaattttaagaatatgaagtcatgggggaaatggccgtgaaataatttatcaaaagtaaatgatttcttgtctttctctgagtggagnnnnnnnnnnnnnnnnnnnnnnnnnnnnnnnnnnnnnnnnnnnnnngtatgaatcgttttggaggtttgcttatctcttatttcacgtgatgttcataatggccctgtgtggagcaaggggctgggatcgttttgccccatgttacgggcggtggagggtgtggagtcgtggagtaatatgagcagcctgggtgatgaagtgagactccatttc

SEQ ID NO: 462109 - DNA, 482 bp, Homo Sapiens
acagcacagtcagcatgagctggttttattaccatcgcccaggacacaagcgtgtctttaacgaagggccctcaggcagccgtccagcctggactggagtcctaagaacagaaacaccctccagaagcggtcagctgtactccctgtcagagccccaccgccaccacaggtggcggctttcccgaggccagcccagaggactgcccaggcgctgctgctccaggaggtgcgaaccttgggaatgggggaggggagtgggcaggtccctccaagtttggggtgccgtgggctacagaagcagatactggtggggctgggactcttggttgctcagatatcttggtggctgtccagagggtcccacgagccctgcccccacctgctgtggcagttgcagggatgcttgaaggcagtcgtccctctaatagtagagttcctggtcccaccagctccctgggcaacagcgaactccaagcttccgg

SEQ ID NO: 462110 - DNA, 400 bp, Homo Sapiens
  misc_feature (52)..(81): n is a, c, g, or t
  misc_feature (94)..(94): n is a, c, g, or t
cttttcctttttttgttggggggaaagggaacagtttggaagggaagacagnnnnnnnnnnnnnnnnnnnnnnnnnnnnnnatgactcttcccnaccctccacccaccccctgcccccaggcctgagtcaatgagggtgaggatgagcacacacagcgggcgaacagcaataacttaggggaggagcgccaggagaacacagagtgactgctggactccacagctgaggaggctgcctgtctagaggtccgaagggctgggcctggggtaagtgagcaaactgaggaaggtgggtgaaaagagaggactagggactggagaaacttcactgagtcgtgggagataaagtgctcaatgctctagatttgggctggaagggctggagtcatcgtgccgaatt

SEQ ID NO: 462111 - DNA, 479 bp, Homo Sapiens
aaagttgtttatacactctgttttattaaagtcaatgcatttccgttcctatgtgcccagcttaggcttgcttaattatagacacccggggtgaatgctaatgtagacaggacagtcggtgattggaaaacaaggcccttttctgacctctacaggccatttggaggaaacaagaaattgcttctggaaaattaccgaccagggggcaccgcaaacggggctgagggaggtttctcctgggacgcctccttgaagctctgagttggctggactcacgtgtgtcctgctttcctgcagctctgctctccatgcgtaagaggttactgagggcaacgggtaggaggtcattctcaggagaccgttctaacagaaattaagatctcaaccatttcaacacatatttatgggaagtcccaccacattttggggcacgatgttagggttttcagggttttaggcagttgaacaaatttgtcttt

SEQ ID NO: 462112 - DNA, 505 bp, Homo Sapiens
  misc_feature (25)..(25): n is a, c, g, or t
  misc_feature (33)..(33): n is a, c, g, or t
  misc_feature (61)..(61): n is a, c, g, or t
  misc_feature (95)..(95): n is a, c, g, or t
tcatcctcgggaaaccgttctaacngaaattangatctcacccattcaaacacatcattanggaagtcccaccacatcttgggcacgatgctagnctctcaggatgtagcagtgaaacaaaattgtcctttgttctcccaagatattacagtcttggtgccagtggggcggtgggggggaggtgaagaggggacagcaaaagtccacaggcaatgccatacaacaaaagctgtgactgggtttctccaagatgacagtaggaactcagaatcagatcatgggagacttcttggaggagcctacatttaagcacataatggatagatctaggcacatggatggaagaagagggaacagaagagtaaggtgctttctgagaattgaaagtaagtttatgactttaacaggggctgatgtcaagagaagagaccagaaaattacgtagtggctggatctgaaaaggctcaagcactaggtcctgtctgcattttatccttaagacccc

SEQ ID NO: 462113 - DNA, 584 bp, Homo Sapiens
gaaaatcttttaaaggattatttgcatttatgtaaaactggaaatgaagttatatatgagtgcaaagaaattgacttctgctcaaatatgtgttgataccctacagtaaattgaattaaatttttatcccaactgtttgattttattatttcatggactagccttacgttaagtgaaatactatttatgttgttaccacccctaagagtgactctgatatattatggatgacccaggacggtcttaaaggtctagttttaaaaactgcctagtttgtaagtatttgaatccagttcttttctaaattttaataatttgactcaaaatttttgctacagggtcaacttttaaattgtatatttcctctgaggcacactgggcatttggagaatggttcttcactggtgtagagagccaggtttactgttggttgcaccatctgttatcaggcatgcagaaacatttttcttctggagaaacagaggggaaggtgttgttacagtgtacatgtttcctctgtgtcgtttttaagggaaataaacatgttccaaaagatgctgttaaaataaatatttgaacacgta

SEQ ID NO: 462114 - DNA, 448 bp, Homo Sapiens
agcctcccgcaaacaaagaattccctggtccaaaatgggtgggaaagcctgacttagaggcttagggagttttcccctcctgctaaatgacttgaagcgattgccacatgggttacacataaaatgtgtccatggcatacagttctgactgtaaaatgagcgtcactcaatggtgacaggaaactggaagcactgttaaaatgggaagatatgaaccaatccttatctacatgacacctacacatctagaactttacgaatttctctcatgggctcctggatctggacatttacatgatgccaggcatatagctgtgtggcttcttgcaggcaaaattcccaagtgattgactacatctcttatttttcttccaggtgtttgtgtacagtttaagcaatcacagtctctgcgtagaaagatcttctcaaatatactactgcaaaaagc

SEQ ID NO: 462115 - DNA, 481 bp, Homo Sapiens
  misc_feature (463)..(463): n is a, c, g, or t
attaccatatcatagaaatttacttttttaacacaaaaatggaatattgtgcactactcagtagcttgttttttttcgctcagtggtatctcatgaataaccttccatatttttttaatggctgcataatatttcaagtatgaatatagcataatttataggcagtctcctcttgaaaaaatgtataaatgggaaaatgctttcccaaataatgtggatgtgaaaattcttatacttctatacttggtatttctgttgagcaggttcctataatgggtatttctaggtcctagttcatgtgcattttaaattttgatcacttctgccaaactaccctcagaaaaggtttgaccaaagttgccatctcattaacaaattatgacctgtttgctcttgccgttgttcactggggtagtgtcttttttttctccctgagacggggtcttgcttgttggcactccgnccgggcgacagagcaaga

SEQ ID NO: 462116 - DNA, 523 bp, Homo Sapiens
ttttcttgaatatttttgacctgcagttggttgaatctggggatatataatctatggatacagagtgctgactacatatccatattttatctagctatcttataaactgaaaagatttccaacttaaaaacatgacactaaaaaaaagcctcatattaattgtgatgttttacaaatcacaacatcagtacctcttatatatttcatctcattttaaatatggtctggtcacacttagggtcctttaaaataatgagatattgtataagaatatgcttaagaatagggatctgtatttgactgacaaagggtaattaaaatctatttctatctctatttaccaaataccctatctttaatgcatttttgtaaatctctggaaatcataatatagtcaaagttttaaaaagaagaccttaggctggacatggtggctcatgcctgtaatcacagcactctgggagggtgaggtgggtggactgtctgagcccagaattgaagaccagtgccggcaacatggcaa

SEQ ID NO: 462117 - DNA, 569 bp, Homo Sapiens
  misc_feature (540)..(540): n is a, c, g, or t
gttgttattctttttctgtttgttgcttttatcatacagaagcagtgcttacattgaattaaactaatatactcatcttttttgttttaatgcgctttgctttcttcttttcccttaaacgatccctttgaatgtctcctgatgctataattttggtaatatctagcacttaaaccaatttgaacaagaaatggtttgtacagaaagttattgtcaataatgccactaataccacaaatctttcatgttcttgattatcttttgaaagtgatgtttgtgtcttacatcttgctcttctttctcattctgcagaagggatatttcaggcatttgctatttttcaggtattcattctattttgtcgtgtatgcagattgctctcctctgtgtattattcttcctacagtcagacatgacttagcaatgccgaatagcagacctcggtcacttggctgaccactcttttttttgttaatacctactacatttttaaagtggttcaacttagatacctgacaaaatcaggctgagaaaattgtnctgaaggaaaatctccccctcgtgccgaa

SEQ ID NO: 462118 - DNA, 485 bp, Homo Sapiens
ggttgtcattgtccctccgctgtcaccttttcaagccccaggctggctgcttcagaagcccctgaccccatggaggagtgggacgtgccacagatgaagaaagaggtggagagccttaagtaccagctggccttccagcgggagatggcgtccaagaccatccccgagctgctgaagtggatcgaggacgggatccccaaggaccccttcctgaaccccgacctgatgaagaacaacccatgggtgggaaaagggcaaatgcaccatcctgtgagccccgcacccggcccctctcacaccatcctgtgagaccacgcccggccccacttccaccatctttgttaagactgtgcccagccccactcactccatcctgtgagtcccactcccagccccactcccaccatcctgtgagcccatgcccggccccactcacaccaacctgtgagccccactcccggccccactcactccatcttgtaaga

SEQ ID NO: 462119 - DNA, 368 bp, Homo Sapiens
  misc_feature (175)..(175): n is a, c, g, or t
  misc_feature (353)..(353): n is a, c, g, or t
agagcacctttcctcagcactcctctttcttccaccatctttatttccaacatcttcctcccaaagctcactctcaattactatttttgacacctctctctacatacccgccaactcctggggctgcccacgcccctgtgatgagattctactcgacaggatttcttgcacatcnttcttccggtcctcggaaaacaacgaaagttccgagttcataggcttctacacacccacagtgaaacagaggaaggtgtttcaaaagggcaaccggaaatctggaaggaaattcaatctttcccccgttgggaagtgaggggccgggggtggcagggagttttcaggaaggtgttttncatttcctcaggggg

SEQ ID NO: 462120 - DNA, 340 bp, Homo Sapiens
  misc_feature (92)..(92): n is a, c, g, or t
aattgtcttcaaccaggaaaaccctgggccaggccaaccaacatcaaggaactctaagtgtctccacccaggaacaagcctgggcccaggcnactgcatcagggctccggtgtctccgcacggcagaaccatggtttgctgagtctctgcccagtgccctccatcccagggatgtgtctacagattgaagactaaagaacccacatccacccagaggccagttagccccagcccaaggctctcacggcactctaccatcaaacctgcctggttcatgaggggatattcaactcaacaagcagggacggaacaccagaaacgtgccaggccctgtgtccag

SEQ ID NO: 462121 - DNA, 275 bp, Homo Sapiens
  misc_feature (241)..(241): n is a, c, g, or t
  misc_feature (248)..(248): n is a, c, g, or t
agggttgcccagcagcgtgttggggaactgcgccagggtcttgagctgcgtctcgaagcgcacccggagatgttgatcaccacgcgctcgcagcactcgtggtcgtcgtggtcggcctgccgggggtagctgccatcctgggggtggcccggggcggccgaagcctcgtccacgttctccccagacatcaccgtcatggttgaagccgggcgcgggtgtttggaggccaggagatagcccngggttgnaagcagccagggaccagggtttggggg

SEQ ID NO: 462122 - DNA, 383 bp, Homo Sapiens
  misc_feature (21)..(21): n is a, c, g, or t
  misc_feature (42)..(42): n is a, c, g, or t
tgtttgaaagcgagttaacanccccagttgtcttaaaaaatncagttacccaaaccccaggtgaaagcaagccgctggtagcatcacccttatgagaagtgaaggttttgtaaactttccagtattaatttgcgggggtattccccgcttgtggcttgtttctgtcctagctggaggtgtaaaatgcacaatgtgtagcaggtagaatacagctccttatcgttctatgtaccaggtattttattactgaactagcaactagccttttccacctttaaaagttgtgccaagtcataatcatattgtgtataacttggaaatggtgctgtttaaaaaaattgtgtatttatacagtaacagtatgaattcattaatctcacctg

SEQ ID NO: 462123 - DNA, 465 bp, Homo Sapiens
  misc_feature (23)..(23): n is a, c, g, or t
  misc_feature (43)..(43): n is a, c, g, or t
attgtaaaaacaaaaaattccangtctggtggttttcctgccnaagtcaatgatgaaaaccatccttacttctgttgaaacctcgtccccaaggcaaggaatccggggtgcggccctacagcctgtcttccccagcgctcccagggctcgtgaccctcctcctcccctcacttcattctgcgctcccaagggcactggggagagtcacagtggtctcctctcccccgcattggcctaaagcaggaagagagcagcccagtcactgaagcagaatcctgctagggcagggctagaacccagactgcagctcactcgagattcctgagagaagactttgtgtttggagtgtgaacgtcagggtgcctcgggaagccagggaaagctgatgactgggtgctggacagggagcagggccacttctgtacctctgcacacttctagaatgcggactcatcctgcatccac

SEQ ID NO: 462124 - DNA, 152 bp, Homo Sapiens
ggccaggcatggtaggtggcacgtgcctgtggtccatgctgcttgggaggctgaggcagggggattgctcgagcccgggaggttggggctgcggtgagctatgatcacacccactgtacgtcagtctgcttgacagagtgagaccttgtttc

SEQ ID NO: 462125 - DNA, 595 bp, Homo Sapiens
taaaaaaattttttcttattttataaaatctagccactatactaatgaggatcattttattattcactgctgagattgagaaaatgactttggatttactaatgtaaaagtataatgccatgtcccttgattgtttttgtttttcttttctttttagagcctaaagatagtaatgagcagcttgagtcttaagttttttaatacaccgatggaaggtgacaaagattctttgcttggccaaactttagtcagactcctcaaccttctcgtaggtttatctgtgcatttccttggaaaatccagttagaaccctctaccctcaatatctgatcaggttcctcatcctctaccatccaaggtgatgtctgatcaccttgacctattttcagcaagaaacccctttactcctgaagttccttcttagtaattttttatccagtgaccccaagctttttgttccttggctataaattcccacttgcccatgctgtatttagagttgagcccactctctctctcctaattcagaatcccattgccatggttgctatacctatcctgatggtccggaataaaatctgacttactgtgcttt

SEQ ID NO: 462126 - DNA, 328 bp, Homo Sapiens
  misc_feature (166)..(166): n is a, c, g, or t
  misc_feature (177)..(219): n is a, c, g, or t
  misc_feature (242)..(242): n is a, c, g, or t
  misc_feature (279)..(279): n is a, c, g, or t
  misc_feature (285)..(285): n is a, c, g, or t
  misc_feature (307)..(307): n is a, c, g, or t
aactcgccaagctgttatattaaacacaaagtcactaccttgatggtcctaatcagtaaattcagcctgatacaactctatgttccttacaccataatctcatacaattaatatccatccccatgcctgttctccagattgatgttcatataaatgagataacttnaacagtttatnnnnnnnnnnnnnnnnnnnnnnnnnnnnnnnnnnnnnnnnnnngcacactacctgatgtgtcacantctctacctcacctctaggggcccaccacagcattcnagcccngtttagaaaaaaacagagggtnttcgggatgggcttctgagga

SEQ ID NO: 462127 - DNA, 422 bp, Homo Sapiens
  misc_feature (20)..(20): n is a, c, g, or t
  misc_feature (49)..(266): n is a, c, g, or t
gagatgaagttttgcttttntcactcaggctgaagtgcaatggcacgannnnnnnnnnnnnnnnnnnnnnnnnnnnnnnnnnnnnnnnnnnnnnnnnnnnnnnnnnnnnnnnnnnnnnnnnnnnnnnnnnnnnnnnnnnnnnnnnnnnnnnnnnnnnnnnnnnnnnnnnnnnnnnnnnnnnnnnnnnnnnnnnnnnnnnnnnnnnnnnnnnnnnnnnnnnnnnnnnnnnnnnnnnnnnnnnnnnnnnnnnnnnnnnnnnnnnnnnnatgagccacggcgcctgggccagggatttttaaggttgaagcatccacaacaattttgtgtgtgaaatgaaatgacatgcaccatcaccacacctgggctaatttttgtatttgtaataggagatgggggtttcaccatgtttggccagggattgg

SEQ ID NO: 462128 - DNA, 457 bp, Homo Sapiens
tactgtcactaatggttttgagttgttcccccatgaaaatctctatgttgccactgatttcacagtactgcagttgtgtgtgtgtgcacattcatatgcacatgtgtttgcatattttggcatgcaatattcagttatatgtctgtctttaccagcttttagccaccttgagggcaggagtattcatcacatatcatatcttttatcagttcaatagtttcttgaaagatgtcttgaattaatttggtggtctcaaatatatttataggttcacatatttctaagactggaagtaaaatcttaagcattttatggggaatttcttactgcatcagaaaaaattattgaaaggagaaaatatttcttacattagtttttcccagggcgaatacaggttgtctttttttctctgatgctctgtaaacacagtttgagtgggattgagaggtgacagcgt

SEQ ID NO: 462129 - DNA, 353 bp, Homo Sapiens
gacggcatccagatcgggatcctgaacgcccagcgggccgggatcgcctcctctcagatgatcagccagcgtcccaaaaccgctgtcgcgtccccttggtgtctgggttggggtgggagaaggcagtccaggaagaagatactcgtctttggccaaaagccgattgagcggaagtgagagagaccgggatttgatatcaactacccgcaagcccccccactccaggccccctgattgttatgaaatgggccggcagggtgcccactagaaatctaaattacccttcctcactggtgcctggagtagtcctttggccgcgcagtaaactaatgttgcttgctttctcctcaacc

SEQ ID NO: 462130 - DNA, 393 bp, Homo Sapiens
  misc_feature (62)..(62): n is a, c, g, or t
  misc_feature (80)..(80): n is a, c, g, or t
  misc_feature (122)..(122): n is a, c, g, or t
  misc_feature (285)..(285): n is a, c, g, or t
  misc_feature (304)..(304): n is a, c, g, or t
  misc_feature (313)..(313): n is a, c, g, or t
gataaggagattttattatccatgctaataagggaaggagtgggtgagattctttccaaaantttccacccttcaatttntggggggaatgcaggggtttttaaagagagaggggtttggantggagaggaagggggctaggaggggtcagtggtgcaatccactccaacagcttatcttgaattattgttccctttggtgaaggggccagtgccatcctgggcctgaccagggttacaaatgaacttcagccaatcttgcagttaatttctagtgcgtgaatgnagtaaacgtgagtgatgtntagccaggngtaaatttcagccttgaccggggagagaattctggaggcatacggtccatgtcaagatccagcccctgggatgggcgcaa

SEQ ID NO: 462131 - DNA, 437 bp, Homo Sapiens
  misc_feature (184)..(184): n is a, c, g, or t
  misc_feature (426)..(426): n is a, c, g, or t
ccaaagtggattttgtgcactcaaaggggttactttaatacttcgataataaaatcagattctgctggcaaacaacttccttacgccctacacattttcagttaggagctgagatttctggcattgctacagtctgctcaaccacaagtaataacgcttccagctagaggagatcacggaagtngcctcccctcctgcccataccttgagctcgtctgcattgtagaagtccacacgcacagcggtcaccatccaggtctggaagagcgtggccaggatctgctccgcaatggagtcagcaataaggtggaagtgcagagggttccgtctatggaacaggacggatttgaccagggtgacgacatcccggctgggcattgttttccgtcgcagacaattagcaacgtgggattgtcttcgtatttnttccacgatcg

SEQ ID NO: 462132 - DNA, 436 bp, Homo Sapiens
  misc_feature (14)..(14): n is a, c, g, or t
  misc_feature (167)..(266): n is a, c, g, or t
  misc_feature (348)..(348): n is a, c, g, or t
gcgtacatcttccntttttttaacaattcttccccaaagaatccaagaatcttcttcaaggtgactgaggttgctagaggctgatgaactcgacacaagagaagagccactgtttcttcttgacccatttacagatcttaaagacttactatccgtttctaacaatnnnnnnnnnnnnnnnnnnnnnnnnnnnnnnnnnnnnnnnnnnnnnnnnnnnnnnnnnnnnnnnnnnnnnnnnnnnnnnnnnnnnnnnnnnnnnnnnnnnnattctgttcttccagtttagccagggagttctaagtcgtctggactcaactgtgatggggaagatgggtgaaagggctggtnttgatagtgtggtagatgaggatgtggtatgtaatgaagtagatggacttgccacctgactggccatctgactgactgtattgcgata

SEQ ID NO: 462133 - DNA, 441 bp, Homo Sapiens
  misc_feature (52)..(52): n is a, c, g, or t
gttgacctcctgggctcaagcaatcctcccacctcagcctcctgagtagctnggattacaggtggcgacagacaaagttgcagaaaagctgagctctactctctcatgggtgaagaacacagtatcgcatacagtcagtcagatggccagtcaggtggcaagtccatctacttcattacataccacatcctcatctaccacactatcaacaccagccctttcaccatcttccccatcacagttgagtccagacgacttaggaactcctgggctaaactgggaaggaacagaatagggtttgaggtacagtgggcgttgaccacgggcttcacttgcaggttttgacctccttggggttcagggtgattcctttggaccttttgccttccccaagttgggttgggggatttaccaggtttttttagggaaacgggttagtta

SEQ ID NO: 462134 - DNA, 478 bp, Homo Sapiens
cgatgccgtccgggcgggttcccctgtcgagcacgtgggggcgaaggccccaggcatgcggacagaggttggggatgcgcgcagtgcgggcgaagcacaggccacgtccacgcagggctggtgtccaccgggaggctggccaggccacacgacacaggcagaggggctctcggcggcctggacggtgccatccctcaaaactccacagtactcacgaccgttctcggctcgtcgaaggtggcgatgaggatctgctgtggggcagggatggcgatgaggtcctgcccgtcctccccaggcccctcaggactctgtatcaacagatctggcccttcctcctccctggcaaaggatcccttgcttgttcccatggccccactgcaggcccttcccagacaccacgtgtgcaggggctgctggaagctggcactgcaggatcccttcctcatgggctgctcgctcaacccacaccccctga

SEQ ID NO: 462135 - DNA, 416 bp, Homo Sapiens
  misc_feature (145)..(160): n is a, c, g, or t
acttttaaactgtttacttcctttcctgggatcccactccactcccctctataagcccgatgaactttgttacagttctcagccttgattatagagctgtatggatccatattttaaaaattcaaaccagctcatgctctgattnnnnnnnnnnnnnnnncaaacttttgtgccactttcagagtgtgagaccgcctgggacgcatgctttggaatttctggagcatttgagaagttgatgggcagctaggaaattctgtgctggaactatgacaagttctgggcagcccatctgccctgggggaggggcagggtttcggagagtttctgtgggcctgggtcactcccctttcccgggcaaggctctgcaccttcagcactttgtagcctgtgttcacagctgaacgagcacttgg

SEQ ID NO: 462136 - DNA, 486 bp, Homo Sapiens
atccctacaattaggatatttatttaaccttgaatattcaagaacattctcccaaatctaaatggctactgtgcattcttgagctttttctgctaagcacaaaatgaacgcaaagctaaatgcatatttttaagtattattcacattttttgttacagaatcctattggatctttggctggaaaactagaatttatagcagtttattaatgataccttaaattactcaggacttaatgtagcattgcacttctgtgtacagtaaaactgctttgttttactaaagagaaaaatgtgagtggaaaaaatatgtatgtggtatatactcaaatgtatataattctatctatagatttatatatgtatacattctgtacagtagttccatcaaaatatgtaataattcacaccaattttattaaatgtatttgctttttcaaaatttaaattgagctgctatcaatattaaatgaagttatggcatcta

SEQ ID NO: 462137 - DNA, 403 bp, Homo Sapiens
ttttttttcaggggaaaaaaagttatatgaataaattacacatatttttaaaatgttatttagcacatgctttctgtttgttaagaagagccattagggccacagctcttaatgcctctttccttggactctgttccattccaccctctccagcccccaagggttttttaatctgatcggtcaattctggcaggagctacatttcctagagaggagggtcagtaacaacctctggctagggctcatgcttttatggagctgcctacaaggtttcaagatttcaacctcaagtatggtcctgggtggaggagaaggagagcagaggctgccaaccttggtgcatgttctgcccagctttagggataaaagctgcccctgtcctccagcccagctcagcacagtc

SEQ ID NO: 462138 - DNA, 119 bp, Homo Sapiens
  misc_feature (26)..(26): n is a, c, g, or t
aagtatatacattcctttattagggnagcccttgcacttataaagaaaccttcctcaaaaaggaaatgtacaaaatgatgaagataccatagtttatttcaacatactaagccaaaaaa

SEQ ID NO: 462139 - DNA, 403 bp, Homo Sapiens
  misc_feature (13)..(13): n is a, c, g, or t
  misc_feature (59)..(59): n is a, c, g, or t
aaaaaaaaccccngaaaaggaaaatccaggaaacagaggccttaattaaaacatgtggnaatatgtcatgaatatttatgtcccccaagtcttgcccttgtgatggtatttgtacttaaagtgctttttctcctctttcctgtgaaataattcagaatgtgtttcattaatacaagaatgtgtcatgttaactttcatcagggaaaaatttcacttctgacaagactgacacctttctgattgaaagtatggaaaataggtcttacgttaattggtcccaaagggaattatgttatccattttcctgtctatacatctgacactttccctcatctgtcacctcctgaattatcaatgctttcccttgcctgattttgacagccagtattctgcctatgacttt

SEQ ID NO: 462140 - DNA, 425 bp, Homo Sapiens
gagttttttcccccagtcttttcaatctgtggttggttgaacctgtggatatggaatcagtggatacagagagccagctgtatttacaataatggatgcatgtctatggcaattggatctaggcaatttctctattcaatacattattaattccaaatgggaaaatccactaggattaaaatttcgtttgagctccagttgcttcttaaatcattactgcaattattttactttataactaatagagaaatgtaatatgtgagtgactagcagaccatggaattaaaattgattttgcacagaaaaataaataggcttttgctcaggttactaaattcactgaataaattaacaatgaaaatcaggaaaggaacatcataaaggcccccaataactaaaacagtatggggttttttaaacaaccg

SEQ ID NO: 462141 - DNA, 479 bp, Homo Sapiens
  misc_feature (381)..(381): n is a, c, g, or t
taaatttaacactttcaaactttattatcagtacagtcaaagcaatacaaagttatatggaactaaattaatctagaaagtagatttttatatcattcaagataaggagaagcccagattaaatatataaaattgttgttatttacacagctaacttcccgctttgaaaacaatcccatacgtaaatttcttttttggagcaaggtaacttggtgattgttctatctctacccagaattcacccctatttggaaaactgggggctaaaagcaatcagaattcaccagttcaaaaacacttacgtccatcttatttagcaacactaactacccagaggaaactaaaatagaccagatttacagcagtaagtaaatctaattngtaatttaaacattaccttattttagcaaaaggtgaagggaatcaaacgctagggggcagcatcaaactgttgtgggttaggctgggcagccttgcac

SEQ ID NO: 462142 - DNA, 421 bp, Homo Sapiens
gcccaaatcacattgaagtaccagggatttatgggtcagcattgccccctaagtcccaaggaaggggaaagacttagcaagctcaacctcatgtgattcacaaagggtttctttctgcatttgtattgactcagaataggacccagtacagagaatccactgttatctatgggtgtcattccttcagaaagaatgtacagtaaaattggctatttcatgctatgcaaacaaaatgaaactagtttgaagttgcaaagtgtctcccctcttgcgcccacgtagtcatccaagaaggaaactcctttcttgccttgatattcaccaggcctacctagatagaacttgacaaattggcctaacttcatctccgctgctattgttatatatttgctttactgaatctatgtcctatgtcagtcag

SEQ ID NO: 462143 - DNA, 539 bp, Homo Sapiens
  misc_feature (80)..(81): n is a, c, g, or t
  misc_feature (511)..(511): n is a, c, g, or t
cttgagtatcagtttattcagacatttttgtagtttaacacagctctggcatgcccccagctcaacaaactactccaggnntttagctaaggatactctttattcaagcagtagtgcttttcatttagatattactttctgaaagcaagagtagattaatacagctgagagtttttagcaccttcaactcaggctattagcaaatgggtagggcgagataccaatgactacaagggaaaccaatataaactacatttgcctatcatggggaaaagggtaatttaacaaggaaaatcatttaaaaagtacttttgttttttgatacagggtcttgctgtcacccaggctagagtgcagtggcacgaatttcagctcactgcagccttgacctccctgggctcaagcgatccttccaccttccacactcccagcttcccagctggggactatatacactttccaccatgcctgggttcactttttggaatgttttttgtaggaggatgggggntttcggccatgttcactcagggttgggt

SEQ ID NO: 462144 - DNA, 466 bp, Homo Sapiens
  misc_feature (23)..(23): n is a, c, g, or t
  misc_feature (81)..(81): n is a, c, g, or t
  misc_feature (98)..(139): n is a, c, g, or t
ggataattgcttgaaacccgggnggccagaggttgcagtgagcccaagaattggcacccactggcactcccagcctgcagnggaagactcccatttcnnnnnnnnnnnnnnnnnnnnnnnnnnnnnnnnnnnnnnnnnnctccctgtgaatatattatcacaaaattaatttaatttttaaaatctgcataatgtaccgaatagacaaaaaagtacatgaaaaggtcatagaaaaataaatataaataaatgaaaagatgttcaacttcactcaatgtaagagaaacgtacattaaaattacggttaattctttttcttgggaaatctatcagaaaaaagaatctaagaaggccacacgctgtttaggctgtaggaaaacaggcactctaacacatcgctaatgggaatgcaaaattggtacaatccctataaagggaaatctgaccatatggagtttatactact

SEQ ID NO: 462145 - DNA, 406 bp, Homo Sapiens
  misc_feature (336)..(336): n is a, c, g, or t
  misc_feature (360)..(360): n is a, c, g, or t
  misc_feature (375)..(375): n is a, c, g, or t
  misc_feature (391)..(391): n is a, c, g, or t
gcagttttcaaccctttgttcagactcagacgggtttcaactcaagcgggtaatctaccccagcagcaggggtgcaaagtccaaaacagctttgtggtgcctggggagtgactaggcagcctgctcacaggggctggagtcatctaaagctagtgatgagctggaatagctttgaaccggttcatccgaactgattgttaaaccttcagaacttttgagagtcagttgagaaaacatagctattactaaaaaattaaataagattagataaattatagctaaaagcaaaggcaacatattagtcaaagcttcatgcactttctacttattttactnacattttaccattatctgtgcccntgaggtaatgtatgnccgttatgtctgtatnggtaggaaatactgt

SEQ ID NO: 462146 - DNA, 386 bp, Homo Sapiens
  misc_feature (46)..(194): n is a, c, g, or t
ttttttggacacatgccacacatcatgtttcattgcggcattattnnnnnnnnnnnnnnnnnnnnnnnnnnnnnnnnnnnnnnnnnnnnnnnnnnnnnnnnnnnnnnnnnnnnnnnnnnnnnnnnnnnnnnnnnnnnnnnnnnnnnnnnnnnnnnnnnnnnnnnnnnnnnnnnnnnnnnnnnnnnnnnnnnnnnaagttcggttttttaaaggtaaattcagcaaattcttaaccagactaagaaaaaagaaagaagattcgaataacaaaaatcagaaatgaaagaggaaacgttacaactgatagcaaagaaataaaaagtatcctaagaagaggagggaaaagagggccaactagacacaccccaggaagagcctctccaagc

SEQ ID NO: 462147 - DNA, 631 bp, Homo Sapiens
ttcccagtttgttactttgaattttactaaattatgtccagcagctgtcaaattcaaatctctgttggatgtgcaatgtcatttattattttagttacaggtaaaattaaaaaaaacactttaagttatatacaattttacactgcatttactgcatatatattgacgtatatatgtacagattaactataaattatctgtttgctaattattggagtagttttgttaccaaatgttatgtcaaagctgtgtgataactttgatgatgtaacttagaacttactgactcgtggagtccattttataaagaacttatgtgattttatatagattgattcttacatttaggcaaaaacaggaatacaagacatattagaattagctctgtgaagtttttcgtacttctttcatttctttaatttgtgagtagctgttaataaatttattgttataagccaatatcaacaaatatgttggtattttcctaaaatagcaaaatattctagaaaattatatcatccagagtaacttcatcattgaagggtacattgttttctcatgaactgcttttagttttggtcttctaaaatttttctgtcatatcttcagtggtaccccttctccaccttcc

SEQ ID NO: 462148 - DNA, 443 bp, Homo Sapiens
  misc_feature (17)..(17): n is a, c, g, or t
  misc_feature (35)..(35): n is a, c, g, or t
  misc_feature (44)..(44): n is a, c, g, or t
  misc_feature (54)..(54): n is a, c, g, or t
  misc_feature (224)..(224): n is a, c, g, or t
gacctaatacatagagngaccacccctaaagggangaaacctancgtgagcagngggaaattctgtgaaatacaccccaattaatccaagaaaaaaaactctgacccttaaaaaatttaatacataaaattccatagaagtgggcaaatggtgtaagatttgaatcacagttgaatcaagattgaaaattatttggttattacttcaatgaattaggttttttntaaactttcaattatcttttcaatcctgaaatttatgagcttttcaaatacatttttatagctaaaaaatcagctaaagaacagaaacttttccaagcagcttattactcaaaagatgaaacaaaagaaatgacaaatagaattaacaaataggtacattccagatacctctgcaatttttgtatttcttttataccccctcccttgatataacatgta

SEQ ID NO: 462149 - DNA, 470 bp, Homo Sapiens
  misc_feature (25)..(25): n is a, c, g, or t
  misc_feature (53)..(53): n is a, c, g, or t
  misc_feature (60)..(60): n is a, c, g, or t
ccccagtggatgtttgaaaacccangggtatactgaaccccgtatataccaanatttttncccctacatatacacatgccctatgatagtttaatcctcttgcctgtgcccctaatttataaatttagggactaataatggaataattacaacaacatgcccagaaatgctcttgcaatttcaggcccattatttagtaaaacaagggttacttgaatacaagcactgtcataccctgacaggtgatctgataactaaaatgtcaagtaagtgactaactggcagatagtgtatacactgtggatatgctagactaaggaatgattcaataaccctcatgggagagcaggagggcatgagacttcatcccactactcagaatcgggtgcagtttaaaatgtaggaattgtttatttctggatccatttaataactttaaagtacagttgaccatggttaatggaaattgc

SEQ ID NO: 462150 - DNA, 567 bp, Homo Sapiens
  misc_feature (29)..(29): n is a, c, g, or t
  misc_feature (39)..(39): n is a, c, g, or t
  misc_feature (61)..(61): n is a, c, g, or t
  misc_feature (72)..(72): n is a, c, g, or t
  misc_feature (109)..(109): n is a, c, g, or t
  misc_feature (114)..(114): n is a, c, g, or t
  misc_feature (170)..(170): n is a, c, g, or t
caaaaggtggacccccccagggtgaacanaataagggcnacccaggaccggccaaaggaangacttgggaantggaaaatccaccttttttaaaaaacccggttaaccngtaanccggacctcaaagcccttccaggacattccaaggcccccttaacccctaactgtanccttcctgttttgggcattgtgctcttgcccacctaacaggaaaacaactttccagtgctgcccaccttttgaacagcagagatttctagagattagaaaattactaaatttaaatatacatagttttaaaatatgatacttttctacctatgcattcaaatatattctaacttttaaatcctgtaaatacttatatttgtaatgattttacttatatgatccaattaattggcaagaatatgtggtgaaagattttttacatgtttgtattgttctgtgtgagacatctactgtaagcattgcttcaggttctcatttttgtctgccttccaggatttgctggcccaagtgctgtgtgctagacttagtctcggtcacagaggggagggaaacttg

SEQ ID NO: 462151 - DNA, 480 bp, Homo Sapiens
  misc_feature (426)..(426): n is a, c, g, or t
  misc_feature (437)..(437): n is a, c, g, or t
  misc_feature (442)..(442): n is a, c, g, or t
tcagcctccctaagtgctgggattacaggtgtgagccactatgcccggctgccccatcctttttcttgatattatagttagtggtgaaaacatgtaaatgataatactccatgcagtatgtatgctgaagtgactaccctgaagacattttttaagtcctattttcttttctttctaggatatgataatcattttctgtttgtattaatacatgcttgaaaggaattagtaaagcgattccatccttgtcagcagcttgggaacaaagctgtgggatctggggattgtgtagaactcatttgacatcagtagttacttgtgtctttatgcctcagatcaagatgtgcgtgtttttttctttctccctttaggcttcacgagggctggacatgtgggtcccagggttcacctaaggccagagggganttccccttaantgggntacaaccggggactactgttctcaactggttcccagga

SEQ ID NO: 462152 - DNA, 427 bp, Homo Sapiens
  misc_feature (215)..(215): n is a, c, g, or t
  misc_feature (402)..(402): n is a, c, g, or t
atgaactagcagttttttattttacaactctttcctttctcctggcctctacccagtcaccccccatgaaaggcagtgggaatgcaagtaagaactgcagtgtttccatcctgggtaagccacaccaccatcgtgcacgtctatattttgagtacatgcttccataccaccaggtttccatgtcatgggcagggaactccaggggcaatcacagncatcatatacaacatactatatcctaggaaggcaaaattatctggactaaattctgcttgggaaataaaaggggctctcatttgatgagctttcagagtagggcaacaaaagtattttaaggctactgcccttgctagggcaaccccaacaacgtttcaccttcaggggaggacggtaccaacagtnaaactttctttttttaggttgaggg

SEQ ID NO: 462153 - DNA, 2171 bp, Homo Sapiens
atgaactagcagttttttattttacaactctttcctttctcctggcctctacccagtcaccccccatgaaaggcagtgggaatgcaagtaagaactgcagtgtttccatcctgggtaagccacaccaccatcgtgcacgtctatattttgagtacatgcttccataccaccaggtttccatgtcatggcaggaactccagggcaatcacagcatcatatacaacatactatatcctagaagcaaaattatctgactaaattctgcttggaaataaaagggctctcatttgatgagctttcagagtaggcaacaaaagtatttaagctactgcccttgctagcaacccaacaacgttcacctcagggagacgatacaacagtaaacttctttttagttgaggaagacaacacgaccttactcctaaacatcttaaaaaataaatatttcaaaaacatgctaatatcttagacacagcaaagtttggtcaaatggcctaaatcagaaacctcatccggaaatacatttctctacagtcaccctaggaaacaaggaggcttgactgtgaaccagggggctcagcctgcactaacttggctttaagcaccctagggtttggactatttagctgaagcccctctccctaacacatctgttcttgggaaaaaaattcgatcttcactgcatgtttaactaagtaacattctctaaagagtgacatttatgagatgaacatcagtgtacatcgttctaaagatgattggtgcacccatgcaagccacggaactacagatcatttataaaaacaacttagagacttgcattggtcaagtctgcttaactttgcattctctttgttttggtactaaaactaagtgaaagcaatggataaagagctgagattttgttttcacatgactgtgagcaaaatctcatcatatccttgctgacctcatagatgcatttctactggacgacttgtgggggctttttgtacagaactcacacgacaacctcagaaacaggagcacgacaactcatagacagtactgggccacaagcactagaatagcgtacacgatggacagaaaaattagcattctgggtgtactcatctggaaaaaaggtgaacattttatgcccacgatgcaaagaccagtgagtgtcatttcatggaaaggtgcaaaggcatggtgtcagacacaccaccctctaaaaacgattctaaaaactgtaaaagaaacctgggtgcatatcccatgcatctctcccctcaggggctgggcatactccttacaccataaccataaggtgcctgggctgtgccagaggcacaagaggcagctcagcaatgtggggtggagggtgacaagtcctcccggctaacgtagggaatcatttaaactgagttcacttggtgagctcctgctcatgttcgtcaggcttgccataagggatttaactttatgggcataatagtcccttaaattgaccgaagggacctccttcattccatctccaaagtcacagctgcgcatggcactctcaagttgcttttggcgccggtaaaagtgggagaacttattgaagatcaaggtgatgggcaggaccaccacgaggatgcctgccaagatgcaggcagaggcagtcagctttcctgccgtggtccctgggaccacatccccgtaccccactgtggtcatactgacggtagcccaccaccagcaggcagggatggtggccaggccctccgttctcctccttttcaatggtgtaggccaccacggagaagatggaaatccccacggagaggtagagcaagagcagccctacttctttgtagctgtatttcaaagtggcccccagggagcggaggccagtggagtgcctggccagctttaagatcggaagatccgcatcagcctcaggacctgggccaccctgcccaagttggctaaagtaggtgtgctctccaccaccaggttcaccaccagagtgatgtaaaaggggacgatggacatgaggtcaataaggtttagggcattcttgaagaacttgaggaagtcaggggccacagcaaacctggccaccagctcaaatgtgaaccaggcaatgccaaagtgctccacgatttcgaacctagggtcctcgtccagggttgtccctgggccct

SEQ ID NO: 462154 - DNA, 246 bp, Homo Sapiens
ctaacatcccatatggtccttagggaacagggaggcctgaagagagcaacagagatgggggaatgcccacttgctcaagcagtcagaatacacacaacattgataatttaagttagccatcttatatgagcatagttcatagcatcccaaaacaattacaatagtaacatcaaagatcactgaccacagaacaccgtaatagactgaaaagtttaaaatattgagagaattaacaaaatgtgacac

SEQ ID NO: 462155 - DNA, 346 bp, Homo Sapiens
ataggaagtcttaaggaaagaggcaaaaaacgggcctcatgggtcacttgaagttggaaaattctgtggagattgacaaaggagactcacttttgagcatctgttctcagtgtaaccttcaaatctgtggaaacataactaggcacattttatgattatttagaatgttaataaattgctctgagtttcctcaagtccattttgtaagatcagaccataggtgggtgttgtttcttttaagtgtgtgtactgtgtccaatgttacatttttagaagtgttcatgctttttgtaaagtgattcgttttaagcacattaaaggtcgtttgagtattgtcatgtatttt

SEQ ID NO: 462156 - DNA, 374 bp, Homo Sapiens
  misc_feature (356)..(356): n is a, c, g, or t
catgcagcccctttcaagccttttaacatcatgtcaccttcacaatgagcagttgctcccattacccagtgaactcaccttctgatgggacagttaccctagttggggcttctcagccttgagagatgtgcagagcaggggacctgtccaggggcagagcaggccagacagcgtgggaaataatccaaacaggaggaaaggcatttcaagaacttgggcctctgggtttgactttaacacactactttcaagtattatgggcaggtctgtattaattaaactcctgcctgttctagtctttcagcctcattaggaaagcaagaaagcaggtgggctttttttgcagaacatttttngggtaggaacaaggggac

SEQ ID NO: 462157 - DNA, 531 bp, Homo Sapiens
  misc_feature (439)..(439): n is a, c, g, or t
  misc_feature (496)..(496): n is a, c, g, or t
cttaaaatagactccggccttcaccaatagtctctctgcaagacagaaacctccatcaaacctcacatttgtgaactcaaacgatgtgcaatacatttttttctctttccttgaaaataaaaagagaaacaagtattttgctatatataaagacaacaaaagaaatctcctaacaaaagaactaagaggcccagccctcagaaacccttcagtgctacattttgtggctttttaatggaaaccaagccaatgttatagacgtttggactgatttgtgggaaaggaggggggaagagggagaaggatcattcaaaagttacccaaagggctttatttgactctttctattgtttaaacaaatggatttccacaaacagatcagggaaggcactagggttggcagagacactttgtctagtgtattctcttcacagtgccnggaaagagtggtttctgcgtgtgtatatttgtaatatatgatatttttcatgctccnctattttattaaaaataaaatatgttctttagttt

SEQ ID NO: 462158 - DNA, 437 bp, Homo Sapiens
  misc_feature (381)..(381): n is a, c, g, or t
  misc_feature (394)..(394): n is a, c, g, or t
  misc_feature (426)..(426): n is a, c, g, or t
atagcctggagcgtgagggggcaaggacacgcgctttatttcggaagtgataattccagctccaggtgggtgaaccccggagacctagtgtccccccccaactccattctcacctataccgctcgggacagtccctgctcgcgcccagcccacctagaaacagtcccttcttgctgagttccaagtgtgcaggcgaaagagatggggctgttcttcagatttctcttcccagctttcagcccccgagctgcccacagcgtttcaccctccacatcccggccgccctttgggacatgcgggtgaagagtgcggcgcgacgttggaccttttagtgggtcgggccttgggtagttgcagggcagaacgggccgagggttgagncgcggggccttgncggggggacagggccattttgttttcccattnccgtttttcct

SEQ ID NO: 462159 - DNA, 399 bp, Homo Sapiens
  misc_feature (386)..(386): n is a, c, g, or t
gttatttcttgctcacataacaatttcaaggtaggcgtccctggtcagcaaacggcttgctttcacttgggtagaaggacccagactctgccattcgtcagcacttcactcttgtctaaatccagtcagcagaaaggcaaggagaaagtatggagaaagcatacttgcttagcttcttagaagcttcttgcagtgttacacattacattggctcacattccagtcacagggaggcagccacttcctagaacaaacgctattctctggaggaggagccagggattttagtgggacaaacaaccttcttttcccacagtttgattttcttacttgttgaaaaccctttgggactttagctttgaacatcattttgcttccaaaaagcnaaaaaccaaacca

SEQ ID NO: 462160 - DNA, 448 bp, Homo Sapiens
  misc_feature (14)..(14): n is a, c, g, or t
  misc_feature (32)..(32): n is a, c, g, or t
  misc_feature (46)..(46): n is a, c, g, or t
aaaaaatgttaacngggaaaatatctgcctanattaacagggaggnattaagaaacatgtttgaagatgccataaaagaaaaccccacttgaagtcacctgttaatccccaagaccctaagagccgagtgcccccaacatccccagtacacaacactttgcaccctgctttgcacccaagagcaccatgcctagcacatgctgccaccattgtgcatggcttgcagggcgtgcccccagctttatggtttgacttgccctttgtctgcccttggtgtctggagagggcggtggtggataggagaggccccgccctggagtctgtggcggtgagctgtggctgcaggcgcttgtactctgtgcctttctcagttcggtggcagtgctggcaccaccttctgcagggcgcctctgagctcgagggagggtggacagaggatcccctgtgc

SEQ ID NO: 462161 - DNA, 464 bp, Homo Sapiens
  misc_feature (305)..(305): n is a, c, g, or t
  misc_feature (391)..(391): n is a, c, g, or t
  misc_feature (400)..(400): n is a, c, g, or t
  misc_feature (407)..(407): n is a, c, g, or t
  misc_feature (412)..(412): n is a, c, g, or t
  misc_feature (428)..(428): n is a, c, g, or t
  misc_feature (438)..(438): n is a, c, g, or t
  misc_feature (452)..(452): n is a, c, g, or t
gggccgcctcgtcgcgctcctgctcgtacacgcacgcgtcgcgtggtccagctcgggcgcgtcccctatctcctcgtacacgtgctcctggaggccgccgtagtcggattagggctcggagtagggctcgtcctcaccgcggtggaagagccggtgcgtgtagacgtagcctgagtaggccgcattcatggcttcctcgtgctccagcgagtggaagtgcaggtggttgggcagcgcgcggcggtgcgtgggcctcggcgtgctcggcctctgcctgctccgtgtactcctcggcctcgggcctngactgcacagcataggcgctctcgtcctcggggtcctgcgcgcgctccgcatcgtagccgtcgcgggccgggcgattcaaggtcgncctcggggntgttccntgttnggttgtggaaagcccnttttccgtgnttggctgagcgcgncaggatttcccc

SEQ ID NO: 462162 - DNA, 478 bp, Homo Sapiens
acagctgtgttcccaagaaacccttatttacagaatacaggtggtgggccaaatttgggccccacaggcagtagtttgctgaacccctgacctagggtaaaagttccaaccaaaatctgttaagccacgagatatacaattctgcccattgttaagctctgtgtttaaacagtcctctcaattgctcccagggttggtttctgcctttgaaaaattgagtaggatgagatgactatcaccagcatctcttctaaatgtcagctttgatgatgccaagaaaaaagcattgctggcttcattgatcagttactccttcattgatgagatgacagttcttgtggtcagtctggttgataagtagcttgccaaattgataagaatttctaactagcaagtagcctgtttgttagagacaatcataggttttcaagacaatatgaagctgaagaattttggctgaagtagcagctgaaacagg

SEQ ID NO: 462163 - DNA, 419 bp, Homo Sapiens
  misc_feature (273)..(285): n is a, c, g, or t
  misc_feature (404)..(404): n is a, c, g, or t
atcaaatcagggtaaatggagtatccatcacctcaagcatttatcatttttttgtgttagaaatattccaattccactcttttagttatcttagaatataaaataaattagtgttaactatagtcaccctattgtgctaccaaatactagatcttattcatcctatctaactgtatttttgtacccattaatcatccccactttatccacccacttcttgccacccttcacagcctctggtatccatcattctactatctccaagagttaaannnnnnnnnnnnnaaggctcccacacatgtgtgaggaatatacaatatttgtctttctgtgtctggggatattttacttaaacataatgtcctctagttccatccatgttgttgcaaatgacagggtttccntatttttatgggtag

SEQ ID NO: 462164 - DNA, 435 bp, Homo Sapiens
  misc_feature (213)..(375): n is a, c, g, or t
aaatattaattttataatttgtatatattcattatttaggatcacatatgtttatgtaacatacccatttgcttgggtatcatttcataccagcaaactaataggaataattttgtgaatgatcttctattttgctaaatttgctaattttgctaaattttgctaaatttgcgagtgatcttctattaagtggagtccatagagcagtagagnnnnnnnnnnnnnnnnnnnnnnnnnnnnnnnnnnnnnnnnnnnnnnnnnnnnnnnnnnnnnnnnnnnnnnnnnnnnnnnnnnnnnnnnnnnnnnnnnnnnnnnnnnnnnnnnnnnnnnnnnnnnnnnnnnnnnnnnnnnnnnnnnnnnnnnnnnnnnnnnnnnggtggcgcatgcctgtaatcccaactactcgggaggctgaggtgagagaagtgcttgagc

SEQ ID NO: 462165 - DNA, 402 bp, Homo Sapiens
  misc_feature (303)..(320): n is a, c, g, or t
  misc_feature (342)..(342): n is a, c, g, or t
gaagagcacctagtatgtgcacagcattgttctagatactgtggggatatgaagtttaaacatagatcatgccctcattgggcttacatgctgttgaaaagataggatataaatccatgaaaatttttacaatgctatttattaacaatacatgacaagagtactagaaatgttacttgtgactattttgtctattctagccaagctggatgcctgggctgtttctcagttatactaaatgagttctgctctcagggtcttcatacttgcccttccctctgcctgcaacactcttcctccagnnnnnnnnnnnnnnnnnnggctctctccatcactttaggnctccattaaaactgtcagcttcaggggaagttgccttccctgaccacaaccacactgatt

SEQ ID NO: 462166 - DNA, 486 bp, Homo Sapiens
  misc_feature (34)..(34): n is a, c, g, or t
  misc_feature (51)..(51): n is a, c, g, or t
  misc_feature (184)..(201): n is a, c, g, or t
  misc_feature (356)..(356): n is a, c, g, or t
  misc_feature (424)..(424): n is a, c, g, or t
  misc_feature (446)..(446): n is a, c, g, or t
  misc_feature (454)..(454): n is a, c, g, or t
  misc_feature (461)..(461): n is a, c, g, or t
  misc_feature (472)..(472): n is a, c, g, or t
ccaaataattaaatctatgtcagtaattaccgantgaagaaaattaagggnttagagcctagagagttaccaaacggaggcggggaaggattggtatttgaattagtgtggttgtggtcagggaaggcaacttccctgaaggctgacagttttaatggagacctaaagtgatggagagagcccnnnnnnnnnnnnnnnnnnctggaggaagagtgttgcaggcagagggaagggcaagtatgaagaccctgagagcagaactcatttagtataactgagaaacagcccaggcatcccagcttggcctagaatagatcaaaatagtcacaagtaacatttcctagtacctccttgtncatgtattgttaataaatagcattgtaaaaattttccatggatttatatccctatccttttcaacagncatgttaagcccaatggagggncatggatnctatggnttttaaacttncatatccccacagt

SEQ ID NO: 462167 - DNA, 419 bp, Homo Sapiens
  misc_feature (24)..(24): n is a, c, g, or t
  misc_feature (29)..(29): n is a, c, g, or t
  misc_feature (55)..(55): n is a, c, g, or t
  misc_feature (66)..(66): n is a, c, g, or t
  misc_feature (71)..(71): n is a, c, g, or t
  misc_feature (87)..(87): n is a, c, g, or t
  misc_feature (103)..(103): n is a, c, g, or t
tcccccattgtcctggaattgctnccccntggccaaaatggcccttccaaatttnaaggggaaatnaaggncatttcgggacaaaangaatttatcacaagtnggactgccattaaaaaaaatgctaaagacatccttcaggcatgagcccactgtgccccagccctagaagcaacttttgaaaagataatagctgaggactttcaaaactggtgaaaagcattgtggcagattaaaaaacccaagcagaatttaaaatacacaaaaaacccaggcacattcatagtaattgataaccaaagataaaatcttataaaatagctagagaaaaaaagacatcaccatcaaaagagcaaccactagacttactgactggattctccagagaaataatgaaacccagaagacaaatggaatat

SEQ ID NO: 462168 - DNA, 508 bp, Homo Sapiens
  misc_feature (88)..(88): n is a, c, g, or t
  misc_feature (331)..(331): n is a, c, g, or t
  misc_feature (476)..(476): n is a, c, g, or t
  misc_feature (496)..(496): n is a, c, g, or t
ctagcataagcaatggtaggtttattcatcttttaagcagttttgattcagaaaccttaaatacagctgattagctaaggctcctggnattattctgatttgaaggagaattgctctaaaacaagctgcgtgaattccaaaagcagcaacacagaggctgtgcaattgcctgtcatgtttttcacgacttcactggtttattatgacctcttatgatgaaggtcagtgagagcagctaagacgctgacaccctgaaacgtcccgacggagaggtaagggcacaccctgggctctctaggcaaccagattcggacagtgagtgggctcggtntggcgctcagaaggcactttgctttacaagtcaactggctcaagtgggacaacgtattccacttctcaagaatagagggtagggcaggcagggacgattttaggcaagtttggggtcatttctgggggtttaaagacccctgggnccaaattttttccctgcctntttttcaggggt

SEQ ID NO: 462169 - DNA, 290 bp, Homo Sapiens
cagtaagtgccttctttaaatgtcagcccttcacagccacgttaaaagaaacaggcaaaatacttatatcgatacttgaaacagcattttaaatcagacagaggaaggaatgggaagagggaaactgccactgactatactgtaagaccaaaccaacataagaagtccttaggggagatgtgaagccacaagggaaagagttgatgaccaactgtttcttctgtctatagaaatccttttactctatctcttctccactaaaaccttaggaagttttgtattacatatga

SEQ ID NO: 462170 - DNA, 524 bp, Homo Sapiens
  misc_feature (26)..(26): n is a, c, g, or t
catgggtctccaatcgtcctaaatgnagccttgccttcccccatccttgaagcattaattagatagatgttttgtgcaggctctgctgagggggaggtcctgcttccccagatggaggtcagcccaccagagctgctgttctaaaattatcccctgcacatcccttaaaagcatcaaatggtcataataactcatatttacaaagcaccatcgcattcactgcatgggatcccacagggctttacaaacgcaacaaactaatacacacgctaactagaaggcgcctctcgccaatccctgcaaggcaggccacctctggggtgaacggtagcagctgttgatctgcacggagccccaggacacaatggccaggcccagggagggaagaatggccggactctgggaggccctacgctgccccaggccaacacactcagcctgtgttattctgatctgacagtgtcttttgattctgccgtctctctacctgttatccaaggattcacagctttggctgccgagcg

SEQ ID NO: 462171 - DNA, 440 bp, Homo Sapiens
cccctactactggggtatctaccccaagggaagttcaatatatcaaaaaaaatctgcatgtgtatatttattgcagcacaattcataactgcaaagatatggaaccaacctaagtgccccactgaccaatgagtggacaaagaaagtgtggtatatatacacaccacggaatactgttcagccataaaaaaagaaacaatgtctttttgcagcaactatgatggaaccagaggccattattctaagcaaagtaactcaggaacagaaaaccaaataccgtatgttctcacttgtaagtgggagctaagctatgtgtatgcaaaggcatacagagtgatatcatggactttggagactcagaagtgggaggatgggaacgggtctagggataaaaaactacacattgggtacaatgcatactacctcctcgggccgaattt

SEQ ID NO: 462172 - DNA, 402 bp, Homo Sapiens
  misc_feature (23)..(23): n is a, c, g, or t
  misc_feature (37)..(37): n is a, c, g, or t
  misc_feature (93)..(93): n is a, c, g, or t
caacctgcccaacctgaaaggcncccgggtaaactgnccccccccaactcccgctcctcctaagattttaatattgaaaccggtctgttcttntccttactcgcccaaggtggatttgcctttgtaaaacagctttgcttttctgtaccctcacgtgcaggctccgtgatgttttgctggaaagctgagcagaatgattcttggccacagctttaggttttttcccctcaacatgagttattttggccattcttatcgggctggagttccttaaagaggaggagcttggttttttggatttcaccgaagctgcaaacttgccgttctgcttggacctgaaggatgaggagggaagtgggacttgggtggggcctgagctgcgggctctggtcttgcccaacg

SEQ ID NO: 462173 - DNA, 486 bp, Homo Sapiens
aggtaaggaaaggcagatttattagagaatgtaggaaaatacgttgcaagaatggaaagggcaggtcagcaagggaggagctggctgccaggagacaaaggcttgctggggattttataggatggtgcttgtgccggagagggttacatgcagtgctgataatgccaaggtttcagtgagctaatttgcatttttctatcaactgaggtcataagttgagtgcaggaagattgtgagttatgtgagttatttgcataggagggctaagtcctgcaccagggaagaaaggcagacttgtagttcatctgccttctctttttgctttcccttggtccaaccaacctgggctccttttccatcattagggactccacagaaaagatcccgtgtatcttgactaccagtgagtctgatttactttttatatttttaattgcacacttccatttgttatcagagaatatctttttaaaaacttggttgttt

SEQ ID NO: 462174 - DNA, 666 bp, Homo Sapiens
attaatttctagattaaggactttgtggtcagaaaatacactttgtatcacttcatccttttaaaatgtatttacactttattgtccaaaatagtcaatttttgtaaacattccagggatactgaaaaagaatatacattttgttattggtggttgcagtggtctacgtatgtccattagttacatctgctaatgtacctacatcttctatagctttactgagttttgtctactggtctatcagagagacatgttaagactgcccactaagactatacagttgttaaattctccatatgatttatatatttcaagactatgttattaggtatatttaccattattaagtttcctctatctctaataatatggtttttgccttaaaagtctaatttttgtagccgtaccagctcttttggttgtgtttgcatgatagagcttttcctttcaaccttctcctatctttgttttaaacatgtctcttcacagaatacagttagctgctgccttttgctttatttttctttaacttagtttgttaatatctgactacttttattggtataatgctaacgttctttctgcccaagatattctacttgccctactcctacttgttcttcaaattttagctccaatgataacattccccctagtgccgaatct

SEQ ID NO: 462175 - DNA, 523 bp, Homo Sapiens
gtgcttgttttattggaagcaagactccagccagctgcagggctcaggggaggaggcctggagagttcagtcctgggtctccctctgggccagcagggggaaaaggggtgttaaaagagctagaaccctcagagatgctcctctgaagcaggggaaagaaaactagaaaggaaaactgtcccagggcggggagcggaatagggcccccacatctcagactctcctaccctcaagcagttaattctcaccccctgccttcctctgtcaacggtgggggtgattccaataactcttctcagcttccatacttcaggtgctcttcgtgaatgctgggtggctttaacccttgggggtcccaaacaagtttccagaatcccactgtccaccattctcccccaaagaaggtcccagaaaaggtgaagttccgtgtcttcacgcaacacgggcataagcagcaattatcgcacgaagtttccctagggtggtcggggatcctctcctgccactcctcctcgttccgaat

SEQ ID NO: 462176 - DNA, 561 bp, Homo Sapiens
  misc_feature (15)..(15): n is a, c, g, or t
  misc_feature (80)..(80): n is a, c, g, or t
  misc_feature (281)..(281): n is a, c, g, or t
ggcaattagttaatntaagttttctactttggctcagctttagtattttgctaggaacctatctgttccatccatatttncttggcttttcctggcctgcctggcacagtctgtactgagaggacgaaggccttttccatgagtgtccttggccatgagtgggtcagggcatctccttgttggcttgggtatcagtggggagtggaatgaggacacagcttcacctctaaggactcagaagccttcttgcaaagacaaggccacccctcccttgggggggnttgggggttccaagatgtgaataaacatggagtgttcacaccatcccacggcctgcaaccccagtgagaaggccccagccgcgtttctctttggagtggcccatccatagcattctgcctaaaaaagcagggtcctggagttccagggcttctcactgcacagggcgtgggacacacctcttgtctcttgggaggtacccggagcccagcctctcaggcgctgggcgatgcagggggtggggactgtaagccctgggagatggggcagtgaggggcgctg

SEQ ID NO: 462177 - DNA, 472 bp, Homo Sapiens
  misc_feature (283)..(283): n is a, c, g, or t
aacaaattcattaaagagcaaacttctcccccagcaacttttgggttgactcgtggtatcatctgtaaaagaaaagtaggataaatgcttctttccccttttcatgcccatttttgaaaaccacacattggttctccattctcttccaatgatgattaattcattaaaaaagttattacccttcctcacaccatgcccagcctgatcgtttctttgggaaaaactattgagtgaggaaagcgtggctgccgtgtgcacagagcccaggcttccttggtgctgncccccgtcggggtggagggcaggcagcccggccttcgggttgctcggccacacaccagctgcagtgggacacgttccccagagcgcagggaggccctggagggtgcgggtgtgggagggaggaggcgtccagcaggcatgagggtctttgagagacacagctgggtcttggtgtccagcctccatagtg

SEQ ID NO: 462178 - DNA, 362 bp, Homo Sapiens
atctgtaaacatatgattgatttatgttttaataatgaagaaacaggaaacaaaccatttcaggggaacatacaagtaattttatcaacatagtatttgcagagaaagaattcacttattcaaaatatcacaatactgaatttcacagttaaattcacatgcagattgtaaaattatgttatgggatgttttgatggagtgtgttaaatataaaagtaatccaatgcaatactatttaggcacattgtacaaaactaatttttcaatggggattaatacatttactatctttcctataaggtgtgatgtattcaaagtgctctgtagcattgagtttgaaatcaggaaacaaatactgttag

SEQ ID NO: 462179 - DNA, 485 bp, Homo Sapiens
  misc_feature (466)..(466): n is a, c, g, or t
aaacatgtataaaatttcaccttcttattctctctttccccatagcccaccaccacagtttcaaatacagaagcggaaatagtcacctttttttgtaactgaattttctcaatacacacaaatgctttttagaatatatactaatatgtcgctagaaaagataaaaagtaaggagggtggaaaagataagtcattaacaaatgagatcttatttaggatgttcaaggaaattactatgtcaaccatgatttggggcactgtgcgtacttctttcgagcaataacattttttgttgcacactactaaagacaatgaaaactgattattttttaggtcatctgaggtcaaatgtatattgggggaaactaaggggggtaatctggaaaggtcaggaaggtctctttcatcttggggttccatttttgggccggggccaaaataacccggcttctttccggggggaggngtgatttattaaggtgatg

SEQ ID NO: 462180 - DNA, 697 bp, Homo Sapiens
  misc_feature (21)..(21): n is a, c, g, or t
  misc_feature (37)..(37): n is a, c, g, or t
  misc_feature (460)..(475): n is a, c, g, or t
  misc_feature (488)..(600): n is a, c, g, or t
  misc_feature (620)..(620): n is a, c, g, or t
  misc_feature (629)..(629): n is a, c, g, or t
aaatggtcaaccttgcactangcctaagcaacctganggcccagcagcacttctttcaatggtatccttagctttgggcaacacactaggcactcaaataaatacgtcctgaaatgaggctcctgagtgcagggtacagagggcccaggtgataagggagacaccctgaagcctctgttctttgctttgagcaaatgaatcgtgaagcaaataccaaaaagtcacgtcaagctcttctctcggcctgaataaagctcactcatttgtgagagcccaccttcaaacttcacctcaaggaagcatacccctgtccctggggcctagggcaagatctttattctgctcttacagcaccccacatatcttctttacagcattagtcactatggtaattactgtgagattgtttaatgcacggtttatcaacgacctcatgaacattgaacatttggggctagannnnnnnnnnnnnnnngatatagggtctnnnnnnnnnnnnnnnnnnnnnnnnnnnnnnnnnnnnnnnnnnnnnnnnnnnnnnnnnnnnnnnnnnnnnnnnnnnnnnnnnnnnnnnnnnnnnnnnnnnnnnnnnnnnnnnnngtgcacagccaatacctggntaatgtttntattttttgtagagatggtttttcaccacgttacctaggttgaccttgaactcctggggctcaagtga

SEQ ID NO: 462181 - DNA, 415 bp, Homo Sapiens
aatttcggcatgaggtttttagacatcaatgaaaaagtttatgctgtaaccacacccaatttctatagtctcttttgtgaaaatatatttgcttcatcctgaaactaagaaattgctatctatctataacacatagccaaataaatgtgcattttataacttctctccagaagtactatttaatgtatcttaaaaatcaactcttgtactgaatatattaaggctgtttctggatgggagccagcgaatgttttgccaaaagacatctgcacacaagatgtccagcctgtgagtcaattctcctgattatcattcaggaatttgtctctctgagctggcataactatgtttgcctgcttgggttcaatattgctggcattcttaacagaaggaatatggattgtttttagaaagg

SEQ ID NO: 462182 - DNA, 379 bp, Homo Sapiens
  misc_feature (26)..(26): n is a, c, g, or t
  misc_feature (51)..(51): n is a, c, g, or t
  misc_feature (257)..(257): n is a, c, g, or t
  misc_feature (271)..(271): n is a, c, g, or t
  misc_feature (341)..(341): n is a, c, g, or t
  misc_feature (366)..(366): n is a, c, g, or t
cttttaaaattaaccccccaattttnaacttaagcatctcttttcttcctntcccatgtttctggtgtcccatgaatctggagcattttctgcttctgctagaacaggctagggaaggcaccatggtgttccagaatgtagagagaatatggagtgcaacatacatgctttcaggaatgaacacaagagccccttccactctcctttgtagtaaggggcacattcaggtaatgagcccatctgggattgccaggganggctcccttttggnacttggcattcacctttctatactccactaactctttcaaattctttttatctctcccatatttgaaatncacgtttccacttttaagtccttcnctcgttccgaatc

SEQ ID NO: 462183 - DNA, 573 bp, Homo Sapiens
tcaggattttattgatgctgtttcaatcacaaaagccaccatgagctacatagagttcccaagggggcaactctccttagtacttttcattcacttggtagtcagcgttgtgggcacacagactcaagccactccacaagtcagtcaatattgcaaaccatacataatagtatacttaatcaatatgtcaaatgttcataggtttaacatttcacaacaaacaaactaacatttaacacaagaaggaaaagggataggagaaaggatcacaaaccagtccaaggggagagaagaagagaaaagcggtcctgggtccagggccgggtgggtccattggtcttgcaaggaaagagtctctgaggtgggcagagacttcagcagcagatgccaagttttcatcaccagtgactgcaagatggcatcagttaacatggctatttcgagctgctgaaggcctgctcttttacggttacagagtcctcccatgagaactgatcatggaagagtgtgcttgtttgagtccttatctggttggatacagtcttttattttttaatttgtttagtagacaac

SEQ ID NO: 462184 - DNA, 466 bp, Homo Sapiens
  misc_feature (46)..(46): n is a, c, g, or t
gtgcaaacacatacatacacacacataaatacatacccttaatatncccaagttgttacctccacttttccttagcctaaaacatttttggaaatattttccagggttatacgtcttttcccagtccctacacctctaaccttttaaaaacaatagcaacagcaaacaactttttgttacaaagtagactggcctgtgaactaaactagaacctgctgagacttccgaggactctgagaagaatttataaaacttgatgagttcccatgggctttagcaccatcttctacttaacatctttctggagggtaggaggcatgtaggtgatgatagagggaacctagtattgttttatgaggtggaaacatcagcttgagtaggagaaacaaaagaagtagttgatataagaaggttatcctaaccgtttctcatttagacaccttcatacttggtgttgggtcatttc

SEQ ID NO: 462185 - DNA, 469 bp, Homo Sapiens
  misc_feature (171)..(425): n is a, c, g, or t
ttaagtacattttgcttcttacactttgagatgtacaaaatctattttacatcataatctcatacacacataactcaaacaaatcacatgaaacaatacttacccttactatgtaaacacactgaaagtttctattctattccactttttaaaagaaaagtacaggttcannnnnnnnnnnnnnnnnnnnnnnnnnnnnnnnnnnnnnnnnnnnnnnnnnnnnnnnnnnnnnnnnnnnnnnnnnnnnnnnnnnnnnnnnnnnnnnnnnnnnnnnnnnnnnnnnnnnnnnnnnnnnnnnnnnnnnnnnnnnnnnnnnnnnnnnnnnnnnnnnnnnnnnnnnnnnnnnnnnnnnnnnnnnnnnnnnnnnnnnnnnnnnnnnnnnnnnnnnnnnnnnnnnnnnnnnnnnnnnnnnnnnnnnnnnnnnnttcccagcccggggcaaccaagagccgaaacttttttcaaaaaa

SEQ ID NO: 462186 - DNA, 277 bp, Homo Sapiens
atcctcaattcatatggccaatttctgtttcatgtgtcaaataagcagttttcacagggaaatgtgtgtactggaagtattaccaaaactaatctcagggttcaaatacccgcaaaaattgatgggggctgagaagtctcactgctccactcctgtaatattatttaaggatgaaaatacggtgtcagaaatactgtgtccacagcatttaatccttgggttttccaaaaatgtctgccaaaccagaactttctttttcaccttcaaagtgtcaaag

SEQ ID NO: 462187 - DNA, 478 bp, Homo Sapiens
  misc_feature (220)..(220): n is a, c, g, or t
  misc_feature (242)..(242): n is a, c, g, or t
  misc_feature (355)..(355): n is a, c, g, or t
  misc_feature (374)..(374): n is a, c, g, or t
  misc_feature (384)..(384): n is a, c, g, or t
  misc_feature (403)..(403): n is a, c, g, or t
  misc_feature (420)..(420): n is a, c, g, or t
  misc_feature (430)..(430): n is a, c, g, or t
ctgaagctatgatagaatatattatttctaaaatagtattgagaagttaattgttcagtccatagtagtgtaagtgaagtgtggaggtcagccatagttgtctttcttcagcaggtactctaaccagagactgggttctgtggaaaatagaattatattccttggtttgggatcaacaaatgttttgttattgttttaatgttgcctggcattgcctganaacaaagtgccctgttattccncttatgtcatcagaactctgcttactgaagttgaagtgttaatcttaggatctagaattcttgtggttggtcgtgtattaagaaaagaaggtggtttgattttatttcttgtnacttgggtggaacctgttnactattacangttcatgttttttgaaccngtaaagccgagcaaatncgtaaaggtngaattcgtttaatgggtagtattaattgtttgcatttgaaactgtcag

SEQ ID NO: 462188 - DNA, 377 bp, Homo Sapiens
tttttcttgttgcttctacaatgtgtatcatcagtaatttcctcaaaattggagagaaattcgttttctgaaactctataatttctgcagttaatttaaacctctgattcattttaaattcttcatgctacataccatgaagatgaatctaattctttattcatttggctaacaatctgcccccatgaatgcagattaactttaatacactttctgtttctcatgtcaacttatggggtcttccattccatgacattactttgcttataaatgtgccattaacataactctaattacatacaaggattttgtaaggtctgtggatacccgatcaaggtcaccttcctcatttcccaatctttacaacggtctttgta

SEQ ID NO: 462189 - DNA, 302 bp, Homo Sapiens
  misc_feature (33)..(33): n is a, c, g, or t
  misc_feature (44)..(44): n is a, c, g, or t
  misc_feature (56)..(56): n is a, c, g, or t
  misc_feature (68)..(68): n is a, c, g, or t
  misc_feature (94)..(94): n is a, c, g, or t
  misc_feature (177)..(177): n is a, c, g, or t
  misc_feature (220)..(220): n is a, c, g, or t
  misc_feature (292)..(292): n is a, c, g, or t
cctgtcattccctggcagtggctggggcccctntgttgcgacgnggagttcccagncccctgaggctntctgtggcctgcaggagccccagggngccgaggtctgacctgcagcgcctgaggtctgactgtctctgcctgcagcatgccggcccctctcctgcagcccctgcccctnacctgcctgggacctgccccgcctccgcatgcatgtggatagncccccacgggccgtggccaacgcttgtccctggggccacacagggacactggaggtcacagttatttattgntcacaattgt

SEQ ID NO: 462190 - DNA, 470 bp, Homo Sapiens
  misc_feature (452)..(452): n is a, c, g, or t
tgtgaaataatttgttttataaacattcctgagttttcaaccatacattctttttacaatacgacaaacaaaacaatgaaagatattcaaaacaaggttccaaggttggcccaacttgattgtttgggtacttgtttttttagtaactctgtaacttttttaaaggaagcttttaatgaagatacaccacttgagtcttgctttaagaccaaaaatatccaaacatagtatcacattatatatatctcataagaaaagctattcctatcaggtaacaaaaatgaagcttccccctcacctaggcagttcatcttggaatgcatctttgaaaaagatcaatgggcctgttgggactccaaggaaggccatccccaaaaaaattggtataaaaaggtttatttggaaatttatccaatgaccagacagacataaaactcaaaggtttgggctcnttctgaggggcaggagaa

SEQ ID NO: 462191 - DNA, 353 bp, Homo Sapiens
  misc_feature (51)..(51): n is a, c, g, or t
attaatcccaattccatttcttggtagataaagcctaagaatagaaaaaanattattacattttatattggggctcaccgaaaagccacgcagttggatacccacgttagttagagctggaagaaacaaaaaaagaaactcaccgtgaatagaacctcagccccttttttgtgtctcagttggctccttccacctttttggtgagacttaaaaatactttaatcttcagcaacacatcagtaacacatgctgactctcttagcattgctttatatggcattaatgacttccaagtttaataaaatatctaaatttctctctgtgacagaaatcagtcaggatagacatgaatc

SEQ ID NO: 462192 - DNA, 511 bp, Homo Sapiens
acaaccgtttgtggtttaagaaacgcctttaaacggttttccgcccgggtggccccggtgttcccttgccctcattctggtaaaaccccacaacccttcccagcgtgggccgtacacggcccatcacgaacatgttcacagtggtgccaaagattttgtttcatggccagttttggggccagttgatggcgagattttgggggggcctgttcccaacatatttatgtcttattggagtgtcaaagatgatgataaatctttctaaggaaatgtgtcttttccacgcgctaaataaacagaatgaaaacttgtaattatgccctggaactgggggacgggacttggagagcaattacacttaaatgatgtaaaaatgaaaaatgtgtttttcaaaaactaacagattataaaattttgcttagtatataccagaggaagtttttacaagttttctttctaacttgtaaacttgtaactagttttaattcttccttcctgtctgggaaaatac

SEQ ID NO: 462193 - DNA, 416 bp, Homo Sapiens
  misc_feature (218)..(218): n is a, c, g, or t
  misc_feature (229)..(229): n is a, c, g, or t
  misc_feature (282)..(282): n is a, c, g, or t
gttcttggaaaactttatttcagtttaaacaacaaagcaaatgatatttatgtcatccagggacagataggagagtacagtcattcttcatagcagtttcattgccaaactccaaatgagagatgtaatctaggtaaaagacacttattattccagattacatttacctcacaatctgaagatattgaaaattagtcaaatatattagaaacagatgntacacgaagtncacctccagataaaactgagaaagtgatgtctaatgctttggaaaattctgtnttctacttaatactcagattaatgagttttaaaggatcaggaaacatctttatgggggttccataaatgttaggaacaatgatatgccactttcatccagtttaattattaggcattcaagatggtatttaaaa

SEQ ID NO: 462194 - DNA, 460 bp, Homo Sapiens
  misc_feature (360)..(360): n is a, c, g, or t
  misc_feature (368)..(368): n is a, c, g, or t
  misc_feature (381)..(381): n is a, c, g, or t
  misc_feature (402)..(402): n is a, c, g, or t
  misc_feature (436)..(436): n is a, c, g, or t
  misc_feature (450)..(450): n is a, c, g, or t
gatttcttgttttcagtttttgtgcttcctattttcacccacctcccttatttcaagaaagaacactgaatggggagggtccgggagaatttgagtgaaggaatctatttgctatgcgagaaggaaaagatatttttctttccaggcacatgaggggttagaatttcctcatttaagcgcacgtgggtgtgggtatttctaggtagcatctgcacatgtcatttcattctgcaaggtgttttataaaaccatagtgtacacactgaaagccatatctaataatctctatgtagagcatgtttaaatcagcttctgctgaaccttttaacacacctcacatactttcaagaaatctcaagngtaatttnaaactcttttccngagggcagacatcatgagganggtaggagatatgttgtttaaccagcccttattnaccccccattaatnatggtgtttt

SEQ ID NO: 462195 - DNA, 502 bp, Homo Sapiens
  misc_feature (285)..(285): n is a, c, g, or t
  misc_feature (306)..(306): n is a, c, g, or t
  misc_feature (337)..(337): n is a, c, g, or t
  misc_feature (479)..(479): n is a, c, g, or t
gaagtttaaaggagtttattcaaaagttgaacatttttaaaatttcacaaaactaaccagcaaagacagtaagccaatcctccatttaccccctttctgtcttggttaagggcagagacacatgtcagagggagactgcgtcccatgtagggagctaatgtgttcactagctattgcttctcgcagggtcgcagcatctacactcacttgcctcatccacactgtcacgttcaaagacaagaaataatcctggaaagtagatcccaaggccagattgcaaaggantagccagaagcccagaccagntcagtgggctaagggtttgtcaaaggcagantctggtgacagctagggtgaggggggctttgtcattgggaagcgaatccatcgcccattcttcgttgttcatcacggtttatgttttccttggccctaggatccagaagttgccacggctgctagttgcgtcatccagtggncacctttatatgtacaattttgg

SEQ ID NO: 462196 - DNA, 513 bp, Homo Sapiens
  misc_feature (408)..(408): n is a, c, g, or t
  misc_feature (421)..(421): n is a, c, g, or t
  misc_feature (442)..(442): n is a, c, g, or t
  misc_feature (457)..(457): n is a, c, g, or t
  misc_feature (471)..(471): n is a, c, g, or t
  misc_feature (490)..(490): n is a, c, g, or t
gtgaatttcagcagggaagatgagaacaatcagggctagaaataattagtgacttttgagggcacactggagtcagaaaaacagaaattaagattaaggtttaggcatagaaaattaaaggatcctggaggagcagctagttttcataggtacaaaagtggtgaaatggccacggagaagggaatcagtacatttctgcagcagtggttgcgctgctttgaacagatctccgttatgtagaatttaggatgccctattgctgtctttctagatttaaaatgagatctttgaaccaggaggagatcttcatctgagacttgtctttctaaattttttggatggccatcaatataaaatgccacccatctgcagttaatttcttttcctcatcatgtgattaaaagtggntgattcagtgggnactggggaatgtttttagctngtggtagaaggcttnctacactgggcacntgttttagattctcatatncatttaaacagccaagggaggtt

SEQ ID NO: 462197 - DNA, 204 bp, Homo Sapiens
  misc_feature (150)..(150): n is a, c, g, or t
  misc_feature (158)..(158): n is a, c, g, or t
  misc_feature (169)..(169): n is a, c, g, or t
agaatcatgaaattcttgtttttccctattctttttggtaattacaacgtacattgtcttcttttataataagacccaaggggagaaaagaaaaggatgtacaatgaaggtacaagttttgaagcaccaaaatattttatgacagggacnaaaaaacnaaaaacaaacnaaaattgaagtacagaaagagggtggtgggggcaa

SEQ ID NO: 462198 - DNA, 252 bp, Homo Sapiens
  misc_feature (76)..(76): n is a, c, g, or t
  misc_feature (108)..(108): n is a, c, g, or t
  misc_feature (176)..(176): n is a, c, g, or t
tagatgtgtttttattaaaattacaaaaatgcgtatctctaataacaaagtctgaacaatatgttaagtacctggnacccatgctagaacagctgccctggaaagggngtttccagagctgcaaacctccaatcccaaacaggccccctcaaaactaaggccctacagggactggnctcaaccctccatccagcccacccaccatttctgtcccagggccagggtggggagccccaggagccagttccaggc

SEQ ID NO: 462199 - DNA, 630 bp, Homo Sapiens
  misc_feature (54)..(54): n is a, c, g, or t
  misc_feature (422)..(472): n is a, c, g, or t
  misc_feature (525)..(525): n is a, c, g, or t
  misc_feature (534)..(534): n is a, c, g, or t
  misc_feature (580)..(580): n is a, c, g, or t
tgtcttgttgaaaatgtcaaagtatagccatttagggtaagtatggaattcagncaaggagctctgaggaatatgatgctggttctggtttatacaaaagacttggaagcccttatatttgcagtaggccactgaggcatggatctcctcatcctgaatccctagcatctttcagtgatttgaatatggttctgactggctagcactatattagtgaatctctgaagaatggggctcaagagaattgatgtgcaggggtaggtacagcactgaaaattgtctaccacttttctggggactccatagaaaataaaactatcccatttattcatcttagaaaattaagtattatttaacaaatggctgggatgggccacttctgtcctaaacacatggaatatatgctttattatcattacttnnnnnnnnnnnnnnnnnnnnnnnnnnnnnnnnnnnnnnnnnnnnnnnnnnnatactaaataaaataaaattcccatgccaaaggaataattatttccctctctntcctgcccntgaattttcccatccaggggctttgagattgagaaaatagctgggntttctcattattctagttgaaaaaagagcagaatttatttgggctctcca

SEQ ID NO: 462200 - DNA, 628 bp, Homo Sapiens
  misc_feature (460)..(460): n is a, c, g, or t
  misc_feature (519)..(519): n is a, c, g, or t
  misc_feature (573)..(573): n is a, c, g, or t
  misc_feature (600)..(600): n is a, c, g, or t
aaacaataaaatgaacttttttgaactaggagttttgatacatatatatagagagagattcatgaaactgccaccacagtcaccattcaaacagttccatcactctaaaaacttattttgtcctatacccttgtacttacttacactgtctctccatccctcacccttggcaacaactatgctcttctccaccactatagttttaccttttccagaatgttacatatatggaatcataccgtatgctaccttttgaaactggcctcttttgctcagcacaaactctttgagattcatccttgtttttgcaggtataaatagttcattccttttttattgctgaggcagtatttcattccattttgataccacagtgggaactaggatggagtgggtccctttgggaaacctcagttaacaattctgggaattctggaaactgtattcagtggaatttttncatactttatttacatttaaaatggcattgggtctgtctggcatttttgaatgggatcnttttaactatggttggataactggtaatttcctggcattggtccattggagggntatttgggtttctggaaacacacaggnccatcttaaatggtggttacatttccct

SEQ ID NO: 462201 - DNA, 393 bp, Homo Sapiens
  misc_feature (15)..(15): n is a, c, g, or t
  misc_feature (25)..(25): n is a, c, g, or t
  misc_feature (38)..(38): n is a, c, g, or t
  misc_feature (167)..(167): n is a, c, g, or t
  misc_feature (170)..(170): n is a, c, g, or t
  misc_feature (173)..(173): n is a, c, g, or t
acggaccgccatggnaccccatggnaggacaccctggnagccactgttccacgatccagtacaacgtggttggatggcctgagggaccgccggagcttccacgggccgtacacagtgcaggccgggttgcccctgaaccccatgggccgcacaggactgcgtgggcnggngancttcagctgcttcggacccaaccacacgctgtaccccatggtcacgcggtggaggcggaacgaggatggagccatctgcaggaagagcataaagaagatgctggaagtgctggtggtgaagctccctctcttccgagcactggggccctgcctggggggttcccgggagcagggggagatgctaccttcggaagctgaagcggattccttccggcagacc

SEQ ID NO: 462202 - DNA, 438 bp, Homo Sapiens
  misc_feature (369)..(369): n is a, c, g, or t
  misc_feature (392)..(392): n is a, c, g, or t
  misc_feature (397)..(397): n is a, c, g, or t
  misc_feature (403)..(403): n is a, c, g, or t
  misc_feature (426)..(426): n is a, c, g, or t
cctgttacttcctcctccggttgtgccttgcataacctgtgtgctgccagagcctagggtgttccaagagagacacatgctccggctgccaaccccctttctgctcaggagaccgcaactcagtgatgatctccagtggaaaaagacagacttgaaataaattcttgttgggactccagccatgtaccatggcacagaaacctatccatcatgtagatgctaacctgtcaggtagggtgctatagttaccccttttacagaaggagaaaacagaggtttcgccagctggcttcaaatctagctctgtctgactctgaagtcttcattctctccagggatgtcctgctgcctccacattcctttgaaccngggctccccaacaccacacaggnttagnagggtnagggtcattgattcagttttcancgaggtttgatt

SEQ ID NO: 462203 - DNA, 477 bp, Homo Sapiens
  misc_feature (56)..(56): n is a, c, g, or t
  misc_feature (157)..(157): n is a, c, g, or t
  misc_feature (308)..(308): n is a, c, g, or t
  misc_feature (394)..(394): n is a, c, g, or t
  misc_feature (428)..(428): n is a, c, g, or t
  misc_feature (437)..(437): n is a, c, g, or t
attcggcacaggcgagcccctggacggcggagggactttggaaaagctcggaattnaccgaggggagccagagaagaggttggaaaccttttctcccaccacgggcggtttaagatggaggaaaacgctcttttattgaaataaaagaagtctaagnctgacctgtggttgcttctttaggagagtcgacgtgtctgtcgtccagcgcgacccgggctgagctgcagactcgcgcctgccaccgccaccctctgccaccttggccctgttttgtctttatggcgcttccccctctgaaatactctttngcggggagttttgtggctctatcactcgcttgttccctgggttccccagattgcctgggagagcggggacctacttggtccccaancgtccagtccgcagcagggctccgtcactgtctncagagactnaacgaatgactttctagcagtaaggaagttcccgtggccc

SEQ ID NO: 462204 - DNA, 208 bp, Homo Sapiens
  misc_feature (45)..(45): n is a, c, g, or t
  misc_feature (111)..(111): n is a, c, g, or t
gaaccaacgtattccttttggtgctttttaacaggaaatgctggnaaatatttgggcctaactgatctttagtcattatcctactggtcaatatgggtaggaattaatttnggcccttgaaaatcagacagcggaaaaaatgcacctcatgatcattcagcctctgactttttgggaggaaatcattttcaaagaaatgtcccccacc

SEQ ID NO: 462205 - DNA, 295 bp, Homo Sapiens
  misc_feature (34)..(34): n is a, c, g, or t
  misc_feature (47)..(48): n is a, c, g, or t
  misc_feature (60)..(60): n is a, c, g, or t
  misc_feature (76)..(76): n is a, c, g, or t
  misc_feature (267)..(267): n is a, c, g, or t
atgtatatattgagaaaagatatacacatataancatatataaatcnncaaatataatanatatacccctaccccncctgcctccttccccaatttaatcagtcaggttcaatgttcaatttcctaacttacagggatacaggcttattgctctttcaggctacactttaacatacatcttatcagttagcaattgatagttaatttatgtgtacaagactccaagttatctttaagggttatacagtgtatttccatattcgtttnctgttataattctcctaaacaactatag

SEQ ID NO: 462206 - DNA, 519 bp, Homo Sapiens
  misc_feature (429)..(429): n is a, c, g, or t
  misc_feature (498)..(498): n is a, c, g, or t
  misc_feature (508)..(508): n is a, c, g, or t
acctattgtctaaacagatttattctttaagaatatacacaagaggttttcctccattattttcacgcatcagatatggtgtttggttttttgagggagggagggggtactatctacaacaaatacttcattcatagccataaaccatttgtatcttgggcttgagcccttggttaaatcaggaatgctcttcagcgctgctgctgaatgatctgctccggatgtgatttctcagttgctctataagttcaggattttgttgctgtatctgctgagcaaactgctgtcccgcttggatgaggcttgacaggtcagttaggcccccaactccagcagcaggtcccccaatgggcatttgtcatcattcctgacattaggctgttgaacttgagggttctgcattaaacttgccgccatactaatgaaggnctggattatttatccaggtaggccatgtcaaagctcagtccagttcctgtagggctgggatacctctcntaggcttacngttactgctat

SEQ ID NO: 462207 - DNA, 525 bp, Homo Sapiens
  misc_feature (472)..(472): n is a, c, g, or t
  misc_feature (488)..(488): n is a, c, g, or t
  misc_feature (500)..(500): n is a, c, g, or t
ctactcaataaaggagcagttggctcccctgtgctggtgtggtctcagctacatggttgctcaaatactcccaatggtggttcaaggccaggtattttagtattgtattgaccttgacagtaataaatcaacttttggagacaaggaatgagttcatgagttaccctttatccttggttgcagagcaatggatgttttaggaaggggttctggagcataatggaactcagtccccagctgtgcatcacaattagatggatggtgttggaaaatatcacctctgtcaggtagaaaaggactacaggtcaccgtgtacggtgaaatgaagaacagctgttgattatctgaaagcatgctttccttctctgtaattcccctaagtaaattctctgaggactatatgacttcctcaaggagtcataataataatattcctaatcacaataaaaacaaagacttatatagtcatatntattagatgccaggcnctgttccaagtncatctgcacatacatagagctactt

SEQ ID NO: 462208 - DNA, 492 bp, Homo Sapiens
  misc_feature (45)..(45): n is a, c, g, or t
  misc_feature (51)..(52): n is a, c, g, or t
  misc_feature (337)..(337): n is a, c, g, or t
  misc_feature (367)..(367): n is a, c, g, or t
  misc_feature (369)..(369): n is a, c, g, or t
  misc_feature (384)..(384): n is a, c, g, or t
  misc_feature (392)..(392): n is a, c, g, or t
  misc_feature (396)..(396): n is a, c, g, or t
  misc_feature (425)..(425): n is a, c, g, or t
  misc_feature (428)..(428): n is a, c, g, or t
  misc_feature (430)..(430): n is a, c, g, or t
ggagcggagtgtaaggccggaaatggaatccctgtggaccgggtngcccanngctggggagacgggtacactcccctggcaaacccgcttcagatttgtcggtgtgacctgcaatgagaagaggggcagaatcatgaagtcaggaagagctgctgaagggagagggtcccacctctggagcttcgccgtcggcccaccccgctcccgccctcgcaaatagggtccaacgcggaggagcctcgggaggtgtctccgctccccaaactctccaaacccagaagccccgggaggccggagctagccgagaggttgcttgtcttccccacctccgccgttncccaacggtggcaggcgcgcgtctagaaananattggtcgccgcganatgggganccanaggcctcacccccaggaggtgcgctggcncgngnccccgcaacggggcgctggttctggttccctctccaggatttgggggggaaacgtgggtaga

SEQ ID NO: 462209 - DNA, 395 bp, Homo Sapiens
  misc_feature (99)..(99): n is a, c, g, or t
  misc_feature (224)..(236): n is a, c, g, or t
agtggagacgaggtttcaccatgctaatctcgaactcctgacctcaggtgatccgtccacttcagcctctcaaagtgctggcattacaggcgtcacacncacacccggcccctttcccttcttattgccattctgagaaaatactagtttgtccctcttgcacaagtttttccctcagtgagctaccatttccaggagcagccctgagtctctgaagttaaagnnnnnnnnnnnnngtttagtctgcttaattaagttcttgttgcaaaactttcttagttattactctcagttgtagcttttggaatctaacagcccctcgcttatgagccactcatatcacttactagcctggaactttgaataagttactaaacttcttcaagctggatttc

SEQ ID NO: 462210 - DNA, 204 bp, Homo Sapiens
  misc_feature (19)..(19): n is a, c, g, or t
tttttcccaaagttaaagntttaaaacatagtttactataaaaaagtatcaacaaattagcactgaataaattgttctttatttctagttaatttatttgaaaagttgatattttatgctctagtttctggcatgagatataaaacgtgccactgctctaaaaaatatatcagaaaatttttttccacaaatggcttttttagg

SEQ ID NO: 462211 - DNA, 607 bp, Homo Sapiens
  misc_feature (351)..(351): n is a, c, g, or t
  misc_feature (354)..(450): n is a, c, g, or t
  misc_feature (454)..(470): n is a, c, g, or t
tcggcacagggatcagttcatcaagaagatacaacagtcctaaatgtgtaacttttataaaacagtatacccaacaattgcagaatattgttttaagtagacatgaactgctcaacaatatagaccaaatgctggaccataaaataagtcacactaaattccaaaaggaataaaatcatacatggtatattgttaaaccacaaaataaacttgaaattaataaagttaacttgaaaaatcccccagataatttggtatcaagtaaacttgttaatcacctaatggatcagaggagaatttacaagggaaattagagaatattttaaatctagaccagatgtgatagcatanacnnnnnnnnnnnnnnnnnnnnnnnnnnnnnnnnnnnnnnnnnnnnnnnnnnnnnnnnnnnnnnnnnnnnnnnnnnnnnnnnnnnnnnnnnnnnnnnnntgcnnnnnnnnnnnnnnnnntttaagtagctgggtgtggttgtacatacctgtagtcctagcactcaggaggctggggtgggagacttgattgagcccaggaattcaagactgcagtgagctgtgattctgctgctgcactcccaggaaaggcgaca

SEQ ID NO: 462212 - DNA, 500 bp, Homo Sapiens
acttgtttgaggtgatttgggattcccaacctctgggaaaaaatattcacagccacattataaaaaccattatcggcaggattcatctcctgctcctttagaataagacctttccttttgtttgtggaactttggaatgtacaagcaagacgttcattcatgctttaaaatgctgtttaacaattgcttagcactttaccagggagaatgtttctcctgagtgtttaccaccctattctgtaatacagttgagggtccacatcaatgctatctattccttccctggcccagaagaacacacacatttaatcctgagtgcattgagtaccacagctgagtggagaaaggattagggaggcaattaagaataaaaagaaaatccttgcaagtcaatgacagagcatgtatttccctacaaacgaaaacgagaaaataatgcatccatgaacttgcagccctcactcctttcactatgcatatgcctcttgtgaggggttctc

SEQ ID NO: 462213 - DNA, 475 bp, Homo Sapiens
cccccaaaaaacctctcagtagtttctttcagtgtacaaaatgatgagcatttttctatgatgaggttttaaccattattccagggtggtcttttgtttttaaatctttttttaactaataagatttacggtgtgtaattttatacagaaatgcattataaatgtttttaattgtgttctgttttttgcagtctttaagtgccatgccaattgttcttatattctatagaagttcgctcaaaatactcaacaggggaataggcagcggacagtcagaatggttggaattttggctttctaagaaaaactttattttgcataagcatgtggtcagatcctttttgtgcatatgcagcctgggttgggatgttaagtaaatgcttgtttcagtgccggtacatttacttaaatctgtttttatttttgtcatgtagaatactactgtggtcatcataatgtaatctatttctgtacc

SEQ ID NO: 462214 - DNA, 186 bp, Homo Sapiens
cctgcttcaacaacaagctattctgaaagcgacttgtgcttgggaaccaaggctgacttgggtgggaacatggtctgtgtttgacttagtgttagtttattatgcaatgttcacagaagacagcagagttgaaaatcagtgctgattctagagcaaaatttctttaaatgcgttcacctgtgccga

SEQ ID NO: 462215 - DNA, 409 bp, Homo Sapiens
  misc_feature (331)..(331): n is a, c, g, or t
  misc_feature (365)..(365): n is a, c, g, or t
caatttagaaagttttttttgccaagattaaggacacacctgtgacacagcctcaggaggtcctgataacatgtgcccaaggttttcaggacacagctgggctttatacattctagggatacgtaagacatcagtcaatatatgtaagatgaacattggttcagtccagtcaggcagagcaactcgaagtaagaggcttccagggtcgcaggtagataagagacaagcagttgcattcttctgagtctctgattagcctttccctgagtccttagtgtagctcagtgaatcatcatgggtggaagtggaggcaggcacatcttacatggtngtcaggaggcggggagcagggggaagtgccacantcgaaaaccatcagcttttcgtgaggacttatttcacctcccga

SEQ ID NO: 462216 - DNA, 438 bp, Homo Sapiens
  misc_feature (22)..(22): n is a, c, g, or t
  misc_feature (32)..(32): n is a, c, g, or t
ctcagagtttgtttctaagtgnaagcagtccnccaccaaagcactaccatgtggctttagaatctctgcctgttttacacctgttgagaaataaaatgtttggacttatgaagtaagccccaccaagacaaaatattgggatgtcaataataacctttttaaaaatggctggttcttcagacagagaaaataaaaatcaccatacatttctaccccagattaacttccaaaaaaacaaataactagctagacctgttcaggagtatggtagccacatgtgtgtggggtcccctagttttcctcatttttgtctctgtcctgaccaagtaacacatggtgccttgacccagccagctgatgttttcctctgcaggtctgaaccccagcctgggccttgaacattcctaggcactgataacggtgcttaggttgttgctc

SEQ ID NO: 462217 - DNA, 355 bp, Homo Sapiens
  misc_feature (336)..(336): n is a, c, g, or t
gaagaggggccttccatacaaatagaccgttccataatttatgtaaattttattttaataaaatccagttttttgtttaaaaacccttgtttcactgtcacatatgaaaaaaatacctgcattgatatataattatttcatgttacataataacccaaaacaaataattacttgaatatgtttgtagagatactatttaatttattcatataaatgtgcagaaagattccaaaggagaatatatatcttgtgaaaatatggagatttgaaaatttgacatgatgcaaatagactgatacataatttggaaaggttctttacatggcagaatacatnaaatgaatattaaagtaaa

SEQ ID NO: 462218 - DNA, 394 bp, Homo Sapiens
  misc_feature (18)..(18): n is a, c, g, or t
  misc_feature (37)..(37): n is a, c, g, or t
  misc_feature (57)..(57): n is a, c, g, or t
  misc_feature (65)..(65): n is a, c, g, or t
  misc_feature (89)..(89): n is a, c, g, or t
  misc_feature (101)..(101): n is a, c, g, or t
  misc_feature (322)..(322): n is a, c, g, or t
  misc_feature (338)..(338): n is a, c, g, or t
  misc_feature (353)..(353): n is a, c, g, or t
taaaaatgtttgaagctnaaaaatgcaaatgattaanatctcatgagaacatgaaanaggaatantaataaagttatttctaatatgtnaaatatatgcantctatttttctacatacctgctgtgcacttgcaataatacaactgattatatggtgtgtaaaattaaacatttactgaaagacgttagtttcatccccccagcgcccacaataatatcaccacatacccactggcagtattacattctcatccttaataatacttttaagcaaatcaaggtttaacatgtgtgactgtcagcagaaaggtgttgaaaattncatttaaaccccaggncttggttgactgggnaaattcgaaagattacaggcttctagaatcctgtgccgaat

SEQ ID NO: 462219 - DNA, 356 bp, Homo Sapiens
  misc_feature (64)..(64): n is a, c, g, or t
aaaactggggaaagccagaaagaccgggaatgtgatacagccttcccccacgacttggctgagnaactgctgttgtgaaccttttgcccctggtgggattattgtaagtattcagagggatcattttgagagaagtgctgtggacattgacagtgccagactgtcacaggtcaagttttcattgtctcttagttttggggctgatatgaaatgaacttgggtctttttctgagggctttcagaaagttagcaattaaacaagaattctaaattctgttttttgaattcacccaccgtgctgttctctggtttcagagtacttgtgcatggtaagggactgtgaggaaagactttga

SEQ ID NO: 462220 - DNA, 277 bp, Homo Sapiens
  misc_feature (173)..(173): n is a, c, g, or t
gatcagtatcacccacttctgtaccggaaattaacagacaattatttaatggggaaataaaagggagtaagaaactcaagatttgtaagacagaaatgcctattttatatagacctccctacagtcaatctaggggttaactattataatttacgactcaatttatcaaagtnctctaaacacagtcaatatctgcaaatcaatgatatctctgtattccagccataaaaatttcaaaagtgaatcttaaaaatataatttaaagtagtatcacact

SEQ ID NO: 462221 - DNA, 500 bp, Homo Sapiens
  misc_feature (74)..(74): n is a, c, g, or t
  misc_feature (92)..(92): n is a, c, g, or t
ttttcacagtggtaagataagagaggggaaggggagggaaatcagaagagaaatatcacctgggtcaatagganttaactcttaattaacanttttaattaatctccactctcccactatgctgggtaagaaagcttttactgtattatcacatcatagagaggaaagcaaagcaagtaacttggtgtaataggttactttgcataagtacctcttggtaccaagggaacatacagaaatcattcccattaggtaaagcacctcaagagaggattgagaaaagttaggatacaaaggagttttgtttgtgctaccctaaagtcatcaactttaaaaagttaaaaacactcctctcttcccttacatacttaaaatagcaaaaatgttttcttagaacttttatacacacaaactaaaacatagccaaaaatccataaagtgactttactaaagcaaattatggggcagatctggactaactgaatgtcaagaatggatta

SEQ ID NO: 462222 - DNA, 425 bp, Homo Sapiens
  misc_feature (338)..(338): n is a, c, g, or t
  misc_feature (368)..(368): n is a, c, g, or t
  misc_feature (383)..(383): n is a, c, g, or t
  misc_feature (388)..(388): n is a, c, g, or t
  misc_feature (399)..(399): n is a, c, g, or t
gaagtattttggaaagtaaagctaaagacataccttttaagatatgagataaagtgggcaaatatgagaaaaaagataagagacatggagagagcaaaagttccaacttctgtttaataaagaagcaaacaaaaatagagggaagatgtattcacagacataatacaggaaaattttcctgtgttaaacaaaaaccagccttcagatagataggggcaactgactgtcaacaggacaacaaaaacagagattgacctgggatacttgctgtattaattcggaaagttgaaaggaggaacctttttcaggaaaggttaaactggttaatctggcggggngaatggaaaactgggatccgtttttcttcnttgggccaaacttgnggggntaggaagggcngtgggttccaggggccttttaaagtt

SEQ ID NO: 462223 - DNA, 288 bp, Homo Sapiens
ttcccctgttggtcaacatttgggtagtttcttgctgttgaaaacattgcctgtagagaatattctgtgatatatatcactatgcacttgtctaaatatagccagtagttttataattcctagaaatagaaagtgcatctaaatattttttgtagatgttgccaaatttccctctagagaaaggtgtgtttgctaatttataatcttacaggctctgtaagagactgttttttcctcctgtgccttcaacgataccatgtgttattaaactttttgatcattccaaat

SEQ ID NO: 462224 - DNA, 441 bp, Homo Sapiens
  misc_feature (96)..(96): n is a, c, g, or t
  misc_feature (104)..(104): n is a, c, g, or t
  misc_feature (235)..(235): n is a, c, g, or t
  misc_feature (246)..(246): n is a, c, g, or t
  misc_feature (390)..(390): n is a, c, g, or t
  misc_feature (409)..(409): n is a, c, g, or t
  misc_feature (414)..(414): n is a, c, g, or t
aattgtttctaatatgtaagatcatttctttataatcataatacttgtcctcccctcctttttgtttccctcctgactttttagtttttaactagntaatgagnaagaggaggtaatgttgttaccaaagagcaaagtctagttctttggtacttaatttgcatgacaagtttttgctcactgtaattagaatttagttaaataaatgtcattttccttaatgttatctatgttnagctcatgganaaaaaaatgttcttgagcactgggcccctgtgaaaatatacaagttgagtatccctaatctggaaaatctgaaatccaacatgttccaaaatccaaaaccttttcgggtgccaacatggatgcacaaaggtaaatgctttggtnggagttttgtggggatttngtacncctgtatttgggggttggtgaacttgg

SEQ ID NO: 462225 - DNA, 426 bp, Homo Sapiens
tattctgtatttatgctaaacctttattacttttagaaagctgtacacttttttaaaaaatttgcacttataaataatagaaaaaatattagaatcaaaatttcgtcattacagatgggaaaatatgtactataaggaattcaagttaacagaggcttgatttatataaaagaaagctgcagttttaaagttgtgttccttaaagaccagattatagcttatctgaatgggcttgacactttcaaatggaataaagttacaatattaaacagattagggtaagaaaatctaaatctgggcacatctctattatttgacagtgtttaaccaaatacatcatacagattaggaaggtgagtgccgggcccctgagggagggagctcttcgtgttccccggcaaagcgctgccccagggactgcgggaa

SEQ ID NO: 462226 - DNA, 386 bp, Homo Sapiens
  misc_feature (33)..(33): n is a, c, g, or t
cataaaaaccttgccttttggggttccatgaantgccttttcaccctgtaccttccccatcctgtccatgaaccagggatcccctgagatgttccatactctgcattcctcatgtgcatgatccttagatttaaaaagggtgagtgggagaaagttgctttatagaaatataagttcacagcattcatgttttgtgtgttccactgccaatattgcatgctgcatacttgtatgctgcatacttgtatttctctgaaaatgaagaacataggctcataagtacacaaaaaattagtttcgtttttgccaatagttggaacagatgaaggaatgttagatgtaataccttttctattttttctaaaatgaaaactgtagtatttttc

SEQ ID NO: 462227 - DNA, 395 bp, Homo Sapiens
  misc_feature (375)..(375): n is a, c, g, or t
cctttattctctcaagcgtatcatagaaatatccaaacaggttcagttctccctcaatagggttgaaccaaggaagaatatagaatctcctctttgagaaatcagaaaatctcagaagcacgtattgcttctgtaaccagaggaaaaggcaataaatgttataaaacgggacaaaaagctactgggccaagccacagtggcctgaaggcaggggaaagcagctgtctttccatgtgcagagaagcaatgtttaggggagtgaagggttcgagagtcagcctaaccaaagtggggaaaaggtcttttagggacatggcctgcaacttgtgggggacttctatgggagatgttttgaaggggaagggaggaggcctncccggggttgggatagggcc

SEQ ID NO: 462228 - DNA, 275 bp, Homo Sapiens
  misc_feature (74)..(89): n is a, c, g, or t
taatgataatacaacgttatgagggagaggaaagcaaatactattatatctatcttatttgtatctgatgcagnnnnnnnnnnnnnnnnacaaaaggaaatgtggctatatttattcaaattttaaaaatattcccactattggatcttgaaattgcacttccagggatctattccccaaaatgctaccacacaacgcaaagttttatgtttcagatcattcattgtggcattgtttgtaatagcagcaaactggggaaaaaaacctcctggtcc

SEQ ID NO: 462229 - DNA, 480 bp, Homo Sapiens
  misc_feature (24)..(24): n is a, c, g, or t
gcaattttaaccccaacatttttnccttcaaaggccccataaatactcagtttctttgaaattgtactttgaacccaggtttactatctgctggtttccctcattaatgagtcgaataagcttcgacacatgctcatcttatacacatgtatatatatgagtcatgttgtcaacttaaaaggtttgacagataataacctaatcaagctaaataaagtccagccaaaattaattaataaaaaacattaactaaataatatcaaggctcaatctacacctcactttagttatttaggaaagaaaaaaaataacctttatactagcatttcacactttcttactgactttagaacgtcttctgatttaggtggcaatcacttgcctagttgtacttagggcaatattaataaaataatgaatgtttctgcaagaaataatatataaagattaatttcctctttaattttaccaatcagaata

SEQ ID NO: 462230 - DNA, 412 bp, Homo Sapiens
  misc_feature (81)..(81): n is a, c, g, or t
  misc_feature (99)..(99): n is a, c, g, or t
acatcatcatcccaggaatggcaaaaacctgggaccatataaagcaaactgtttcatggcagttcagctccacgcagtggnactggtgaagaacaaagnagtttacttttttcatatacatttccattacttgaatttactgagaaaggattacttttgcaaattttataaaacctatagagatggtaggctaagtttattttaggcttcgtcacagaatgtatagtaaatgaacattcttaaaacctaagttccactgatctgggaccatgccttactcttctctttgcacctagagagctattcagagcatttagcatagatagtaccaggtgttcagtaaatgtcttattggactacacaggacaagagaatgcattctatctgctaaatcccactgtcgtcgccgagg

SEQ ID NO: 462231 - DNA, 255 bp, Homo Sapiens
  misc_feature (29)..(30): n is a, c, g, or t
  misc_feature (38)..(38): n is a, c, g, or t
  misc_feature (50)..(50): n is a, c, g, or t
  misc_feature (205)..(205): n is a, c, g, or t
  misc_feature (219)..(219): n is a, c, g, or t
ctgtttcatgattgtgtggagttactgtnnctttgaanttggattcaggnaattgttccatttcatttaagttgtcaaatttatttgtgtagaattactcctaatatttcaaattattctttggatgtctgcatggtctttagtgctatcccatgtttcattcctgatgttactaatttatggtcttctctcttttctgtcagtnttgctagaggattncaattttattcacttttaaaggaacacattgtttca

SEQ ID NO: 462232 - DNA, 381 bp, Homo Sapiens
cttggctttaactctctttttatcatcatcagagtcagaatttgtgtcagactctgagttactgtcactatcagaatactttcctctgctttcttttagacgacttattctttctttttttcttgtttcttgaacgcctggtcttctttttcctatgttcttccgagttggaatctgaactgctgcttttctgatgcgttacctcttcttcactcctcaactggggtatgttcgtcagaatctagctgagggaacctttggagacggcccccacacttcaggcgctcccaattccccaatcctctctctctccttcagcctcctctgccgatggtctcttccttctcgtagtcttccgctgactgccgttcttctgcatag

SEQ ID NO: 462233 - DNA, 483 bp, Homo Sapiens
  misc_feature (32)..(32): n is a, c, g, or t
  misc_feature (456)..(456): n is a, c, g, or t
  misc_feature (472)..(472): n is a, c, g, or t
cctctctcctacttgcaacttcctaacccctngggcccaaaaccttcctcaactcccttcctgttaaacccacacccactcggggcccacttctgggatcatgtatttccctcatcataactatcttcttcattatcagatactggttcaggatcaggacgacttactggtatttgaactttcttcttccttctaattgtaatttttgcatttttccccacttttccttagttgctgaacagcaaaagcatgttcaacattatccattgaaactccgttaaccattgcaactcggtcattttcctgtagctgtccttcagctggtcctcctttcagcacatctgaaatcactattgacgtttccccactctgaaaatgaggattatctcgtccaccagatattgcaattccaaatccaaatccaggagccctgtgaagcgtcactgtatgttagtngcaattatagctgttncctaccattgc

SEQ ID NO: 462234 - DNA, 504 bp, Homo Sapiens
  misc_feature (16)..(16): n is a, c, g, or t
  misc_feature (68)..(68): n is a, c, g, or t
ctaaagagaccagctnagacagctacaggaaaattgcccgattgcaatggttaacgaagtttcaatgnatatgttgaacatgcttttgctgttcagcaactaaggaaaaagtgggaaaaatgcaaaaattacaattagaaggaagaagaaagttcaaataccagtaagtcgtcctgatcctgaaccagtatctgataatgaagaagatagttatgatgaggaaatacatgatccaagaagtggccggagtggtgtggttaacagaaggagtgagaagatttggccgagggatagaagtgcaagtagagagaggagcttgtccccgcggtcagacaggcggttcagtgcttccagccagcctgctaaacctactaaagtcacactggtgaaatcccggaaaaatgaagaatatggtcttcgattgcaagccatatatttgttaaggaaatttcacaagatagtttggcagcaagagatggcaatattcaagaagatgatggccct

SEQ ID NO: 462235 - DNA, 162 bp, Homo Sapiens
aagaaataagtgctaaaaatttcccatattgggcaaaaacataactcacagaatgaaggtcagtaaactcccaagtagaataaatgcaaagaaaatcaaatctagacatataatagtcgcactactaaagtccaaagataggccaggcgcagtggctcacac

SEQ ID NO: 462236 - DNA, 414 bp, Homo Sapiens
  misc_feature (22)..(22): n is a, c, g, or t
  misc_feature (49)..(49): n is a, c, g, or t
  misc_feature (61)..(61): n is a, c, g, or t
  misc_feature (74)..(74): n is a, c, g, or t
  misc_feature (81)..(81): n is a, c, g, or t
  misc_feature (89)..(89): n is a, c, g, or t
  misc_feature (334)..(334): n is a, c, g, or t
tggttaatgaatttgctgaaancaacccaacaacacgttcaaccttgtnaaggaacagcanttgtttaaggcangggaatnagggaagnaagctggcaaaatctgtgcaaggtgaaaaggtacctgtggccttgggctcatggaaagtgggaggtgatgggattctaatgtgcttgggtacagtttacaaatacaacctctcttagtttgcccaatacctccaaattcctggggtggcacacctgaggttcaggtggcatgactgagccatagtcacacatccccactgtaggataccaccacggttgggttaggttccagcacatggcggtcncggcctggcctcttggtcccacctcacctggtgactagtgcagaccactctgttcttgcctgtttcaggcagcggaggag

SEQ ID NO: 462237 - DNA, 302 bp, Homo Sapiens
  misc_feature (13)..(13): n is a, c, g, or t
  misc_feature (21)..(21): n is a, c, g, or t
  misc_feature (32)..(32): n is a, c, g, or t
  misc_feature (76)..(76): n is a, c, g, or t
tcctgtcccccgntgccctgncgtattgcccngaacttagggacccctcggtgaagccttgaatgaaatgcccacnggatccctatgttaaggccttgaccctattaaatatttagaacccaatgacttgtataaggacacataaacaaccctatgaaatttgcccaatagtagaaacccgagaggacctaacaactcattttatgtcaggaggttaggagaatgggcccaaatgtatcatgaagaaatttagctgatagaaatatacaattctatgtctgaattacaaaaatcagtaacat

SEQ ID NO: 462238 - DNA, 396 bp, Homo Sapiens
  misc_feature (174)..(174): n is a, c, g, or t
  misc_feature (184)..(244): n is a, c, g, or t
  misc_feature (350)..(350): n is a, c, g, or t
  misc_feature (366)..(366): n is a, c, g, or t
  misc_feature (372)..(372): n is a, c, g, or t
  misc_feature (385)..(385): n is a, c, g, or t
caattagtgttatgagttattcaacttctttatcagagtaagtaggaactaaaaaaattttttaactattttgaaaatctaaatataaaacttttttaaagtttctaaatggttatatttcaaaataaaaagatgaaaaattaaggtatccacattaagatgttaggcaacagnaacaacaggnnnnnnnnnnnnnnnnnnnnnnnnnnnnnnnnnnnnnnnnnnnnnnnnnnnnnnnnnnnnnttctattaaactttcaagggataacatcccattcttataaaaagtatcctaggaaaataaaatgcaaccattcttttagctcactttatgaaagccaaaattaggncaaggcatagtgactnaagggnaaacaacagtccnttttgattcat

SEQ ID NO: 462239 - DNA, 357 bp, Homo Sapiens
  misc_feature (309)..(309): n is a, c, g, or t
  misc_feature (338)..(338): n is a, c, g, or t
tagatagaattcacatgctgtgagattcaccattttaaagaataccaaatcagtggtttttatttattcacaaagttgttaacattaaaatttgacctttggaaatataaggaaatattttagaaatctgtagggagtatgaagggtcattttttattttaaattgtagaggtggtagaatgacgtttacttcctgggatctgtttttggtcatggctgcagttttgtttgggagtgtacatcttctggggtgttctgctcagggagtttatttagtgttgctttcagtggaattgccatcccagtccngtctggaatctataactgccacactgtangggtcactcttaggggacc

SEQ ID NO: 462240 - DNA, 315 bp, Homo Sapiens
gggctcttcttccacctaaacacaacatttatgggcccattaatgccttggatttatttccactttgctcatttatatgtataaaatcataattaatgtcacttctgtttattcagaaccacagactaaatcctcttaactaggaatgaacagccaagctaacaaaaggagggcagggcaaaaagggaaagagggacgtaaaagggagggactttaggtttctaggtggcagtgcctggacacttacagggggtttcaaacatttcaattaaaatttctttcaaaagggtgggaaatttggggccaatgttccgc

SEQ ID NO: 462241 - DNA, 476 bp, Homo Sapiens
  misc_feature (23)..(23): n is a, c, g, or t
  misc_feature (42)..(42): n is a, c, g, or t
  misc_feature (59)..(59): n is a, c, g, or t
  misc_feature (70)..(70): n is a, c, g, or t
  misc_feature (84)..(84): n is a, c, g, or t
  misc_feature (442)..(442): n is a, c, g, or t
caacttcggttctctgcaaaccnaaaagccttctgcgggaanccccaggatggaacccnaaccccaaaanaaggaaaagccccngtcttttcccaagacaaattccggggttccccacattcgaaggaaaggcaaagtggagggagctaagcaaacagaggtctaagtccgaggtcacacggctggaaggtcggagaaccccacgtgtaccctttcatctccgaatgcagagccagtgcttgtaactgttatgggaagcagcaaggcctgggcccaggctgagcctttccaagggccgctcagaccagggacagtgctttcaggcagttattctccgttcctgtgcccgtcttcaagatggaactaaaaatactcctcccttcctcgacatgctgggggcgggcagggggccgatgactatgggaaaatgcccggctctggncctggcacccagacggagccaggcatgtcccctg

SEQ ID NO: 462242 - DNA, 505 bp, Homo Sapiens
  misc_feature (52)..(52): n is a, c, g, or t
  misc_feature (101)..(101): n is a, c, g, or t
  misc_feature (119)..(220): n is a, c, g, or t
  misc_feature (472)..(472): n is a, c, g, or t
  misc_feature (476)..(476): n is a, c, g, or t
aaatctcctgcctccctgcctcaacctgggacctgaataactgggaccaacnagcatgcgcccaccactccctggcccaatttttaaaatttttttgttanagatggggatctcccttnnnnnnnnnnnnnnnnnnnnnnnnnnnnnnnnnnnnnnnnnnnnnnnnnnnnnnnnnnnnnnnnnnnnnnnnnnnnnnnnnnnnnnnnnnnnnnnnnnnnnncctccccctcaaacttctgttgacaaagtgctcccttcccagaggagggggcccatcggtgtgtaaggtggcctattcctctgtgtgttctctggatcttttcagccctgtggtccagtgtccatcacagccatgctgactgagtgactggagacagggatgatggagagttcaggaagggctgggcagaggaggctggggccacctctggagggtgtcctgctgttcctgttggccccagctgcactatanattncttcctgtggcccctttccccaagcaggg

SEQ ID NO: 462243 - DNA, 310 bp, Homo Sapiens
  misc_feature (264)..(264): n is a, c, g, or t
  misc_feature (276)..(276): n is a, c, g, or t
  misc_feature (289)..(289): n is a, c, g, or t
gctccagcgattctcctgcctccctgcctcagcctgggacctgagtagctgggaccacaggcatgcgccaccactcctgggccaatttttaaaatttttttgtagagatggggatctccttatgttgtccagggccagtcttgaactcttggggctcaagcgatcctcccacctggggactccaaaagtgctggggtttacagggcatggaggcaccacacccagtttcctccccctcaaattttttgtggcaacaaagtgttncccttcccagangagggggcccatncgtgtttaaagggtgggctat

SEQ ID NO: 462244 - DNA, 814 bp, Homo Sapiens
  misc_feature (24)..(24): n is a, c, g, or t
  misc_feature (68)..(68): n is a, c, g, or t
  misc_feature (73)..(73): n is a, c, g, or t
  misc_feature (742)..(742): n is a, c, g, or t
  misc_feature (766)..(766): n is a, c, g, or t
acaactcctcccactgaccttggnaatcagaactaaatttctttacataacctacacaactctgtganctggncccttacctccccaattccatctgcatctacatgcgtcctcttatttcccacctattatatgttgaccttcttcctaaacagtacttgccgttctcctgctacccctggggccttgcacacaacaaactctttgctctcttccctaggattagcccctaatcccttcaaatatcaactcagtggtctgttcccccaggacaaatccctgctatcatatgctctcaaagcacctcaggcttcagtttaaaagattagcattatttgattttatagactctccagtcctgggctctgccagtggcagagaagtatacttttactcatcattgcacacgtgggggctgggacagagttagaactcatttatttgaagggaacaaatgaacaaatgggaattgatacagtacttttgcctctctagtttttatggtggggtgaatcttacatttgatatgcactgggggaaactgtcaggtctgaaactgtttttgatatagagaacttaagagaattacataaatgtcatttggctatataatattcatctgaatttatcttttgcaaccattactgtttacccaagagaagtcagtaatgtcagatcacactgttcaaggtctatttgattataacctttcaaagatggcttcagtatatctctggggtcntcaggctatttgtgccaattttcntaaatggaacaagggacattaggtgccttggatttcacgggcatcccc

SEQ ID NO: 462245 - DNA, 601 bp, Homo Sapiens
  misc_feature (12)..(12): n is a, c, g, or t
  misc_feature (37)..(37): n is a, c, g, or t
  misc_feature (237)..(237): n is a, c, g, or t
  misc_feature (257)..(257): n is a, c, g, or t
  misc_feature (539)..(539): n is a, c, g, or t
ggttagcatttnttgtagtgattttcaaaccttagtntgccgcagaaccacccagagaaattgtttaaactcaggttgctgggccccacagccagagtttctgattccataaatcaggagggttgtgtccaagaatttgcctttctaacaagttcctgggtgatgttaatttgccattccagggactacactatatgagccagcaccatcaatgctaggccactttggctcaatttnaatatctcaacaacagggtngagattttaatcatctttgttttacacagtctcagagagattaggtggctacactcacacagtagtgacaaagcctgtctcaagcccaggggctgtctaactcaaaacccatcactctcttctgaacacaatgatgtcgggaaatgaagttggcagtcgctccatctatctggccctcagcttcatgtgagggagcaggacttagatgacggcttcacgggcttcccctctgagtacttggaggactggattgggagccactcaggaaaggcctacttcatncccaggccgcatctgcggagtaagtaagctgaggggaaagggaagaggaggagatatcagcc

SEQ ID NO: 462246 - DNA, 395 bp, Homo Sapiens
  misc_feature (17)..(17): n is a, c, g, or t
  misc_feature (171)..(171): n is a, c, g, or t
  misc_feature (357)..(357): n is a, c, g, or t
caatatagacatttttngttatacatttccctttaaatactactttatctgcataagttttgtatgttgtgttttcattttcattcacctcaaaatagtgtgcaatttcccttttcttcttctatcccttggttatttaggagtatgttatctaatatccatgtatttttnaattttctagatttcctgctgttattggttcaattacatttcacgtggccagagaatgtactttgttcattttaaaggatgagttcaatcctttgaaatttattcaggcttgttttatgggcctagtgtatgggggtattctgggataattttccatatatgcttgaaaaaaatgtgtattctgcntgttattaaatgggagtgaattataagtgtctattagg

SEQ ID NO: 462247 - DNA, 385 bp, Homo Sapiens
  misc_feature (13)..(13): n is a, c, g, or t
  misc_feature (299)..(299): n is a, c, g, or t
  misc_feature (304)..(304): n is a, c, g, or t
attacctctgtgntcctcaccaaggcaggtgggctgagcatgatgtggctgaggtggggggacagatgctgtcacggggacaacctctgtagaggtaagatcaggagggcttgcgaatcacccagccctactcccttcttcatacagatggggaaaccaaggcccatgttcatatgcagaacggtcagggctgggagcagcaccaggggttccaagcaccctgaagcttccatctggggctgcgggctgctgggtgggggagccacgaagggggacacactttgcccaggggcaagggntcttntccaagcccctcacttcccaacttcaggaggccagggtccagggtttaattccatgtgcactttcggggagtttccccagg

SEQ ID NO: 462248 - DNA, 439 bp, Homo Sapiens
  misc_feature (12)..(12): n is a, c, g, or t
  misc_feature (52)..(52): n is a, c, g, or t
aataatattttnaaagctttttggccctttgtccaaattggggaacacattnaaactggagtactttgtaaaatatttgtcccttttatggataaaggacagttttccctctgagagaacaatgtatgttttcatgatacagcaattatgatctgtatgagataagcacttccttaagccattttatgattgtattcctttcaatctcaccattctcaaatgtatcaagctctgagtatcctttcctcaccaaagtttaatattgtcaggagctcgtattaaattgtgctgcaaaaagcattttcctttccccttccctttgtaattaatattaaattttgcacttttgacttgctataaatttacagcatacatctacaataaaaatcacgaccgccaggactgcaaagaggtagcaggaaagacatgtcagataatc

SEQ ID NO: 462249 - DNA, 491 bp, Homo Sapiens
  misc_feature (115)..(162): n is a, c, g, or t
  misc_feature (181)..(291): n is a, c, g, or t
  misc_feature (293)..(417): n is a, c, g, or t
  misc_feature (426)..(426): n is a, c, g, or t
  misc_feature (438)..(450): n is a, c, g, or t
  misc_feature (467)..(467): n is a, c, g, or t
  misc_feature (475)..(475): n is a, c, g, or t
agattgggtgtgctatgttgctcaggctggacttgaactcccgggctcaagcgatcctctgccccagcctccgaatagctagggctacaggcgtgagtcactgtacctgtcttcnnnnnnnnnnnnnnnnnnnnnnnnnnnnnnnnnnnnnnnnnnnnnnnngagatggagttttgctttnnnnnnnnnnnnnnnnnnnnnnnnnnnnnnnnnnnnnnnnnnnnnnnnnnnnnnnnnnnnnnnnnnnnnnnnnnnnnnnnnnnnnnnnnnnnnnnnnnnnnnnnnnnnnnngnnnnnnnnnnnnnnnnnnnnnnnnnnnnnnnnnnnnnnnnnnnnnnnnnnnnnnnnnnnnnnnnnnnnnnnnnnnnnnnnnnnnnnnnnnnnnnnnnnnnnnnnnnnnnnnnnnnnnnnnnnnnntgacaactngtggcttgggcnnnnnnnnnnnnnttaattaaaacaaagcngttttttnaattaaacggacttta

SEQ ID NO: 462250 - DNA, 501 bp, Homo Sapiens
  misc_feature (11)..(11): n is a, c, g, or t
  misc_feature (53)..(53): n is a, c, g, or t
  misc_feature (90)..(90): n is a, c, g, or t
  misc_feature (95)..(95): n is a, c, g, or t
  misc_feature (119)..(119): n is a, c, g, or t
gctgttgaagntcattacgacttctttcatctttgacgtaaatgtcttttttnaacttatttattggcagttgctgtatccatcctcttnctttncctcaccatttattactcgctggntttaattccttaggaacttggtacaggatgacctgcagggagtgtgcatgggcatgggggtaataatagtagtcatccctagtaatggcctgtctatcccaaatgaatttgaggggagctgtgacaggccctacctaagtggaaccatgcttcctgaagcagtagtttttcttcgtacttcctcttttgctcattagctttcatactacacagaatgtaattcttaaaagcctctttactgtcccctgaggaacattcatgcatggggtcattttctaatgggcagtacacatcagatgaaccatcctattactgcaggctcaggggcctcttcactgcaattatactatcctgatccatgttatcacaaatacaaagctgg

SEQ ID NO: 462251 - DNA, 319 bp, Homo Sapiens
  misc_feature (33)..(33): n is a, c, g, or t
ccctacaattccatgtcatacatcataatgccncattataatagacttcttgtcttcatgagataataataattacctgagtgaggagctaagcttgagttataactcatccatttacttcctgtattacaattgttaagtctctttaattccttgcatctttgtaaaattgggaaatactgttgacattttgattacgaattgaagtatattataaagtttggtttatggtttagatcagggttcagttaagctacagtctgtgtgtcaaagctagcccactgtctgtttttgtattgcctacatacaattctgtttc

SEQ ID NO: 462252 - DNA, 355 bp, Homo Sapiens
  misc_feature (22)..(22): n is a, c, g, or t
  misc_feature (34)..(34): n is a, c, g, or t
  misc_feature (43)..(43): n is a, c, g, or t
  misc_feature (150)..(159): n is a, c, g, or t
ttaaatggtgccatggtaaagnccccaggtttangttatgttncctgggataataattcccatggcattttgtgccttcctctccttttatgggaaagcttacaattaacttacccaggtttttcttttaatttaatcaggattagattnnnnnnnnnnccctaaagctacttagtaaaagatattttatggcagcccaaatacaaaaatgaataaagcttaaagtaagttattttctcatctctcaaggatggtttccttctgaaataaaaattggaagttgtactttggtaggtgttcttatccactcaaatctagccaccgaatgcaagtgattaggtattaaggcctactt

SEQ ID NO: 462253 - DNA, 378 bp, Homo Sapiens
  misc_feature (11)..(11): n is a, c, g, or t
  misc_feature (54)..(54): n is a, c, g, or t
  misc_feature (92)..(92): n is a, c, g, or t
ctggagccgcntgtatttaattcggtacagaacagaaacgccaaaggcctgaangcccaacacaatttgtgagtaatgaacattgtcgcccncccctttgcagggagcagtcttgcactgatcaagggttggtttctggaggacatatgtaaacaaacttatctagataaatttctttacactaccttgttacctactcttcgccctcagcctcggggtaagagaattagctgccttcagctttattctctctgaagctttgcaaaacctcccagccttccaagaaggtttgcgtctttccttatagcttctcctaccaccctgactgatttcctacagtccgaaacttaaaatatccctcaccttccacctcaaact

SEQ ID NO: 462254 - DNA, 594 bp, Homo Sapiens
  misc_feature (11)..(11): n is a, c, g, or t
  misc_feature (30)..(30): n is a, c, g, or t
  misc_feature (45)..(45): n is a, c, g, or t
  misc_feature (61)..(61): n is a, c, g, or t
  misc_feature (106)..(106): n is a, c, g, or t
  misc_feature (375)..(375): n is a, c, g, or t
  misc_feature (432)..(432): n is a, c, g, or t
  misc_feature (449)..(449): n is a, c, g, or t
  misc_feature (479)..(479): n is a, c, g, or t
  misc_feature (504)..(504): n is a, c, g, or t
  misc_feature (557)..(557): n is a, c, g, or t
ttaaccccatnttgttattacctgtggtgnaccaacatgggaggncctttcttcattcagnaacattttcaacttaggagattctattcgccaaaattctgtcagnaccaaggcagtttggggaaagtaattttgtttgccgaagtgaacccccacaacgatgcgtctcctggatggggctgatgtttcagacaccgcaggaaatggggcttaatagtgatcgcggcccggcagaccgagggcaaaggacggggagggaatgtgtggctgagccctgttggatgtgctctttctactctgctcatctccattccactgagatcccagctgggacagaggatcccgtttgtccagcatctgatgtccgtggctgtngtgggaagcagtgaggtccattcccgagtattcaggatattcaactttacggagtgnaagtgggcccaacggtnatttatttacagtggacctcatgaagatcnggcggattctgggttaactcaacantcatggggaggaaacatttatatacttatttgggtgttggatttaatgtggantaacagttaaccttaccatttgcatcaacgaccttat

SEQ ID NO: 462255 - DNA, 248 bp, Homo Sapiens
aaagagatgcccacagtgtaataaggaatggaggcaccctgcgggttcctttacctagacattaacctgagagtccggtgttgatgtttacacttctaaaaactgttattattactgcccttgatgtggaaaattcgtgggtattcctacccagagtatagcccagattatcatgaaaccacagaaaaatatctcccaacagtttccttaaagtccataattttgggcccaggcacggtggctgatgc

SEQ ID NO: 462256 - DNA, 317 bp, Homo Sapiens
  misc_feature (98)..(98): n is a, c, g, or t
  misc_feature (105)..(105): n is a, c, g, or t
  misc_feature (113)..(113): n is a, c, g, or t
  misc_feature (122)..(122): n is a, c, g, or t
aaactgaactaaaacaacttttgccccctgactgatagcatttcagaatgtgtcttttgaagggctatgataccagttattaaatagtgttttatttnaaaaacnaaataatnccaagaagnttttatagttattcagggacactatattacaaatattactttgttattaacacaaaaagtgataagagttaacatttggctatactgatgtttgtgttactcaaaaaaactactggatgcaaactgttatgtaaatctgagatttcactgacaactttaagatatcaacctaaacatttttattaaatgttcaaa

SEQ ID NO: 462257 - DNA, 432 bp, Homo Sapiens
  misc_feature (335)..(335): n is a, c, g, or t
  misc_feature (387)..(387): n is a, c, g, or t
  misc_feature (393)..(393): n is a, c, g, or t
tggatttcagtccttgcttatgttttgggagacccagccatctaccaaagcctgaaggcacagaatgcttattctcgtcactgtcctttctatgtcagcattcagagttactggctgtcatttttcatggtgatgattttatttgtagctttcataacctgttgggaagaagttactactttgggtacaggctatcaggataacttcctatatgaatgaaactatcttatattttcctttttcatcccactccagttatactgtgaggatctaaaaaaatattcttatccaaggctcattgtctgttttcttcagtacctgggttaccatttgtnactacttcaggtaatcattgttttaactttaaagtttcaggattccaggcanatattngaggatggattatttcccggggtatactttggtcaatag

SEQ ID NO: 462258 - DNA, 379 bp, Homo Sapiens
  misc_feature (22)..(22): n is a, c, g, or t
  misc_feature (46)..(46): n is a, c, g, or t
  misc_feature (165)..(165): n is a, c, g, or t
  misc_feature (253)..(253): n is a, c, g, or t
  misc_feature (365)..(365): n is a, c, g, or t
gggcgcagcaggggggctgaantccgccctgaggccccggtgcccnagctcatggtccggcactgaagcagatgcctagtgaatgaacgtcgggctggatgaatgaacgaatgactaatgcccgctccctcaaaccacaggctacatcgtctgagccctgggggnaggcagagcccacgggaccccagaagaggcctccgcagctgaggctttgcgtcccagggtcgatgggggagggggcggggcggccagncagccggcgcggcacggggctcccctccttcccgagaaggaatctgggtctctggactgagctggtgacgggggctggggcggggggttgtggcgtcctggatggagagagnctgcaggagcaggg

SEQ ID NO: 462259 - DNA, 444 bp, Homo Sapiens
  misc_feature (53)..(53): n is a, c, g, or t
  misc_feature (136)..(136): n is a, c, g, or t
gcctgattccctttctctctgtttctctcttttggaaaggcattggccatcanggctcactgtaaaccctggaactccctggccttggcccccagaagagctgagacaacaggcaaaggcgtgtgccgccgcgccnagtccttacccgctgtccttccccaaatagtgtctttatataactcagtggcaatgccgtagtccagcagggaggccgccctgggcagcgcctgcctggccagctcctgcccgggagggcaccgtcctctccctccggagaggtcccggtcactgcctgcctgggcccgttccaggcagccctgcgcgcctgtgcaccgtgcgcctgtgattggacatctctgggtctctggacagctgccggggtcacgcgccgccggtgaaacgacgtctccacaaagagaggagcagaggcccccagggtatccg

SEQ ID NO: 462260 - DNA, 453 bp, Homo Sapiens
  misc_feature (249)..(249): n is a, c, g, or t
gcctgattccctttctctctgtttctctcttttggaacgcactggccatcacggctcactgtaaccctggactcctggccttggccccagaagagctgagacaacaggcaaggcgtgtgccgccgcgccagtcctcacccgctgtccttccccaaatagtgtctttatataactcagtggcaatgccgtagtccagcagggaggccgccctgggcagcgctgcctgggccagctcctgcccgggagacncgttcctctcccctccggagaggtcccggtcactgcctgcctggggcccgttccagggcagccctgcgcgcctgttgcaccgtgcgcctgtgatttggacatctttggggtctcttggacagcttgccggggttaaggggccgccggttgaaacgaagtttttcacaaagagaggagcagaagggccccagggattcccggagg

SEQ ID NO: 462261 - DNA, 429 bp, Homo Sapiens
  misc_feature (52)..(52): n is a, c, g, or t
tactgtaaataattgtgtaacattggtccttattgtttgcctctgacaatantggggttttctcccgtatctttagaatctagcaaatgctcggccacgtaagtagggaaccaatgaattattaaataagtgactaaatgaatggatgaatggaggaaaatagttaaccacagagcagagacctgagggtagttgcccccccacgcaggaaaggcttcctgggaaattggggagcccaaggagacaggcagaaccattgtttggaaggagctgttgggtctggtctccacctctgcctccttttcttttcacttagaggtcagaactccagggggtgatagagaccacaggtgcgtctgctcagccccaggcagtttatgccctgcttccttctggaactctcataatattctgcaccagcagggaacc

SEQ ID NO: 462262 - DNA, 548 bp, Homo Sapiens
  misc_feature (502)..(502): n is a, c, g, or t
  misc_feature (525)..(525): n is a, c, g, or t
aaagaagttcgaaatgtttaatatttcatgcagttaacatgcttcaaagctttaagtctgaagttttagacttatcccaaatccttgctaagaagtcaagaccactatggaattcacactgctttctatagacttccactgacttgcagctaatggtccttacacagcaaagttgggatttctagacgtctccttccaggttcggaaaagcctcactaggcaagtggcaagactgtgaagacaatgaaggttcagaattcagtcaaatggaaacaagatcaggaaacaagatcaaggactcatctgtccgcctggcaccactttagttttgaaggtgacgccaccacgcatccccgcagcacacactccttcctgtgccgactcccgctatttgcttgcctgagccagttcatgtttcagtaagaacgatttttctcccaacagtggccagttttcttattcccaattttgagagtttgacccaaaattgtggggctatgangggatgggttttttaaaactccncctaatgggttccccaggcacag

SEQ ID NO: 462263 - DNA, 347 bp, Homo Sapiens
  misc_feature (17)..(17): n is a, c, g, or t
  misc_feature (208)..(223): n is a, c, g, or t
tgaattttaaaagaaantaaaacattttagtggacctctacaagtaccatgggcccttggcactatgtctactctgcctgacggataagttggcatatggttcagattgcttgtctacacagtccagtttccctagagactagtccgactctcttctccttgtctggaaggggtggaggaatctggagaaaggtcttgattggccttnnnnnnnnnnnnnnnnaccacacatttcccaggatcatcaccctttgatttcatctccagggtgcccaatgcaccagacacacctgtaatctggaattatcgctttgcaccatgagaagctacttccaacctgtcaagat

SEQ ID NO: 462264 - DNA, 484 bp, Homo Sapiens
  misc_feature (250)..(250): n is a, c, g, or t
  misc_feature (467)..(467): n is a, c, g, or t
ttatttttttattctcatgcaatgctttaatgagtagtagtggttaacattgtgattaccttgtgctacgtactgtgctaagggttagataactcatttaatattctcaacaacctcatagaaatggtagcacgattattcctacgctcagatgagctcatgtcgattgcctgctacccagctataacaatgcctctctttcaatcagttctctcacttctgtttccattgctccttctccatccagggntcttgtgcgtgcgcttctctctgctggggaagatccattgacaccttgtctctttgggagaaatcaggacccccttgttctgagggcttccagaggacaaggtaatcatatccttttccatggccccaggctaaacctgtggcacacacagggttttctttttggcactttatattacagggacattaccggaaataattggggtacaagggggctnattggtttgccccgatt

SEQ ID NO: 462265 - DNA, 253 bp, Homo Sapiens
  misc_feature (68)..(68): n is a, c, g, or t
  misc_feature (204)..(204): n is a, c, g, or t
aaataaggctacataattaataaatatagtgcctataaagtttgactttgtttttcctatattgagtnccttttatgttttatcatcttaatatctatataatacaaaacaaagttatctgatttacttaatcaataccccattagtggatggtttcattttttctagtacattgctattataaaatatgttgccataaatagnaatatgtgagtttctaaagattggggctgaatttccaaataataaatct

SEQ ID NO: 462266 - DNA, 461 bp, Homo Sapiens
agtcaccacaaagctaccattgatttataatgcacattaccacatcaagcctggcccaaggactctgggcccagaaggaaaaacagccatggcagaaatataatgaaaacatatctgtattcacagaaaacaattaggcttaatgtaattagagtgaacattcaggttcattttattcaaaggtaatgtttctgcccttgaagttccatgtagaaaagggtccttggagttagaacactgtgggaaggtgatataatttcacttgggccctcggcttatgtaaggtaaacattttacattattgcacagtaacaaaaatttacagccataggttaacacagggttttgatccaacgtttaacacacctggtgttttaagggctttaccccacatttgggaaggcaattcttttccggggttggggttccaattttctttaacacgtgttcaccgtgttgag

SEQ ID NO: 462267 - DNA, 388 bp, Homo Sapiens
  misc_feature (192)..(192): n is a, c, g, or t
ttttttttcagtttgttcattctggaggtgagaacagccatcctgggacttttagagttgtgcaatttttagagctgtgattcgtaaccgaatagttcatcaaaatcacttagaaagcctttccccaaactctcacgcccgtccctgggattctgactccacaggctcttccaagaactctgctgtgcgagnaaacatgggaaccactgggagagtgctttctgatactctagggctctcaagggaaaccattgccaacctggggaatatctgtcacttcaccgtctttcagctcctgaacatccctgggctgaacaaaatctggcttgacattctcgaaccaccaaaaaagctccgcaataaaaaccataacattcggctaaaagac

SEQ ID NO: 462268 - DNA, 354 bp, Homo Sapiens
  misc_feature (21)..(21): n is a, c, g, or t
cttcaaaccccacattcctgncccgcctttccattaagtttacctgaattagttgtgaatgaatcagcccttaacctatttccatggtttgtggagattggttcattcctgagtacaataggatggtgggatttttgctttaatgttcattttaaacagaattctagacgcagatctaacattcaaactgaattatgttttctgttaaaagacggtgaaatgtcttggatatatcctcaggatatgtcagtgctttctcataaaataatgtaagcaatagcatttcttatttgtagagcattttgttctgggtggaatctgtgtggtggttctaggggctggacctagggaaat

SEQ ID NO: 462269 - DNA, 581 bp, Homo Sapiens
  misc_feature (43)..(43): n is a, c, g, or t
  misc_feature (511)..(511): n is a, c, g, or t
  misc_feature (525)..(525): n is a, c, g, or t
  misc_feature (539)..(539): n is a, c, g, or t
actgcagcttcaaacgctcacacttggctgggtttctacctangttgccaggttatcatcggagccttcttgtgtcctcaaagggccacgaggctgaaaggaggatcagaatgctttgggattaattgggcagccatcgcagaattgtttgtgggcaaagggctgctttagacttttctttttgcaaattaatgactctcaggcacagggggttttaagtgaaggtattaataagagggtctggcaggtattcccatgattcacagagttacatttgcatttaattaatcttaaagttgcaagataaacagctgtaattcggacaaacatgacaaacacagtgaagccaactatcccataaaatgaacactgacatacttgttttaatttttttcccagcgtaaaaatagaaaaatcaaaatactcctaacaaaaccagtgattttgataggaaatatttctccaatatacttggcatccacctacaaatattaaccttttcaaggttaantcgcttatggtttncaataggttcaaantgctgtgtttgttggatggtaaggtgttttggatgggctggt

SEQ ID NO: 462270 - DNA, 465 bp, Homo Sapiens
  misc_feature (118)..(118): n is a, c, g, or t
cctgccccctccgctcaggacttggacaggcagagtggggacggtgtcatcggacccccctccacccgcggagacttaggtgcccgccaactgaggggcattcggtggcacgcgaggngaggggtcttgtgaatgtttgtgggctgctgatgagtaggggcaggtggtggccacagtccacgcagaccacttccctggaataaggcaggagctcgtcccctcgctcccccagcctgtgcagggacagcagtccattcggattggggagcggagagaagagtgtctggggaaccagataacccccggcttccacccccttcatcttgccggggctctgggctcttttgtgtcaagtgcggtggggggggtccccctcttgaccccgtcagtctggggtggccaagctgcccagctgtgactctcacgtggctgccattcactgtcactcactctctcgctgaaact

SEQ ID NO: 462271 - DNA, 720 bp, Homo Sapiens
acagctgactgattgcagtttgtttttccagaacttcgaggtagtccggttctgattgcggcttagcttgcagtaaagggtggttgggttttgactgccccacaaagcatttcctgggagttccatataaaacggttttattgattctgtcttggttttggcgtcgagattcataggaaggggcaaactgcccttttaggtaaggtacaaaagttatagtggactaaggcctgcgctgggaagttccttgactcgctcagcaatattttaatacagcagctcaggctctcttggtgtggcctgcttttctagcagctcagtggcacttattgtgtaagcaggtgtggctggctcttcttttttctcctccaggttgctatagctgaactcttgcaggtttcggtaataggctactgggtctccttccttctgcatgtagatggggttttggcacatctgtaccacaggtggggggatatagttgtagacatggccgtctgttttatcgtgagtctcagtgttgtaagacccatactgtaattgaaaggagcttacgtctaagttgttggtattcctgggaacgctcggcactcctttcggcgtttcaagacaaagacgaataaaccagccccaaaacagacagataagatgaaaacaacaagcaatcccagaattaagacagacagtggaacttcagtgtgtagttcaggataggaacta

SEQ ID NO: 462272 - DNA, 485 bp, Homo Sapiens
  misc_feature (11)..(11): n is a, c, g, or t
  misc_feature (33)..(33): n is a, c, g, or t
  misc_feature (264)..(264): n is a, c, g, or t
gaacctaaacngcaccattccattttaatattnggagaaatcctaatgtgccattaattaagtagtcaatcatgaatacccatttaataatagaaataattccctttaagtatattttcctaagtaatacattttatatcacataaggctaatatacatgatgtaaaaagtcatcctattgtacccaagatgcattgaaatattttgccagataaacttccttgtgctgcctataattatccccaaagctgtttaaagaggctnccctgctgcagcatgaaagtacattagagaatacagcacatttcctgagtgaagaactgaaatttctcttaaaatttcaagtgtgtgttgaaacattgtcatagggcatcaccttgatactgtgctttaattcatgttgctttgagaagccaagaatttggtgtaaacacatgtagtttgaaagtttccactgttattaaaatagtataatccattttgtc

SEQ ID NO: 462273 - DNA, 443 bp, Homo Sapiens
  misc_feature (24)..(24): n is a, c, g, or t
  misc_feature (36)..(36): n is a, c, g, or t
  misc_feature (52)..(52): n is a, c, g, or t
atcaagatcgtgccactgaagaantctgtcaagaantccttgcctaggacangcttttttaacccaattcaattcttgcctaaaggctggaaaacagcatcctacccctagtagtttcctctgaatagtgatgggcttcctgggaaatccccaagatcagatccattccttgaacattacgttcctaggatgtcatatgatctctgtggcccaagattctggagcaaatgtgaaagtttgcttcagtacttcttcagaaggcaattctgcgtcacgctgtgcagaagttgacttctcaacctgtctttcacctaattctttaagagccttaattgtgagctgttcttgttctaagtcaagagatgctactggagtaccttgggtagggaaaacacctagaggctcacttccatttgtttctttgctttgttcactgtatttgc

SEQ ID NO: 462274 - DNA, 440 bp, Homo Sapiens
ttttggaggtaagtaaaatcccttgcccattggacaatgaattcaaagctgaggctgtccaggatacagtagatgaagtctcagaattcactgactagaactgtgaactcctcgaagttggttctatgtctcattcaattttgtgaccggcgcttcacagtgtctggcatatagcaggttttcattaagagttgcccaggtaaatgagtggatggataataaagtggaagaggggttgcactagataatcttccacagtccctgcgactctgagattcagtgatttcatattaagtcagtgtccaaaagggctcaaaaataaggcttctcatccccatctcaaagattggcaagactcaccgtgcaacatggctgcatccagggttctccatccacttgcattggcagcagcttgtttgtccggaacccagaacaccaag

SEQ ID NO: 462275 - DNA, 380 bp, Homo Sapiens
catttgattccatgacctttgttcacaatctccacactatatccagctcctaaaattctgtgaccttgagagtctaagtttctttatttaaccttctcagatatcattgtcctaagaatgtgatattaggctgttgttgaccatggccaataaaagtggggccttgaagccctccctgtgggggtggaggctgggcctagtcagggagagacacaggctctctctgacaagcatacacagcctactttttcctccctgctggccgttagccaagggggactcaaggccaaactatctagtagggagattcttccttgggacagccttttatctctgcagccaggagcctggggctttctagggagatcttaggaacttat

SEQ ID NO: 462276 - DNA, 399 bp, Homo Sapiens
  misc_feature (43)..(43): n is a, c, g, or t
  misc_feature (262)..(262): n is a, c, g, or t
  misc_feature (297)..(297): n is a, c, g, or t
  misc_feature (309)..(309): n is a, c, g, or t
  misc_feature (356)..(356): n is a, c, g, or t
  misc_feature (375)..(375): n is a, c, g, or t
  misc_feature (383)..(383): n is a, c, g, or t
agtcatctaacccatctctcagacagccattcaaggctgcctnatgtctttctcaggaggagatagaatggttaagctgtcattatcttctagtgccactgaaaggacaatagtttcaatgccatattgcctgacatttaaactgatataccttgggatattgagaaacagaagggactaggggaaggagagagccagtttttaaattgttactatataaggaagattctagggattttttcccactctgaattttaacttngcattccatgttaacaaaaaatagaccatgtaaantgaatatccatncattttatgtctattcttttatatcactgtgaaaggaagccaccagnaatttgcccaaggaccccnagggtttntggatgccttttccgg

SEQ ID NO: 462277 - DNA, 415 bp, Homo Sapiens
  misc_feature (34)..(34): n is a, c, g, or t
aagggaaactcctgggggtggtaaagaagttccngtatccacgcctagtctgtttgaagaggagggtacccccgggagggggagatgacaaatgcttgaatcaactcccccatcccttagaattagattccactctccttttatttattgaattatttaagttatgaattttacatcaatagtgaacattcttgaatccatcacctgcattaagaaaaacatctgactatgggacatattggccccagtgccgccactcaaacatgtaatcgtcttgctattctctgcaagttagctttgctttacagaatcagcttcttctcattcctggctttataacacagtctcatgagtggtcagttcttgatctttttatctattaactcattcattattagtctaaatgagtttataa

SEQ ID NO: 462278 - DNA, 374 bp, Homo Sapiens
atgcgtttctggccctgacataagctgtctggcctctctgtgacatgatgaaattgaaatcaatccacagtccatgaaattgtgacactccaccagattaagttagggcataacattaacttggaaatggccatgtcatcacccctgcggctgtcctatagctgagatgcgtgggtcgcaggggaggtgatttctagggcatattgctgtcccttttgtgtatctgtcatccggatgcttcggaccccacgcctctggcaagtggggggagacccgaggcatcctccccacccccattaggttccagtggcacggccacccccgtttttgccgggggtcgggggcctgcgcaaggcaaccattttcaacaacac

SEQ ID NO: 462279 - DNA, 520 bp, Homo Sapiens
  misc_feature (178)..(251): n is a, c, g, or t
ttcccagagatccaaggtgaccaattctctcccttgtggtgatcaatgagtcgtctccacttatctttaagtctttccatgcctccctcccttttaaagctaccatttacagagctcttctaggtagtgggcatttatttgtacatctctcacttaattctaatgatattcttgaagnnnnnnnnnnnnnnnnnnnnnnnnnnnnnnnnnnnnnnnnnnnnnnnnnnnnnnnnnnnnnnnnnnnnnnnnnnatgccacccagagaataagtgatagagcgagaattcaaatcctagatctttttgataccaaagcccatgatcttagatcacatttcatttgtccatttgatcattcattcattcatctcacatagactgagaaactattatatccaagaatgaagtcccaactctcaggatgattacagtttagtgatagacacagataaatggataacaataattcagtgtgaacactgctaaagtaatcatagataaattagacatcactcttttca

SEQ ID NO: 462280 - DNA, 280 bp, Homo Sapiens
  misc_feature (63)..(63): n is a, c, g, or t
ctgaaagacctaggatattactgtacctactgtagactttataaatcctatacacttaggctnaccctaaatttatgaaaaataaagtatttgcactatgagattacaacagctacgacgtcaccaagtgaaaggaattttctagctccattataatcgtatgggaccaccatggttgatatgttctgttattgaccaaaatgtcatcatatggtgcacgactatacaaaaagcctcctgtttcccttatcctcctgacttaccttcctctcattcatcc

SEQ ID NO: 462281 - DNA, 513 bp, Homo Sapiens
  misc_feature (435)..(435): n is a, c, g, or t
  misc_feature (440)..(440): n is a, c, g, or t
  misc_feature (457)..(457): n is a, c, g, or t
  misc_feature (464)..(464): n is a, c, g, or t
  misc_feature (472)..(472): n is a, c, g, or t
  misc_feature (483)..(483): n is a, c, g, or t
  misc_feature (499)..(499): n is a, c, g, or t
cattttagagaatccatattctataaccatgtgaacaaactgcccttctgaaaatttataataatttacaaatctcttccctcaggagtgtgtaacactgccgttcctgtgacagcctctaccaaaaaaatttttttaatctcttctaattgagaatacaattttaattggcattcattttactaataatgtcgaattgtttttacatcttatttgctggcatatatatatgctttttaaatgggacataccaaagtatgtttatccaatgtatggctgctcctgtggaaattagtcccttcggaagggtggtgtctctattctaggtgacgtggaccttcccttaaacatttgggggtaactcttctttttggggtggaccatcaggggctttaggtggacattcttttggggatagtcttaggggtccagttnatatncaccaggtggggggggnccaaaanggcagggngaactggcttngggggattacccccgnttttcttttgtggg

SEQ ID NO: 462282 - DNA, 425 bp, Homo Sapiens
  misc_feature (13)..(13): n is a, c, g, or t
  misc_feature (28)..(28): n is a, c, g, or t
  misc_feature (90)..(90): n is a, c, g, or t
  misc_feature (121)..(121): n is a, c, g, or t
aacatgaagtccncacagaatcctaaanaagccaagtaaactgggcacttaatattaaattttcctgtctaataaaaaggtgagggaggnaacatgattccattcaacagaattaaaatgnatgtgcaatgaaagaagacattttggaatgggatccatcagtgattggtgttccttcaattggaattgttgtccaaaagggcagtgggtagaggcaagtggcctttcccctttctgtggtaccgcccctgacagccacaggtggacactagtgcgagcctgtcgttctgccattggggctaactcaagctcaaatggcaattccaatcaagcggcaattgttgctccaagtgctatgttgagaggttctgaggctgtgtctaggctcagtaggaaagatacgatgctcaatacataatgttggt

SEQ ID NO: 462283 - DNA, 466 bp, Homo Sapiens
  misc_feature (25)..(25): n is a, c, g, or t
  misc_feature (36)..(36): n is a, c, g, or t
  misc_feature (47)..(47): n is a, c, g, or t
  misc_feature (52)..(52): n is a, c, g, or t
  misc_feature (103)..(103): n is a, c, g, or t
  misc_feature (143)..(143): n is a, c, g, or t
  misc_feature (333)..(342): n is a, c, g, or t
attatgtacccattaacacattttnacctttaactntccttattagngttgnaaagtaaattatataccacggttaagtgttaacctgtaaatatgtctatanttttaccttcagcagtgatatttatgtacctgtttccatntcctacacacattttaaatgccctggatccaaaacacacagacatactttgaaatgtccttagtttggtgtgccatatattcctgagaatatcaatgatgtaaaatgatagaaggtagaaaactattcacctggaatttagggtattttgattacttaaagttatatataaattaaactaaatactcatnnnnnnnnnnaacttccctaaggtatcttccttatcatttgtctaaagttttaaatgatacaaatttttgtacttagtaattgttttttaaccaagacttgctattattggttgggagtacatagtgtttccta

SEQ ID NO: 462284 - DNA, 716 bp, Homo Sapiens
  misc_feature (88)..(208): n is a, c, g, or t
  misc_feature (690)..(690): n is a, c, g, or t
ctcactgcaacctccatctcccgggttcaagcaattcttgtacctcagcctcccaagtagctgggattatggacatgcgccaccatgnnnnnnnnnnnnnnnnnnnnnnnnnnnnnnnnnnnnnnnnnnnnnnnnnnnnnnnnnnnnnnnnnnnnnnnnnnnnnnnnnnnnnnnnnnnnnnnnnnnnnnnnnnnnnnnnnnnnnnnnnatgagcactgcgcctggcctgtttcttttttaaacagttttctattgggtgtttgcagacctacagcttttctcgtagtcttattcataaagcttttcaaagcacttagtcttctacttccctaactgaaagtcctcctataatcaatccctacccccttctagaagtatcttaaaagaaaagcaaggtgattgtaagtattaaatagaaatctcatcttagtttatattcagcaaagtaagaggcaagagaagaaaactgcagccttgacatctgtcatctgagaaaggacatctggtttcatgttagggcacatacatgcatgtgtgtgccatctactgatgatttgtacacagctgggacctcgtgtgtttgccatgctcagctcttcatttggcttttcaagggtacctgggggtgggctgttctcaggaggagtacttacggggggaacagactgccttttagtaacaaggggatanttggggaaatacattgtggagtatgg

SEQ ID NO: 462285 - DNA, 403 bp, Homo Sapiens
gggcctttttaaaaataaaagtggacaatcctcggggctcccagttaattgaatgtccgtcccattctcctacccataaatctcctagtaaatatccaatttccatccaattatgtactgtatgccttataatatcctaaaaataaaagtttgatataaataaatgtcctttagtggcaatatactaaaaaacagccctttgcctccagacaaccattaaaatcattttagcattacaggcagcagctaagtatgacgactgcaaagggttaatactgcaaagtccatttggtctttctttgcacctattactgtgaactaggtccattgctaggtgtttctaggatgctaacatacatgaaacagaattggtccagaagcaagtggactcacttacatttcc

SEQ ID NO: 462286 - DNA, 437 bp, Homo Sapiens
  misc_feature (26)..(26): n is a, c, g, or t
  misc_feature (46)..(46): n is a, c, g, or t
  misc_feature (57)..(57): n is a, c, g, or t
tcaaactgcccgaatgaaccatcttncatgccctgtcgaaactgcntcccgctcacnaccactgctggggtcgtcaactgggctgcccgaaggtccggggcgccccgaaatgttcatcgtttaccacgttgcgcaggcctgcccatactccccccagctgggcacacgctgcgtctgcctccacggagcccccctcggctgggcagagctccacattttaacggccccccagcccaccctggccctgggcggccctcaaccagcccctgccccctgccacccagcctcctctgcctctgggtggagagtgggacacccagagggagacagagtctagcagagggggtcaaggtgaggacacaggagaggagggggcagaccttgggtcccaggagtggcctccaggtcttgaagtgcctgtgggtgtgcagagctga

SEQ ID NO: 462287 - DNA, 489 bp, Homo Sapiens
  misc_feature (409)..(438): n is a, c, g, or t
gtctctgatgggcgaggcttttccttgagggcaaagaaagagtcctgggcagcagttcaggctgccggaatgcaaatatctttgtcatctttgttgtattggacaatcccagttcacgggattctatcttggacattaaagtaccgatatttaaaggacctgggagagatgcctgaaatccgatcctacatgggaagagttcccattcccattactatatcattcttcgaggatgtaaacgcacttcctgaggacactcaggcgatgccctcagacagtggtttgagttggtgacagcctctgaccacccatagaacagaaagaagagtccaaagtgagacttaactgtgggtcagaaggtcacatttgcttacccagggtgctcccttttgggacaacttacaaaaannnnnnnnnnnnnnnnnnnnnnnnnnnnnncaacgtggatctttacagccttacaggattggttttttgggcttcccgggt

SEQ ID NO: 462288 - DNA, 440 bp, Homo Sapiens
  misc_feature (16)..(16): n is a, c, g, or t
  misc_feature (31)..(31): n is a, c, g, or t
  misc_feature (42)..(42): n is a, c, g, or t
  misc_feature (57)..(57): n is a, c, g, or t
  misc_feature (87)..(87): n is a, c, g, or t
  misc_feature (94)..(94): n is a, c, g, or t
agccactgtggaaccntccaaaaattcctcnatcctgggaangcccccaaaaaagantgtccccgaaatccccttgaacacctcctntcctccnacaggaacttggcctccttgttttgaaaaagaagaaggggtcccactttccaactcccgtgtcgggtgaaaactgagcccgtacctcactgctgcctgctggtgtccctcccaccagcacaggtaccggcaaggatatactccctgagatattcatttgatccagctgaaagagctgaaagcttaggttgtgtctttttctttttgcttgaaacttttaaaaactcatcaacaagcaagtcgttagcacaggctctcttgtcaggatctggttcaaaacatttcagtatgaatgccttggcctctgcagacatggactctgggatctcagggtggactttaaacat

SEQ ID NO: 462289 - DNA, 279 bp, Homo Sapiens
tgattccaggtggaaatctcccaagtgattacaggtgtgagccactgtgcctagccaggagctggcatttgaacaaagcccctgacggaggtgagggagttctggggatgtctgcagggaagggtattttaaagtaaaggggaacagccagtgcaaggccctgagacaggagtttgtccggtaagtctgaggagcttcagggagctagagtgtttagaggggaggaagcagagaagagagcgctaggagatgagggcagagaagcgatggggcagatct

SEQ ID NO: 462290 - DNA, 385 bp, Homo Sapiens
ttccttttctctcctgtgtgcttgtcagtggggacccctcgcaaccctgcctgtcacctgggagggtgggaccaatgtccttgtggtctttgctgctgctctcaggggcttctccaatgctctggagtgtgcatttcagcttgaacctgcttcctggctcacacatccccagccagggagcttgccacactcttcttcaagttgaggagagttcttttttgcttaaagcccccttctccatggagtgttgggcttctcaatagagtgttgttgctgaccagctggagtgagggcctcagagcctgacctgagagtccgtactcggcttcctgttggggtgtaggttctcgcgattcagggacgttccttccatatccctgcccag

SEQ ID NO: 462291 - DNA, 522 bp, Homo Sapiens
  misc_feature (16)..(16): n is a, c, g, or t
  misc_feature (43)..(43): n is a, c, g, or t
  misc_feature (51)..(51): n is a, c, g, or t
  misc_feature (91)..(133): n is a, c, g, or t
  misc_feature (148)..(148): n is a, c, g, or t
  misc_feature (179)..(179): n is a, c, g, or t
aggtgcccaagtgggnaattgggctgggtggtaacatgccagnaggggtanggactgaaggggcaacatgtgggctggcccaagtgaacannnnnnnnnnnnnnnnnnnnnnnnnnnnnnnnnnnnnnnnnnnggagcaaacccttgnaaaataaaaagtccatccattcccccatgantggaaaaactaatatgtaacatcctgccccccaccccaggagccctagtttaactttaaggtgtaatgtgggatttccagagctgggccctaaagggatgggtataaaaaagggataagcccatagtggtccccaaacaccaagctctgctgactagctgagtgagctaagacttgctttgttctttagaacctcacttccctcttgtgcaaattaagaaaaatgtctttccctatcctcctccacttatcatgtcttaagatgagacttcataaaacgaaaggactaggcaatgtgacattggtggagcaaagggctttgcagatagctaactggctctgct

SEQ ID NO: 462292 - DNA, 489 bp, Homo Sapiens
  misc_feature (435)..(435): n is a, c, g, or t
  misc_feature (442)..(442): n is a, c, g, or t
  misc_feature (452)..(452): n is a, c, g, or t
  misc_feature (464)..(464): n is a, c, g, or t
tctaagccttagattttggagatacaaagaggagtgatacaaacctagctctttccccaggaagctgccttgataactagttttctattggtttctgattgaaagttttcagtttcattgattttagaatttaacttcagaatatgacatctgaccttccatatcttagaaacctgttattccttttttttagtctctgcattgtctttgatgccttggtagcatgcactgaaaattaactcttctgtttgaagctgtaattgtcaagattaaagattaactttttatctttgagttcactttaggcattgatctcttaggtgacagtgcccttgatggaaaaacagataaggggggcacaagcttataaacgtcaagtgaaaggtaaatgctgccggaactcatgttgttttttttaaccaccattcctttgcntttgggnagtttaattnacgggggggccntaatcgggacccaaattaggggtta

SEQ ID NO: 462293 - DNA, 530 bp, Homo Sapiens
  misc_feature (43)..(43): n is a, c, g, or t
  misc_feature (54)..(54): n is a, c, g, or t
  misc_feature (80)..(80): n is a, c, g, or t
  misc_feature (92)..(92): n is a, c, g, or t
  misc_feature (98)..(98): n is a, c, g, or t
  misc_feature (111)..(111): n is a, c, g, or t
  misc_feature (122)..(122): n is a, c, g, or t
  misc_feature (128)..(128): n is a, c, g, or t
taattaggggtaaaaccagtggccttccaaggggatgccaagnaggatggggancttagttaacggtaagtggaaaaagnacctccaaaacngaccanccttaaggccctnatatgtctttnacctancctctgaatatgtgaatatacttttaagaagggaaaatatgcccagttggaaaggttactcatcttgacccccaatataatcacttcctctttttacgttgcaaaaagcccagtcctgccctaaacacttattttcctgccctttgactacatatcaaactaaatgttacttacaagcaattgactgcaagtttgtttaacagcaagacatccctttaattaactgcccgcttttttactggagttgacaggcaatacatttgtagcatctcagctgattacatgaagtcttaagtagttatatagcaattggtaaagaaaaaatagcctccattaatcctaatagataggttttgtggttaagaaaccccacaaggcaaaaaattcaataatttaaaagaa

SEQ ID NO: 462294 - DNA, 467 bp, Homo Sapiens
  misc_feature (389)..(389): n is a, c, g, or t
  misc_feature (409)..(409): n is a, c, g, or t
  misc_feature (424)..(424): n is a, c, g, or t
  misc_feature (452)..(452): n is a, c, g, or t
taagcactcggtcccttatttatcagtaagcaggtttttaaaaatcttttatatcatttatggggatcaaacatatgattgtctgaaaacatcactttttgtggatttgtgtatccggtcaccaaacggtgaatattatagaagaatgggggaagaaaggatagaatattaaaactgctttgcatggggttttctgggaaattagggataacttcactgagaagacattgaatgggaaattattcacccattttaaattggtgacctaggggatcagagatttgtctttcccacagcttgtccattttttcatttctcttctccatttttccagggaagtttttgagtgttattagggtgggagggaacataggtagccatggggtacnttttttggaaaattattgcnttaccccgggaaccngtgggccccagggtttttgaggtcccanttcccccggccccct

SEQ ID NO: 462295 - DNA, 580 bp, Homo Sapiens
  misc_feature (26)..(26): n is a, c, g, or t
  misc_feature (45)..(45): n is a, c, g, or t
  misc_feature (84)..(84): n is a, c, g, or t
  misc_feature (89)..(89): n is a, c, g, or t
  misc_feature (100)..(100): n is a, c, g, or t
  misc_feature (448)..(448): n is a, c, g, or t
  misc_feature (489)..(489): n is a, c, g, or t
  misc_feature (525)..(525): n is a, c, g, or t
aaatcaatggttaacaagcttctcgncccttgaaccccccaacgnccgtcaacaacccaactccttcccgttttaccgggttgnctgcncctttcgcctncgcagttaaagctcgggtaaaagccgggcggcagtcagagcagttcattctagagaagggagctggagcccccgaatctttcccaatggaacgcccgaagagactcgaaaggcagggccggattttaaagggctgagagatagcgggtgcttgaaaaaaggagcctcgatcagatttggggaggtgcggggcgtctaaatacagttgcactgtgtctcagcaggcgcgcgttcggccagtatccccatctccgtttcctcaacaaaggtagtgctggggaaactgaggcagtaaggagtccagccctctagtgccgtctcgatcccctggacagcacagttagtgctncggcttcggcctcagctcccgtatggactgtgccccccaanaggtcgcgcctgcattcccacatacgcgaagaaaancctggcccgggcttctctcggctcggtggcccttgggcgggagtatcccttctct

SEQ ID NO: 462296 - DNA, 410 bp, Homo Sapiens
tgccttcttccgtgtttatttagagagcagaatctaataacgggttccactgtagccactatccatggacttctgggtcctcttcaggtttgagtgcttgaaaatgttcattctctgggcttgtggcctgtctcctccactctcctcctcaccctctcgctccttcctgtgtgagggccgctctgcagtaatgttctcaggcaagccttcctaggcacctcagaaactactttgccagagccagtaaggaatatataatattgggagcagttgccagggataggaaattaaatataggattccagtttagggataggagtttttaccgaggagctctttaggacagtatacctgtgtcttctctggggcaattgctttcattttagtcctatataaaaggctttcctttt

SEQ ID NO: 462297 - DNA, 523 bp, Homo Sapiens
  misc_feature (486)..(486): n is a, c, g, or t
ttttgatgggaggaaacaaaaagatctgatcactctctctcattcatgcggaatcactgactgttgaatgaccaaagcagtcaaagccaaaatattcaccttgaagcttcaataaaccagattgagtatccataataactaatttaagtaattttatccccattctctgctaaatcatatttcataatataaaatgtaaccacttccctctatccaaagcttttgggtcagactctccattgagttaggggaaattgggactttgggcaaaaaggcaacattaaagattattgttgttcctaggaaccattgttgccatggacccctcatttgctcctcaactttttcaaccaaattatagcgggaaagattcctgatgaagccaagactgcaaacaggaagaatacctagctagtaaactatgcaaaatcacaacaaagattcatttataattccatgttacagtgtttgatagtcctaagtatntaatattggtatattatgtcacagccatgaactgtca

SEQ ID NO: 462298 - DNA, 395 bp, Homo Sapiens
acacttaaaaaggcagaaagacactggcctttgagatttcaaatcttaaaaatccctccttggaaccactgggaaggtgagtaggcccttaagctattctgtaatttaaaaaagcaagaatattgattttctaaaatcgatacctgccaagaagattttggctactgtatttcttcctatgtacatctatactgatagctgcactgataaaatgctaggaaacccaaggtggttaaaaatccaatttctggcctctccttattgagggcacaggctgcataacaagccaaccgtccttggaaggaatttgcaaaatgaaccccaaccggggcaagatatcatctggggtcttgaacacaatgtggggtatggaatccccaggtggaacggctccc

SEQ ID NO: 462299 - DNA, 432 bp, Homo Sapiens
  misc_feature (30)..(30): n is a, c, g, or t
ctgaattggcatctccaatgagcatgtaanaaactctcctccctcatccgtctaaaatccggtgtagccgtttgcgggatggtttgccttcctcttcctcctcctcctcatctgcttctgaatactcgtctgtgcttcggccccgctttcgaactgaccgctttgattctttagctagctcatcatcttcagagttcttggacaaatagctctcttcactctctgagctggaaagtcttcgcttgtgtactcgccttatttctttaccacgtcgcaaaactctttctgggaaccgtcactttctgagtcttctttgtagttaatttgtcttttctgatttctccttgaccgccttcgccgagtttctacaaaatcatcactaaaatcatcactgaagtcactttcagagtctctactattctcctcagattc

SEQ ID NO: 462300 - DNA, 395 bp, Homo Sapiens
  misc_feature (364)..(364): n is a, c, g, or t
  misc_feature (382)..(382): n is a, c, g, or t
ctcacagtcccacttactttgctctaagcaacactgatctccaaacatgctgtgcataggtatttcccttacacggcacacctgcaaatttattctgcactttcaaatataacttaaaacaatagcactacatgaaatgtgccattttcccaagaagattgtagactctttcccctgtactcgccataccttacacaattctccctttctgcaaataccaaattatgtttcttggtatagtgatcttcccatgggcctacaaaatccatgtggtcaaatgacatgcctttccgttattccttccctaggaatcttctcctatggcctggacatccatgtttaatggaatggttcaggacacatnaggggaggagggggtggntggacttttatgg

SEQ ID NO: 462301 - DNA, 443 bp, Homo Sapiens
  misc_feature (22)..(22): n is a, c, g, or t
  misc_feature (40)..(40): n is a, c, g, or t
  misc_feature (94)..(94): n is a, c, g, or t
ccccaactggcagtaaaggctntgtgggaattccccatgnaacatggcaatgaaggtcactaggtgaagaacctccctggagggaatggtactnccacctctggcaagaaacatggggtaccagtgtcagcataagagccacattacatgtcaaacccagtagtctgccctgtagcctccttatactgagtcttggcctcctgacagctgtcctgggggtttctgggtgacctatagcttagttgtggaataaccattcatatagcatttgctggcaagatataccagggttggaagccatgaattctccagaacagcatgttcagagtagagaggatcagactgccaacatggctagcccccactatcagcagatattctgactacctgcagaactgtgaggtgaactcagcttctctctagctcccagcatacacctggtc

SEQ ID NO: 462302 - DNA, 426 bp, Homo Sapiens
  misc_feature (205)..(215): n is a, c, g, or t
  misc_feature (405)..(405): n is a, c, g, or t
aatagaatttctcatgttttgacagccgatcaaagtccagatctccatctccaaaaagaaggtaagctaaatgttttgttgccaaatcttgcctgtcaagtgtggcctctgcagaatttgtttgcttactgctttgcatcctttgagctctttggagaattggtgctatatagattaaaatactatgctaagtttctgaaatacnnnnnnnnnnngattcagtaacattagtttatacttttgctggaaatacttagtcataaaatgttagggtgattattaagatgtgattgggtcctgtgagtacttgggtaggaaattttgggtaaggataggatgccttttccccacatgtacaataggatacaaagtgtgggagaaaagtcttgggaaataggttacccngcctaggtgcttctttatgac

SEQ ID NO: 462303 - DNA, 496 bp, Homo Sapiens
  misc_feature (34)..(34): n is a, c, g, or t
tcagtgactgtatgaccttttcatttaaatcccntgcctgtatttaacccatgcagtggatttgggataatatacataaggcacctaacataacataggaactcgtaaatgattgtcgctcttgaagctgggcaatggaaaaccgacttcgtggatgctctgcctagaaattatgctaaggacaaaggaagaggcaaagtcctaaaaactaaacaaaaactgcctccctacacctcataaccagcggaccaaccaatcaagctaataccaacacagctaaggcaacaacactcagattgaaaatgtaccccatgggagggaggctgacgtctggaggtctaactctcccttctgtcacactgacatcacttccttggccccaacctgaaaggtggcacatatagcccctggtgggcagacagggaaagcaaattcctcttactccagggagctggttagtccttcttcctcccacttcccatctccctcagagtga

SEQ ID NO: 462304 - DNA, 469 bp, Homo Sapiens
  misc_feature (54)..(100): n is a, c, g, or t
  misc_feature (354)..(354): n is a, c, g, or t
  misc_feature (369)..(369): n is a, c, g, or t
  misc_feature (390)..(390): n is a, c, g, or t
aaacatgtgcctagtttgcagcaccaaatactggtcttctcagaagtgtttctnnnnnnnnnnnnnnnnnnnnnnnnnnnnnnnnnnnnnnnnnnnnnnnaatttcctcttctggcatcccaatttggatcatttcctctctttctttcctgggagaaacaggatggcaggtgctggagcccagagaggctaaatgacatttagcctccagctaaaatgatttaaatgggaaaggagaatgacagcaaagcctcacgtgaactttaatgaccttatcaatgacctttactaactgactcttgggtacccgggattgttgaggagggtgagtgggggactaaaaagccagggatncaaggatcagggttngcttccacacattttgcaggntcagggaaccccggggaatatggagttaggaccccaggaaagtatttggaactggggacatttgatggaggctttgagg

SEQ ID NO: 462305 - DNA, 359 bp, Homo Sapiens
  misc_feature (307)..(307): n is a, c, g, or t
  misc_feature (323)..(323): n is a, c, g, or t
ttgctgaattataagtttattttttatcaataaatatttttatacttacattgagtgatgtgtttaacaacaaattgtgacagagctgagtgctcctatcttacagggtcaatgaactacttattaagccttactggtagcactgaatttagcagttctgagaacatgtgaaactatgttaaaactgaaggcactatatatttttacataaaagcttgaacatacagatgatttataacctatgtgaaggaaatcttaggatataaaactaacttttcaaagatacaaaagaaattaaacccggttncctgaaatttttagtncttgggccggtccaccccgggggggaaaatcctaag

SEQ ID NO: 462306 - DNA, 324 bp, Homo Sapiens
  misc_feature (64)..(64): n is a, c, g, or t
  misc_feature (102)..(102): n is a, c, g, or t
  misc_feature (292)..(292): n is a, c, g, or t
aggaaaaatgatttatttttataatgcattataccgatataaaaaatatcttccaatgaatggncatttgaacctcacacgctgtaaggtggagagaaggtnttataatacatacttttacagatgaggaaacacaaaactacggggttaatatgaataagtatcaacttctttcagcagtacgtactatgttgaatattaacgtggttatattacacattggtgaagagtgttggttgatcttgtggttggtgaggttggcttcaaagcttgattcatcattgtttattgngtaatcttaaaaaagttactaaaactcttcag

SEQ ID NO: 462307 - DNA, 533 bp, Homo Sapiens
  misc_feature (24)..(24): n is a, c, g, or t
  misc_feature (43)..(43): n is a, c, g, or t
  misc_feature (50)..(50): n is a, c, g, or t
  misc_feature (66)..(66): n is a, c, g, or t
  misc_feature (330)..(330): n is a, c, g, or t
accagggggaaagggaaattgaantaaaacgtaaagccatcangcctcgngccacgccccactcantgaataaacacaggaatgtgacctaaatcacaaaagatccaattgaccaatgcataagccccaagtcctctttcccatgaaagaggtggagactggtggctaatagcatcctgcagggcaactttcccattgcacgtgactttgcagacccctccatggaggaagcaccagtatgggcaacaagtcacaggacccaaagagcaggcctccccctagtcctaggcacccctggtgtggagtggggggtggccctcagacaaagangcctgcggagagcacggtgcagctcaggactccgtgagaagtgacttgactttattttgcctgtaaatatatacatagaggaaaaatagaatttcagaaataactttttacataaattttatttctaaggaaaaaaccattttcaagggtttagaaagtacgtacaaactggagccacagcatccagagtcgttcatgaactg

SEQ ID NO: 462308 - DNA, 563 bp, Homo Sapiens
  misc_feature (486)..(486): n is a, c, g, or t
  misc_feature (547)..(547): n is a, c, g, or t
agaaagggaagtagggcagtgcatgactggccttaggttttttttttccaagtttattttcttgtgcttcactactagaaaggtttaattcagggataagtcccaattgagtagttcaagatgatcagagactttgctattttcccctaagttctattccataatctaaaatgttctgtttctagtgccagttcttatgctaagcaggttacgtggaatatatcacttaactcaaaaagccctgttaagccaggactgttatctccatttaacagatgagaaaatgggaggtttatggtctgttctcacactgctacgaaggaaataccccaaactgggtaattattataaaggaaagaggtttaatgggactcagttccgcattgctgggtgaggcctcaggacacttatacaatcatgggcagaaaaagggggaaggcaggcaccttttttcacagggcggccggatggaaaatgactgcccgncagtgggaaatgcccggacgctttattaaaaccttcaggtctcctggggaccggctcactntcacagggaacagcct

SEQ ID NO: 462309 - DNA, 691 bp, Homo Sapiens
  misc_feature (656)..(656): n is a, c, g, or t
cctcccagggaagatgaatggaaggaggtaacccagggctttgcaatccagctttgcatgatggccaacacagcacataatgttgggcttaattttcccttatacagctcctgtaagcagtctgccttcctacagggctctgtaattgtgttccttcctagactgccttcttcattttaccctcaaagtacttaggaaggagcttggtagacagactgtgcaagctcaaaacagcctagctatattgatatcacacttaatggaaaagtgaataaagagtacaaatttgataatgtgatataaaaagaatgttttattttaaataatttatacattgttttctggtcatttttaagttttgtgtcagtatctgtgactattaagagagggcacaaaaacaatttttcaaagagcaaaccactataaaatagcatgcctcagaggttggaaagatggcagaagttggggacaaaaaagaacatgttgggctgcacagtacttacaggatataaagggagtagtttaactacatgatcatactgtttcagggattaagggaggattctgggaaaccaacccaaggtaaatacacaggtccaaggcagggttgagtttatttttcctacctctgaggggactagggggcatttttaggngaggcctttaccctcttttaattattacaccaggg

SEQ ID NO: 462310 - DNA, 470 bp, Homo Sapiens
  misc_feature (337)..(337): n is a, c, g, or t
  misc_feature (432)..(432): n is a, c, g, or t
tacaacttcagaggtcacttatatttggacttacaatgcatctgattcagtacaggttgctcctgatggctctaggttaaatcaatatgacctgctgggccaatcaatcggaaaggagacaattaaatccagtacaggtgaatatactgtaatgacagctcatttccacctgaaaagaaaaattgggtattttgtgattcaaacctatctgccttgcatcatgactgtcattctctcccaagtttcattctggcttaacagagaatctgtgcctgcaagaactgtgtttgggagtaacaactgtcctaacaatgacaactctaaggcatcagtgctncgggaattctcttccccaaagtgggcttatggcaactggccatgggactgggttttattggctgtttgttatggcatttgtgttctctgccctanttggaatttgccaactgttaattactttcacccaaaag

SEQ ID NO: 462311 - DNA, 446 bp, Homo Sapiens
  misc_feature (426)..(426): n is a, c, g, or t
gaggagccagtacacgtgatgggacatgcaagtgacaagtttcccaaatacctttccgcataataaaataatcttaataaaaacataatttaaagaaagtctccaaagccgagtgtaaagtcagagctgtaaactctacccaagtttgaagggtctcttgaagaatcatccgctacaagatcagtcatgatttattgatggaaacttcagttcggtgatttcagagtcaggggagctgcttccactcctgtcactataggtgtccctgggtgagagcctgcagcctttctgggaggtaatgtgagagccgccccacagaggccagggagggaggccaaagtatgggtgggggagggcttgatagggcctggggacagggtacttcaggggtggtacttgaaccccaacaaaaaaaggggttgattntttttaactccacattttcc

SEQ ID NO: 462312 - DNA, 642 bp, Homo Sapiens
  misc_feature (64)..(64): n is a, c, g, or t
  misc_feature (185)..(185): n is a, c, g, or t
ttttttttgctagtgaacacactgtaacttttcattaatgtaaccctctctctttttttctccntgaaccatggcaggttacttcatttatagcacatggttttgtgaactggtggccctacaagtaagtaatgttaataagaccctcagtaccattaaaccaactctttcatcctgtttctggncaagtcccctcaatgtccccacagtgactaccctatacattttaagtccctccttcccaatgttgctccactcctctctcagcagaaggctcacgactggactgtgaattgggtatgaatctcacatccaccattttctagagtgtgtaaaactttgagtatggttcttctttgctgtgccttgggtttgcttatctaaaatactgtggattattaaaaacatggaataaaaactgacacaaaattatctctaaatattaatattgtgagttcctgaaaatgatgatggtgatggtgatgaaggatttgctgttcatttaacagaaaaaaattctcttcattcctttccccatatctacaaatatccttccatttcttcattcatttaggtagagatgatgctgcacctaaaactaacccttcgatcactcccgcgtacctgcccgggcggccgctc

SEQ ID NO: 462313 - DNA, 561 bp, Homo Sapiens
  misc_feature (92)..(101): n is a, c, g, or t
  misc_feature (405)..(405): n is a, c, g, or t
  misc_feature (415)..(415): n is a, c, g, or t
  misc_feature (518)..(518): n is a, c, g, or t
caagaaccagcagttgcaagtggccatttctgatgaaaatactggttgctaaaacttagtctagttctgatgtgtttaaaatccattttttnnnnnnnnnntcctgtttgtgaatcggtgtaaaaatatagtctttccttctaagtgagaggcaagaggtcaggtgaatatggcagatgaggcaaaactctgcagcccaatttgttcaacttttgaagccttaggttgtgcagcatgtggtcaggcgtggtcatggagaagaattgggccctttctgtcgaccagtgctggctgcaggtgttgcaggtttcagtgggatgtcatcgatttcctgaggcatacttcttcagttgtcatggggttcgccagggatttcaggaaagctgtagtgggatccagaccggncaggcagagnaccaccgtgatcttttttttggtggcaattttgggcttttggggaagtgctttgggagcttctttcttcagtccaaccactgagctggtcatcactcgttgtncatattaaatccactcttcgtcgcatgtcacagtctgatcgag

SEQ ID NO: 462314 - DNA, 543 bp, Homo Sapiens
  misc_feature (13)..(13): n is a, c, g, or t
  misc_feature (31)..(31): n is a, c, g, or t
  misc_feature (62)..(62): n is a, c, g, or t
  misc_feature (103)..(103): n is a, c, g, or t
  misc_feature (499)..(499): n is a, c, g, or t
aagttctccccancggccacagacccgacanaaaccgcaaaccccttgctggaaggaagccnccgaagccgccttggcccgcccgaggagggaagcaaccacntggacgccggccatgcaccgacggcggggagtgagtgggctgcggctggaggagttaatacagacgaagctgcgtggacaagacggctgggcagagaccaagtgtgaaaagaaacacaaaacaaggacagagataaatgagacaggaagagagaggcgactagaaaagctggcatgcagagactgcccagagtgtggcgcagcaagagcttaggagcccccaacaccaagcgtggagccacccagctgagcaggacacagacgcccctccaggcacggccgaccgcagacaaggcaactcaagtgctcggggcacccgccttgccactcctgctcacgggtgggcacccaggacaggaggagagcaacggcacacggaacgcagtcaccgggcgcngacaggccaacaggatggtctcctggggtactctgttccaaagc

SEQ ID NO: 462315 - DNA, 500 bp, Homo Sapiens
ggaatagtctccttaaccccggttttggagaacaaaactgccccaacctgtaaatgtatcatcctagtaaagaggcatggatgtaaagaagaaagagactggggcctctttgtgaacacaacaccttaccttttccttctgtttcgtggagcacagttgcagcagaacagccatgcgcagtgctctgcataaagcctgtacatgttttcacaaccacttctctacatctccccctccgtgaattaaagccaggattgagaaaaactaaacatgcttgtttagacttgcagtcgactgtatcaggcacttgacattaaactactgaaaaacaagcttgctgcagccttaacacgagcactttcattggcattactttggtggaagtgcatatgaactctgttttgggaaggggaagggtttcagagtccctacattgctaattcctctcacctaatctcctaacaggacttatttggcttccttttcatgtggaaaacctg

SEQ ID NO: 462316 - DNA, 411 bp, Homo Sapiens
aatatctgttaaaaatctttccccagtagtggatttcagaacgccacctggtgatcatgagtacagaactggggcatcatgcacgcattctgaaaaaatgcagcttgggatcaggcatgcaaacccctcaggcatcaggaggagacaagttttctgggtgcattttaataaacatttaataaaattcagtttggttaacaggaaaattgccaacttatataaagcatctgaatgtctggatgaaaggagttgtctcattaaaaagctaatcattgaagaaaattatacatagacctttgaaggaaaagtgttagttttatatagtgatgaagaaccattgtattctctgcttggtgagttgttgctgttgtattccttaggactccacttgcctccgtggcttgcacacag

SEQ ID NO: 462317 - DNA, 520 bp, Homo Sapiens
  misc_feature (298)..(298): n is a, c, g, or t
  misc_feature (449)..(449): n is a, c, g, or t
  misc_feature (468)..(468): n is a, c, g, or t
attgcattttcaagccactgggtgtaaaaataaaattactcaaaatatgtaaaaccacttgaaaacaatgatttaattgaaccagtcaaacattatttaaaattgagagctggtgtcccatccaggtaggccacttttaaaagacagattttaagtttagtctttaaagttttcaggctgtaccatgttgtccttccattagatgtctgaaaacttgaaaaactgccgtatcatctcacagtgatgcttttttgtgggtgtggggcaggggaatttcagggcacacttttggccaatncccacaccagggggaaagctatagtctttgggttgcctgtggttaaggaattgagttaaaagtttcctttttatctcagggatttgcagggagttatttattcattcatccaggatattttactttaactctttaacttcatggccagagngcctttggaaggattaccnggatttcctgttccctcagggaaggtttaggagttggagatgtcggggggaa

SEQ ID NO: 462318 - DNA, 545 bp, Homo Sapiens
ttttctttatacagggatctgcttcagaagggggttcctccttaattttggtaccgtacttaacgcaaacaacaagattctccatctgttgctctaaataggcactactcatctgatgagtgcgtttgtaatgcctcacaatgctgctctccaacttcaccacagataagcatccttgaaccatgcaggggtactgtgtgtgctcagagtgctccacacacatatggagggcctcagctctggttttaaaacttattggggctttcttttctttgattaagccacattttttagacttagcattaaatgatctcctgggtggtctgatgttcatgcccctgagtatcagctgtttgacataccttttcactccttagtagtctctcatttgctactttctggcttctaaacaaatcatcataatagtctttatgtcggtaatatacatgttgtgagtaattactgcgatgggtgaaaatctgggccacagcattaaggtcacaatgatttcataatctggatgtatttcccctccataatatgct

SEQ ID NO: 462319 - DNA, 569 bp, Homo Sapiens
  misc_feature (90)..(90): n is a, c, g, or t
  misc_feature (96)..(96): n is a, c, g, or t
  misc_feature (446)..(446): n is a, c, g, or t
  misc_feature (466)..(466): n is a, c, g, or t
  misc_feature (487)..(487): n is a, c, g, or t
  misc_feature (501)..(501): n is a, c, g, or t
  misc_feature (522)..(522): n is a, c, g, or t
  misc_feature (531)..(531): n is a, c, g, or t
  misc_feature (539)..(539): n is a, c, g, or t
tcttagtcagtttatctatctcagaccttaattttcagaatcaagatgaaaacatgccaagtcagtaccgttgcacagttggcggctaangtattnttctgtgagcttcaaggatgcaaatatgaatttgtgaccagagaggctctgttaatgcattatcttaaaaagcataattattcaaaagaaaaagtccttcagttaaccatgttccaacatcggtattccccatttcagtgtcatatttgccaaaggtcatttacaagaaaaacacaccttaggattcattataaaaataaacatcaaattggcagtgacagagcaactcacaaactattaggataatgaaaagtgtgatcatgaaggcccatgttcagtaggatagggttgaaaggtgattgttctgcaggaacttgggaggtgatcccagtagttaactctggaggaanccacactgttcatcctaaantgggtggaatgtagttctggnaaacaggtttgggntcatcttgtggaagaaacagngaggtaaanccatctgnaccttttcctcacccattgggcagcccata

SEQ ID NO: 462320 - DNA, 443 bp, Homo Sapiens
  misc_feature (265)..(265): n is a, c, g, or t
  misc_feature (337)..(381): n is a, c, g, or t
  misc_feature (383)..(383): n is a, c, g, or t
  misc_feature (417)..(417): n is a, c, g, or t
acattgaaacccctttttatattaaaagttaaaatgaaagacaaatccagattgaacatagtgattgcaaaatataatgcaattttcaacaattaaaattatgaaaatatacaaaattgatgggcaacacaactaggcatttgtacattttccattatgtggagaacactacaagtttctctaccttttatctacatcagataaatgatttaaaccaaatgtttgctttggagagtcttaacttaggatctcagtagtataaaanggcaataatttttcagtctgtaaacagtagtcgtgatttttctcctttccttttttaaatatcagtttaccnnnnnnnnnnnnnnnnnnnnnnnnnnnnnnnnnnnnnnnnnnnnngncggcggcggcctggggttttttggggggttctcnttcaaataccctggggctacggtttg

SEQ ID NO: 462321 - DNA, 452 bp, Homo Sapiens
  misc_feature (46)..(95): n is a, c, g, or t
  misc_feature (414)..(414): n is a, c, g, or t
  misc_feature (427)..(427): n is a, c, g, or t
tttttgttatgtcttgattcaggataacttggccaagtcctgtgannnnnnnnnnnnnnnnnnnnnnnnnnnnnnnnnnnnnnnnnnnnnnnnnnaagtggtgatggagcttctgtgtggaagagtttggtgctttgaagcctagagcctgcttattccctctggtcactctttgccccatttcctatagacttacccctgtccccaaacacagcaccaaacaccccattatcaagatcaattcacatgacctctgagacactgcccagagctcactggagcacagtctgactagcctagtctttgtaaaggcagaaggacatgtggggcatgatggggtggggtgggcaatttgtaagcttcactgattctgtggggtgggcattttttttcttacagggaacaaagtgttgnctttcaattggancgtttatggggttatttaacaggga

SEQ ID NO: 462322 - DNA, 427 bp, Homo Sapiens
  misc_feature (367)..(367): n is a, c, g, or t
  misc_feature (399)..(399): n is a, c, g, or t
  misc_feature (412)..(412): n is a, c, g, or t
ttttccatgctcatattttttgctcgttttaaatcacaactaaaaagaaattcagttgaaatttcatttacttcattttcatattgttgaatatgttgatttcttcctattattcattactacaaataaagttgcaatgaagctttgcttattctaacttacctcttcaggagagattcccaaaaatgggattagtgggcttggaggtataaacatttttatgacaactaaaacctcttgccaaaacctttccagaaagattgttactaatttacaatgccacaaaagcatgcatgagatcatcagtttcaccatgccttcattagcactggaatatcacaataaaaggtgctaataggttgggganttaggtaaggtaaggaggtagggtatttttcntttggtccatttnaatttggaatttcat

SEQ ID NO: 462323 - DNA, 217 bp, Homo Sapiens
  misc_feature (142)..(142): n is a, c, g, or t
catttgtgcatcacgagtaccaagagatatgtaaaagaatgtgtacaacattatgttaaagtcattgtctaggaaatagtacagatctctgttcaacagtaggaatgggataaatataaggagtacattcatatgaaaggantattatactgcagtggaaaatggaaatcacaggcagttctccaacatgggatggatgttcacccaaacattatgg

SEQ ID NO: 462324 - DNA, 745 bp, Homo Sapiens
  misc_feature (33)..(33): n is a, c, g, or t
  misc_feature (36)..(36): n is a, c, g, or t
  misc_feature (71)..(71): n is a, c, g, or t
  misc_feature (609)..(624): n is a, c, g, or t
gttcggcacagcgtctgaagtgggagccagtgnagnggcggggttagcgggcgtggcgtgcggggacgtcnacttagcttttcgagctgtgtacgtttgcgtaaaggctgggcggcgatagaacgtttccgtggaccagagtcgtggctgttgtctgtgttaacatttgtgtaaaataagatgcccataaaagttgacttgaacactgaggaggaagaactaaatatttaaatttccaactgacatggacaccaaccaatggtcaccaagtcccctaaacaggttgtgggaagccccttgaggcggttcatccagcgctgtttcggagaaatctctatttcagtctactcctatacgtcagttattgaaaaacaacaatcggcaaaaacaagttgacctttttgtgttccttgagcccagtcgcaaagggccctcgtgactgggcctcatgctagacaacatgttacaaaaagatctagggtcccagaccacgccaaaaagcttcatgagacctctcctcgtctgtgcactgacgagtggccggctctggagcccaggtcgttgcttcccagtctggaggtgaatcctccatagtctggtgagtgtaannnnnnnnnnnnnnnngtctttttccttctcctcttcccattgcaatttgcttattatatcaatctgcttattatattaatttgcttattataatatctgcattgccatttacgtgggataaagcttgcttaccctt

SEQ ID NO: 462325 - DNA, 388 bp, Homo Sapiens
  misc_feature (47)..(70): n is a, c, g, or t
cggcaacccccgatggccctgccagtagaatttccacaagatgattnnnnnnnnnnnnnnnnnnnnnnnnggcttttgccagctacagctcaagctctattggatttcctattatgtttagctggctgctgaattctaacaaaatggacaaaatgtcaaaagcatcagttgtgctttgtccacactgaagcttttcagatgttttgaaacttccatgcatgtaatcacagaccaattaaagaaaacaatagtttcttaaataactgaatactcttgtcattacaatttctttttaaagtttcaaaataagtatagaatggcagcatagtagtgaggttaaaaccagtatttagaatcagacatttttttaggtgtattacttttctag

SEQ ID NO: 462326 - DNA, 296 bp, Homo Sapiens
caaagatcctggagcatatggaatttaaccggcattcctaatcccagaagataaagtgtttaaacaaacttatgaaggggaagtggggtttggtggaggggaatcagaagggcatgaaggtcccttgcttttgctttccttccttacccagataccatcggacatactctgtttggcacttgaaggctctggtattttggcaaagcaattatgggaggcccaatcctagacggcaactggggacgaaggagtctttgtgactagatggaagtctttcccctctgcagtctgaaatc

SEQ ID NO: 462327 - DNA, 408 bp, Homo Sapiens
  misc_feature (354)..(354): n is a, c, g, or t
accgcgctcagccaatttttcctcaactctctctttcctggacgggctgcgttggggggaggcgcagggaaagaacacctctttgcttagacattggtgtcgacagtggggatactaagttcatctcctgatcctgctaggcctggaagcaggaaagaaatgtcctggttagagataaaattgttctatccttttagaaaagcctgttaaggaatatgatgcaaagccaccttcgacgaaatctgaaatgataccccacagccttgtccaccccaattattcagtgacagggctccagttgcttaagccataggagaaggcccctttgcagtggggagtcacttgaagacaganaggggaagcccaggggtgaacccagtcctaagggcttcttgggggccaccaaat

SEQ ID NO: 462328 - DNA, 542 bp, Homo Sapiens
  misc_feature (14)..(14): n is a, c, g, or t
  misc_feature (65)..(65): n is a, c, g, or t
  misc_feature (70)..(70): n is a, c, g, or t
  misc_feature (86)..(86): n is a, c, g, or t
  misc_feature (94)..(94): n is a, c, g, or t
  misc_feature (109)..(109): n is a, c, g, or t
  misc_feature (120)..(120): n is a, c, g, or t
  misc_feature (186)..(194): n is a, c, g, or t
aggaaccggcattnccaacctccccttggttggttggggaataagcctcctggggccccacctcngaaangaccctcaatatcccngggggaanaaaacccacaaaggnagctcaccccngcaaaggggagaatggttgtcagtactttggaaacccttacactgaaagattcaattttggtgtcnnnnnnnnntaagcatctcacttctcccttcatccttttttcctattcccctttccccctctacttaattcctacacagtgtgtgaattttatatgcatcaacctgaaagcatctgctagaaaataacagccaacctgtatatgaaataggaatagattccgtgtcagagcaaaattaagcccttgactcctcatcgttttcataatcttaacatcatgtttggtgaataaataccacaggaatacgaaatagcagttgaggaaaaaaatgaatattgaaatttttaaaatggccagtgtccaaaatagtaatattcacagggaagtgttttgacatctgagatcacctccattttc

SEQ ID NO: 462329 - DNA, 526 bp, Homo Sapiens
gtagcccagtctctcaatgtcacttcatgttatgtatgtggagaagctgtaataagagatcaatggccatgggaagcctgagaattagtacctacagtacctgatgaattcctggctcaaaagaatcaccctgataatttctgatcctaaaagcctcaattattaaacaatattgcatagctagagaaggaaaagaattcactcaccgcgtaggatgacttagttgtcggagcagaaaactgtataatggtaccacaaaaacaatcacttggtgggagttcaaatcacacagagagaaaatttagtaaattctcaaagttgcaaactgggacccacctgggagtcccaccgggcttgggaacagcccccactggattatactgggatatgtagggcatagagcttatgacagattactgaccagtagggcaggtagttgtgttattgggcactatttaaaccatctttcttccctactgccccataaaaacagggcaaactccttggggtttcccctgttcttacg

SEQ ID NO: 462330 - DNA, 497 bp, Homo Sapiens
  misc_feature (324)..(399): n is a, c, g, or t
  misc_feature (432)..(432): n is a, c, g, or t
  misc_feature (438)..(438): n is a, c, g, or t
  misc_feature (446)..(446): n is a, c, g, or t
  misc_feature (466)..(466): n is a, c, g, or t
  misc_feature (485)..(485): n is a, c, g, or t
ggagaatttggtttctgggatttcgtgtaattgttttctgttatatacaatttttatatagttgtcactagtttgcacataattatttcctatttgacatattaacatgtgtcacatggaccatatacttgcatgatacattcatttccttaattattccagttgtatttgcattctagttttccacttacttaggatctgactttccattagaccttcagttcctcagaggcagagaccatgattgtattctttatgatgtccctgggcattgttggtatctggggtcattgcagaagaggaattaatgtatgctattaaagnnnnnnnnnnnnnnnnnnnnnnnnnnnnnnnnnnnnnnnnnnnnnnnnnnnnnnnnnnnnnnnnnnnnnnnnnnnncatttgtactggaacatgtaggagtattgtttncttgtncattattnccccaaggcaataaacgttnaacaactatttaccaggcntttacatgtatt

SEQ ID NO: 462331 - DNA, 490 bp, Homo Sapiens
  misc_feature (437)..(437): n is a, c, g, or t
  misc_feature (451)..(451): n is a, c, g, or t
  misc_feature (459)..(459): n is a, c, g, or t
  misc_feature (471)..(471): n is a, c, g, or t
aagtttttctccaagaccacaaaaaagagttatttaaatgaagattcgtaccacactttggaatgagaagaatcaacattgtgaagttattctcttcaaatttatctattaatctaatataatttctagacatgattcaaagaaatgatgggacagaaattttggatacccaggctctgtgaaaggatcagtttgcttctctttcttccctacacaaaatcaacatgatgggatattcaggaatatttcatactggtttcaatttttggggatgaatttcttcatatacctgcatagggaatgggactcaagccgctcacccctaccccaaagcttcctgtaggggtccagacagagagttttgcctgcagttattctattaatgggctcttagcagaatgggttgggcagtggtggatatcccgtttaccactccnttggattaggggtngggggtgntaggaggagccngtgatccattcttcgggcc

SEQ ID NO: 462332 - DNA, 442 bp, Homo Sapiens
  misc_feature (55)..(55): n is a, c, g, or t
  misc_feature (182)..(182): n is a, c, g, or t
  misc_feature (396)..(396): n is a, c, g, or t
  misc_feature (427)..(427): n is a, c, g, or t
cccatttcatggtaaattgctgaccttaagaaaggactggtccaacctgacaatngccctggccttctgtctccttcatctgactgcacccatttgggcaaaagcggtagagcacggaccctcaggcaaccaaggggcatgggcctctttccacaggctcggctcccaaccgtgttggaaanagtgctggggcagccacgcccacagcaaggacaaggtcacttggcaccaaacggccagctacccaggcgccaggccacagtacccactgactcctccaggagccactggacgcagcttggacgatctggactggaaagacctctgagcagggaagagatcagcctgggcctgtggatctctctgcccagcccctgctggcacccaggcaaaccnactggggcctggccccagtgaaccagaagcnctgcacgaggatcag

SEQ ID NO: 462333 - DNA, 456 bp, Homo Sapiens
  misc_feature (383)..(383): n is a, c, g, or t
  misc_feature (401)..(401): n is a, c, g, or t
  misc_feature (432)..(432): n is a, c, g, or t
ctggctattttaagtactcacttattcctgtgggacttgaaccaaggtcatttgctttggccagcttagtagcccagagacttgctttcagaatggatgttcttgtattggattactgagtctgatccctcttttatttttctcctccaaaagtacaaaacaaagaggagctcatgatacaattgatactgagaatcatggcatagatttgtatccgtgactgctgccttaaaaaaccatcccaaaacagtggctttaagcaacagctacttctatacttcctgtaagtctatgggattgcctggggtaattctgctaatacggacaggcttgattcatcttgactgggtgtccctcatacattgtggcactgggggcctggnttcatcttaggatgtccntcagctggcaatgactcacctctctcacccnccttaggcaggctaactccagatt

SEQ ID NO: 462334 - DNA, 524 bp, Homo Sapiens
  misc_feature (441)..(441): n is a, c, g, or t
  misc_feature (464)..(464): n is a, c, g, or t
  misc_feature (475)..(475): n is a, c, g, or t
  misc_feature (508)..(508): n is a, c, g, or t
tttgtttctttcactgaaaactgttgctgtgatcagtcaaaccatcatctttcccagtttcgatgtttctttctcgattccgtttgctcagggtcctctttcaagctccttcaagttgttggcagaatttagttgctgtggttttaggaccgaggttcccactttcttgctgatcaccagcctggggcaggctctcagccccttgaggccacctgcagttcctcatcctttggcagatcctctcacaacgtgggccacttacttcaagaccagcaagagaatgttcctcttcaggaagggcccaactcctccttatgggatgttcttctgattcagtcagggcccacccaaaataattgccatttttgggttacttcaaaaatcaactggatttggaggatccttaatttacattcaggcaaaatccctccaccttttccntacataataacctaatctggggngtgatgtttcntcccgtttgtggattggggtcacttttaggggngggggttcatttgggg

SEQ ID NO: 462335 - DNA, 408 bp, Homo Sapiens
  misc_feature (363)..(363): n is a, c, g, or t
caccatcctgtttttcaccgaggtggtgattcatctcacaaccaaacttctgtaccctttggccagactcttcccatccatcctaagaccaggcctgggaaccaccatggtactctctgcttctgtgagctcaatgttttagattccacatataagtgagcacaggtggcatttgtctttctgcgcctggcttatttcgctcagcataaagtcctccagattcctccaaatgacagaaatgtctttgtctttttaaaggctcaatagtattccattgtgcatctatatcagcacattttatccatttcacctgttgttaggacatctaggatgattctattatcttgggcttactattaaatnaatggctggcagtggaacatagggaatgcaggacatctcaacaca

SEQ ID NO: 462336 - DNA, 452 bp, Homo Sapiens
  misc_feature (15)..(15): n is a, c, g, or t
  misc_feature (28)..(28): n is a, c, g, or t
ttcccaagctggganttcctcccctaantggccccccacccctcgggtgcctggttaacaaagtgttcccccagggtatccataatccttcccaaggagtcacagacccactcgcccattgagaaaagacagagtttgggcttattagagtggaatcaaagttgcttctggatcccatcaagtcatccgtgcagatatcacagacatttttccccgttgcaaaattccagtaaggaagggagaaagaaggctcttgcaacatttcctgcatgtctttctccagacgcaggaggtggtacctgtgccatgtgagaaaagctggtccctcatgagagaaatccacttcaccaaagctttcctgtcctaccccaaggaaagtctttttgactgagtaatagtgtgtccaaacaaagtagttataaatggaaatgttctcaaattgtggcgtgttg

SEQ ID NO: 462337 - DNA, 494 bp, Homo Sapiens
ttttagtctgtcacctggaagtggcttataatataaatttgaatagtgaagcacttaagatgggaaggcaatttaggaagttattggaattttccaactgagaaataatgaaggccatttggatctgtcatagattttgcctctggcacccaattattttctcactcgattattgctttttctctgcttccatcactgttgccatactattttctttgtgatccgaggagatctgacttaataacacattttgcttcatgcattgggggcctaatgtcatacaaagtggatactgctcagagagtaaagccgatttcgagagctgacaagttgtcataaacttcctgggtgtcctgcttccatatacctccattcccattaacataaatcaggtcacccagactaggaaggacttcagtcacagtgtaaggtttgtgaaccatccttcctcagttatttaaaatgatccgatttaatgggaaattcagcatcat

SEQ ID NO: 462338 - DNA, 686 bp, Homo Sapiens
  misc_feature (11)..(11): n is a, c, g, or t
  misc_feature (47)..(47): n is a, c, g, or t
  misc_feature (57)..(57): n is a, c, g, or t
  misc_feature (78)..(78): n is a, c, g, or t
  misc_feature (83)..(83): n is a, c, g, or t
  misc_feature (95)..(95): n is a, c, g, or t
  misc_feature (107)..(107): n is a, c, g, or t
  misc_feature (134)..(134): n is a, c, g, or t
  misc_feature (161)..(161): n is a, c, g, or t
gacaatttccncccttgggaacccgggttgtcggaagcccaatgggncgggaaacanggaggaatatatcccaaaacncctcnccccattcctgnaagttccttccnggaaattgaactcccccatgtaaatgnacgaagttccagaccgacttccctccnacctcccatggatgtttaactggtgcccacaacagggactgaatgcctttaagttccttaacaattcctgatggttcacttggttcctcccaatccccaatgctgttgccggcaacaacacgaaattccatattcccacccaaggactcaaaccaaccactgttgcattgtatgtcttaccattgagaatttctggaactgtagcaacagcctgccaacccacagaaaatggtgtccgagtctgaatagtaaatatttgaatgggactgttattatctgggcctgctctccaacttagttgagaagtagtactggaaatgtcttccacttgcacatcctcaggaggacctggtggacctctaacaatgatatcggctactgcagataaactttctagggttgtttgtactgtgcagagatattcctgaatgatgtaactgaatattccttatcatcaaatccccaacagattctcctccaatcctttcaaaatgagccactcctttttttaagtctatgacatct

SEQ ID NO: 462339 - DNA, 369 bp, Homo Sapiens
aaatagaagtgcttaataaatagttgctattgtaagtggatgtcagaggagctgttacaatatatcccagaaagtgagccctgggaaggcgccgattttccatagcaatcctgtttctgctttacagttgcttcctcttacgtgcatttacctgcctggtcatcctgcagggcaatgccacctgcgcagtggtgtgttgcatccagggaacaatgtccacatgatcagtgtcaggcacagagtgggcatggggcatcctcaccattctgtctccagtcccatccgtgggacaaaatgccccctgggaaagtttgaacagagattgctttcaaatggggccaaatatggcatttagttgagggaacttaa

SEQ ID NO: 462340 - DNA, 1139 bp, Homo Sapiens
  misc_feature (365)..(365): n is a, c, g, or t
  misc_feature (673)..(673): n is a, c, g, or t
  misc_feature (865)..(865): n is a, c, g, or t
gaaaatttttctttcttgtcctttcatctcttattagtcagttgaaaagtacccactccactttcaagatatgccagggataatttaatgaattcatccaggaagcttttcatgaaatttctagccagaccaagtgttcctgtttggagtccattagttcattggcatgctggacttgtttactactttctgttttatattgcaattttctatttacaattctttacaaaatgtttcagccttagggaaatgatgggaagtttcctgtaaggattaaacaaatataaaccccaaacatgcctgacttcttaatgggataggcgggaaataaaagcttcttccaaggcggcgggattatccagggncgggaatctgtgtatcctttacaccagaacttaaccagagaagtgacgtggctgctctctatgatccaattctatgtgtcttttaccactgactggctcagtattttcctccagactgtgttatttccctactgcaaagctttttgtttattcagttccttgttcaatgtaacatcagtggttgcaagctgccgttcatgacttttactcctatatatttcttctttctaggtatttatattagtttcctaaggctccgtaacaaagtgtggggcctgaaagaaacagaaacatattctctgacagtnctgaaagccagaagttcaaaaatcaaggtgtcggcaggaccacactccctctgaagtctccaggggaggatccttccttccttcttccagcctctggttgctccaggcctccgttggtttgtggctacatatgtgcactgtctgtctgtgccttcattcacatgaacctctcctgtgtgtcctctacctttntgtctattgcataaagacacgctcattggatttatgaccacccacttaattcaggatgatctcatctttaaatctttcacttaattaccagtacaaagacatttttcaaattaggtcacattcacaggtactgggtggatgtcttttggggggccaccattcaaaccactacagtatctttgcaacttctctttacacttctaattcagtcaattagtatttttattaaatacccaagcacaggaatctgatttgtcagggtccacatccttgc

SEQ ID NO: 462341 - DNA, 1163 bp, Homo Sapiens
  misc_feature (85)..(246): n is a, c, g, or t
  misc_feature (359)..(521): n is a, c, g, or t
cagtccttgttccaatgtaacatcagtggtggcaagctgccgttcatgacttttactcctatatatttcttctttctaggtattnnnnnnnnnnnnnnnnnnnnnnnnnnnnnnnnnnnnnnnnnnnnnnnnnnnnnnnnnnnnnnnnnnnnnnnnnnnnnnnnnnnnnnnnnnnnnnnnnnnnnnnnnnnnnnnnnnnnnnnnnnnnnnnnnnnnnnnnnnnnnnnnnnnnnnnnnnnnnnnnnncctctggttgctccaggcctccgttggtttgtggctacatatgtgcactgtctgtctgtgccttcattcacatgaacctctcctgtgtgtcctctacctttctgtctattgcnnnnnnnnnnnnnnnnnnnnnnnnnnnnnnnnnnnnnnnnnnnnnnnnnnnnnnnnnnnnnnnnnnnnnnnnnnnnnnnnnnnnnnnnnnnnnnnnnnnnnnnnnnnnnnnnnnnnnnnnnnnnnnnnnnnnnnnnnnnnnnnnnnnnnnnnnnnnnnnnnnngtatctttgcaacttctctttacacttctaattcagtcatttagtatttttatttaaatacccaagcacaggaatctgatttgtcagggtccacatcttcttgctaaagctcagatgataggatgccgccagttcctgctttcatactctttcacctcagtccattcaaatgtggtcaaggcacagagtcacatgatacctaacatggctgctgaggctcagctctttccatggtgcctgttggcagggcaggctatggcttcagcagcctgacataactggaagtgtcccatcctagtcccatcagaattccgggaacttcccacacaagtagggattatcttattatattttgtaatcccagtgccttcaaattgtgctttgtatatgttatacgtttaatatgtatttttaaactgaaacattaaagattcattcattcatggattcaataaacatttgttagtacctactacatgacaggcagtacagttagatgccttggttaagatgatgcatattgagataggttccatatcccaatagagtttttagacttaaagaggaggaatacatatataatcacacaaatgatcagttttcattgtgataagttctatgaggagtatctatcttcttacc

SEQ ID NO: 462342 - DNA, 465 bp, Homo Sapiens
  misc_feature (62)..(62): n is a, c, g, or t
tgacccccgaaaccctcttcaaaaaggtcgtcttccccaatcatctaactcaccgaacagcnacctcccagaaggctccgaagtttacagcgctggaagaggtaaccctcccctaacaccccgcccctactgttcaccggtcacagtctctgccctccttcccatgggagcagaacagttcttcagtggctaggatctagggttgcctgcgctggaagagattaagccatatgcaccctgctttgtagaagaatgatgaccgggacacccacttaacaccccagagctgtcttcagttaccttttctgccttgccttttgtcccacacaatcaccactactaaaaacctgtctagttgaaaggaaactgaaaatgcactgtcaggagatccctacacttatggctggagctgtgcctcctgaggcctgtcatgtgtgaatacatggaactgccatggtatgtctg

SEQ ID NO: 462343 - DNA, 443 bp, Homo Sapiens
  misc_feature (14)..(14): n is a, c, g, or t
  misc_feature (25)..(25): n is a, c, g, or t
  misc_feature (31)..(31): n is a, c, g, or t
  misc_feature (168)..(168): n is a, c, g, or t
gttatgtccaaaancccccctgtantcaagncccccggaaaatgttacatcactggggtgttgacccccggcaatatgtaatgttgtcctaatgtgaacacattgtgctgcaaatatggcacaaacatgacaggacataggttggagagtcacataaccatgggtacnggatcccagcaatatttgacaatacccaaaatttgtggtgtccaaaaagaagagtcacatcactgagatgctgggtccagtgacacatcacaatcttcactttgggttgaaccaaggcaggaacatcaaaccactcaggtgtgtaacaaagacatatgtcacaatcacacctgcaggaaggtccagtaattaaaaatcctgcacatgtcccagttctaggtatcagagtatgttgggtctaagtatgctagtgacaatctcaccaactggatctg

SEQ ID NO: 462344 - DNA, 432 bp, Homo Sapiens
  misc_feature (26)..(26): n is a, c, g, or t
  misc_feature (37)..(37): n is a, c, g, or t
  misc_feature (42)..(42): n is a, c, g, or t
ccaacctacctccatatatattttanccctaaaatangaaancctatgatcaatgcattgaatgtaagttaattaaataaaaataaagtaatattggatttaaaaaacaacaaaaaagttttattcccaatctaaccaatcaatcacatcacgcggcccactaagtgcagcttctgttggctgtctaatgatgcaaagcatggaatcagaaatcttctgctgagaaacctcagtcatcatacccatacctctaattcaataataataataataatttatgtgtcctttcattccaaactgtcagaatgggaaatatgatgaacctccctgtcttaagggtcaggcattcttctttaaatttaaaggactgtctgattggggaagatgaatagatactcagaaatctttctgcttagtgtccatccctagtaa

SEQ ID NO: 462345 - DNA, 542 bp, Homo Sapiens
  misc_feature (26)..(26): n is a, c, g, or t
  misc_feature (60)..(60): n is a, c, g, or t
  misc_feature (93)..(93): n is a, c, g, or t
  misc_feature (103)..(103): n is a, c, g, or t
  misc_feature (111)..(111): n is a, c, g, or t
  misc_feature (149)..(149): n is a, c, g, or t
ggccccagccttaaccgcccacctcngcacccccctaatgtgagggtaaaacccccaacntccaaatggaaaaaaacacgtgggccactgaantgtagaatantacctggnaaagggtgaacagcatttcctacactacccctgagacnttattattaagtagtaagttgttgctgtagtttggagaaaaaatccacttttaaaatagcccaaaatatgaataagtactactgcattttagaaagcccagaaagactaaaaggagtccttgaaagtcagattacatctgtccccatccgttttaacagcccccagtgctcagcacagttccctggcacaagctagttaagagtgagtggctgaatgaatgaatgaatgagtgaatgcaaggcaatctaccttaaattctataatcctatgttcttactttagggagtgagagaacaatctgaatgttatattggagaaactggccagaggactcagaatagtgattgtactttaggttacctttgttctgtattgttttcacatttcacatc

SEQ ID NO: 462346 - DNA, 356 bp, Homo Sapiens
  misc_feature (27)..(27): n is a, c, g, or t
cctataaactgtcctagtgccctcccnctgcctggcataattgcacgaatgcctacaatagtcacattccttcagtaagaaggtaaggatttgtggcaggtctgcagagaaaatgtgggcaatcttcccaaatatgttaatagagaatgcacacatgagagtgtgagcttgtctcacagatccagccccgcacaccagtctcaccgataatttatgttcatgataaaattcaaatgaggttggctatataaaagtgattctcatgtttctgaagacacattttactgtggggacttggttacacattgtttcttgttaaatgtttttcactaagccgaaagacacatctttgttgg

SEQ ID NO: 462347 - DNA, 468 bp, Homo Sapiens
cctactgacctcctcctgcaaagccagtttgggaaaccgtgtgaaagaaaatatccttgcggacccaaaggcccccctggccattatgtgttgaggaagaaacgatgatgaatgttgatagcgaagacggttacccataattgacagtgtcacaaaaatcatggtaaataccagatactctccaattagaggtatgacttttgaagatgatggtatgatctcttcaataaccagaaggaagacagtcaaagacacaagtactgaagtgcagagacaaatcttttcaccttcatttgaaggaagatagaagacaagtacagttaaaaatgagagcccaatacagggtattataaggaacaaggtataaaagagaggcaggcgcttgattacaaatgagtaagtgacatacggataccagcaacagctgtcggttctgtttcctttgctccctgttgcactcacaatctc

SEQ ID NO: 462348 - DNA, 392 bp, Homo Sapiens
  misc_feature (279)..(279): n is a, c, g, or t
  misc_feature (326)..(326): n is a, c, g, or t
ggtagttaaaacagaaggtttcaataaaatcgacagtctgataacataatacccaaaagtccaagtttccattgaaaatcattcatcataccaagaaccaggaaaatctcatactgaatgaaaataggcagcaagcacacactggcaataaaatgagagaagcgctgggattgtctgacaaacattttaaagcaagcaagcctgatgaaaatgatttagcgagtaattatgagcacacttgaaataaatggacaagtaggaaagtcttaggcaaataantacaagactttaagggaggacccaaattgaagtattaggaagtgggnaaatttacaaccaccaaatttaaaaagtctgggcacatagggcttcaacagccggattgggtgggt

SEQ ID NO: 462349 - DNA, 397 bp, Homo Sapiens
  misc_feature (53)..(182): n is a, c, g, or t
  misc_feature (347)..(347): n is a, c, g, or t
  misc_feature (370)..(370): n is a, c, g, or t
agcttcaagcgaaccttgtctcagcctcctgagtagttgggactagaggcacnnnnnnnnnnnnnnnnnnnnnnnnnnnnnnnnnnnnnnnnnnnnnnnnnnnnnnnnnnnnnnnnnnnnnnnnnnnnnnnnnnnnnnnnnnnnnnnnnnnnnnnnnnnnnnnnnnnnnnnnnnnnnnnnnntgacaccttgcgccaagccgttatcctgcatttctacacaaagagtacaacagcaatatatcccacaacagttaaggcaaaattattcccaaggtaaacttaaataaggaagggcttttccatggaactggggcaactgatggggaaccaaggttgatatggggncccttacctgattccaatatttngggcaaaattaggatttttgatttcag

SEQ ID NO: 462350 - DNA, 195 bp, Homo Sapiens
  misc_feature (56)..(56): n is a, c, g, or t
  misc_feature (97)..(97): n is a, c, g, or t
ggtacaaacttaatcaaatatttaatatcttagaggttaacatattaagataacanggttatttgcccaaagtcataaggtgaagtagaggcagganttgggcttcctagcctggagtccttttctccacctcaaggggctacgagacctccaactaaatgctgagtttctcggtactgaaacagccctaggaga

SEQ ID NO: 462351 - DNA, 303 bp, Homo Sapiens
  misc_feature (262)..(262): n is a, c, g, or t
  misc_feature (282)..(282): n is a, c, g, or t
ggctcacgttgcattcctgttggacagtgctgtcctggagagttgttcttatacatcacaaattgggcttttctgagtccaaagtgaaaaggaagtcaggtcggtttaggtgttctcattattcatgaagagagaggatgctcctttctcaggagagtcaagcctttcctatcacttgggcataaaaaggcctcgttgggagttgtcaagcactgaaatcctcgtgattggggcatgcattcttggtccccattttacgggntgcaggaatcaaggctcagnggagtcaagtggctcacaaga

SEQ ID NO: 462352 - DNA, 415 bp, Homo Sapiens
  misc_feature (395)..(395): n is a, c, g, or t
gcagttgaaatattttgttatgtaagcttatgtctactcaattcctaagaatcacataaaaatgaggaggaaaaactctacatgaactcacacccaaacacacaaagacacagatgtttccagaagtgtggcatctgcagacaaagctactgggagttttaatttaatttttaaatttcatccagatgtctattatatcataaatacttcttaggtgttcagcttttcaggtactttatagatgtaaaatctctggtaaagaaagacagtcaaaaacacactgtatacacatactcacatggcatatggcactggaagggagttcagcaaatgccaccccaaaatatgttggctttgggtatggctggattactttcagtaggggcaacgggggnaacaggcaaatgccgggggt

SEQ ID NO: 462353 - DNA, 424 bp, Homo Sapiens
  misc_feature (288)..(288): n is a, c, g, or t
  misc_feature (344)..(344): n is a, c, g, or t
  misc_feature (391)..(391): n is a, c, g, or t
  misc_feature (408)..(408): n is a, c, g, or t
ctccatcttctaggatacaaaagtgcttctcccatagttgagaaaaatagtaactatttttaccaaaaacacctgtttcagaagcctcttaacaccacaatctccacgagcttaatgtgctaagaatggtttaaagaatctcctgctattatttaggttgatttcctattcttaaaataatgatggaataaaacaccctgtatcattcatgtctgtgtatgaactttccattctaattagtaaggatttttgggagtcaggaaacaaagtaacttacttaaattaccntaaaaatataggtattaaaattcagggggggaaaaggtttcccccttattttgtcntcctttttctagggattttacccacatacttcgtgggggacatggantacggtggactttcccnttggggcagctggctc

SEQ ID NO: 462354 - DNA, 490 bp, Homo Sapiens
  misc_feature (379)..(379): n is a, c, g, or t
  misc_feature (442)..(442): n is a, c, g, or t
  misc_feature (450)..(450): n is a, c, g, or t
  misc_feature (476)..(476): n is a, c, g, or t
ttgtctagtaattttgactccctccttatttagtagtgacaggatcctaagattaacaagagttttaaatttgtaaaacaatctgaagattgagggagctggctaggtgcattaaaatgtgtacttttcctagacctgatagggttacagcaacatgctcacgtagattgggacagagcctccttctgtttccctgtctagaatcccttgtaggctgtttgtggttgttgcaaaaacaatattgcccaaccatttcaagaacatcactgtaaactcttctgggggcagttagtgaaaatgatggaatgaggtttctatggagtacccagcattcatgcttctctggattcttctttatttccccagttgtggctcttcntgaggtggctaagggacttttcatggaaaggagtttttctggctttaatatgttttccaaggngggattantttttcctcttacaatttccaggggntagggaacaccccc

SEQ ID NO: 462355 - DNA, 583 bp, Homo Sapiens
  misc_feature (342)..(342): n is a, c, g, or t
  misc_feature (539)..(539): n is a, c, g, or t
  misc_feature (553)..(553): n is a, c, g, or t
  misc_feature (558)..(558): n is a, c, g, or t
tacaactacctgtacctgctccctgccggcacctttgttggtggatatttagctgccctctacagtggttataacattgaacagatcatgtacctaggctcgggtttgtgctgtgtcggtgccttggctggcctctccacccagggaacagcacgtcttggcaatgcactgggcatgattggggttgctggaggactggcagccaccctcggagtcctaaaaccgggcccagaattactagctcagatgtctggagcgatggctttgggtggtaccattgggatttgacaatttgccaaacgcatccagattttcttgattttacctcaattagtttgctgntttttcacagtttagtgggtttggcagctgtacttacttgcatagctgagtacattatagaatatccacattttgctacggatgcagcagcaaatctcaccaagattgtggcctacctcggcacttacattggtggcgtcacctttagtgggtctctcattgctatggaaaattgcagggttctgaaatctgccctntctactgctggagnccttnctaatgcaggtacttgctctagttg

SEQ ID NO: 462356 - DNA, 423 bp, Homo Sapiens
  misc_feature (31)..(31): n is a, c, g, or t
  misc_feature (377)..(378): n is a, c, g, or t
aatctgctttgggaaagaagggaaggaaagnaacccctggaaggggggcttatcaaacgccagcaaggcccctcaagggcagcccgggcaaaggggggcactggggttctcaggcagacgttcattcgccaagccccacttggagacaacatgcggtcaggcccagggtcccgggggtcttgggggctacctcctggtcccggcccggggcagcaggaacgtcgtgccagctatgcctgcgaaggactccgggaagtgcaggtcccgctcccactcgtcggtgtccgtgttgtacacctgtacgatgcccgtgacgttgttgagacgccagttgtagcccccgacgatgtagatcttcctctccagcaggcaagccnnggcctctgactggccggccgcatggagtcacgctggtccactggt

SEQ ID NO: 462357 - DNA, 532 bp, Homo Sapiens
  misc_feature (27)..(27): n is a, c, g, or t
  misc_feature (32)..(32): n is a, c, g, or t
  misc_feature (43)..(43): n is a, c, g, or t
  misc_feature (58)..(58): n is a, c, g, or t
  misc_feature (69)..(69): n is a, c, g, or t
  misc_feature (76)..(76): n is a, c, g, or t
aagaaccccagcctctgaactaccccnggatnaagatgtcggntaaacagaacctccnaaccttttaancaaaaantccctcccctccctgtctcggatcgtcaaaacttattccaccccctctgtgtaagccaatgtaagggaaaatttaatagttccagggaggtaaccttgtttggcaaagatgagggaatgtcatagtaacccagggatatagctcaagggagggcatctttgtgattttcaaggaacagagggtcaccctcaccatagggagcatctctctctgcccttggtctgaaaagcacatgacatttcaaggccagcagccccacctagtgtaatagggatcttttccatgaggcacatcattggtcctttaccaaaacaccctagctaaccaattctctccctttttgcatccctctactagacaccatgctttatgttgcttctgttaacaggaaaactctaccttcaacaattaggattaaaatgtcccctggaaccgaatgttagttcttgatactgt

SEQ ID NO: 462358 - DNA, 295 bp, Homo Sapiens
  misc_feature (26)..(26): n is a, c, g, or t
  misc_feature (45)..(45): n is a, c, g, or t
  misc_feature (99)..(99): n is a, c, g, or t
aagcagtggccttcccctatggatgnagccaaaaaaaagtggttnccttgaagatggaatcctactccctgatgaagatgcctgtgaaaatattgttgnaaatgacaacaaaggacttagaacactatataaacattgttgataaagtagcagcagggtttgagaggactgactcccaattttagaagttcctattgtgacctgccctggcccaacatggtgaaaccctgtctctactaaaatacaaaaagtcagccaggtatggtggtgcacacctgtaattccagttacttgg

SEQ ID NO: 462359 - DNA, 556 bp, Homo Sapiens
  misc_feature (473)..(473): n is a, c, g, or t
gcatttatttggatggatccctttggcaccttggaagcaccactgaagtgctctgagaaaggggtcagctgtctgagggaatagttctggatagaggccacaggaagcactggccagttgctttagttctagatagctttgtattcccgccttgttgcccttagcggaggctggcccaaagcacacttgatcttgtccccactccctgcccccatctcagatcaaccttcagaaagtcccggcttgttgggcaaaggcacacattctgtgttactcttaagtttcattaggaaatttcaagtcctctgggggccctgttcccttgtgggcttgtgcaactgactttgtttcttgtctgcctttctggaaccaaatccaaggaaattcatggggtttggggagacagcgatggggaacccaggcagggcacaggatgctagggttaaagctgtgggcgcccccaaaagtgggcntgttttgccaacattacataattacatacagtctgaggttgacattgtataattttggcccagaacatttgtattttgaggtc

SEQ ID NO: 462360 - DNA, 553 bp, Homo Sapiens
  misc_feature (17)..(17): n is a, c, g, or t
  misc_feature (90)..(90): n is a, c, g, or t
  misc_feature (99)..(99): n is a, c, g, or t
gaacactgaagaacaanaaaacggggaaacgtttacctggcctgtaacggagggtatttaaaaaaccccaaaaagcttgttggtaaagantgccgaacntttaacaagatgaattcaaaaatacaaaaccttaagctgggaataatagtgaaaaagcccctctcctcagttcaagaaagggttttttcaatagcatattcattgcatttgtctgctcatacttactaaaaagtgtccccaaagcctctaaaagacacatcactttgaccttggattggggggaggaaaagtctgtacacagtggagaacttgattgctcgttctctcgcctgcttttagggggctcatgccactcattctcagttgtttggggcttccacgtcagtcctgtggttggatggtgtttggcactagaaaggagtggcacggagtcttccagagtcagcatctgcctatggtcacacagagccactcattctgcgtctggaaacagatccggttccagcccattctctttctgtcgcgccggactgccgttatgttccaatgggcg

SEQ ID NO: 462361 - DNA, 398 bp, Homo Sapiens
  misc_feature (22)..(22): n is a, c, g, or t
  misc_feature (34)..(34): n is a, c, g, or t
  misc_feature (40)..(40): n is a, c, g, or t
cctgtgccgtgcaactcgaaanggccaagtccgnggagantaacattccattgggcagccaaagaaatagaaaacgggaaaaaattccagttaaagtattaactgattaacccacccactaaggaatttccaaagtgtagtgaagttatttagaaataaccgtagacatgggaacaaactttaggatcaactacgggaatattaggatttcttacttcatttttcaaggtaacatctttttctctgcatttttgcctcccttctacctgccccctgtcagtctttgaaggtcatttgtgatgggtccttcaaactgtgaatacagaatatgaataggctattcttcccttttttgccctgtataggaaattcatgatcacctcttagggagacaaggt

SEQ ID NO: 462362 - DNA, 477 bp, Homo Sapiens
  misc_feature (176)..(176): n is a, c, g, or t
  misc_feature (353)..(353): n is a, c, g, or t
  misc_feature (442)..(442): n is a, c, g, or t
  misc_feature (455)..(455): n is a, c, g, or t
  misc_feature (460)..(460): n is a, c, g, or t
tcttaattttgcttttgggtcattcactgctagtgttagaaacacaatcgatttttgtatattgatcttgtgtcctgtagcttgacaagggggtgaagcttagcacaaacgcagggctacctccaggagccataatgccacagtctctgtgccttgcccaggaacaggcttgctgncctgagtcacaggccttttatgacaatccttcctgttgtggatcagattagaccaccatccccactccccgtatgggccacagttgccaaggacacacagatgaaggggtccatgtgggacaggtgggctggggcgaggctggggctctcgagccattcccagggagctcgtggggncatttcaccttttccctcttagtttttgttgaatttgttcaggcccgggattttgggcccaggggggagctgggcctccttccacggtnggccagggagttnccccntcattgaggacgggaag

SEQ ID NO: 462363 - DNA, 486 bp, Homo Sapiens
  misc_feature (24)..(24): n is a, c, g, or t
  misc_feature (56)..(56): n is a, c, g, or t
atttcctttaagctcaatctttgncccccccttataatcccctaagggaaagaaangacaacacctgtcaacctcaaactggcaaattgttacttttaaaaagtaaaaatccccaaaagtatgcataaagactacatctgttgtgttccatccactataacccccaatgtttgccccatttaggcaccccaataaatacttgcatattgaaatcagtcatcactctcacaactatcacaatcgccctcacaggctaaatttatgcaggttgctgatgctttgtgtgaatcagcctgggagcacggatacatgtaaatgcttaggctgcctcttttcccgtgcattcctgaagctccatttggaaagaagaaagccatcttccagaagtgagtgggtgacttcgtttcactagggttttggagtggaaatggattgaggtgtcataaatgaatgtactttcagtactgtggagatgggacagaatgt

SEQ ID NO: 462364 - DNA, 504 bp, Homo Sapiens
  misc_feature (452)..(452): n is a, c, g, or t
  misc_feature (468)..(468): n is a, c, g, or t
  misc_feature (486)..(486): n is a, c, g, or t
gcttttagctgccagccctggcccatcatcgtagctgcagcacagccttccctaacgttgcaactgggggaaaaatcactttccagtctgttttgcaaggtgtgcatttccatcttgattccctgaaagtccatctgctgcatcggtcaagagaaactccacttgcatgaagattgcacgcctgcagcttgcatctttgttgcaaaactagctacagaagagaagcaaggcaaagtcttttgtgctcccctcccccatcaaaggaaaggggaaaatgtctcagtcgaaaggcaagaagcgaaaccctgggccttaaaattccaaaagaaggcatttgaacaacctcagaccagtttccacaccacctcgaggatttaggactccaaggcttgcatttctattgggaaattcaggaacttttgagggttgaagggcagattgacccggggagncctattaatggggaantgggggacgagggttgcnttacgggggttggttgga

SEQ ID NO: 462365 - DNA, 678 bp, Homo Sapiens
  misc_feature (512)..(512): n is a, c, g, or t
  misc_feature (518)..(518): n is a, c, g, or t
  misc_feature (532)..(532): n is a, c, g, or t
  misc_feature (555)..(555): n is a, c, g, or t
  misc_feature (654)..(654): n is a, c, g, or t
tcgattccatgtctttgctgttgtgaatagtgtgctgcaatgaacatgtgcatgcgtgtgtgtagaagcacttgatttcaagctaccaatttccatactagtctaagtaattaatactaactgttcatggaagacaaacttccaaactctcaatgttgaatgcagcaatgtatttctcacattataattggatgtggatgaggcatccttccttcatctaaagcttagccacctgggaatgccgggtgtctgaggtcacaaagaccatggtgaagggaaggactaatggatgtgttaccctagcttttaaccatcttgtcccatagttaatacacaccactcttgcttgcgtctacttgctgggaactagtcttgatgggctccaatctcaattcaagtatgggctagggagtttagggagaacacatgtaatatttggtgaggattaaatctctttctcacactattacagatcagctttcctttgtaaaactgctttcacatccatgatntaatantaatttcaactgtntcttagaggtgagacagcaaagncatgactcattccagctctgtgggatgagaaaatctatgagtatccacctgtctttggattacactggacttccgtagcatttcctcttatcttagggnttactgcacacaggaaatctgtgt

SEQ ID NO: 462366 - DNA, 612 bp, Homo Sapiens
  misc_feature (602)..(602): n is a, c, g, or t
aaagccttgagagagagttttcaaggatcaggagagggcttagaaagaaaaggactctgagtggggctgcatgaaaagggggtaagtgaggactcttggggagggtctgaaaaaaacaagtagtttggcaaggagagcagaaaaataaaattccactgtgtaggcatttggagatttagcaagagcaacctagagtctgcccccagagacactgcacgttgtttctgacacagaggatgcactaattctatttcctgtgccacctgaaaaaatcataatttgagaagagaaactgttaggccatttctagtgaactatttttccaaaccctcacggaaccctgaacagggtgtgaatgagatcacaactactgctgctgctggttcagcctctctgtccactaataaaggcaaacccttcagcatggtcatatcctgccagccgtttttcccccaaaagatttaaattatgtttcatcttgggttcatctaacgccacatcttggagttcttaaggtattcacagccaactcagtccataccttactttatggcactgagtacggcattaaactctatttagggagggagtggggaggcaangggaaggcct

SEQ ID NO: 462367 - DNA, 443 bp, Homo Sapiens
  misc_feature (24)..(24): n is a, c, g, or t
  misc_feature (47)..(47): n is a, c, g, or t
aacagtttaaaaacacagtgcctnatcttaacgcgggaaaaccacancaaaggcagtccaaggacagctccccattttccctctgtcaaataaaaatgacatgcccccttcctctcggggagaaagcccaggtcagctgctgtgatcacacgtgattcttcagggctggagacccattcagtgcccaggaaccaagtaaagggatagtgcagaatacagatcaaggcctggcactgctggtcagtttgccacgctatataaaaattagcatcaagcttccaagcactgccaggagggaccaggctattttccttaacagagatacagacagacctattggcagggtgagaaacgcactgcagcaattgcctactgcttctgttagcaagaaggaggtcttgagggaagcacggagaacctaaagcttcagctcataccttagt

SEQ ID NO: 462368 - DNA, 446 bp, Homo Sapiens
  misc_feature (94)..(94): n is a, c, g, or t
tccaattcctgaaaaacgccccttccagagtggggaaccagggaggaagttcctgtgccaggtgaagcgtctggccccagccagcccacacccntgtgttaaggacaggttcccctgaaggccccgctgatggtggagggtccctcaagaagggtctctcccagcttttggaagtgccccacctgaccgtccctcctcattactccctggctactctcctttgtggaggctcccaggaaagcttgggagcacaaccaagaaatggttaatggaacaaaaaggagaattaatgaatcatgaaaacatgtgcttattattattattttttagagattcacactttcctgagtaaagtacacaaaaatctcacatgaagtcttttgaaagcaccaggcctctagctcttagactagctgtgctccatggcagatctgagccaagctcga

SEQ ID NO: 462369 - DNA, 513 bp, Homo Sapiens
  misc_feature (44)..(44): n is a, c, g, or t
  misc_feature (48)..(48): n is a, c, g, or t
  misc_feature (361)..(361): n is a, c, g, or t
  misc_feature (381)..(381): n is a, c, g, or t
  misc_feature (405)..(405): n is a, c, g, or t
  misc_feature (421)..(421): n is a, c, g, or t
  misc_feature (451)..(451): n is a, c, g, or t
  misc_feature (472)..(472): n is a, c, g, or t
  misc_feature (482)..(482): n is a, c, g, or t
  misc_feature (496)..(496): n is a, c, g, or t
aacaagatgcaatgaacagatgcaatgtctaccccgcgctgggnagtntcccgaggccatgggtggtttggaatcacacttcattaagagacaaactgttccttcccttattgtgccttaatgcttatgacaaggcagctctgaattgatcccaagctggagcctctgaatgctttaaagagtttgaatatagacggtttgagagcaaaaagggagctttaaatattgctcagtgggcccccatctcccctcttcccacatttactgagggcacgagatggggatggggacctgtcctgggggtcacaggcaggcagttcgttcaggcgactttgggccctcctgggtttgtagggatggntgctttttcctggggctttntgggcagttccagggccagggatnggggggagccagggantttcatgtttgttcatttggggaaaaagcntgataaaacagggaggcacantttcaaaccngtcgttttttcccnccttaggattttgggcc

SEQ ID NO: 462370 - DNA, 518 bp, Homo Sapiens
ggagttagaggtggcccctctgattagggcagatgtaaatgctgcagcaaactggtcagaggctttgcataatgacacggcagcagctgctattgctagagtttgctgggggcccagcagaggacagggttgcggggtccatttccagcagccagggaaggggatggtagaatttgtgctatctgagtgtgtgttgggagaggcagcctgacccctcaggcaaggcctggggatggcaggtcgctgcagaggccacagccccatgaagcctgtgtttgcattcccaagcttcagaatctgggaattgttgggccagatggagatgaggacctctcgtagaggccagatcagaggtgagggttctcttctctgaacctccaaagctccatatcccagccagagggaggaggaaatctcaactctccttcttaggctagagctcagatgtcggatcaaagctttgccttcatctgagagcccaaggggaggagcatgcaggagtccagctgggagagtgg

SEQ ID NO: 462371 - DNA, 489 bp, Homo Sapiens
  misc_feature (46)..(46): n is a, c, g, or t
cccctctcctacccctcctgccctccgggccaggggatgaacaaangccacaaagggcccctcaacccagaatgcctaagcatccatgccctttgggatttccccccggttcccagaactgtgagcccaaataaatttttggttccatccacgttaccccagtcctgtggtattcctgttatagccagccccaaacggacttaaatacatactctctctacaactcagctttctcttcctagtagtcccaaagataaaaatcttcacaggattcttgcccaaagtacaaatataataatatatatacagcagttagcatgttgcctggcacagaataagaatgcaaatgtttatcatcattattaatgcaatgtgaacagagaaatgagaatataactagaagatgtttaggagacaaaaattgacagcttgaataaagggagagtaacttctggcttagagagtaactctatttgattagatgagaaa

SEQ ID NO: 462372 - DNA, 484 bp, Homo Sapiens
  misc_feature (27)..(27): n is a, c, g, or t
  misc_feature (37)..(37): n is a, c, g, or t
  misc_feature (433)..(441): n is a, c, g, or t
gtaaacgggggcctaaaaaaagggggnagccccccangggcccccgcctaaactttttaaagttaatttttttgtaagaaaacgggggtccttgccaaatgttgcccccaggctggttctccaaacctcccaggcttccaagtggatcccctccctgccctcagccctccctaaagcgttgggatttacagatgtgaagccactgcaccctggcccaatattttgctccttaataaaataaaacaaaaatttcactctatctaatgggctacggctgggcttctctttctgataggtggttccagagctgagctgtactcccgaatatcacagccacgagccacgtatggctgctgagcacttaaaatgcattagcccaaattcaaccagtctgcaggtgaaaacacacaacctatctgaaggctgaatatgnnnnnnnnngcaggtagaatatctcaataatttttatattgattacatgtcg

SEQ ID NO: 462373 - DNA, 530 bp, Homo Sapiens
aaaggctggtggacagcccctggagttggccaccacctgggagcagtcccttgcttcccttcccatgtctttacaggcgcaccagacgctggttgccctcagtttcagcaaatacgcagcaggcttgggcaactcagggagtctgttgagggaatcccgtcatttaaatgtggaattcgttccttgaattgtggaagcttgaactccgcccaggtcggccccctctttgtggaagtcacacagcattgaggaaagtggttttggtgttgctagtagcgctttgtggagcttaactggaccctatgatgctgggggcttatgagttaggcttcttccctaaatgtggttccagctttaccaaggcttgtgagacgagggaagaggacttagtgcttctggagtgatcactgagaacaaagtggaaggtgactgcgtggggaggcttgtctcaagggagcctgggcaccgctgcttgcctgtagtcaaagcatgttctgacccattctttgcccccatatttgtttagatgg

SEQ ID NO: 462374 - DNA, 429 bp, Homo Sapiens
  misc_feature (23)..(23): n is a, c, g, or t
aggctcacgccctgctgtggacnccagcacccaggaaaagaagttgtccctgtggtcctgtgtcctgccttcaaaatttcctcagtctttggattggtggttagcatttccttagtattccacataggatgaaaggtgaatgtccccaaacccaactcccttcctgactttccagttgcaaatgattgattatcccatatacttccagaaaaccttttgtggtttctgtgatctcttcctacaatgggctgaaagttagtgcttgtaaggagttcctccttttcatcaacagtcagagaaggagtcgcagtgatagcaatggttaacatggccttggcaagtccactttcaggagatattctctctggctggctggaaccaaatacttcttcagctgaggggacacctgactcagtaggtgtggaaaca

SEQ ID NO: 462375 - DNA, 480 bp, Homo Sapiens
  misc_feature (33)..(33): n is a, c, g, or t
  misc_feature (48)..(48): n is a, c, g, or t
  misc_feature (65)..(65): n is a, c, g, or t
  misc_feature (100)..(100): n is a, c, g, or t
  misc_feature (148)..(148): n is a, c, g, or t
  misc_feature (210)..(210): n is a, c, g, or t
  misc_feature (219)..(219): n is a, c, g, or t
ggaatggcctcccttcattccattgccaacctnttttggaaatccaanctaaggaagcccttcanagggaaagtctgtttgacttgttccttcatcaaangttcccatcctgggtaaaaatgtcccagtgagctgaggcctaagtggntgaagaattacagcaatagagaagttacttacttttcccttagaactttaaaaatctcaaanataggagtnaaagttctcagcaccctgagcaggtgtcaggctttctctataaggggcctcaatgaacaagtattttcagttttgtgggcccaggtcaggcttctgagctactcagctctgtcactgtaacataaaagtggctacagacaatatatgaccaaagggtagcagccaggatccaacagaactttatttacacaagcaggcagcaggctggatttagccagggccacagagtgagggcgtggtgtggatccatattactgctag

SEQ ID NO: 462376 - DNA, 438 bp, Homo Sapiens
  misc_feature (404)..(404): n is a, c, g, or t
  misc_feature (418)..(418): n is a, c, g, or t
ataagcatcattatctatggagtctgagaggggaacgctgagaggaagggtcggccagccgtgtgcagcaggaccaggaggccctgcaagccccagatcacgtctaccgcgcgtgtgtgcactgatccacccacacaggcgttcagggccctacctggccaatcgcgtgaaaggctggctcagaaggcggtaaactctgtcaggtcaaaatgagtaataacatttctaaagcgacaaggctacaaaggaagctggactcaccggatcccgggaggtttgcgaggcccagcgaagggcgtgggctgggaggcccattgaaggagtcatgggagccaatacggggctcaccaccccgcaagcggcgccccggagcccctgcttggttcccaaatcttcttgacctnaacccttcaagttnttgttcctctgacctgagga

SEQ ID NO: 462377 - DNA, 255 bp, Homo Sapiens
taaaattatgaataatgctacatcaaaaagcaggttacaaattcatgtttactatataactatttaaagcaaatgaaacactaatagtcaaagtttaggatgaaaactaaatctaaaaggaaatataacaaaatgccaattatgcttggtttggggcattgatgacccttcttcccacttttctatattttccaagatttctttattgaatatgttttactataaatattttctaaactcatatttttcactatt

SEQ ID NO: 462378 - DNA, 390 bp, Homo Sapiens
tggcccaccacaaatttccaagaagacattgttattttatttcaaagctttcaacaattgcatcctcctgacttatttttttattggtcagaattaagaccaaatggctttatatctatggacactcgtcagaaaaatgcacatttgcatttatacagaatgccttatataatttcaggggacttagggattcttgaaccccatcctataattctcagtttaagaatgctagttttggagataagaatgtgcccctcataatgactaaataacataattatatctatgtgtaaggaagcagaaacagactttactgtagtagttattgtattctctccattttgcagattgtccaaatgatttgccttttgactccaagattgtattgat

SEQ ID NO: 462379 - DNA, 785 bp, Homo Sapiens
  misc_feature (769)..(769): n is a, c, g, or t
tgaagcagctactcattgctttttccttttgctgtgaagatcatggattgggaatgtcctcgtgaggtggacctaaggcagtaacatttaaacttcatgtcctagcacccgccctccatctgacccaaagataaaaaaggcatcaagcttcatggttatgcctaagcttaaaaattcccttccccactactaatattgagttcaggcagggccccatcttacttatttttcaaaaaagttatagctttgaattatagactatattactaaatttggtaaggtagttctttgcatgaatggggaatgtgtgtccaaaatactttcacaaaagggcatggattacaatggaaatgcccctttgcctccagttttgctaaccctaaaaagtatttcactaatttcaagcactgtttacactcaaatcccaaaattggccaaattatataattctcttaaattttcatttctgtaggtggagatttaactatggttctggtgaatcatagaagggagagacaatatttgaggggagtttatcagcagaatatcatgccttatgaccccattactgaaacacagacattacaatcaggaaataggacctaattaattccaatatccctccatttaactagttccagtgatgctgaggagacacagcaccctgtgccagggtattcaggaaatattaaggcctcaggcaggaggggttaacttgaaaacttttcaattcaggaaacactcttcccagggcttatggggctagggnttattgtaggggttca

SEQ ID NO: 462380 - DNA, 336 bp, Homo Sapiens
ggatagacccagatttccttgatgcctgctgggttggggaagatgagaactcgagaaaacagtgatttcttgattatgagaattccttcaatgaagtaccttcctgctttttagtcactgtgttttctgaagaatttggcttaagttttgtcttgacctctgcaaatgtctgaaggaggttgtttacttgagcaaaggtctgtggaagaataccatcataatttgaccttgtactgaaagcatgtaacaaacttctagaatcctgaagcaagaatttgactgttgtaaaatccactgccttattagctttacggagatttttgtataggctctcaa

SEQ ID NO: 462381 - DNA, 397 bp, Homo Sapiens
  misc_feature (71)..(71): n is a, c, g, or t
acgccctccccaggaaatgcctgccagggaaaagagcaagaaggtcaaataggaccgggcaagggggtccnaaagggctgggtcccacttgactctggggaagccctgccggacccctgcaggcccacacctacatcccagaggcccaattggtccttgtaggcagtctggggaaatgtttggttccagaaagttccagagctggtggctgcaggaatccttcaatggaggcgatgtttgcaagcagcagcaacctagttggttggtcgtggagtccgtggcatccagaagcttttccaaaaagtccgcccaggtccagactgtgctggggaaggagaggcagctggtgccatgacagaggtgtccagcccctctgcttggtgcagggcaggggctg

SEQ ID NO: 462382 - DNA, 487 bp, Homo Sapiens
  misc_feature (13)..(13): n is a, c, g, or t
  misc_feature (25)..(25): n is a, c, g, or t
  misc_feature (36)..(36): n is a, c, g, or t
  misc_feature (42)..(42): n is a, c, g, or t
  misc_feature (63)..(63): n is a, c, g, or t
  misc_feature (98)..(98): n is a, c, g, or t
  misc_feature (113)..(113): n is a, c, g, or t
aaaaatgttgaantttgtgcttttnaaaaaaaacantccaantccaaatgtcccaacatgtantgtgtggctgaatggaagctaagctcttcccccanccctggctcaactantgggagccccaggaatccctgggacaggcagataagccaggactgaagttttaaaagtatcaactactgcaaaatcaaaagtaggcagcctcatgcatagacttgcatgatattagttgagccatcgctgccttcattatcatttttatgcctttggggtcactgtgtggtttggtcccaggctgttctcaaaacctgcagtgcaacagacccgtgtctactttagcaggtgagtctagctgcaaatcagtcacctttcctaccacaaacttctggcctactccaaaaaccaaggtaccccctctctcaggaatagcctggggaggttatttggaacaagtattgtgttccagtccgaatcttaagtaaagatc

SEQ ID NO: 462383 - DNA, 495 bp, Homo Sapiens
  misc_feature (26)..(26): n is a, c, g, or t
  misc_feature (42)..(42): n is a, c, g, or t
  misc_feature (47)..(47): n is a, c, g, or t
  misc_feature (56)..(56): n is a, c, g, or t
  misc_feature (223)..(223): n is a, c, g, or t
aaaaaccacctccagtgggggtaaanggttaaaccaataaangtccnttgccatanttcctaaatttaaaaatttgtatccacaatattattaaaaagcagtatttagaaataaccgtactatttaaagttttcatgccattaatggataaaactattttgtcatttatgatgtgttttgtttcaggttaatatctttagtctcagctgtcaaccactctttnctactaactagatgttacatgctgagaaatgttattaccatctcaactttgccagaaagcagaaaatctttttctggctgtgtgcagacactaggaatacaacttttgtttttcttaaagtttgattataaagtcccccagaagatgaccttttaatattcctgagtgcatgacctgtaaggtccccattctggttcttacaaggtcttggtaattcattaaggtaaaattatttcaacaagaacctcagtgctcttatagctgttttactt

SEQ ID NO: 462384 - DNA, 538 bp, Homo Sapiens
  misc_feature (13)..(13): n is a, c, g, or t
  misc_feature (37)..(37): n is a, c, g, or t
  misc_feature (44)..(44): n is a, c, g, or t
  misc_feature (161)..(161): n is a, c, g, or t
gagggacaggtgngccaagaagttaggacgcctagangtcattnggcaaggggaattttccagctcccataaggacctccacagtacccacccatccataatatggcagttggatccattggacccaaaacatcctttaatgccagtaacatgactcctgncttggacataactgggctatacaattaaaacatatggatgtccaaatatatctgagattgtttggattaacaataatttccaatatttgttatagacttctgtgtcttagtactttatttactagatgatgctcagtagcaaagttgtcttccaggaaatccatctttccaaaaccgtagcgggctgtgctcaacccacagacaagaagccttggggttttgtaacagcacttctctccctcccagtacacacactctttcacaaatttaggaagtcgttatttaaagaagctcaccaccactgttaaaaagaaagctgccaacttaagagtgtgtgtgcccagcccaaaaactctggaaaacctacactgtaacct

SEQ ID NO: 462385 - DNA, 459 bp, Homo Sapiens
  misc_feature (23)..(23): n is a, c, g, or t
  misc_feature (28)..(28): n is a, c, g, or t
gtccacttttttaaaaagccccnggtangcagtaaacatgaacaaaacggcctgctgtggccttccctcttggagaagaggaacagggaaagcctttccctcttcggctggttatgtggggaacttcccttagtttttttcccacaagaaattctcctttggctttgtttttctgaatggatggagactatgaaggggtttgtagttgtaagagatttaatattcaaaactgaaatattctgcatttcttagaaataccccatcttcccccaccccccttttgaattattaattcaagatcaacaaagcattcctcaagatcacttttaaaaaaggttagaagtgaagcaaatacattcagcttactgatcactatagtattgcataagcacagctcaagaactgagctttgtatgtgtccttttgggggataacagggctggaccatgcttccctgcc

SEQ ID NO: 462386 - DNA, 598 bp, Homo Sapiens
  misc_feature (458)..(458): n is a, c, g, or t
  misc_feature (468)..(468): n is a, c, g, or t
  misc_feature (491)..(491): n is a, c, g, or t
  misc_feature (516)..(516): n is a, c, g, or t
  misc_feature (549)..(549): n is a, c, g, or t
  misc_feature (556)..(556): n is a, c, g, or t
ttcagtgatggattttgcttccaggttttcagattataagcaattctgcaaaatgtcattatctggttggaactaagttcatataattgtcttaatggcatgcttaactagcttttgcaagtacagttttcttcagtatgtttctactgacctgatcattcaaaacactcttttaatgttttctaccaagccacacctccttcttgatggtaaggacaaaaacaactatgagatatttcgtattttgaatgccccacaaataaacagatattccaaatacggcagtgaattaaatgttttcaatagggggaaaatgaggaatctcctgttcaggaaatgcccaagggaaaggttgttatggaaagggaaaacatccattatgggcaagttttcttgtttacacaaatttcgggttattacagttcagaccatgtcccttggaactaccactggcacantgggggaaantcctttctttcttggtaggcgtnccttccacacagttttcaggttttnccttttaccctggtttggctaacacccacgttnttaaggngttgtcactggttacttaaggggtggggttgcccatcagggt

SEQ ID NO: 462387 - DNA, 433 bp, Homo Sapiens
agatgaggatgttggagagcctcgagcaccaaggggaggaaacaaggatctggtcagaggagaggatgctgtgagggacagtctccaagtcgactgttctgggagtgagaggcccacaggcaggaagcacagcctaccatggcctccagccttcactggctatggatgtgggacccgggaacaggaacaggcagtggctgtgaatggtttcatctctgccccctgtcctgagatgaatcctgtcccccactgggttgtaagtcttcctgctggtgggttgggagggagagcatctggccagccaggggcacaacccctgccagggattcatagagtggggatcagtccagcctccccagcaggcccaacctgaatcctgggagaaagacgacaaaagggacaaaggggttggatccaggagaagggcccccag

SEQ ID NO: 462388 - DNA, 479 bp, Homo Sapiens
  misc_feature (43)..(43): n is a, c, g, or t
agggccaaaaccaactgctgcccccttaacctttgacccctgnatttcaaagtcccttctaagagttcaagccctgtcccccggaagttctttataggaagctcctcactgatttctcaaatcccatctctggagatgggtcatgcttcagaaagaagctggaggtgcaggcccatctgggtaaaacaggctgccctggacaaagctggaaacagaatgaggctcccaggcgttgattgggctgcagtcttgggcgggtttggactgcgacgagcaggccacgatagatcaaccaggtggtagccccagggaccttcaggttgttggaggcaaactgggcactagaccagctaaaggccccggagtaggtcgacgagagatttctgagaaggctggcagaccaccgcggatctttgtctttttacgtggagccatgggcgaggcgctcaagaacttgctgaaggagctcgacttcttca

SEQ ID NO: 462389 - DNA, 421 bp, Homo Sapiens
  misc_feature (14)..(14): n is a, c, g, or t
  misc_feature (37)..(37): n is a, c, g, or t
  misc_feature (63)..(63): n is a, c, g, or t
  misc_feature (82)..(82): n is a, c, g, or t
ggtaaaaatatccngtatttaaaaagtaataggaacntccaaaaagcaagaatagttattagnggataataaaacaccctcngtgtgttaacttttggcctacaacctacaaaatgccatatgttaaaagatcacttttaataactcttttcctaaaagtactcccttgaattatcagatataatttgtctgaattccctttcttttgattttgaaaacacatacatgtcttccagctatttaaggaataaggcaagtgatttaaggaactgagggcaagtaatagaaaactgggtgttaccttaagtactttacaatgtccggtcataatgataatggaaaggcccatctattaatttaagaggctgggacacagaagaaagccaaatttaacattaaattgttattgggtaacaagttg

SEQ ID NO: 462390 - DNA, 231 bp, Homo Sapiens
  misc_feature (51)..(51): n is a, c, g, or t
aagaaattaaaattgtaaagatctattaaagactaacatttccaagtttgnaagtttcctatttaggatccccagaatttttaaagggcaaggcccactatattaactcagtaccatgttacatcagcacctgttatctgtactcttgaaactgtctcagagcttgtatgttgtctatagtttctttcttatccaatctactctccagagtggcaccagagttacttttct

SEQ ID NO: 462391 - DNA, 497 bp, Homo Sapiens
  misc_feature (182)..(182): n is a, c, g, or t
  misc_feature (316)..(316): n is a, c, g, or t
  misc_feature (417)..(417): n is a, c, g, or t
  misc_feature (479)..(479): n is a, c, g, or t
ttctgaattcatggtttctctgcatgacccgtaaagtctttagtctatgtccagggaatcacagttcaatgtacaatattttttgattcctccaaatttatttggacatgttttactatctcccaggggctcaaccctggtaaagagaatgaagccaagatccagtggtgtgctagcgccanttaatataagctcataaaattttattgttagaatcttcccacccactaccactgctgttatcactgccagagagctgtagcatgagctccacagagcctgaggagccacctacctagactggctgccactggcngaaaccccaccccgcctccagcagcaaggttgccacacacttgcatacatgctggaggatagcctgctggctggctgggggcatggccaaccaggggcctngggaattggccccactttggcccaccacagccttatttcctatggcatggccatgggggggncttaaggacagggcacaa

SEQ ID NO: 462392 - DNA, 548 bp, Homo Sapiens
  misc_feature (204)..(231): n is a, c, g, or t
  misc_feature (452)..(452): n is a, c, g, or t
  misc_feature (508)..(508): n is a, c, g, or t
attgccaaaaaagcattttatacattgagttggggggtagtggatcttagtgtggtgttgcatggaggggcgagattttatatttataatcaacacgtgggttaacatgtttttttgaaatccaagcaatacacaggaaatttaagtagaataaaaattgcagcccatttttgaaatgtcagcatgtgctgtgttcagttcagnnnnnnnnnnnnnnnnnnnnnnnnnnnnaactaataagttggttatcagtggtgggttttcaaaatgtacttgttctaataagttgtacaatgaactaaatcagtggcattctctagataatgtggggggaaggttagaatattttctggccttctatgggggtagccaccccaggaatccaatctgaattagtccctgtttttggtgggagtttgtaccattttaaatcctatgaccaaaaataatcntagttttccatttccctactagctaggatgcgaatttgtctttttggaatgacccngttcaataagccaggaagggcaacccagaaaaagtgctcc

SEQ ID NO: 462393 - DNA, 475 bp, Homo Sapiens
  misc_feature (14)..(14): n is a, c, g, or t
  misc_feature (37)..(37): n is a, c, g, or t
  misc_feature (47)..(47): n is a, c, g, or t
  misc_feature (78)..(78): n is a, c, g, or t
  misc_feature (96)..(96): n is a, c, g, or t
tgccctgtgaacangcccaaaaccttcgcaaccccanaatgggggcnacttccggtggtgaaaacctgttatttggangtccctaatgtggggcangctccctaatagctgaaaaggggaacaagccccccaggggaaggcaagagctgggcctcctcctgggtcccgaagaggaggctgccaggggatgtccctgtcttggagcaccagccggcagggtggatgtctgggtggtcagcgtcgatccagaaatcatagccatgactccagccatcaaagtggatctggggaggaaaggctcttggaagtcaggcgtttctcatggagcccagctcagccagaaggtcctctccccatccctgggacctgtcagaagcaagatcctggattgaaagaaccaaggggccaaccctgcaataatctgtcttggccaccacattttccaagggcatcactcattaagttactggctctc

SEQ ID NO: 462394 - DNA, 476 bp, Homo Sapiens
  misc_feature (18)..(18): n is a, c, g, or t
  misc_feature (35)..(35): n is a, c, g, or t
  misc_feature (75)..(75): n is a, c, g, or t
  misc_feature (84)..(84): n is a, c, g, or t
  misc_feature (116)..(116): n is a, c, g, or t
aagaaaaattcaaaaaanccccggaaagtttccangagcttccaatccacaaaacctaattaaaaagccatattnaagccccanaaattcaataccctcaaacacacttacattcnccccaaaaaatcatcctttgcccatgccccctaatcaggttcctcattgtgtttttaaattcctagaaatttaaccctagaggagagattatttggtgggaagaggagggctatattaattccctggctcaacatcccatagtgccttaacaggcttacttataaatgagggtaaatcctaacactcctaggccaagatagaacacgattggatatggcacattggtaattatttacaaagctaacttgtaatcacaaagtactgtagtaatattatcacaacatctttgttttggagaactcaagtgctttcacgacattaactcattcaccctcactgaactgataaggaggggttgg

SEQ ID NO: 462395 - DNA, 429 bp, Homo Sapiens
  misc_feature (25)..(25): n is a, c, g, or t
  misc_feature (38)..(38): n is a, c, g, or t
  misc_feature (56)..(56): n is a, c, g, or t
  misc_feature (62)..(62): n is a, c, g, or t
ccatttacccgactttaaaacagcnagttcccccaganggggaaagtaagccatangctgancccttaaaatccatgccccttccagggatcctgtggctcctcacccaatatccatgaaggcctaaactccccacccagaaaatagaggcaatcctataatgtaaaggcagacaattccccaaattcatactcgtttccttcctacttgtgaaagcataattttttgttcatcctaaggtcaccagagccttcgagataatctggcacatgaaaggtactcagtccttgtttcctgaatgaattattcagtggacgctttagctgctgatggaggctcagaacgcttctcagtctctacacagagcatggaaacttggtcctaaatatgaacttacagatctcaactgtttgctctggccattcctaa

SEQ ID NO: 462396 - DNA, 400 bp, Homo Sapiens
  misc_feature (32)..(32): n is a, c, g, or t
aatttatgtgtgtgtgtttgggccatatgggnaaaatacaaattccatatggggtagaagtagaacttctttaatagagtagtaaaaggattatgccccccaaaataactgaggtcaaaagtaatcaattatgaaatcgtttaggaaaaaataattttcatagatacttagaaaacatccaaaacataatatcctagtatccttttacatataattcttaacaaaccatctgaaaacctaccactgtcttccttcagaattgcttatgttagtttaatatttcttttttgaatagaaagaccctagttcatgttatggttttcttatatatagctggttgggggacccttgggcagttataaagtggaaaaaataaaactgtattattactttcaataag

SEQ ID NO: 462397 - DNA, 417 bp, Homo Sapiens
  misc_feature (304)..(304): n is a, c, g, or t
  misc_feature (314)..(314): n is a, c, g, or t
  misc_feature (392)..(392): n is a, c, g, or t
gttttcatgagtcagttttgcctctagaaacactctttgaacttccatagttatatgaaagcataaaatgctatatgctatttttaactcatgtgttctgaattgtaattgtatataatttttacttgagatatagtctttctagaaaccaatttctcagcatcagctagagccaagacttttcagaattttaaggaaaagcatatttcatacgttgaggtcataggtcccttaagacaagttctattttgggtatctacatttacaatgggctgaggactgtcacaatcgttcaccttgcatncatttaaaanggccatattaaagttcctttctcctctaaacttaggaatgttaatgttgggccttgttaaactaactttctaggtccnttagggtttatgtccgggggggtgt

SEQ ID NO: 462398 - DNA, 441 bp, Homo Sapiens
  misc_feature (52)..(52): n is a, c, g, or t
  misc_feature (72)..(72): n is a, c, g, or t
  misc_feature (96)..(96): n is a, c, g, or t
aaaaaaagggccccttgcccaacccaaacaagggaaaccaaccttctccccntcccttccaacaggcttccnacaaggcaaaccccaacttcccangtctggtcaacccaacccctggttcaccgagggtggtttcagggaaaggccgcaaggaaaccccaggtgggccccaggaagcgtcaccccctggagttgaaggggtgaaagatggtgtgagaccaccaccggggggacaggctctgacagtgggtgggaagctgccagcatagatgcctggggcccagcagagagctgggtccagcggggcctgcaaccagctgtgcccattggaatcctcagttacgtgagccacaaaatcatcgctattttagggctgagccagtttgaagtggtttctatcactgacaatctagaggggctccacatacagcaacgggaaga

SEQ ID NO: 462399 - DNA, 495 bp, Homo Sapiens
  misc_feature (426)..(426): n is a, c, g, or t
  misc_feature (433)..(433): n is a, c, g, or t
  misc_feature (457)..(457): n is a, c, g, or t
  misc_feature (464)..(464): n is a, c, g, or t
aagcaaatgtagacaacttttgattgcctaactctcagtgaaacttaaccatcatagaggtattctccctattataacaaagttagattccaaaagcttgtaagtaagctgtgtataacttggacatatgttttcctatagcaccatttctgcatgtaagactgtgtttcgaacctcagcttggagcttggacaatcaagaagaggtgtctttgctggcctcagctatgagaatcctatctaggtaccgccatctctaggctatctgtaggcaccaaccctctgctactactggctgccttctcccgtggggatggaatgtgggtgaattgtggcattcatattttcagggaattgatttaacattcaaggttggggaggatatttcccaggattcacaatttggattttattaggatgctttgcngaaatantcttaggttaattctaaggggttncccaatnggcttataccaaaagggacctaaagtgaggt

SEQ ID NO: 462400 - DNA, 487 bp, Homo Sapiens
  misc_feature (468)..(468): n is a, c, g, or t
tgaccccatgacctagatgatgtgaccctctttttctgcctcagccttcacaataggaggattttgacacaatgctgagcccagcactcagaatatgttactctcctctttttgctgaaccatgcccacaaaaaaggaatttggacctattgcagggcccagcatcgagatgatgttactcttctgcctgggttctgcaaaagaggaaattgtggcatattgcatatttcttggcccagcattcttatgatgtgactctcctgcctgtgctgggagccaccgaatgtattttgacatatcttgggacccattatgtagggtgttttgggctcttattaacttgggctggggtttttttccacgtgaggatgggtgttcatatttgctggggtcccagcacccagtttattgtggggcccattttcctattaccctggcctaggaggaaagcattgtgttcaagttggnttgggcccaggcacccaag

SEQ ID NO: 462401 - DNA, 483 bp, Homo Sapiens
  misc_feature (423)..(423): n is a, c, g, or t
  misc_feature (431)..(431): n is a, c, g, or t
  misc_feature (444)..(444): n is a, c, g, or t
aaaaagttcctcccaagttcttttataagtgacatgacttttagaccccttcccatctttgtcaacaaaagtagggtgccagaccagtcacagaacactaaatgtcatccatgtttccttcagtagaaaccagcagttttaaaagaggtaagctgtgttcactaaagactgttccagcttgacaaatgcagagatataagtctctggtctttaatcactgtgggggccattttgtaaaacacacatactgtccagcagactcctttgggtcatcccaaatacctctggaactccaggggaaggatggcattctaactccacggaacttacctattttgtttaaccttggattaggaccttctgggaggaaggtaaccaatttgttccatcttaggggagcatttggggatggggagtttttanttttttcnggttaacggcccncctggcctgcagtaggacccttggggtttaggagggtcc

SEQ ID NO: 462402 - DNA, 451 bp, Homo Sapiens
  misc_feature (12)..(12): n is a, c, g, or t
  misc_feature (45)..(45): n is a, c, g, or t
  misc_feature (56)..(56): n is a, c, g, or t
  misc_feature (382)..(382): n is a, c, g, or t
  misc_feature (409)..(409): n is a, c, g, or t
  misc_feature (413)..(413): n is a, c, g, or t
aaaccctgctgnaacccgaaactgccttcggtggtcaaccaacangctcccaaaanggctggtgcctccgtgaataggcaatgtctggaaaagaggctggggtccctcaatccctggctaaaaggcgcccaccaaaagccttgaaaggtttcgctgttctgtttgtgcttctcgatggtggccctggatgatcgcgtctgcagctcccagggacctttttcttcccgttatgatgaatgtatgtgctgtgtttggcttgacgatatcctgcacctggaggcctgagatgtccatcttctcccggacgctgaacttctggcccatgagccgcagcttgggcacacagtaaaggatcatgctgttgaactgcaagagggatggnacaggtgaggaacgagagctgcccgtnagtnccccaggggccccagtgagcttctcacatgggatcctt

SEQ ID NO: 462403 - DNA, 446 bp, Homo Sapiens
  misc_feature (425)..(425): n is a, c, g, or t
  misc_feature (431)..(431): n is a, c, g, or t
gaaatatcaatcgaatcaattttattctcacaacaatcctgagtaaatatttttaaaaaatatattttttgaggaaacagattaaaagctttaaaaaatgtgattcactgaaaatcaaatagtgaatacatgatagagtcagcactaaaaaggcagatatatcaaagagagactgaaataagcaactcattttttgcatcgacttcgaaacacctctttaccatcagtgtttgtaataatcattcttgatctttatacttcacatttcttgggtaatccaaatggctttcataaattctcttacacatcctggaatctcttggcttccattcgggcggggataattccggggtgaggcgggattgcctatggggtttccaggtgtagggaaccggggttcccccgaggccaaaccagttgggccngggcangggggataccataat

SEQ ID NO: 462404 - DNA, 473 bp, Homo Sapiens
  misc_feature (122)..(155): n is a, c, g, or t
ttttttttgaagaggctacttggacctctgtccttcagaacccctaaatcggccctatactagactattcattctttgatagattgggagacgacttcttttgacattcctgcaatcatagnnnnnnnnnnnnnnnnnnnnnnnnnnnnnnnnnnaaatcaggaagggtgagagattctggaatatgatcatgtcaattttggccagttcagttccagggagtgactgtaacagatgcagaaaaataggattgtctcctcctgcccttaattattgaacatgggcattcagtgtgatatactttgctctcatcacagacattacttttctgtcttctcaagggttaggcataatttctaccctccagaggataatgattggggaggggactggggttaccacctgagggaggccttaggttatttgaaccaaggtcaggataaatctactttgacccttggcccaacagggtt

SEQ ID NO: 462405 - DNA, 487 bp, Homo Sapiens
ataatgcaaagttgacactttaatagatccgaaataaacatctgttccaaaataaaagttcaagaaaaattatctgacttcgatattagaaattgaaattttcataaagaaatcttgcatttcactaaatgagttggtaacttttttcaggcagcaaccaaaacaaaaacatttaacacagattccttcaatctcatgatttctgaaggacacaaaagcatagaatatccaaaagctattgtattgggatattctaataagggtacactcaaggacacacatatacaatggaactctgaatttcagtagcaatgatgaacaaaaaaatactgactttgcaatgacttttgcttatcactcacatcgtttagggaatacttatttgatttttttgacatttctatgtattaaaggatctctccagtttagtaacagctttgctaagctacgttttgaaagtgacaattaattttagtggaaattcatt

SEQ ID NO: 462406 - DNA, 515 bp, Homo Sapiens
  misc_feature (356)..(356): n is a, c, g, or t
  misc_feature (466)..(466): n is a, c, g, or t
ttttttttcagaggttttaaaatgtgtattaaatttcatgggtatgcacagtagagaaggcatcctcacagaggcaagagttccaacctggtgacaatggcagtgagccacccgtctagttttcaaccatctaagatagcagcagctggctgttgcccctggactgagatttcttcctctttgctggtggggggcggctggaacggatgggagacacagtgggaggctgagggcccttgggggtatcattctgtttctggaaggcagctttctcaaaaggctgctctggcaactgctgcttctcaacccccttggcccttccaaggggctgatgatggtccttaggtttcagggtnggcctgagtctttggatgggggataacacagccggtgtttgtgtgtctgtgcccttgggaggggcattctgcctgaggaaagcaactttcttggaggactgtaatttagntgatcgttgctttagcttcccagtcacctttggctccctgatcccttcc

SEQ ID NO: 462407 - DNA, 462 bp, Homo Sapiens
  misc_feature (373)..(373): n is a, c, g, or t
  misc_feature (379)..(379): n is a, c, g, or t
  misc_feature (391)..(391): n is a, c, g, or t
  misc_feature (403)..(403): n is a, c, g, or t
ttttttttcttcatgtaggcatttattgctattaaattccttcttagacctgcttttgctgcatcccatcattttggtatgttgtggctccattttcatttgccttaagatattttttgatctcctgtttcaatgttggtctctttttagttattttaggctttttggctagaatttacgttgaggtgcatcatccgtcttttgcctgcttcactgagcacaggccagttatgacccatttcaacactgttaggacagcatcacactcactctcctctcaggggagagagccggttcccccatgttgaataggcctgaataggggtttgcttttatgaaaatttagtcagcagccccgtgggatgggttatcnactccngtctctgtttcngtgtgtgtcccngtctgcactgggcttctctcctctctcaaccaccctgaaaagcacatacacttagggtg

SEQ ID NO: 462408 - DNA, 458 bp, Homo Sapiens
  misc_feature (18)..(18): n is a, c, g, or t
  misc_feature (32)..(32): n is a, c, g, or t
caaaatcccttaaaaagngcaacctacaaaantgctggtgcctgtggacaataattttcttttaacatccccatttccacattagcccatgagaagccagcatctgttccataatcaagggctttacccagcctacaatccagtaaattggtttccgtagttcactggcggttgagactgtctgagaatagaactgctgaagaaagggctttttgactgcaggcatcacagcatccagatgtggctgaaggaactcaaactgttcagccaagaataccaaggattccgtggctaccactctttctgccaacccatacagcgtatccccagatgtcaaaaccactaggtgactgaggtgtggacttggcaccttctcctttctttcttctgctgctgtgagtgtggcagtaggatcagctgaaacttctagatcaataaggctttcttgtattctgttt

SEQ ID NO: 462409 - DNA, 459 bp, Homo Sapiens
  misc_feature (367)..(385): n is a, c, g, or t
  misc_feature (387)..(387): n is a, c, g, or t
  misc_feature (413)..(413): n is a, c, g, or t
aacctgggggaaagaatttttatttatagttacattaaacctcccccaagaggtgaattagatacacatttttacacactcatatttactacattcaagctaggggaatttagataaggctatcaaacagaaaaggaaaatcaaatattgaccacaattttcccaaatcctgatcttcttcataactttgggctctaaaagattactatgtaattattatgggaaattcccttttatacccaaaacatcttcaatgggtttatacagtttaacaaatgggttactctattttcaaaaaggtaaatacttctaggttgctcttttaaaaaggcggggggaggtttctttccatggttcatgccgcccnnnnnnnnnnnnnnnnnnncnttcggtgtcctggatggttggggttntggaatcccttgggggggttccgcccggtcctttttccggggttgg

SEQ ID NO: 462410 - DNA, 432 bp, Homo Sapiens
atatcaaacttactgatatttaatgcaaaataataaatattgagattcttggttgtacattataaaatgcatcacagagcgatttattgatgcaaaggaaccgttttggctcatgtaagtgaaaagtctaggagtcacatctttaggcatcgctggatccaggtgctgaaatgatgtcatcaggcccaaaatgtctctttattgcttgattctgctttcctgagttggtatcaactaggagactctctctacatgctccatggcagctccaggctcacacatacttagtattaagattttctcctcttctttaatataaaggaaattcagctaggatgatctttaggttcaaaattctgtgatatataaataactcgaaataactgctaacagttaatgaaacatctgattcagtaaagatactggttattt

SEQ ID NO: 462411 - DNA, 467 bp, Homo Sapiens
  misc_feature (279)..(354): n is a, c, g, or t
  misc_feature (369)..(369): n is a, c, g, or t
  misc_feature (453)..(453): n is a, c, g, or t
ttttcaagttcacagggcattagtaatctgtggtaaatgaagatagtttaaaatttggggtaaaataaaatagaaacattttctgaatttaatttagatatttttctgggtctatttgttagacaggtttacactatctctgctatttttttaaggccctaaaactgaatggacatagaaaattgaggaaagaaataaaaccgtaacaattataagaggttataaaaggttcatggaacctttttatgttttttcttgtgcagtcaaaaccaattgcannnnnnnnnnnnnnnnnnnnnnnnnnnnnnnnnnnnnnnnnnnnnnnnnnnnnnnnnnnnnnnnnnnnnnnnnnnnggagtttgaggaccntcctgggggcaacatagtggaaactcttcttcacttacccaaagtaccaaaagggatttggctggggcctggatgggtacacanttgttagtccccag

SEQ ID NO: 462412 - DNA, 508 bp, Homo Sapiens
  misc_feature (426)..(426): n is a, c, g, or t
  misc_feature (489)..(489): n is a, c, g, or t
cttttgttccttccactctaatcacttgacctcctgacctcagtcatgctaataaactcatgcctcatttagatttattttcctagtggaagaaaatgcattgatctgtgaacacaaatacatggtttatctgttacagttctcattgcatgtcaacaaactgacattctgatgtgtacatccatctcttatgagtctgcttagtgtgaatctgccccctctggtagtactgacaagattgtgtttctcagcccacagagctaagacacagactcatgagacccagtctctgtctataccactagagttctactgcccctgaatggcattgcctggcacagacagctggccttcctcaggcaggacacacagcctttgttaccatattaactctttcaggacttggctatggtggtaccaatggtnttttccttggaaattgctcttctggaaaatggttaaatggctaaaactggtttaccatggctntttgaagtgggtgtggcag

SEQ ID NO: 462413 - DNA, 427 bp, Homo Sapiens
  misc_feature (147)..(183): n is a, c, g, or t
agtacctttatgatttcatttccttctttatccatctggtattcattttgacaaatggtgtgagctgggaaataacgtgtattatttatttatttatttcccggatggttactcaattctttcatcactgttaaaaagcacgtattnnnnnnnnnnnnnnnnnnnnnnnnnnnnnnnnnnnnnaactattcctaaagtgaacatcttgaacagctggacactgaaggtaacgcagctctagactttgggtcatcattagaaataccagcttaacaggcagaaatatcagcttaacaggcagatgtgggcactttctaacagatgtgagcttttgaattcaaacggattgacattttgacattcaaatccagctttgcaggctcactgctgggtgccaactttgaggcaaaccaatggttcccccctg

SEQ ID NO: 462414 - DNA, 189 bp, Homo Sapiens
  misc_feature (143)..(143): n is a, c, g, or t
ggcgtgagtgggcctgtattttctttcttatttattctgtggtaaaacttttaaaacacagacaacatctgtgtaatccaaaaacaaaacaggattccccataggagttgcttttgaaaggtgacttaggagtcagacaatcnggggttccacaaccaggggccctttacggggggggatttttcccgg

SEQ ID NO: 462415 - DNA, 471 bp, Homo Sapiens
  misc_feature (21)..(21): n is a, c, g, or t
  misc_feature (363)..(363): n is a, c, g, or t
  misc_feature (376)..(376): n is a, c, g, or t
  misc_feature (393)..(393): n is a, c, g, or t
  misc_feature (416)..(416): n is a, c, g, or t
  misc_feature (424)..(424): n is a, c, g, or t
  misc_feature (432)..(432): n is a, c, g, or t
  misc_feature (447)..(447): n is a, c, g, or t
agttatttgtgaaggtttttntttgccttgttttgaaggtggcctgagaatgggagcttctctttttcttggggataatagatacatcaacttttacaagaaaatctctgtctcttcaacaatgatgtccagtgtgtgctgctgagtggtacaaaaggaaatagtacttgattcctgttagaaacaggagtggtagaaccacagtcttcccagggccgcagcctctgtttatagaagcttctgaatgtaggaaaagctgttgaatttcattttaaatgtaaataacccttttaaaaagcgtatgggagttaggccagttccccctagttaattggacataggggaggacattttgctgaaatnggtaggggttggnccccttttgtggacccntgatgtttgccaagttgcccccncccggggnattggggnaattttggctttccnaaggcttttgggggtagaaggggc

SEQ ID NO: 462416 - DNA, 413 bp, Homo Sapiens
  misc_feature (19)..(19): n is a, c, g, or t
  misc_feature (28)..(28): n is a, c, g, or t
  misc_feature (70)..(70): n is a, c, g, or t
  misc_feature (75)..(75): n is a, c, g, or t
  misc_feature (82)..(82): n is a, c, g, or t
  misc_feature (342)..(342): n is a, c, g, or t
  misc_feature (358)..(358): n is a, c, g, or t
ggcccattcgaaagaagcnccggccaanccgtcaccccttaatcattcccgaaaggaaggggccattcanagctnacagctncatcagggtcaatcagaaaggggcgcccgcacgcaaaggtcacctgcaaaccgaagcggcgcacggataaggtccgggacttgaagtctatctccaaacattcaggctcctcctccgactcctcctcgaaaactggctcagaggcgccaccattcggaaggagcccaggccaacgcgcagctcgcccttccgcaccgcgagggcagcagccgcctcatgcgactcgagaacgctagagggcgccgcttccgggaaggccnaagcggcttccgggtntcgcgcgccgacctggacgcagagaagccagagacttctcgcttcccggctgccg

SEQ ID NO: 462417 - DNA, 552 bp, Homo Sapiens
  misc_feature (375)..(375): n is a, c, g, or t
  misc_feature (391)..(391): n is a, c, g, or t
  misc_feature (413)..(413): n is a, c, g, or t
  misc_feature (440)..(440): n is a, c, g, or t
  misc_feature (460)..(460): n is a, c, g, or t
  misc_feature (466)..(466): n is a, c, g, or t
  misc_feature (484)..(498): n is a, c, g, or t
  misc_feature (514)..(514): n is a, c, g, or t
atgaaaccaaccccaaacacagccaagcagagagatggaaagaactaggaccctaattacaccactgagcagctatagcaaccagttccagagccctctgacttcccgccaaagtgagatgataagatactgtttaatttctctcttttatagccaaacacaccaaaattgacacagagatgtgagccatacctactactgttactgctccatccctaggctccaaccacagtgcatgggtacatgggtaggagaggccaacaaacacttggaaggaatggaatgggtggcattattggagtggggatttttccagggggcagacctgggagacaagggtttcaagtgcgtgtgtttgtatttaagggaaattgntccccaggggggacantaggcaggagttgggcaggaantgggggacaagggggggccaggggagnccaaggaacagagatttcanttcgtntttaaacagagccccccnnnnnnnnnnnnnnncaccgggggattagtntttttacccgattccccggggggacttttggggttttt

SEQ ID NO: 462418 - DNA, 337 bp, Homo Sapiens
  misc_feature (214)..(214): n is a, c, g, or t
  misc_feature (309)..(309): n is a, c, g, or t
gggctgaaggcgatcccttctgccctcagtgtcctgagtaggtgggactacaggcccatgccaccatgcccaggtcatccagctttgttttggtcatggtatatcttatccttctttgttaccatgatgtatcttttctatacttttactttcaaccaatttgtgttcttatacttaaagtgggatttcttaaaaacaggttatagttgtcttnttttttttaactctctcatatctggccagtctggataatatcagccctttaattggggtatttaggactatttacattttatggctattgttganatggggtgcctttaaaattacccacctg

SEQ ID NO: 462419 - DNA, 429 bp, Homo Sapiens
  misc_feature (329)..(329): n is a, c, g, or t
  misc_feature (414)..(414): n is a, c, g, or t
caggatctcgtgtggattttctttcctacgctggaaactactaaactctagctattcagatgccacttcatattctaaaatccaaatcaaatagaaataaacagtactgtatggcaaaggtgtacctcaccgagaactcaggtccactgagcccccagcgtagatagacattccacctcccagatggtggaaaaaaggattgatggctggttctgcttccaccctcagagactttgcccaggacaactttctaccctgggatataactttttttaagttttccagaaccaatgtatgtgggtaaatatacatctatttctcaaattagntgtttaaaaataaaaacccaaagtaaggtttgactgtaacagaataggacggtgccttcctgtttaaattcatttcatatgtttnctagttaggtgggtt

SEQ ID NO: 462420 - DNA, 522 bp, Homo Sapiens
  misc_feature (13)..(13): n is a, c, g, or t
  misc_feature (32)..(32): n is a, c, g, or t
  misc_feature (38)..(38): n is a, c, g, or t
  misc_feature (56)..(56): n is a, c, g, or t
  misc_feature (66)..(66): n is a, c, g, or t
  misc_feature (82)..(82): n is a, c, g, or t
  misc_feature (92)..(92): n is a, c, g, or t
  misc_feature (102)..(102): n is a, c, g, or t
  misc_feature (125)..(125): n is a, c, g, or t
  misc_feature (131)..(131): n is a, c, g, or t
aaggccccttggnccggggggtcccccaaatncccccnaacctggtaaaccttccnaacccccctnaaagcctcctaaaaangtcctgggcntaaccccaangcatcctgccctccacggtaggnaactcncctttaagaagtcctctgaatcctaaagagaaacagaaatgtttggaatgggtgtaaatgaagaatattgaagtgactttctcctttctgcaggaccggatggtttcccatggtcatggacagagaagtatgatgtggcagtggaggctgtcagattactgatacttatccttaagtgagtcctgggaagaggggaggccagtgtctcagacctttgaccttccagggtcatctccctccacctgtcatagctgactcttccatctgtgcaggttgactgaggtcattcctgagttgcagtatgttgatttctgtcttctctaactccccatactcctttgtcttccgctcttcatttagaagttttttgtgagttatgtccttgttgctt

SEQ ID NO: 462421 - DNA, 436 bp, Homo Sapiens
  misc_feature (21)..(21): n is a, c, g, or t
  misc_feature (380)..(380): n is a, c, g, or t
acggcacaagaaggcatctgncatcaccaccattgacacaagaagtggaccttcattccattgctgggccgcctgttcctccacgacaaagcacttctcaacatatccctaaactccctccaaaaacttacaaaagggagcacacacacccatccatgcacagagatggaccaccactgttgggagaatgcccattcttcctgagttcctctgtactggggatgtatattttcctagccccaaatccattgctggcaatggatgcactgaatgtgccagcactggaggagttaaaatgagaactccaaacacttaacgactcttcttcaagatggcagtattaaggacaatggaatttttaacctaggatgttaattatnacaatgggaatgggtatttccagttttaggaattatggggaaaggaccgaccttgg

SEQ ID NO: 462422 - DNA, 203 bp, Homo Sapiens
ctcacacatgacataggaaacaaacatttgtagaaattttcatcctgtttggacttcatcctaaagattaataccttttaaaacaccataatcaattaccagactttgcttagggttcggccctcatgtctaaggctaaactgcagaggattgggcaaacccaatgccagtcctctctcttaatccactttgtcttccatatg

SEQ ID NO: 462423 - DNA, 494 bp, Homo Sapiens
  misc_feature (20)..(20): n is a, c, g, or t
  misc_feature (29)..(29): n is a, c, g, or t
  misc_feature (39)..(39): n is a, c, g, or t
  misc_feature (47)..(47): n is a, c, g, or t
  misc_feature (55)..(55): n is a, c, g, or t
  misc_feature (90)..(90): n is a, c, g, or t
  misc_feature (95)..(95): n is a, c, g, or t
ttgacctttttttaagggtncaaaccatncccgaggggncgggatantaagattncaaagttcaagtgacctggattcccaagcctaaangatgnaaagaagagagggccacatttgaaaaccctgacacacacactgtatgtccctactctttgcttttataaacagtaagtaaaattttcaaataatggaagccttagtcttttaagggtcaaacggaagcagctttagcccactgttgaaaagcatttctgaaatgtattatatttgcccttgcctcctttgaaaactgactgtaatctactctcttcttgatacatgggttataattacaaaaatttactatatttatgaacttctaattcagtagataccctcaggttctatggaggcacatgtgttttttaaaaaattaatttttttgctgccccacctaatacattcatggctagaaatagctgtgtagcagaactggctgagtcatctccttcttc

SEQ ID NO: 462424 - DNA, 502 bp, Homo Sapiens
atttacatatattttctggggtaagagcctctgaaatatcttatttatggttcactgaaaaagaaatagcctttaaaaagaggagtctgtgcgtagtcttgtgaatctcacagagcattagatgttcgtgaagtgtccagcctcttcctgctctcaaggaacgcacatgcaggtggggtgacagtcccactgtggggtcgtggaaagggcaggcgtgaggaagccggagtatgatccagctcatccccctggctctgcaacccaggcaggctgctctttccctagtgactcctttttctaacaggcataatgccattctatctctgtgattctcgtgcaccatacaggattggaactcagaagaggaaggaggctgagagaggccctgtgtctaagaaattagctttcataagaagaagacggggccagaatttcagcccatttcagttcctgagggcattttgaaggaaggagcaaggaaaggtgcaagagcatcacacat

SEQ ID NO: 462425 - DNA, 519 bp, Homo Sapiens
  misc_feature (47)..(47): n is a, c, g, or t
  misc_feature (94)..(94): n is a, c, g, or t
atccatgaactttggccccacgcctaaacatctttccctgtaaagtncgactcctggttaagagacaaatattactcaagaaccccgtattagnggatcaaacactctgtaagtccctcagatagtggtgctggctgtggacttatgggccagaaaaagccaaacatgtggaccccagaatatgtgttaatccccaaactagaagaaatgctgtcccttcccaaggtgagggaaggtacagttttagaggcttcccacttgatcttcccccactaggaaagcacttaaccaaactggtcaaggagcccaagttgagaattctgcccaactaccatgtatgttgattcccaattacaaaactaggaaccagagaaaggactctgataacagagacacactgtgagttaaatctgggccagaactctatttattataattatctgagtctcatacacccctccccattctaacaagagtaggtcatagcactttaggtccccagatttcaatgtcatttca

SEQ ID NO: 462426 - DNA, 522 bp, Homo Sapiens
  misc_feature (15)..(15): n is a, c, g, or t
  misc_feature (26)..(26): n is a, c, g, or t
  misc_feature (37)..(37): n is a, c, g, or t
  misc_feature (89)..(89): n is a, c, g, or t
  misc_feature (132)..(132): n is a, c, g, or t
cccaagaatacctgnaaataagcctnccccccggccnaataatcccaaataaacccgtccaagttggccccggaaggacctctggccanttgggaaataatacgaacggcctttaagggaagggaactgccnggaaacaccttaaataatagcctcctatttttgaaattatccaaagttcctacccttttgaaagtctgtgttagtggaactccctatttatgagatgtgctgtgccttaaaggtttgcctattgatgaagaggtcccaacagagccctttatcgtaagtacggcagcattctccctgagagataaatagccgtgctaaaaggtatgctgtgtacctaggctgcaaattactagccaagtacctcataacagtatacttcaaaaatacctttatgcttcttgtttgttctcttttccatagagatgaatgacatttcttaaaacacagaggggtggaagtgtgttggtcattgctggtcatcgacattaattgggtttgaggaacatgttt

SEQ ID NO: 462427 - DNA, 490 bp, Homo Sapiens
  misc_feature (13)..(13): n is a, c, g, or t
  misc_feature (27)..(27): n is a, c, g, or t
  misc_feature (32)..(32): n is a, c, g, or t
  misc_feature (43)..(43): n is a, c, g, or t
  misc_feature (49)..(49): n is a, c, g, or t
  misc_feature (57)..(57): n is a, c, g, or t
  misc_feature (108)..(108): n is a, c, g, or t
  misc_feature (128)..(128): n is a, c, g, or t
cctcccccccaanggggccttacaaanggccnccttatttttncaaagnccccagcnagggaaaaccagtattccctagcaaagaccagaccattaccaatgttgtgnaaatcccgggagcatccccnattaccctttgcctgtactctgttggttaagaagccaagtccacatatccctgcccccacactcaaaggaaggagatttacacaagggtgtgaatccccaggaagcggggatgatgaacgttacccttagactcggttagcccacacccagtaattccagagttacccgggaaaatgacacatttttgcctttcttggcttagataggcagagtgcctgtgatagaaagctttcaacagctgaatgagacagcttaaaagcatttgaaggccatgttaagtcagtcatggaagaatatgatgctaaggatttttgttttgttacaaagaatcattctaatcaaattctaaggatgtacacta

SEQ ID NO: 462428 - DNA, 479 bp, Homo Sapiens
  misc_feature (385)..(385): n is a, c, g, or t
  misc_feature (468)..(468): n is a, c, g, or t
agggccttgagtttgtctggaatactctctctcctcagagagaggcttatttccctaggcttctgtgtcctcatgtatacaatgaagttcacttagatgacctctaaggtcttttccagccacaaaatagtattgctgtagtactctggaatatatacagctccagggttggaatcctgcctcaactcctcaaactaatgtctaaggccttctataatctaaccccacctaattatatggatgtatgtccaaccatttgggacataatagtctgttctagttagactggtctctttactttatctttcccacagatgattcccatttggggttatgtgttctttttgttccttccacttaggaatgcccattttttctctcactnacaaataaccccctagggtctcagtcaaaatctcctatttccttgaggaattcacttggatattatattttgctcattatctncctacaggcaa

SEQ ID NO: 462429 - DNA, 413 bp, Homo Sapiens
  misc_feature (374)..(374): n is a, c, g, or t
ttaaagccagcttttcttcagatttttttggtgggcaggtcgtgaaagacaggtgaggaagtagatcttgggctcagcatgcctctaaaagtataatttcttttttttaatgtggaaagaaatgcataactctgtttctgttcctgtccccctctctgcctctgtggtgcctgagatactggggatcccacagctggggccactcagaggctaccagggaacgcttccagtttgcatctggctgttagtgccagggaccagaaacccacagacctctttcacagacctcctgaccgtgatgtccctgaagccgggaagttgttcacacaatgaagcaggaatttgagtgatggggtgttttgtggaacccagtngaactgtgttaacacagtggaactgtgttaattttgagt

SEQ ID NO: 462430 - DNA, 518 bp, Homo Sapiens
  misc_feature (11)..(11): n is a, c, g, or t
  misc_feature (21)..(21): n is a, c, g, or t
  misc_feature (54)..(54): n is a, c, g, or t
ccggtccggantccgtgaaantaaaccccgggccacaaaataatccacaaaaancggtttgtgaattccagccgggcagtcgcctgcccccttattcctttttaaaaaacatgttgaagacctttgtatactgtagcccttcccaagagtccaatacttttacaaaagaagtaaaagagtagcgagtacccagcaactcactcttccttgtctgaggctggcgagaagcagtcagttttatacattttcgatcaacccacggaggaggcaaatgtaaacagagttttttacactctccgaaaaacatgttactactgtagcatatgctgtttggcccaattaaaagtagaatggagagcaatttgtttggttggctttttaagttttaccttgtgaagattttaaaacaagggtattactagttcttggcaggagaccgtccaatcagaggctctgtatttataaataacccgtgtgggattatgctctccagtgaatataactggagcctaaattca

SEQ ID NO: 462431 - DNA, 531 bp, Homo Sapiens
  misc_feature (89)..(127): n is a, c, g, or t
  misc_feature (162)..(172): n is a, c, g, or t
gtagctgtggattatattccatcaggcaactggttgtgattctatcaagggcataagtaacaaaaataactcctttatgctcagaatgnnnnnnnnnnnnnnnnnnnnnnnnnnnnnnnnnnnnnnnctttacctgttttttacagatgaaattgcaggggnnnnnnnnnnnctgtttgccagataaaatatctggctttcctgtgttgaaataatccattatttagaaaatttcctttcccttttgatgactgaaattcttaccctagtaagacacagaagaactaaccatattaaaagactactttgcagagtcatttttcattctaaaggagaatgttcttttagtgaattccatacaggaatattagtctggcaatgtcaaattcttgttttttaaagtagtaaggctatcatgatattcaaggccctaaaattgtttcaatcattgaacatctctactacacaaatgccagtcagggaacccatgtcatttgaaggtagctatgctaatatgttttaccatggggt

SEQ ID NO: 462432 - DNA, 552 bp, Homo Sapiens
  misc_feature (370)..(370): n is a, c, g, or t
  misc_feature (412)..(412): n is a, c, g, or t
  misc_feature (491)..(491): n is a, c, g, or t
  misc_feature (505)..(505): n is a, c, g, or t
  misc_feature (515)..(515): n is a, c, g, or t
agagaaaggagttatttttgtgttttgaagaaagttgacaggatggaagatctgaaattatggctggggattgtagtgatagctggtagctgaaaccacccaaaaaagctagaaaagtgttctcttatgcctccagagatacctagaaaatatgaagaatgtggaaaagagcaagatggaaccctcagagtgtttcagataaggtctgttggtatctccataagcttttctcctatttgggagaaaatagactctcactggaaactcttcaatgtttttaccctccatccttttcttaggcaatcttaaacttcaatgggcctcctgtttccccaacactgcagtctgggcatctgactttgtcttcccnctgcactcatttctgtgaatcatgaccagggatgaaactganatccctagttcctcttccccatttcttctgacactcccctgcctgaggaatcagttgagttcccaatacctcttccttnagtctctattcatnatatgggtcnagggttgaggacttccttgggaaggcaggaacctgag

SEQ ID NO: 462433 - DNA, 411 bp, Homo Sapiens
  misc_feature (23)..(23): n is a, c, g, or t
  misc_feature (52)..(52): n is a, c, g, or t
ccccgggtctgtgtcctggtggnacgaaagattaattatacaacatattccnggtcttgaaatcccacttagctcaggcagtccctgcatacagcatcatttcccagcaggttccaagagcagttggctgtgctttctgataatattataagcacgacagcaaaggtcccacaaaatcttgaaaatgctgtgggtttttcccaccctctgtaataaagtattccatctctgaagtaaaaatgaaaggagctcggtccctttttatccctccaaatgtttgtgcatgacctaagaattttccaaagtcaatatgaaacatgtggcccgactttgtcagcatgatattatcattgtgacggtcacatactcccaggatgaatgttaccacacaccagccagcacaggagtaga

SEQ ID NO: 462434 - DNA, 508 bp, Homo Sapiens
  misc_feature (485)..(485): n is a, c, g, or t
ttttagaatcatgtcacttgtaatattttaggtcatctaatccaatcaacaaaggtatattgactctgtatttgaagcatttgtcatgactgttgcattatcagttattcaggagtttctgtatggggcacaaattagctcttcttagcagcagactaatctgaagaaatgactcccacgaataagaatctgtctgaatacgtagggcttttattaggtcacatctcactaagtgctgatcagttttgattcagttggagtagagcacataggttctttggagatgattgttttagagagttgcatgaaagaatagaaatcaatgagccagcagccttctcagagcaatgaaaactgccttttcagattagttttggatccatctcagctccattaccctttatttctttcttttgtttgtttgtgtatcctagggagcggctcagccccaggggcaggcacatcagagacacctgggacacagnccttcctctgccgtcgtgctggg

SEQ ID NO: 462435 - DNA, 459 bp, Homo Sapiens
  misc_feature (426)..(426): n is a, c, g, or t
tctgcataacgcatttactaatattttctaaatgagcaatgtaggctaagaaaaaatcatgcataagtaaaagatccactcaaagtacaaggtaggtcaatagatcttaatgtaactgcatgtgaacaattcactaacatgattttattttttcacattgtaataatttttttaaaaaattaccacttgttgaatgttggtagagttttaaaaaaagaatatccaaaattatctgaaaaggctactaaaaatatttcttccttttccgactatatgcatatgctagggactgatttttgtatggacaataggattgagtgaggaggaggatatgaggcctgggagcagtgggttctctgttgggtccattaactacggggtggtttccaacacccttcaggggttgccatgaggtggcacaaagangctaagttggaactgtggatggcttcgctggga

SEQ ID NO: 462436 - DNA, 385 bp, Homo Sapiens
  misc_feature (15)..(15): n is a, c, g, or t
  misc_feature (42)..(42): n is a, c, g, or t
  misc_feature (297)..(297): n is a, c, g, or t
cccttttcccgaccnatatgccatatgcctaggactgatttntgtatgacaatagattgaagtgaagaagaagatatgaggccctggagccaggtgtcacgccctataatccccagacatgcttcttttaagaggtggctagaatgaggatattatgttctctaggccatacaaagctattttgtgatttttattttctttaggacagtggttctctgttggtccattaactacggggaggtttccaacacccttcaggggttccatgagatgcaaaaaaaagataagttgaactgntgacttcgcatgaatctagacagtggtaccaagttataccaatagtcattgtattcttcactgctacacactcacagattaaaaaaaa

SEQ ID NO: 462437 - DNA, 487 bp, Homo Sapiens
  misc_feature (23)..(23): n is a, c, g, or t
  misc_feature (59)..(59): n is a, c, g, or t
  misc_feature (67)..(67): n is a, c, g, or t
  misc_feature (245)..(313): n is a, c, g, or t
  misc_feature (351)..(383): n is a, c, g, or t
  misc_feature (396)..(396): n is a, c, g, or t
ggggtcccttcccccacctgttnccccccgggcatcaacctcctccttaaacaagtganacggggancatcccctcctaaaactaagaaaaaccctgcaaatgttaccagccaacttcaaaattcagaagaaaacaaaaacttccctcatggatctttttgccccctcctatgaatcctaaatcccattcaagcacggtggccccatgcttgtattccctactgctttgaagaaggccaaggcgnnnnnnnnnnnnnnnnnnnnnnnnnnnnnnnnnnnnnnnnnnnnnnnnnnnnnnnnnnnnnnnnnnnnnaatttaaattaaaaagttaaccaggtatggtggtgcannnnnnnnnnnnnnnnnnnnnnnnnnnnnnnnntgaaaggactgcntgagccccaagagcttcaaggcctacccacaaagccatgatggcacccactgcactcctgcccgggcgatggaagaagaccctgtctctta

SEQ ID NO: 462438 - DNA, 462 bp, Homo Sapiens
  misc_feature (14)..(14): n is a, c, g, or t
  misc_feature (29)..(29): n is a, c, g, or t
  misc_feature (34)..(34): n is a, c, g, or t
  misc_feature (52)..(52): n is a, c, g, or t
  misc_feature (64)..(64): n is a, c, g, or t
  misc_feature (72)..(72): n is a, c, g, or t
  misc_feature (199)..(297): n is a, c, g, or t
  misc_feature (335)..(402): n is a, c, g, or t
  misc_feature (444)..(444): n is a, c, g, or t
gccagtcctgcgcnaacacattgggtccntcccnacctgtttcccgggcatnacctcttctcanaagtgacnggagcatccctcctaaactagaaagcctggcaatgtacagcaacttcaaaatcagagaaacaaacttcctcatgatctttttgcccctctatgaatctaaatccattcagcacggtggcccatgctnnnnnnnnnnnnnnnnnnnnnnnnnnnnnnnnnnnnnnnnnnnnnnnnnnnnnnnnnnnnnnnnnnnnnnnnnnnnnnnnnnnnnnnnnnnnnnnnnnnaatttaaattaaaaagttaaccaggtatggtggtgcannnnnnnnnnnnnnnnnnnnnnnnnnnnnnnnnnnnnnnnnnnnnnnnnnnnnnnnnnnnnnnnnnnnccacaagccatgatggaccactgactcctgcccgggcgatgnaagaagccctgtctctta

SEQ ID NO: 462439 - DNA, 423 bp, Homo Sapiens
acaaatacaattagctattgcaaagccttttgggaattattcccagtgtaaataaacacataaccatatagcaagagccttgataaagtccaaaaacatgcaaacttggagtgtctaagagaaaagaccacaatgtaaatgaaaaaccaaataaactcgggcaaaccataggatagggccctgtctgtgatggcctgcatatgatgagccatagaaaaaggatggtgaattctggataataagaaatgtcaatgagatggaagaaccacctgttttatgtaaagctccaaataaccagatcacagtgggacagccacttcaaattattgcctttcattaattacagggtattttttcaggattaacttcaatttcacaggggaggctttaagggcaggcccatattttggttaggccttttcc

SEQ ID NO: 462440 - DNA, 516 bp, Homo Sapiens
  misc_feature (86)..(86): n is a, c, g, or t
  misc_feature (107)..(107): n is a, c, g, or t
  misc_feature (122)..(122): n is a, c, g, or t
  misc_feature (137)..(137): n is a, c, g, or t
aaccaacagcggggtaccctaaaagaacgccttgtaaaagaccgttttcgggaaacagtgccctgtagaatgaatcaccaaccccnctgtgaatcctactgaacccnggaataaacaaaatntgtaccctggcaaancctttccaactgaatgtttttccttctaattacttttttgaatagttggctcatcatcaaaaatattatcatcagaccagtcattaaaagtttctgaatttaaactgtctatgtcttctggggatttgggaggtggcaaagtgttcaaagcaggcaacattagaggtgctttccctttattttcagtgttgtgaacattctctttcatgccaggccttttggagcagtattgaacaagtatccacacaagtactttaatgaggtcacctttaaattcttttaagttttcatgagaatcaattatgcctgatagaacattcctggcatcagaatacaatttcacaggcaaaacagtacagggtgtcaagacatttccaaa

SEQ ID NO: 462441 - DNA, 462 bp, Homo Sapiens
  misc_feature (21)..(21): n is a, c, g, or t
  misc_feature (40)..(40): n is a, c, g, or t
  misc_feature (249)..(249): n is a, c, g, or t
  misc_feature (251)..(251): n is a, c, g, or t
  misc_feature (420)..(420): n is a, c, g, or t
acaaaaaggaaccctgaactnaacttttgggaagcccccnaaacccctgtgtccccaggggcccctcggcagtgctcccatgccgaacacatgtagctgtcaattgggcaagagagtgcgttcggctgaccccagacttccgcacagtcagtaagtctggtcctggcagctccgtggggtggggctgcatcgtggggtgctccagggaaaagtgggaggctgatcctcgcgtgggccgctgggtgcagnancccaggcttggggctgtcggggctgtcggggccctcgaccccaggccagaggaaggggctgcccagtggcgagtggggctgggggctgagggtcttcatctccagctccagctcagcctctagctcggcctcctccttggcctccttgttgctctcctccaggtgcttnatcagaacggcgatcaccacgttgactagcacgaactgggcc

SEQ ID NO: 462442 - DNA, 409 bp, Homo Sapiens
catgtcccatcactttggcaggttctgtgcgaagcaagtttgccatccaagaccagaatctggttggcgtgaataggcactgagccagcgctcgatgtgggtggcgtaccagcccagggcccaggcagcggttctggagggcacgcagcttcgaggatgcgtcagagccggcggtaatcacctcatggaaggtgtactttagggccactgggtcgtcatgggctcgctggtgctggtaccaggaataggcccggtccgcggggttgatgaggatggtcaggaccttggctttgggcaagtaggctgctgccgccggggcgccacttctgaatcaaagtagttggcgcttttctcaaagtagaagtcggaggtggtgttggaagggatggggaagaactccatgtaccag

SEQ ID NO: 462443 - DNA, 398 bp, Homo Sapiens
  misc_feature (388)..(388): n is a, c, g, or t
ttcaatcatgccatttaattttttaaatacgcaagtgtagttttataatttgtgtctgataattctaatatctgaagtcttagtaggtctgtttcagttgtcctgtaattatgcatgtttttgcccatgttgctttgtttccttgtatgcttggttatctttcttactgcccttgcaaaattatttggagagtcctgggaggcttaaatgaagataacttttaggaataatttgcatttgcttttgccgagggatcttggggatcatttcaaccaaaatcttaggcttgaaattccgcaatcaatcaagggtgatgaggaacctgggtcagtaaatcctaatgaggggccagggcttttgcccaaaggattttttggacagatgtttnccctcctttg

SEQ ID NO: 462444 - DNA, 510 bp, Homo Sapiens
  misc_feature (55)..(55): n is a, c, g, or t
  misc_feature (126)..(126): n is a, c, g, or t
  misc_feature (314)..(324): n is a, c, g, or t
ggccaaaacagtgttacatatgggggaaggcctcggtcgaatttgaagttatccnggcaaacagttttcctagcctaatgggttgtccaaattcatttgcatcagaaccttttatcctggttgatnaaaggtaagctctgtactgactagcaatggaaagggaacggatgcccacaaggacctgctttaaaaccaacatcaacctccagaagtggatcctgagtggtttgatttatgcccctgacatacccccaagtcctggagaaagtaagttcaaaggaagacaaaaatgtatgtaaactaagtaataaagnnnnnnnnnnncccaacagaattcaagctatacattttctggattcgctatgacttccacagacacagaaaacaaaacgaggaagaattatgatcaatttatttgatcagctcaagaaactatattttttcatgtagtcaaattttaatatttattttagcagacaatatgtgagtaatttcttctactaatcattt

SEQ ID NO: 462445 - DNA, 213 bp, Homo Sapiens
  misc_feature (22)..(22): n is a, c, g, or t
  misc_feature (33)..(33): n is a, c, g, or t
ctgcaactacgggaactctggncaaaacatccnctggccttcctgaagccaatgaaatacccagttagtgacttcctcagtccacggtgaataaccctataaagaactcctatatttcccaatatgtctcttggtggggggaaggaacagtactagcccacattaaaaaaacatgtaggtaaacgtaaatatttaaatgtagaaaatggggcc

SEQ ID NO: 462446 - DNA, 419 bp, Homo Sapiens
  misc_feature (20)..(20): n is a, c, g, or t
  misc_feature (29)..(29): n is a, c, g, or t
  misc_feature (55)..(55): n is a, c, g, or t
cccacgtaaaaatatgcctnacctgtttntacttcctttacaggttttccttgantcccagaaaagatagctgtgtcctgcctgtatcccctgaagtcccacagtgcccagatgatgagaaaggcccatgacttatgtagatacagctcaagaacactcacaacacaggttgcctaaggaaaatcttcctaattagatgtgatcagtatgtctgttactcttttctccttgctgctatagaagttggagcagcagaagctgggaaccagagcttcattcttggaacattggcacgtgctgtgtgtttcctgagacccaaataacctcaggtaggttatgagctgtgggcatttctcaaaaagggttggaatagggagacttcccaggaatctaagcaaacttcaagcaggattatagtc

SEQ ID NO: 462447 - DNA, 485 bp, Homo Sapiens
tcggaggtagtgtagggagagatacctgggagaccagtgaggggaaccgtactattaacagtaatattttaactacttagcaatggatatctattaaacaaaactgatgtaacacttactacatactgtagatgggaaagaaatggtataactccacaaaagaaccaagaggagagagttcaaggatatggaaaaatgagaaatcttctctgggaccatttttcccccaactccgggaagtagcagctgatggtggccatcattataaagataaatgataacacctgccgaggaactccaccaagacactcgtagttcttggtaaacaagaactaattaattttcacaacacccttgtgaggcgggaaagtagcatcttcctgggttttacttgacaggggaaggcttcagcacattaaacataagtggattgttggcccctttcacacagttgggagctcttgacaggggtgggggattaagga

SEQ ID NO: 462448 - DNA, 579 bp, Homo Sapiens
  misc_feature (17)..(17): n is a, c, g, or t
  misc_feature (524)..(524): n is a, c, g, or t
aaaaagtgtaatccccngggaaaaatagccctccccctaacatggcctccttccccaaacagctgcgggttcctgggggttaaagcaggcatgctgcggaaggagcccaagaaccctagtctgtgggctcaggtgagctgcaggaggctcagaactctcccagttaaggtgcgaaggccgtgaagccacaaagggccattggttcctacagagagagaggcccaagatttcaaaaaggcgacactttgaaattttaggttagcctccactgataaaaacagttctccttttatttatctcatggataagtgcaatttaactactaaaatgcacctcccctgactaggactcttgctacagcagggtgatggtgagtggtggagaccatgggacacaggagttcttgcttaaaaccatcagggccaaggattatgtaagaatagggattatatttagaggaccttgaagaaacaaccatgcccggggcagaactgtccccagtggctgcaccatttccagaaatngtgaagggactccccgcttcagggtggagacaattcttttacctctgtattcccc

SEQ ID NO: 462449 - DNA, 348 bp, Homo Sapiens
aatatacatgtataacaaggaataaattttttaaacgttataattttgataatttataaaattttaaaatgggaaagacaacctgtatgtggtgtagacatatattatgcaagtgtaagtatattaaattgtgtgggaataacagacatcaaattaggatagtagttatcctaagaagtggacgaggggtgccagggtacacggatgcataactgtgttgccgatatgtatcatattatgccatatattccagttatttcaaaataatgctatttctaacatttcaaaaaatgagtttacaaattgatttaaacatgtttatattttatgtttttatatttctacttt

SEQ ID NO: 462450 - DNA, 679 bp, Homo Sapiens
  misc_feature (21)..(21): n is a, c, g, or t
  misc_feature (29)..(29): n is a, c, g, or t
  misc_feature (103)..(103): n is a, c, g, or t
gggacacgtgcacgagtgcgnctcttctnaaaagctgcctaggaggccgttctcattgcagtagagaaaagactggatgcgagtaagcccagtaggttgaggntctttgtcttggcaggctgatgaggggttgtttatgacacctcttgctaaggctaaaaagcttgtgtacaattttctgcgcctttaggaaaagttgtttcatgctgttctccagttggttccataaacggcgctgaaaattagaatcccattgtcccacaaatgccattatagtagatgtgttgaggaaataattcataggtagccttttcataaataacttgaattcatctgattcctcaaagtcactgttgtaagctttcccaggtttcagttattcgaagaagattctcttccatggcttgaatgtccatggaggggcagttgcattctggaaatttgggaccacagtgacaccagcagtcattttccttgcagataaactctccctctgaattgcaagcaatgtagctcaaagctgcttgtacaaaacgttcctgaagatagtctgggagaagtacttgaagcccttgcaactgaatcttattctcaggactctgaaccagaacagaactgacagaatctaggttgtcatagttactgcagccaagaggaccagtccgtgtttctgttacct

SEQ ID NO: 462451 - DNA, 544 bp, Homo Sapiens
  misc_feature (459)..(459): n is a, c, g, or t
  misc_feature (470)..(470): n is a, c, g, or t
  misc_feature (492)..(492): n is a, c, g, or t
  misc_feature (504)..(504): n is a, c, g, or t
  misc_feature (509)..(509): n is a, c, g, or t
  misc_feature (518)..(518): n is a, c, g, or t
gcgatgtgttctttgtacctgtaggtctatgatgtccaaacttaacagatcacatgcccctcttagaagaaatatgagcatgctccctcatgcagatagtatacacatcataaacaaagagtagaactttaaaagaaggtaaataatcatacacagaaatcctaacattatattcccaaatctcaaaagatctcctgtgcacctgactttggagacgatgctttaggtaaaaagcttaaacattgccttatattggatcaggaacccttacagtagagggtccagtcttctagtggggtttaatgtttagtcagtgtactctgagtcctcattgttcaggaaaaggcacctcttgaggaactggacttcctggaactcccagtccatgttgggtaccctgggacagtggcctaaacttcctttacaggaggggagttgaaaaaccttttttcggggaanggtttgagagncggctttttggatggttttaanggttccaggggnggggnggaaggggnaaacccttttgtttttgtggccaaca

SEQ ID NO: 462452 - DNA, 342 bp, Homo Sapiens
  misc_feature (148)..(148): n is a, c, g, or t
  misc_feature (326)..(326): n is a, c, g, or t
gcctttgggcatccgagagctctggcagcccctgtgctttagggagcaaccgtgagccgagcccagaggcctggcctggcactgcctgcagccgacatgcgacagtttccctcccccgcgtgcctagccggtgccggtccgggcacangacccccccagcccccgccctgccccagggaagcctgggcttccggggaacaaggtggcatttgtggagggagcgcccgcaggcctggtctgctggggccgtctgcgctgggctgaagggagggaaaggcggcttgggcctcctggaaggagttggccaccccgcgggcctacgtgtntgctggggcggatccc

SEQ ID NO: 462453 - DNA, 267 bp, Homo Sapiens
  misc_feature (36)..(36): n is a, c, g, or t
  misc_feature (41)..(41): n is a, c, g, or t
cctaccaattttgggggccatttggttggtaagagnatttnacaaaatgtttccacattgcctttgacttccagggggcgcccatttttacatccatcccatttcctaatagcatggcccaagagtatactcccaagtaacaaatgaggtatagcatatgagacaaagtagaaacacttaaagggttaaagaaattttcacccgtatctctatgatgcaaagtaaagcaaaagacaaagaaacaagcaaaaaagaacaagtggttcg

SEQ ID NO: 462454 - DNA, 458 bp, Homo Sapiens
  misc_feature (63)..(63): n is a, c, g, or t
  misc_feature (82)..(160): n is a, c, g, or t
ggaaagaatgagcccaaacatagctccccagctatgggtgggggataggatgggacatcttcnaccactagaggtgctttannnnnnnnnnnnnnnnnnnnnnnnnnnnnnnnnnnnnnnnnnnnnnnnnnnnnnnnnnnnnnnnnnnnnnnnnnnnnnnttgaaggaaacgtcacttgccgcagcctatgtaatcatgcccaagtcagaacaactcaagccctgggagggacttcctaggcctcctagtcaggccagtagttcctcattgcttttcttcctacagcacatttgctaccatatcatgtattctacacaggtttaaaaaccctagtatacttttcaattttaggaagccagcagttatgccacccttttcccagttactcaaaaaaggaaaaaactggaatgtaagtgtcattagatggcaaatgttgacctgtaccatccattaggga

SEQ ID NO: 462455 - DNA, 443 bp, Homo Sapiens
  misc_feature (30)..(30): n is a, c, g, or t
  misc_feature (37)..(37): n is a, c, g, or t
  misc_feature (63)..(63): n is a, c, g, or t
  misc_feature (72)..(72): n is a, c, g, or t
  misc_feature (89)..(89): n is a, c, g, or t
gaaatgtccaaataaaaggaaagggggagntcccccnaaagttaccccactcctacgaatccngcacacctnactactaacacatggantttcaaaattgacccaacacagaatccagaaacctgtacccacagtgtttttaaacacttccaggcatggaatgtaaaatgaagcactagccgtgtccctaagaacaaatgtattttgagcaagaaaacatttcaaaactatctttgttgtgtcctaatgcttcaagcactttggccaaacagtcctaccatgtaagtatcccccccactgggatgcaatggttgaggaaatttcaaaatagctgtatccttttaaggaaactattcctgttgttcgctaaggcaaaagcttgcgtgtagatttgtcttcaaagatctttgtcaacaggtgttaataagtttgttaatatcaca

SEQ ID NO: 462456 - DNA, 472 bp, Homo Sapiens
  misc_feature (428)..(428): n is a, c, g, or t
tgcctctgcccagagatgtcccaaaggccctcagcatacggccgggccagggatgtggctgccacagctgagaccaagggctctggctggcccgtccccaccaggtggccctgccctccccaagttgggggttgtggcacttggggtcaggcctagccacgtaaggacacaggtaacaccctgaggatctggcattggcagcttcaggcctaactttcctggtcagggccccttaaggtggcccggggcacattggtttcatttcgatgagactttgtcagaggcctggtctggtcctggccctaccgccccagctgtccttcagcacagctcggggtggggactccaggatgctgggtcttgccccttgggaggggaacttctgggaaggtcagggtgatccacaactgtgagctgaggttgggttncagctggggagctttgggacagagagagcccagggttccccctt

SEQ ID NO: 462457 - DNA, 420 bp, Homo Sapiens
  misc_feature (277)..(277): n is a, c, g, or t
  misc_feature (279)..(279): n is a, c, g, or t
ccaataacgtgggcccctaaaaggggcccaggcccatgtttgaaaaaagcccagcctgcctgcaaaaatatttccctgtgtcctcctgcaactgcccccatgtccttaaacacctctgaagggtggatacggaagtttctccttcccactttctccgttgaagccctggggtcctatggcaggggagacctgaaccatgttcactctgctagctcatggcaagtgggctcctaggtcagaattagctcttgcaaaaaccatcaggtggctttcttgntnaactgacggggccaggggcatgggagccacagagcagcatggactaacttggttggaactctttgattatgccagaacttgaggtcccttagacattggttactgactgtgcaaatgagagctggaaactgctgtttcccc

SEQ ID NO: 462458 - DNA, 521 bp, Homo Sapiens
  misc_feature (406)..(406): n is a, c, g, or t
  misc_feature (485)..(485): n is a, c, g, or t
  misc_feature (496)..(496): n is a, c, g, or t
  misc_feature (502)..(502): n is a, c, g, or t
tctcttctggttttgaaattatcattaggaataaagaactcattgctttctcctagctaaccgtctatagcataatactaaataccctttcaaaatgatgcttctatttgcatttatgttacttcattctactaattttccctatgctttcactcaaaaagctatggatacctccacactgtgtttttcggtatttctccccgtgttcttctgctgggatttgaaagtatacacttgaacttgaaataaataatagtaattcatgcaatgtaaggaaatatgctgctattatagggataggggagagaggataacttaggaaaggacataatttgtaacaataaaagttttgaggtatttttccttcttgggctggacttcgttagtaactatccataggagggcnttggacactttcatttttaaaggtacagtagtccccccttattctccggggggttttttagggaggaccccctagtggngccgggggacnggcggntggtaccgaaccccttggc

SEQ ID NO: 462459 - DNA, 473 bp, Homo Sapiens
  misc_feature (30)..(30): n is a, c, g, or t
  misc_feature (38)..(38): n is a, c, g, or t
  misc_feature (54)..(54): n is a, c, g, or t
  misc_feature (120)..(120): n is a, c, g, or t
aattaaacccaagaaccaccgtaattgccnactgcaancttgtggaagtggcanccccggggtaaagggacctgcctgccacggtgaacatgacccatcgctgtggggtgctggggtganttggtgttgaatgtgtacccctgtaactccctttgttaacgcaagggtggtttgaaacttagctttcagtagctgtttcattcaaaaccgtgggtccctgcatgttcatggcccccacacttcagggaaccagcatctacccggttgtaatgttcccctaatgttccccaactccagaggcgccatttcttgccctggcttatagctagggaacattgcctctaaatcttatagtgagaatttccatgaggttgtacagtgagtggtacaaccatttttagctggtctgtccccttctttaacctaaggaaaccacttaaactcttggagagagaaagggtgcctagttcttg

SEQ ID NO: 462460 - DNA, 409 bp, Homo Sapiens
tcaataatcaaataataccttcgggaatagctttggcctatggagaaagggcaaacatccctggagactggaatgtaaatggcccaactgacccatcccatgtcattccttatccccttccctatcccatcccagattcaaccccactaaaatacccatctgaaatatcttcccagagctttcttgtgtcacttatgcccttgttcttaatttcaccaaggccatttctgtccagctactgcctgggctgtcattcttaaattgtatgagatttactgatattacctgaattgagttaatatagcttgctaatttgtcatactcaagtgtttcttaagcttactctatttattacttctaatgcattctgaaagctatttttggacagtgaattaaccatttcaggaca

SEQ ID NO: 462461 - DNA, 396 bp, Homo Sapiens
  misc_feature (357)..(357): n is a, c, g, or t
gagatagaacagtgttttgtctagtgcttagcaaaaggggtgaagttcagaattctggcatgtgtttgaaatcactgctgctccttgcaaggtagcaatgggcatgacattttccttagcagtaaaaattggggaaatacaggaaatgttcctctctgcagggcaaattgtgatgatgcaatgatttcaggtcaagactgcagcccacagggtgggttgcccattggcagggagaagtgtgaaagttgtatcatcacacttacctccccccaaccccaacttcagccaagatggggggaacactggattatcccgcaggtccaaggttttaggaaataggccatgttctggccgggnaggttgagggtttcattaccattgggccacactgtttta

SEQ ID NO: 462462 - DNA, 471 bp, Homo Sapiens
  misc_feature (19)..(19): n is a, c, g, or t
  misc_feature (27)..(27): n is a, c, g, or t
  misc_feature (33)..(33): n is a, c, g, or t
  misc_feature (52)..(52): n is a, c, g, or t
  misc_feature (59)..(59): n is a, c, g, or t
  misc_feature (176)..(184): n is a, c, g, or t
ctgaaaacccccgatgaantacaatanccggtnggtgaaagggataagctgnggtatgncccagagaatggcaattattaatacagtgcctaaaaataaatgagttatccaagtccatgaaaagacatggaaaaacccctaaatgtgtattacctaagtaaataaacccaatctgnnnnnnnnntacatactgtacccattcccaactatatgacattctggaaaaggcaaaactatggagacagtaaaaagatcccccctccacccccgctaaaattaaggggaagaaaggatgaattggattaacacagaggatttttagggtaaactattctatatgatactacaatggtggatgcatgtcattatacatttctcaatacccatagaatgtagagtacctatagtgaactctaacataaactatggactttgggtattaatgatgagtcagtgtagttataggctctt

SEQ ID NO: 462463 - DNA, 389 bp, Homo Sapiens
  misc_feature (94)..(94): n is a, c, g, or t
ccttactgggtaaaagccctagatgcctactgaagtcatgctggttgtgttccttaaatgtgaacattttcatcacatttgactagtgaaagcnttattgggtccttccccaacttgtcagtcattgaatcccaaaagactcacccccaaaataggaatatcacgtcagaaaaggcacaaggcttccaagggtcaggcactcagtgttgacaagagcacatagcaagctaatagccactttttcaaaaggggcattcctggtagctgcatcagggaggtgatgagtctaaaacctcaagggggaatctctgggtagaaatgacctccttttgctagaggctccagtcaacaaaatcatcagtcagagagacttgtagtccagaagggtc

SEQ ID NO: 462464 - DNA, 451 bp, Homo Sapiens
  misc_feature (11)..(11): n is a, c, g, or t
  misc_feature (39)..(39): n is a, c, g, or t
  misc_feature (45)..(45): n is a, c, g, or t
  misc_feature (69)..(69): n is a, c, g, or t
cccgggtaaantccgcccccgaactgaagcccaattttncctcantaaaaatggggcaaaaagttccanttttggacgaaggggtccagggtaactggaaacatccacccctataacactgtccaacacccaccgcctaccttccccaaatgcctggaaaggcagatctgggcagcacatggaaaaagtgttttcctaaacttccctggaggaaaatacagaaagtttgctttaacccagggcacatgctctggagactgtgtggttaataatgacatttagtactttcttattctttacaccctctcacggggcattccatagcactttaagatggggatggtaaaggaggggtgcttgaagatgtcaacgctgtcagggaaggtgaaaagtaaccagaattccgactcattggagtgaatttgatcaggctaggctgtgtcatgatgca

SEQ ID NO: 462465 - DNA, 393 bp, Homo Sapiens
  misc_feature (71)..(71): n is a, c, g, or t
ctgggagccccagcctgcctgcgggacccctctggcccagcaccctggggaatcacgcacccccaaccccnacgcccggttcctgctctgttactgggatgaagagctgcaagtggcctcccagggttgggagggtaggaacccaggtaggtgttgctatggcaacaggacgcgagggtctgcacagtaggtcctgtgtaactgagttgatctttacacatttgtgaatgttttcacaccaacgcaattccaaactaaagaaaaaaatcgttactaggcccagagccggttttggcactgagtatgtgaacatgtcctcacccaagccaccaggggctggagcagacttgtggcctctgggtcgtggctggaaggagaatgaagtcatggacc

SEQ ID NO: 462466 - DNA, 478 bp, Homo Sapiens
agatctgcatgtcagtttttcagcaactaaggtgcctcatgttctgagttcagcagatataggaaccaagccgccccctcctgcacttgatgctcccacctttgttgtgcctcacttaaaatggtgcttttttcagttgtctgtcttttcttatgtttttatttgtaaggtgctgtatataagttgaatatattatgcacatatcctacccaatgggtaggaacaaaaagttgttaatactgtaatataatgtatagatgataccaattttaacagaaatggcatagaatttgtgaatgcctatgtgctttgtcctcttttgtaaggaaatttgcaaatggatgcatacagattaaagtctatgtagtttattttcctatttaaatatccaatattattaacacaagaggaaaggaagtgtggaacaaacaggcaacagtttttggaccagcgtatatataggcatgggaaagttgcc

SEQ ID NO: 462467 - DNA, 581 bp, Homo Sapiens
  misc_feature (17)..(17): n is a, c, g, or t
  misc_feature (51)..(52): n is a, c, g, or t
gaagcaagtcttccagnactacgtttcacaatgttcagccacgaccactanngtgttcatgctttcccctagaaatatcccacatactggcaagagtctgggatgggtgatggttttaaggatttgaaagcgccctaaaattttgatggaatttggtgtgagaggaagtccattgcttccacaaacatcatgtggcagagccgaggcaaagaaggtaaaggctcccatttcagcgtccttcaggggaaacatttttggagtcctaggtcttctaagataatctctgagtctggggacgcaggcaagcacaaagacaagggggatggagcttctacacagggccccagcgctgtcgctgtggctgctctgcgctacggcttagtgcaccagacgctgcatttcaggtgctcctacaaaagaggccactcctggaacgccgggagctcagacgctgccctttgctcgcgagccaagtcagccaaggttaaccttcgcggaacccggcgaggagcgcaagcctggccttccccaaacacagatccgagcttttcaccctctaccctcccctcagctggcctttt

SEQ ID NO: 462468 - DNA, 389 bp, Homo Sapiens
  misc_feature (57)..(57): n is a, c, g, or t
  misc_feature (63)..(63): n is a, c, g, or t
ctatgacggagcaatcacgttaatgcagaaaactaggggcaggcagacaatttgccntttatnttcaccttattttaaaagcctagatatttttataaaaagggctcagaagaaataaagcaatcctctttagatcaaggctattaagttaaaataaaagatttatgaaaaggtatttattcaaatgaagaagtaataaaaattaagttatatcgatagtttactgttctctgctgacataattcagcagagatgcctatataatgtatttcagtaaatgaatcattttagaaaagctattcaaagaaataaaaaaattttgttttgttttatgggggattttctgtaaatgtataatgctacttttttataatttaaagtcatatttt

SEQ ID NO: 462469 - DNA, 526 bp, Homo Sapiens
  misc_feature (324)..(324): n is a, c, g, or t
  misc_feature (337)..(337): n is a, c, g, or t
  misc_feature (363)..(363): n is a, c, g, or t
  misc_feature (371)..(371): n is a, c, g, or t
  misc_feature (515)..(515): n is a, c, g, or t
gggtcggggcctggatagggttggggtgagccataacggggaggaaggtgctgcccttatcgctctgctccatctactccaggacagcggcagtggcgaggaacaggctgtttgtgtcaggaaccgttctgcctttgaacagcaacatcaccacttgctgcactgtctagagaagacaacgtgccatgagttcacagatgagctcaccttcagtgaagccctgggagccgtctcgccgggtggccgcaccagccgtagcacctctgtgtcttcccagccagtgggacccggaagcctgctgtcttcttgctgccctcgcagggnccaagcgccgcgncattccgccttgccaacttccactgncctcagtncagccgtggcaggcatgcaggagctggacatgctggcagggcttgcgcaggagccatgccccttcagagccgctccagccttcaatgccaagccccatgacagccttgacctgaactgcgacagcgggggacttcgtggcttgncatttattcag

SEQ ID NO: 462470 - DNA, 434 bp, Homo Sapiens
aggttcccccactacccctggacccccttaaaattaccattccttagggtcaccctgaaacatcccgtccgaaagacaaaatggttatggtaacacccccctctgccatagacctcctggggtacctcttttaatgcccttatcatttccctataagaaaagacagcaaatgcctaattcattatagtaaggtgacaaattagtattaaaattgtactatatttaaaggaattgccttcaagggaaaattcatatgaaaaaagtgagaataattcaaccctacagtctgaatataatacatcatggtaggcatagttacctcagggttaaaatatacataaaacaaacaaacatagtgcacgtggactgaatgtttgcatacccccagaatttacatgtcagcatcctaacctgtaaagtgatagtgttcagaa

SEQ ID NO: 462471 - DNA, 425 bp, Homo Sapiens
  misc_feature (20)..(20): n is a, c, g, or t
ccgaagaccctactgagccnaaacggggtatatatggacccagggtgggatattttaaaaaaatccccttggcctggcctacctatttacctccttatgttagcattttccgcctacctacacagtatgactttgtagcctgcaattcacccataatggatcaacagaaaagtagttatgaaaatggaaactactacatcctaagcatactacagatatatgtgattaaacatgactcaagtacaaacaagaatgagaacatatatgttctggaacaaacaaatttcaaatgtgatgatttcaaatacacagctgagaatccaaaaataggaatatctgaaaactggatttcactggaccagaaactactcacactagcatgttgtccaaaatgaaaatttgtcagtgacataaagccattgaat

SEQ ID NO: 462472 - DNA, 360 bp, Homo Sapiens
  misc_feature (20)..(20): n is a, c, g, or t
  misc_feature (43)..(43): n is a, c, g, or t
  misc_feature (78)..(78): n is a, c, g, or t
  misc_feature (118)..(118): n is a, c, g, or t
  misc_feature (324)..(324): n is a, c, g, or t
cgaaaaatgccttatatggnacctgtgccctaccgaacaaaancggggattcagggatctcaggacacagttccaaancaagaaatcctaaagtaaccgggtgcggcccaaaaccagnaaaggcacgacggttcctccctcgtgagcagctgctgcaaaggttcagtcactcccacaattcaacacttgtgctgaggcacggaaaaatggccagatgggagttgtattgtgtgacttggaaataaagctctacatgtcatattcgaagtacaagttcagaactgtattagtaaaaatgcttcagcatttatggtaagagaatangagcgcacaggccaggagaatggacggatgaccagg

SEQ ID NO: 462473 - DNA, 373 bp, Homo Sapiens
ttagtggttcctgcctccctctgattgtacccctaacataaatggtccagcagaagcttaactcatgattcctaaatgtcaatcaaataaatttcatatagatcattgtcaaaattacccagaatactggggttgggtggttggttccctgggggaaacaaagcagtatcagtctatccagtcttgactagggctgaactagttaggatggaataaaggaaggggtggggaaggtggcagaggctggactgtatgagacagaactgggaaatggctaatccatgtctgaattacttaaagctgcagggctgggactagggtaaggcaagggaggcacacaggatacaaagtttaaggaggcactcactcagtc

SEQ ID NO: 462474 - DNA, 393 bp, Homo Sapiens
ccctgtccttttagcaagcccttacacattttcttttgtatgcaatatttaataaaataattttggataatttggtttttagcattaatcaacaactttttttacatcctcaatatgccccaagacaaattattgattcagcagtttttagctgaatcttttatttctgaatgattggagagaacggcagtatccatttctggagaatagttaagtacttagattgaggatgtctttctttcatgacattaagcaatgcaatatcatctgcatccaagagccaacttaacatgttcagtctaatgagccttggtagtcgtaacacacattgactcaaagacttgactgttgtggcctgagctttgatacactctgtgaaatgcctggagatgt

SEQ ID NO: 462475 - DNA, 417 bp, Homo Sapiens
  misc_feature (251)..(251): n is a, c, g, or t
  misc_feature (341)..(341): n is a, c, g, or t
  misc_feature (386)..(386): n is a, c, g, or t
gaaaataaatttgacaatttattcaaacattgttacataagaagttttaaagaaactgtaaataattcttaatactctcattttgattttccgacttctcaagactattttgtacttctttcaaacacacttcctgatgttgtgctttactgttcattttgcaaacaagttgattttgctcttccatttttctttctaagctcagtttccagatctaatattttaatttgtaaagcactctctctagatgncattttctctatttcttcagcaaccttttgtcttccttcttctaaagcagcttccagttgtctggccaatgctgtatattctgcagattnctctttaaacttaagattgctgtgcttaagacattcttcttgggnttgccagcttcttctcaagctctttattttc

SEQ ID NO: 462476 - DNA, 463 bp, Homo Sapiens
  misc_feature (62)..(62): n is a, c, g, or t
  misc_feature (168)..(180): n is a, c, g, or t
  misc_feature (223)..(223): n is a, c, g, or t
  misc_feature (404)..(404): n is a, c, g, or t
cttggcactgtagtcccaattttcctgtttgtgtgtctgccctccccctgcaacaccccggnctgattttagtccctgtgtagagactcctatggtaccctagccacagggccctagcagtcaataggagcaaagaaaatcatttatcacccattctgcaacttcccnnnnnnnnnnnnngagagagaagacaaagccccaaagactgcggagaatcgcacgnatggggtgcggggcaagcataaattgtcccaggagaaaacaggactaaagcgccagaaatacaccctaaaaatgtccctccacatcggtcccggtgacacaacagtaagactcagtgcttgctgaatgaatgacacacacacccgtcatttattcagcaagcacttacagagcgccaactncggcccggcactgctctcgacagacacaaatcaagcacagccctgtcgtcgcgcctgac

SEQ ID NO: 462477 - DNA, 516 bp, Homo Sapiens
  misc_feature (16)..(16): n is a, c, g, or t
  misc_feature (41)..(41): n is a, c, g, or t
  misc_feature (66)..(66): n is a, c, g, or t
  misc_feature (87)..(87): n is a, c, g, or t
  misc_feature (104)..(104): n is a, c, g, or t
cccccggggaattttncccttttaaaaaaccttaggtttanggccctcaaaaggggaaccaggatnaccccagcagacggcccaaangtattacaaaacacctnaccctgtcttttcctacttttgggtaccctgctgtaccctcatacacacagttcctgtgaagataccctaggtttgggggcccaaattgggaatagataaaattcctttgtcccccgtgaagactgttccctggccagatacctaaacaaaatttcaacaggtatccttaagtgaaaagattttaaatagcttatgagttgaaaaatttatgtcttaaattaaaggtaatccaaaagtggtaaattattaccctttattcattgtattaagtgattctttggacttataaaatcttcttttctttaaatacaattcagaaagcacttattatttacataaaaattacaatctttttcccatacatgcttttctttaatttggacatacaaatcatctatcgctttgaactaa

SEQ ID NO: 462478 - DNA, 520 bp, Homo Sapiens
  misc_feature (25)..(25): n is a, c, g, or t
  misc_feature (36)..(36): n is a, c, g, or t
tactttccacaattttgccaggggnaccatagggcnccccgggactgccaatagaaactgaaatggattgggtggagaaaaactttgaaaggtaaaagaaatgttcccacaatgcccaattagtttgaagcccacagtgaaatataactcagttattaataataggctggaaaagttaaaagcttccttttattaaaagatacaaattatcgcctttctgcctgtccctatggtaatcaaggctgacaatataaattctccgctagtgtacatttagaaatgggttcctaaagcttgagatataagagactgcagggaggtggttaggcctttacctaacagctctgatctggactgaacaaagctgctaagctagcacttgagtattcctcgacccttcccctagaaaggaaacgttagccatttccaggaatctgggtgtggaggcaaagatatcgtccgtccgtagttagaactcagggtgccagtttgttttttgcaaaggtaaaatacgtggtgt

SEQ ID NO: 462479 - DNA, 264 bp, Homo Sapiens
tatgagtttattttagtctagattctgagaacttgaagaatgcatatttgaaatgacaaatattgccatgttgccctacaaaggaccatagttattgactcacccactgttagtgtatgggggcacctgtctttccacactctctgccatgctgggtaatgccaatttttttaaagtttttgcgagatatttggaacagtgttacctaactaatacagtaagcactatgcatgtatggctatataagttgattaggaatgaaat

SEQ ID NO: 462480 - DNA, 467 bp, Homo Sapiens
  misc_feature (101)..(110): n is a, c, g, or t
  misc_feature (393)..(393): n is a, c, g, or t
tacagttgtgagtcatatatcatgggtagtttaagtgacatgcctagagtcatagagtgaaaacttgaacacaggctgattgactgcaaaatgaaggttcnnnnnnnnnnaattgtggtgaaatgtacataacataaaatttactatttgaaccatttttaagtgtatagttcagtgactttaagtacattcacactgatgtgcaaccatcaccaccatccatctccagaactcttttcatcttctgaaactgaaactctggacctattgaagactgactccctattcctcccttcccccagcccctgggggaaggcaattgtaatttctgtcttccatgaatttgactactctagggaccccatttaagtaggattcacaaatattaaaggncaactgaattttaatggaaactaggctttacggtttcaaatggaggcactaggggacaggccaaggaaggattt

SEQ ID NO: 462481 - DNA, 493 bp, Homo Sapiens
ttcatacattttctagagaagcaattacaatcttcatgctatatataggaagaaaaatagcttttaattatgtttgtcgactcttttattcaataaacatttagtgactattgtgtgacactgttttaggtgctagggatatagaaataaatcagaaacaatcattagccctagagaactaaacctaatggaactggatctatcactggcaaccttaaaattacctccgtttgtacttaagctgaagctcaacttcaaactctgacatgcttggcatcttgttgaaaataaataacgatctacctagtttgccactggtagcactttgggcactattaatattaactatatactgatgaaattaactttccataaagggttatacaaaagtttaggaggggcagaaaatatttaatgggttaaacaagtactgggtcagccaccaaaattaggcgttccctttctggcttttcacaaggggcccaggaaaacc

SEQ ID NO: 462482 - DNA, 443 bp, Homo Sapiens
  misc_feature (401)..(401): n is a, c, g, or t
  misc_feature (416)..(416): n is a, c, g, or t
cttcacttggtttgacatcagcagcttatttcttgcaatctatttaattgagacttttctgctgtttatcctaaaatgcagataaatggctttcagcacactgtttatagtataatagctcctgaagtgagtcagcattatcagctagagtctccatgtcataactaatggtctctctgcttatactttcctgctagtgaggagccactgaactccacagagacaggagcctggcatagttgggggtgggtagattattttgatggtgcctataggacaaggcttttttcctcctttattggtgtgaaatgagaagagaaatatgtccttattcatgattttaggcatgcttcaaaagtgccatgtttctaaggactgggggcaaagaactttttaggggntattaattgatcccnaggagggatttgttttttatttcccag

SEQ ID NO: 462483 - DNA, 734 bp, Homo Sapiens
  misc_feature (681)..(681): n is a, c, g, or t
  misc_feature (688)..(688): n is a, c, g, or t
  misc_feature (711)..(711): n is a, c, g, or t
aacacctgtggaaaaccagagtcatatggctctatgtcctattttactatattgggaacaaactcaggaatacagtctccagcctggaccataaagccccctgatcagaagtggggagctgtgtcttcccacacattgaaactagtctagtttcaaggggtgagagcatgtctgcaccatttctggtaggctctccctcatggatgcagttcctgagtggattctgtgcccgggtgctttctacattaagtagtctctttttaatttgggggatcctcagagtagtgatggggggtgttggggagggatgaaggtcttgttaattttctgactgtcagtttgccctaaaatgaactaatgtaggatgctctgagcctccccaatgttgttatactgtgcccttgtgggtagcctgttgcagtagttattctggtgtgaacctggaaattccctctgccactgtcctggatgcaaagttgtaaattctgtgggtgaaaccagttcatgaggagctcttccatatgctctttctaggccagagaggcagtctttagcagatggcagacctttacaaagacatcatatgtatccattccaattcatacaggctttcagctgaatggggactttgcagtgatatctcagcttcagtcagcaaattcttccaccaacgcagtgggncagggcnttttgttctgaccctcagggccntctcaggaccacccttttcagtc

SEQ ID NO: 462484 - DNA, 509 bp, Homo Sapiens
  misc_feature (14)..(14): n is a, c, g, or t
  misc_feature (25)..(25): n is a, c, g, or t
  misc_feature (34)..(34): n is a, c, g, or t
  misc_feature (42)..(42): n is a, c, g, or t
ggaaacccaacgtngtaaaaaaggnttaaagggnaatccccngtttccacggaaattggtgtactgaactccactttcctatttttaacatcctccagttttccctacctgaaaaacgggtttaaaatttgcccactttgcctcttgtataatatatgacaccctgaaatctttgaaggaaagggaacaacataatagataacacaataaatatgataaaaacagaaacagaacacaatagataaatatgatagacactgatgatggtagtgctcatgccactatactatgttgaaattttccttctttaacatagaagttggtgacataaatccaacaattctcttttcctcacttgccaatgagtagtttaattatggtgaaaacggaaaggacgcatcagaccagagattagattgctgaaataacccacgagccctctaaaaaaagagcctaaattgcagaataacctctggagtcaggttcacttggcatctgttagtgcttac

SEQ ID NO: 462485 - DNA, 478 bp, Homo Sapiens
  misc_feature (300)..(300): n is a, c, g, or t
  misc_feature (335)..(335): n is a, c, g, or t
  misc_feature (386)..(386): n is a, c, g, or t
  misc_feature (399)..(399): n is a, c, g, or t
gaagtattattccatattttaaatataaagaaattgatatcaatgaatgagtattatattatcttactcttcaaagatgagttttaagacttttctgatatgctttggaaagttgataagctttttgaagcatctttatgtttttctattctcaagtcagtctcaaaaagaaaggaagaacagaaaagaaagaagagttaaaacatccttttgattgccgagttgattcaccttgaaagagctgtactttgacattgggtctcaggattcttactcgtgtgccctttgggtctggggagncatagcattttgcaaccttggatttggttactttnaacttttttcaaaatggggtaaatgggcttacctctttggaaagatacttncaaaatccaaggntaatatttgtggaaccggggtttggaaaatgggacgtggggtccggagtgtggggaattttccgtttggaccggcacca

SEQ ID NO: 462486 - DNA, 468 bp, Homo Sapiens
  misc_feature (15)..(15): n is a, c, g, or t
  misc_feature (42)..(42): n is a, c, g, or t
  misc_feature (49)..(49): n is a, c, g, or t
  misc_feature (60)..(60): n is a, c, g, or t
  misc_feature (123)..(123): n is a, c, g, or t
ccctaacaagggaangagaatcctttccagatgaaagggtcnaaccagnaaaataaaagnccccctaaacactcctaaaaagttagaacgccagttgaaattttgccataactcaatctgggnaatggagtaaaagaaacaaggttacagaatgtagtgctttagggactttagaaattaggggcagtatgtatgagaatgtgtgtctggacactggaggtgtcccaggagctttgaagcactaggtttggttcaatcccgacaaattcccagcccaattgcaagcacttgctcacggggtgcccagagccatgaattcttttcatctgagttggcatccggtcagctgagcatggaacatggggccaccccaaacgccgtacagcacaaccattaccaacactgtctattgctagagcacagcttcctgcatacataggacactgggcttctgactgcaagtttctc

SEQ ID NO: 462487 - DNA, 516 bp, Homo Sapiens
  misc_feature (60)..(60): n is a, c, g, or t
gaaaaccgttcccgttgcactttgtccaaatcattcgggttggccaataactgtccgggntggaaaagcccggccaaaaaataatccaatttggaaagggacggagggcttcgtcagaaaattgcccttcttgttagctatgaagacattgagcaaaaacagaataagaactggggcaaatggaggcaataaacattaaggctaggatgtatttttggggagaaagcggcggctagcagggacgaagctcaacttcatgcgccgcgccccggaatgctttgcctttagccactagggagccgcccgcctgagggagcctccggaagtgagcgacgcaaccgtgcagtcagattccgtcgccgaccgcggccctctctcctcggctttgccttcgctctctagcttttcttctttcactcccgctcgccgacttcgcaccgctggctcacgctctgccggacaccaatcccggcgccctgcccgacggagctcaaggctagcctggccttgtccgcg

SEQ ID NO: 462488 - DNA, 414 bp, Homo Sapiens
ttttccagcaacattttaatgaaataaatgccaggaattcccacaactgattgcaaaaatatccggtttcctggggggcaccctggcctgaagtgaaaacaattcggcaaggctcaaggtctctttgagtttggctgcagttaaattgcgcgtggctgtttgttcctgccctggactctcccacatacctgcctacctttatgtaggatcaggacaaacacaccggccacgttgcagggcatagagtgtcggtgcatatatttagatggcagtagcaaggaacgcgtgcgtgtacgggctgagcatgcatgtgtgtacagatgcgtgtgtactcggtcgcgcgcgctatgtgacaaggaacacagagaggtacacctcttatctctgatctctctgtaatctccttttgtgttt

SEQ ID NO: 462489 - DNA, 538 bp, Homo Sapiens
agagccgtggatcgcagaggcagcgaggctcggtctgcaaacaagacgctgcaaggctgagtgagagagagagggtgtgcgagcagcgagcacatgttacatcagacacagtacctgatttttcactgcacagcttgtcagctagatagtgtgtctccctgggcgataagtgaggatatttcatcttcatactcttctattatagtttcacacgcaaatttcaaaggtctgtaagcatcagaataaaaatacaattttttaaattcttggtatattttgtctcctttcctaggagcgaatctcttgaaagttctctccttcgtcacagggtcttcctcaagcttgtagtcgttcattcgctcacagactttctccaaaagatccgttaggaacgcctccgactgagctagggggatctaagaagaaagacagggcgaggaaacttgtcttaatgttaatgttacttcaaagaccttccggcgagtccacatggaaacgccacactctccctgaatgcaaacgtgtgccacttccccct

SEQ ID NO: 462490 - DNA, 539 bp, Homo Sapiens
  misc_feature (28)..(28): n is a, c, g, or t
  misc_feature (76)..(76): n is a, c, g, or t
  misc_feature (91)..(91): n is a, c, g, or t
  misc_feature (97)..(97): n is a, c, g, or t
aaaccaaaaccaaggtaacccaaacccnagaaagggtggaaaaaacagaacaccccccaataaaagggaacctccngcctaaaaaattccngcaaancccagagacctttaatactcttgtgagccttaaggtttgccccagttaacccactcattttggaagatacagttaaaatttccgtaacagctaatattgttccttatctttgccccttcttcctgaacacttctgtgaccctttgcctctttatttcttcagaatgaccttctgtaaagccccttgatttagggtgacttttactgctgctcagaccctgaataaccactgacgaggtttaagaggtgcatctctcaattcagagaactgcacggagtgaaatgatgaacagaattatttacagtcacattcagtcttgctttggttcacactgcacgtctatgtgaaaccataggggctgggagatggctacgtcccttggttcacccggttgacaatgtagctcttgacattgggaataggccgcacatcattctggtgc

SEQ ID NO: 462491 - DNA, 400 bp, Homo Sapiens
ggaagccggttgaaaataatgtgaaagcaactctggctaacagcgggtagggaagagggcgcgcgggaccccaggaagcctccgtgcggagccaggcctcaggagcagccgccttgttccctggaaggggtgcctccctccatcttgtctccaaagactgtagggagaccttctcgcccggtaggaaagcgacgtctcccatgctttcccaccacgtcagccttgtggcctttctcctgctagtgtctgccctccaacctgcgggggctgcggctgccacggttccacgctgggtggacgctgcctgcccgggatccaagaggcgccgttgcaggcgggagttggggagtcgtgtgcaggtccgaaggagacccaagctcttggtcaaggcttttttgct

SEQ ID NO: 462492 - DNA, 432 bp, Homo Sapiens
  misc_feature (194)..(194): n is a, c, g, or t
aaaaaagtttcccttgcccctctgtgggccccaaaggcccttaccgaaacggaacacctcaggtcatgtggccccctggaaaattccccccgcccctgggaacacacccaacccgactgatgttccttaagggccaaagctggcctacagtgggaaagagcaaaatgctggcttggaaggtggttatggtttgncaggtggaacccaacggagtctgctgaaggtcatgacagatgggtcaaagtggtatcctgttttttatttggaagaactgccaaaatgggattgccctctgctgaggtcaggaaagtggcaggaggaatgggcttgagttccatctgggacacattcggtttggggatatccattaggcatccatgcaggcagctggtacgtgagtttggagttcaggggagaggttggcatggagac

SEQ ID NO: 462493 - DNA, 504 bp, Homo Sapiens
  misc_feature (15)..(15): n is a, c, g, or t
  misc_feature (32)..(32): n is a, c, g, or t
  misc_feature (48)..(48): n is a, c, g, or t
  misc_feature (80)..(80): n is a, c, g, or t
  misc_feature (120)..(120): n is a, c, g, or t
  misc_feature (402)..(402): n is a, c, g, or t
  misc_feature (404)..(404): n is a, c, g, or t
  misc_feature (406)..(406): n is a, c, g, or t
  misc_feature (408)..(408): n is a, c, g, or t
  misc_feature (491)..(491): n is a, c, g, or t
aactttaaaaagggntaagaaaaacccggccncgttttgcgaaaaatntggtcccagaagcaaacttcccccaagccccntccgctccaagcaagcccccggactccgccctccctttcncttaagcggaagaattaatcccctggcagactctccctgggactggcgcggaagagggaaccgagccggctggagggagggtcaacggggaggcgctgtatcggcggcgctcccagggacaggcggctggactcaggcgagtcagggcaaaggtgtcccaggggtgttccagctccactggctccatgcggctcagtttctgcctcagccctgaagggggaccagactcctgagcttctggtgctgtgtttcggcgagagagaggacccccgctagtcactntntncntccatgggggcgggtcctcagggcttcggtgctgtgacgtcgggaaagacggggtcgaccggtcagggtcaggccattgaatntcggcagtcaagc

SEQ ID NO: 462494 - DNA, 480 bp, Homo Sapiens
  misc_feature (442)..(442): n is a, c, g, or t
aagactctagggctaaaattcatggtcagttccataaaatgcatctcactttatttctgaatttttcacaacccctctattttcttacattaaagaacatctggataagttagaatagtgccaacttgtttgatttgttatatgattttcttgttaatgtgttgagtatgggaaataagggctttctgtgtgtcttgactcacaggaaaactgaaactgccagggaagcaacattaaaacaactgggatagattgaatacatttgaaaaaataatttctggaaaaacgctatacatgctttttatgtttatatcttctttcttattaaggacatggaatcagatccatgtgggcattccaaaacaaatttattttgggttatattctttacaagtcataattttttacctaaaattgtggggatatgcctgtggattacacngtgtaggtattaaactcaaccatttggatttttcccgt

SEQ ID NO: 462495 - DNA, 557 bp, Homo Sapiens
gaagtttatgaggcaatataaagttatttgaaaagggcacatttccatcagctcttatagatctgctgcagtggtgtacaaatgcccctcttatcaatgtggaaattgtgctaactcctggggtctttcttttcctacccattctccctaacaaagcatcactggaacaataactgtcatgataaaagacccactgcatacgtcttggcacaggagttgaagcaccattgtgaaaccatttgtgcctggagtgctttttcttttcttagcactggctcatgacatgcttcagattggtcaaagaaagagattttatcaagtgttcccttctcaagatgtgtgataagtgctagcagagtgtgctggtagcagatctttagagattgaaaaaagagaaggggaaatttcaggaagtgggggggaaaaagcttaaaccttattttgaatattgtgggttctagggtctttgttatgtggaattcagtgatgataaattttcacattgggattgacataaaaggtaacaaaattttatattctgttccttgttgtgcctg

SEQ ID NO: 462496 - DNA, 191 bp, Homo Sapiens
  misc_feature (146)..(146): n is a, c, g, or t
tttctccacagacactacccaaagcagtgcttcactacagtgggcaggacaggacctggaaaatttttcattctggaaggcaggcaggagtggaacttgcagagggcagggttcacccaaccagttgttggggggggttaaaagcnggggcctcttttggggggtttccggggttgggagttgtttgggac

SEQ ID NO: 462497 - DNA, 482 bp, Homo Sapiens
  misc_feature (462)..(462): n is a, c, g, or t
tcttctaatcatttcatttttcttgaattgttatattctctcccaacttttctttttttaacgacattgagctctcctcttcctgtcttccattagcacctttcctaacaaccttatttgttcttcaattgttatttatgcttgtcttctcagctaaattgtaaggcccttgtagtgaactcagggactgtgctttatattacttctgtatattacagaataggactatacgaatgcaggttgaatagatggaatcattttatatttacaattaagtaagaaaatgggaaacatagccatcaaagcagtcaaggaacaggtagggcacttaccctttctattctcccttggctaccttcttttttgttcttgttttgagacggggtctgggctctgtctggcagggttgggagtacagtgggtacaatctcgggcttcgctggcagcctcaacctccggggncttcagggcattcctttctt

SEQ ID NO: 462498 - DNA, 417 bp, Homo Sapiens
  misc_feature (28)..(28): n is a, c, g, or t
  misc_feature (50)..(50): n is a, c, g, or t
  misc_feature (98)..(98): n is a, c, g, or t
  misc_feature (117)..(117): n is a, c, g, or t
aaacttcatgtccccattttgattcggnaaaacacgttccacatcgggantgagtcccgggtcataggaatatatgtcccacagaacagagaataagnggcatcattggagagaganggcaccaaaaagtaagaaaacaaaattcactacctacacagttcctaactagactcaacagcccctgatacttgagaaaacctatttcctcccctaagttcttactctcataactagaaaaagtgcccatgacaatacctaaaaggaaactaagtggggaactcttcctcatatctacctactctcaatcccaccagttactagagtttcagacaatacatattgaaatctgttgtttttgttacagtttgcaaagtcctcccatagacattatctcatgaagaaattaggacaagtaaa

SEQ ID NO: 462499 - DNA, 429 bp, Homo Sapiens
  misc_feature (15)..(15): n is a, c, g, or t
  misc_feature (29)..(29): n is a, c, g, or t
aacccatgattatantggggccattgggnaaaatgaaagaagccaggatgtaggaaaagaaactccagaaagggaggtgcaagagacactaaaagagaaatattgcatactcaggaattttatttaggtctgattctgtccctttcctcctttaaaagcaagttcttcctcaggaaatggaactgaaagaaaatacattctggctgatggcctccccttccctgccctcccaccagccccgatcctccaggtgaggaagagcctatcagggagaagaggtgacaattccagccattacagtcattgcagtcaggtgcaggtgggaacttctcaccccagctcatgcatagatcaaagcatagaggccccatcccactccccaaagctgtgatctgatcccatggagaagctcttccctactttttattt

SEQ ID NO: 462500 - DNA, 483 bp, Homo Sapiens
  misc_feature (25)..(25): n is a, c, g, or t
  misc_feature (33)..(33): n is a, c, g, or t
  misc_feature (80)..(80): n is a, c, g, or t
  misc_feature (456)..(456): n is a, c, g, or t
ggtaataagaattgggccaagccangggaaccnggatttttaatagtagtttaaaaattaaattttaatgtttaaaatanttccaggaaaggaggaataagttcctgtttaaacctgaagaggcaggggcctagccatcctcctgaccttactccctttgcctttacctaataaacactcccactacaaatctggtgttaaaagccccaggtcaaggaaatcccttagtagaagctcaactctcagtgaataccacagagaggttcaggtaatttacacagatggggaactgatgtgacatacctaaggttggcctgagtctgcagaagctgggctgtcagaatagaaaagcaagatatctacaggcttttgaactattgatacaactattcaaagggggctttaaatgtataaggaagtgtcacagacctccaacaccaaataaccagaactaanaataaccatccttcttgaaaatgccaa

SEQ ID NO: 462501 - DNA, 475 bp, Homo Sapiens
  misc_feature (31)..(31): n is a, c, g, or t
  misc_feature (67)..(67): n is a, c, g, or t
  misc_feature (295)..(295): n is a, c, g, or t
ccgggccctcaatgggttaattataatcaancagatcttccatactctttaatttgggttcccaaanaggggagtggcggtcgggtgatggaggcagggaatctggcagcacacaggccccagtactcagccctggaaggaagaggcgtctcctgcctagccccagaagcatcaccccccagagaacacaggctgtggtgaccactggggccgaggtcctagccccaccacagaggaaggttcctgggggacgaccggctccagggaggaggagaccttggccagagaaccaccnacgagtccgccctctcctggtgaccctggagactgctgcctgtggaggaagcagagatgctgcagctggaaggctgagctgcggaacctgggctcagcacggacttccactgtgacaggcaagagagacctgagctgtgaggctgctggctgaggatccagtcctggggcaaatctgcta

SEQ ID NO: 462502 - DNA, 511 bp, Homo Sapiens
  misc_feature (488)..(488): n is a, c, g, or t
tatttttaatataagactcataaatgaacctgatgtggtgttcatgacccatcccttaagcatgcttgctttttttaactttactttttgagtatagtacttgtcttgtttttcctggagccatgctaggatttaattcctatgtgccactacccgcccatgtcctggaagatggccatgcctgcagcaatgctcatgtcttgaggagaagcaatgtgaaaagcatcaggaaagctgaaccttacgttcaagtcagcaaacatttgtgagcattctagtatgcttgcgaccttgacactttttaaaaattatctttttatttgcttcgagtatcaaccgtatagttgactctagtgggggcgaaggggagcagagatgaggaggcaaaattcggacttgggtgcccctgtgtgtcttcagttctcatgtctctctgaggaaatgtgttggcccaattccctatctgccactctgagtctcttggagtnaaatgtgtgtaaaatgaggaaaa

SEQ ID NO: 462503 - DNA, 658 bp, Homo Sapiens
  misc_feature (30)..(30): n is a, c, g, or t
cttggtggatttcaccagttaatgcacatncttcttccctcctccccccattaatatgtatactgaaaaatgtgcatttgtctgaggaattattttgtttgctaccacttaatgaatctcaaaattttgagtaaatgtacctcagtctaatcagactttttatgacctttataactacatttaaaacccttaattcctatttctgggtgtttgcgagcctgattgctatcatgaagtaaaaatttattactctaggtattcactagctaaataaacatagttcttgtttagcaagcatatgttgttcctcagctcttttctccagcttttgcagtgtcctggcatccttaaaatactttgaaaatatggccttgatccatggattaaatcagtatctaagtgaatgtgttgatgttttattgatcagatctatataagtgggaatacagcatatatctggatattcttatagttatctttttaacatcttatttttttcattaattacatatcaacattaattttgtatccttgaaggcaaattgattttggtataatttaaatgtgtccaaggcatctgtatttaattggatttgatgggcctaagggttatggaaaataatgtactgccccatggtattactgttcccaaagggag

SEQ ID NO: 462504 - DNA, 497 bp, Homo Sapiens
  misc_feature (56)..(56): n is a, c, g, or t
  misc_feature (79)..(79): n is a, c, g, or t
  misc_feature (105)..(105): n is a, c, g, or t
agtccttcaacgtcaaacaggttccactgtagctccttggaaaacaaggctgggcnctgtatgctgccgagttgccttncaggtaactcccttccttcgcagccncggttttctttttaatagacctgtttttgctcttctcctaaaccgtcccacattgaagccacaattttagagacttcgccaaaggtagcgtttggattttggcccttgatggcggccctgagtatcacgaaagaataacgcataggcagacacaggcttctggggctcattgggatccttcttccttcttctttttgggagtttttggttttttccccatatcagaggcaggccgcttctctccaccattgatcttagaggtatcatcgccttcatcttcatgcactgaactggatggtgaacggagttgcacgacttgcttccacggtggagatggtgacgttgtggggaacattgcttcctcccatattcaaaccaagttgagcacttag

SEQ ID NO: 462505 - DNA, 468 bp, Homo Sapiens
tagtatgatgaaatgtgggcccagagtattggaaagaaagcaatagccctattcagtgtccactaggatggatattgcagaaggcatgagtttgtccttttttcccccttaccttaaataacacttcaatagctaactttttccaaaatatccatttaggccatctcttatttcttaaagccaaatatttcgtccccagtcttaactctgagttgcaagatcaggctggttggaagaatctttatatttagaaataggatggtgagtggtttgtttattctcttgtaaaattcctttttcagagacataactgcaggggagagtcccaaggaggaactgaaggaactgggattattatcctttaaacacatttgtgtttgtaggggattttggggagttttcatttttgaactggataaggatattagggacataaaccccttgtttccaggcccacatgtggtccat

SEQ ID NO: 462506 - DNA, 377 bp, Homo Sapiens
  misc_feature (224)..(224): n is a, c, g, or t
ggcttgataattcatttctttttatcactgaataatattccattgtctgatgtaccacagtttatttacgcatttacctactgaaggatatcaggacatcttagttgcctctgagtttttggcaattatgaataaaactgctatagaaagatgtgtgcaggtttttctgtgggatatagttttcaactcctttgggttaactccaaggagtgtgggtcgctggnatcatatagtaaggagtatgtgtagttttgtaacaaataggccaaatgttctccaaagtgggcattagcatttttgcttttcccaccaggcaagggaataaggagttcctgttgctctgtatcctcaccagcattgggtgggtgtcagtgttc

SEQ ID NO: 462507 - DNA, 590 bp, Homo Sapiens
  misc_feature (396)..(396): n is a, c, g, or t
  misc_feature (468)..(468): n is a, c, g, or t
  misc_feature (487)..(487): n is a, c, g, or t
  misc_feature (501)..(501): n is a, c, g, or t
  misc_feature (510)..(510): n is a, c, g, or t
  misc_feature (523)..(523): n is a, c, g, or t
  misc_feature (530)..(530): n is a, c, g, or t
  misc_feature (542)..(542): n is a, c, g, or t
  misc_feature (553)..(553): n is a, c, g, or t
  misc_feature (563)..(563): n is a, c, g, or t
  misc_feature (579)..(579): n is a, c, g, or t
aaataatacagtctatgtttttgaaagtttgttcctgaagtttctttccttcatttaacattgtctaatctgctttctcaacaccaattcaacacaggagcatgggagagccaagttaaataagcacgataattctgctggaaactacatatagtctgttgcgtagaagcatacagtaaacattctgcaccgagcactgtgtttcatccccagcagatgacattccttatgactttatatcccatgggctaaattgattaatataatatcgaactactatttgtgtattttgcctaattgcccaactacataaatcattatggggcaggggggacgggttttttttccttcttacttcacaggcctgctgcttttctgaccttgccacggattagncaggagtaggttgtaaatgcaggggctggcaaatgtcttccgaggggcaattactgtggaactttgttcctnacattatggaatgcggggnattttcactagggntatggtccntattacccaccgnggggctngggggggtgganccccaaatggnagggaatgtncccctggggcaggggnttactggcggg

SEQ ID NO: 462508 - DNA, 414 bp, Homo Sapiens
ccaaaacaactgtatgttttccgaagaaaggagtgaataaagagaactaagagaacagcaaatgccttccccacaggtatcacatacataaggcttttctcccagtaatgcctacggacatgataggtcagtgtgctggcttgagcaaatctctgtccacacctatcacagacatatggcttctctccactatgcttccttgcatgaatcttgagattgctagaagttgcaaactgtaagttgcatacatcacatttatagggtttttcttcaccatgatgcatgcgactatggaagactagctgacatttctgagcaaatcctttatcacacaattcacatttgtatggcttctcacctgtatgagttcttacatgcgttttcagctggttacattgggtcaaatgcctttcc

SEQ ID NO: 462509 - DNA, 446 bp, Homo Sapiens
  misc_feature (262)..(262): n is a, c, g, or t
  misc_feature (368)..(368): n is a, c, g, or t
  misc_feature (405)..(405): n is a, c, g, or t
  misc_feature (432)..(432): n is a, c, g, or t
gagctgtccgccctgccacaggacctatcgtccttgccccttattagccctcatggggaggccagagctgatttcccaatagccactccttgtctcctcctgtcctgagacaccttggtttcctacatgccacagggactgtgaacagcttcaggggtcctgcccgatccagaaagagctgggctagttttaagggcagctgccttccaaggactgtccccaccctcctttcgcaggccttccagggttaatcctagggttngcttgcatttcccaccctggacagaccccaaagatctatggcaaaatcttagccccagccatgtgggtgctttcaattttccttccaaccaaggacccacatgggncagaattttaggggatttttaggctttttaacaaggncattcctttttcttaggccaggggggnacggatttttttgg

SEQ ID NO: 462510 - DNA, 443 bp, Homo Sapiens
  misc_feature (18)..(18): n is a, c, g, or t
  misc_feature (387)..(387): n is a, c, g, or t
  misc_feature (404)..(404): n is a, c, g, or t
aggtggcagagatgcatnggactacaaggtgatgaataccactatgagctcactacaagatctcaaagatttcaagccactggtgttacaaagcataaagccacccttctggagcagcggcgggaggcaggctgggaggaggccccaagttttggccagacgatagaccacctccttaggtgtccggggagctgctgaaacataatgaggaagatgctgctgatccaaaggataaaaacacagaaactagaactaagaagcacctaaagtggactcatgcccagcatccctgcagactgactttctctgagctatagttctgcattgggactgtttttcctttgctattcacctgcccaacacacaatcctgggtgcttttggattngttggatttcttttggnttttttcctgccttttctgttttctttccttgaaccctg

SEQ ID NO: 462511 - DNA, 553 bp, Homo Sapiens
  misc_feature (34)..(34): n is a, c, g, or t
  misc_feature (41)..(41): n is a, c, g, or t
  misc_feature (109)..(109): n is a, c, g, or t
gggtggggaaaaagccaaaaatgggtccactttnaaaaaantcttcccccctttggttaaagagacccattttccaagaattaatttttgggggaacagaaatcaaaantgcctcaaaacacatcaaacgggatattaaatcctgggatggctgaattttctgggttgttgactttccatagaatatcatcttttccccaggctacacaaaaaaagatgccacactaacttttgaaaacgaacctagatggcgtctgaagctggcgactcaccttcttcacccgcataggccagaatggatcgtgctcgtatctgtttcccttctgtcgttttccctgagcaggtgtgtgagcaggaggaccacgtagaccattgctgagcacacagtctttcgggcacggggcatcacaggccacagggatggggaagatggcatctctgcacagctgtctgtcaacttcttctcctggggaaaacatgaccaccaacagctattattgttaaattaatgtaaaatgagcaatttaaaccagatgggcacccagataagtta

SEQ ID NO: 462512 - DNA, 478 bp, Homo Sapiens
  misc_feature (65)..(65): n is a, c, g, or t
cccttgagcccacgagtttgaggctgcagtgaggtatggattgtacccactaacactcccagccnggacaacatagcaagaccccatttcctaaataaataaataaacaaacaattttgaaagacaaaatatgtagtgagattctcaatccctaaaactgatttgattttctgaacttcaaattctatttttttcaaagaatatctaatgtattacaacaagctgttttaaaaaacaagatacaaaaccacatgcttattttgcctaattctttttccaattattttcccaatgaatacatattactttttatttatccctattgctaccagggacagagcctgctatttcaaaaagaaaatctaattgcaaagctgctgcctctctgttttgggttaacagcacctctttccaaaggcctattcacgcctccccaacctcctccctttctaccaggccttacccatggctcaaattt

SEQ ID NO: 462513 - DNA, 483 bp, Homo Sapiens
  misc_feature (23)..(23): n is a, c, g, or t
  misc_feature (119)..(119): n is a, c, g, or t
  misc_feature (141)..(141): n is a, c, g, or t
caacctgctgcccaaaaatgctnctgggggcccctgctgcaaccctctctggccaagctctcctgtgtttgctggggcagaaccagcctgctgtggggcaagcgaggtctgttccctcnccaacttccagccctcggagcnacccacacaacacccctggctgaaagatctgcaagagggcttgcctcccatggttctcagatgcacatgggggtctcaggaggccaactccctccacagggaggctgtgggaactcccttgtcagggctgctgccttctgacggcaccacccagaaagccgggaacagtgtcgtccttcaacatcgggacgtgaaggacagtggtcctcatgcagccccagacagacttctgtcctccagaacaatacgcagagggcgaggggtgaggggtgggggttgggggcaggagacagactggaggcagcaagggcaggaagttgctgggaggggcagctcccctgc

SEQ ID NO: 462514 - DNA, 628 bp, Homo Sapiens
  misc_feature (59)..(59): n is a, c, g, or t
  misc_feature (118)..(118): n is a, c, g, or t
  misc_feature (533)..(569): n is a, c, g, or t
gggatttttttaaaagcctgtaaaatttgggggaagaccccgaattaaaattcccctangggaaaaataccagaaaaaatggataccagaagccttaaagtggaatattaaaagtaantgcccaaccgtcctaagttaccttaacactgagggatccataacttatggagtcatcagactcacggaaatacttcctagagcaaaagtaaatgtgaaacagaaaaaccagcaacacccacaatgtgatttgttctccattaaaagcccaaagacactgatctccaattatgtggacagccacattttggttacaaaatcaaattcaagttaattatggcaaatcaaacaccacctatgtctactttgcaagataatgcttaaaattggtatgtatataaaaacatacaaaataaatcagatttccaaattagaaccttgaaattaggcaactacaatacatttggacagaagtacgaagcttaatatggggattcattggcattgcatgtgattatatgctaccattattttgnnnnnnnnnnnnnnnnnnnnnnnnnnnnnnnnnnnnngaatagctttatgaaattaacacagcaggctaacttaatgcattatttgaaatcatctt

SEQ ID NO: 462515 - DNA, 407 bp, Homo Sapiens
  misc_feature (40)..(40): n is a, c, g, or t
  misc_feature (48)..(48): n is a, c, g, or t
  misc_feature (55)..(55): n is a, c, g, or t
aaaaacctatccccacctaaacaatccgtgtaaattttgnaaaaaacntcaacantttggtccacctagtagtccaaaaccttaataaggcccatatgtccctgaaaaggccaaaactctgtgtaatgtgccgatttacccgggagatagtaggacagtttttatgagggtttcaaaggagttcatggcccaaatgaagcttgtggcccacctaggtttagtgtacatgaaattggaagatgcttcttgattgtagttcccatggggaagagggaggctgtgatcatttggttagatacagcattaattgtcacaacttgactttcagaaacaagaatactgcacaaactcaagcatgcattggagcatgtgttactatttagaaaggagtgcagccatcagtaggt

SEQ ID NO: 462516 - DNA, 413 bp, Homo Sapiens
  misc_feature (31)..(31): n is a, c, g, or t
  misc_feature (277)..(277): n is a, c, g, or t
  misc_feature (307)..(307): n is a, c, g, or t
  misc_feature (336)..(336): n is a, c, g, or t
  misc_feature (348)..(348): n is a, c, g, or t
  misc_feature (359)..(359): n is a, c, g, or t
  misc_feature (369)..(369): n is a, c, g, or t
  misc_feature (374)..(374): n is a, c, g, or t
  misc_feature (383)..(383): n is a, c, g, or t
  misc_feature (396)..(396): n is a, c, g, or t
cccattaaaagtaccatgccataccatatantttaaaagaaactcaaacctggtaatgccgttaatattccagagtagagggtaatatgtcacccactgtgagccctcatgccctccctagaagatcacatcttggttcaataacccactggtgtcctggcaccccattttatctcattatagttgacagtgcgctccctgcaaagatctcatgtagttccaaaatctctgaacaggcaacaacaatattcagattaggaaatgtaaggaaacaggnccagggtgtgggtgggctcacggcaaatanttcccaacacgttggggagggccgaggtnggaaggaactgntttgaggaccnggggagtttnggagnaccagtgtnggggttaacaagnacaaggacactattctt

SEQ ID NO: 462517 - DNA, 464 bp, Homo Sapiens
  misc_feature (445)..(445): n is a, c, g, or t
tatgtgtgcagtgagtgtgggaaggccttcagggaacgtcagaacctcatcaaacaccacaggactcacacaggagagaagccttttgagtgtggcgagtgtgggaaagccttcagccagagtgcacacctgaggaagcaccagagggtccacactggagagaagccttatgagtgtaatgattgtggcaagcccttcagtcgggtctccaacctcattaagcaccacagggttcacactggagagaagccctataagtgcagtgactgtgggaaagcatttagtcagagctccagccttattcagcatcggagaattcacactgggagaaaagcctcacgtgtgttaatgtatgtgggaaaagcctttagttattagcttcagtgctccgaaagcaccagattcatccacacggggagaggaaggccgtacagatgcagtgttntgtggggaagggctttcag

SEQ ID NO: 462518 - DNA, 478 bp, Homo Sapiens
  misc_feature (155)..(155): n is a, c, g, or t
  misc_feature (166)..(166): n is a, c, g, or t
  misc_feature (181)..(181): n is a, c, g, or t
  misc_feature (213)..(213): n is a, c, g, or t
  misc_feature (218)..(218): n is a, c, g, or t
  misc_feature (303)..(303): n is a, c, g, or t
  misc_feature (418)..(418): n is a, c, g, or t
  misc_feature (465)..(465): n is a, c, g, or t
ctccccttgaaaactgctgctgaggctcctgttaaattttctgtggcatcttttatgccttggtaaaaactgcagtgtctttggacctgagagtggctactccgtggttttgtgacctgtaagcgtggggttcaggggtgtgtggccctgcaggntcccacgcctncctgagcactgactngaagtttcactggctggtggctgtcccttctnccatnagggtccccagcaaagttaactacacagaggacccaggggaaacgagctgtgtagccactgacttgctcgcgcggccgtggctantgaggggcactcgccggttaagacagggtgggagtagtgctttccagttcagactctaacttctcccaaagtgtcctaagaaaatactggatcggctcatagatttatgctcctnattgatgccctaacttgggaaggttattctagggacaagccgggcantgtccccacacac

SEQ ID NO: 462519 - DNA, 537 bp, Homo Sapiens
  misc_feature (13)..(13): n is a, c, g, or t
ccccaaaattcgnggaacattgaagatactttttccaagtttgaagcgctggcttgtggggagagtgcaacactcctgaagagcagtttttccccacagaggatatgtgtaacaggctttgtccctggcacaaaaactctggtgactcatcttctccctgggatggggttttctcctcactctcccctggagaatttctacattgccttcttgatgttggctcactctccaagcctttttgtagctcagagtgccaataaactcctctggactttctctgtaaagccttgtttatttctacttcctctgaatcatcccattttagattttcttttttaatctcgttcttgaactcaaaaccaagtctgtttgggaacagcactggcaggtctagtttcctgacttcctggccaggattcctgaagtccttttcatccctgtctgcaccatccacagtgccatcttctacctccgtgggttccccattctggtgattcagctctccagcctcaatatcacttccttcttggccaggaa

SEQ ID NO: 462520 - DNA, 343 bp, Homo Sapiens
cacttatgaatgatatattttatattactccccaaagaattattacaagctttaggagtactcaaagcaacaaggttaaatgaagaataaatttaccaatttgcaaaatttaattttatacacatacacaaataaaacaatttttaacaaatttaaaattcatggtccaccaaattatttttcattatttaactcaataggaactttcagatcaacacgtacatattgtaaaaaatagttgactccacattatgcaatatactttagcaaaggaatattaaaatagtagataagaaagggcactggagttttgtaaaacaggaaaaaagaagtcctgtatttt

SEQ ID NO: 462521 - DNA, 469 bp, Homo Sapiens
  misc_feature (204)..(390): n is a, c, g, or t
gaataagtcattttattttctttggtagtttgcctaattgattatatgaaaaactaattagaatactgaatttactgtatatttaccacgataactataaaagcagaaaattagctttgaaaatcaaataacatatttagtaacacacattcatttttataaacacacataaagacaccagggttctcagtaatgctctagtcnnnnnnnnnnnnnnnnnnnnnnnnnnnnnnnnnnnnnnnnnnnnnnnnnnnnnnnnnnnnnnnnnnnnnnnnnnnnnnnnnnnnnnnnnnnnnnnnnnnnnnnnnnnnnnnnnnnnnnnnnnnnnnnnnnnnnnnnnnnnnnnnnnnnnnnnnnnnnnnnnnnnnnnnnnnnnnnnnnnnnnnnnnnctctaatctagtatactaagctttaaagtggtgtttcataaaaaataagatgagactttaatactactaattcagcctt

SEQ ID NO: 462522 - DNA, 418 bp, Homo Sapiens
  misc_feature (182)..(182): n is a, c, g, or t
acgtttttaaaaaatatttatttaaaaataagatttcaaaaaatacagtacttaatacattttgagaagtaaaaattccacaatttaaattaaaaacaatctgcaaagaaaatagaaatattacgtgaaaaaaactaaatcgctacaataaattaaaaacaacaacattgttcttaaggtangatacatggtttgattttcacattaagaaccagtgtagacttttcatctaaacaaatacatctcagctacatggttcccacttgtcatttcacccattttactcactcttctcaatctattcttacatctctcaactactattttccctaattaccctcaacactaggaatattggtgaagattttcttcaaattctcttaggggaaaagacaaggtaaaaataatagaccaatgc

SEQ ID NO: 462523 - DNA, 461 bp, Homo Sapiens
  misc_feature (17)..(17): n is a, c, g, or t
  misc_feature (27)..(27): n is a, c, g, or t
  misc_feature (47)..(47): n is a, c, g, or t
  misc_feature (56)..(56): n is a, c, g, or t
  misc_feature (377)..(377): n is a, c, g, or t
  misc_feature (380)..(380): n is a, c, g, or t
  misc_feature (387)..(387): n is a, c, g, or t
  misc_feature (389)..(389): n is a, c, g, or t
  misc_feature (391)..(391): n is a, c, g, or t
  misc_feature (437)..(437): n is a, c, g, or t
ccttcaattgtgtacancttctccctnccttcccaggcccaaagaanaggttgaantaatgcttaatctagttatgggaaggggaaagaaaagcttagtccacagagcaaaccccgcacggaatctgcaagaacccttagatatatttgactttgtccactcccttcctccttgcttcgctaaagcccacacctcttgggatggaacctaacgtgccttccgcttacaaatcgctctgctaggttagccccaaccaccatgcaacctttacgaagttacttgtgcgtccacactgagcgcggatcacctcagccacagcccaatagagcaaggaaccaggagctcccgaagcccggacacgagccgcggccagtgcntgngccctcnangnctgcgctcacgtggtagcggccccgggcacgtgcgcctccgacctnttagggcgagagggaacgccgccc

SEQ ID NO: 462524 - DNA, 385 bp, Homo Sapiens
  misc_feature (92)..(92): n is a, c, g, or t
  misc_feature (153)..(153): n is a, c, g, or t
  misc_feature (269)..(269): n is a, c, g, or t
  misc_feature (280)..(280): n is a, c, g, or t
  misc_feature (289)..(289): n is a, c, g, or t
  misc_feature (312)..(312): n is a, c, g, or t
  misc_feature (320)..(320): n is a, c, g, or t
  misc_feature (324)..(324): n is a, c, g, or t
  misc_feature (349)..(349): n is a, c, g, or t
gagagtaaaaaagctgtaggctttattaacgcagagtgacagtacaaagctttcacagcgtggaaggggtcccgagcggggtacgccacgtnttagatttttttatcaccttttaaactctctaaggcaggaaatatgtgtggtgggaagatnttaccagagggagaaacaaagacaattaacatgtctcagatcttgaggaaaactggatttgtaacttaagttttctctacttataaccttgcagcgggatggcaaaggagacaggntctcacggggnttttacaanttgtgtttacaagggatttgggntttggggncccntaggataaggtctgctggtcacagnaaagtggggcttttaacattcccttttagtttcagg

SEQ ID NO: 462525 - DNA, 488 bp, Homo Sapiens
gaccataaatattttattattgacaaacgttttttaaaaatgtttcttggatttaatagtgaagtgaaatttcactattcaaagagtaacataaattttttttatactaactattcaattcacaaaagtatacacaattggctcattaatctacatgcctgtacaatgctagaattcttttacataaaataaagtactaaggaaaaatgaaatcagtgtctttctttacaagtagagataatacaaacctttaaaaatactatttgggtatgttttctgatacaaactgctgttttcaggaactcagtgttgtaacatttgagcaatctcatgaataatttttgtgcattgtttaccatgtgctaaaccttttatgtggattttccatcagttttcaattaaaaaaatcaaagcttggacattctgagtcagagcgccaaggtcacacagccgtgagttatggaacgggcattgaacccaggctgact

SEQ ID NO: 462526 - DNA, 535 bp, Homo Sapiens
  misc_feature (24)..(24): n is a, c, g, or t
  misc_feature (34)..(34): n is a, c, g, or t
  misc_feature (50)..(50): n is a, c, g, or t
  misc_feature (86)..(86): n is a, c, g, or t
  misc_feature (92)..(92): n is a, c, g, or t
  misc_feature (117)..(117): n is a, c, g, or t
cctttggaacttttactaaaaaanaaccctgccnggggtcaccttaaaantggtcaaacctttaaaacatttttacctaaattggnaaacancccttaagaaggtaagtacctaaanggttcctagccctaatagtaaaaaatcccataatggtccgccggcccaaaactcaaacatcgctctttttccctcgaatctttccacaaaaaacataatccctaaaaattaaaacatctttacaataatgaaaaacctacttttaaaatgccatgtgtttctacattaaggggagaaagtttttcattttttgtttgtacaagttgagcatttcaggaagtcattggtatccattgataacaaccacgttctccattttcccagaagagccaggagccactttcagtcctagttaacgaaaacgcatgcataaatcaaccactcgggtcggtcggtcttctccactccttcagcagaggaccgtcggcgcccggctgcctcgcccgcctgcctgtctctaggctgcgggaggattaga

SEQ ID NO: 462527 - DNA, 459 bp, Homo Sapiens
  misc_feature (304)..(320): n is a, c, g, or t
  misc_feature (374)..(374): n is a, c, g, or t
  misc_feature (417)..(417): n is a, c, g, or t
  misc_feature (434)..(434): n is a, c, g, or t
  misc_feature (449)..(449): n is a, c, g, or t
ttaaggggaaattggggtttctgtgaatctttacaggacatagccatggagacaatcactatgttaagtaagttgctgttttcccaattgggcttcagtttcctgagacaaaaaagtgaggaagttggattaattgtttcttcaagtcctttccagctctaaagttgtgggttattttacaaaatatccattggtgccacctttcagtgactcttcctatgtttataagaaccaagaaatttaaattttgaagattggaaaaatcacctgggtccatctttttccttttcacatctctctctcnnnnnnnnnnnnnnnnnatcatttccccaggacaacaggaaacagacaaccttccaaatcctctatattgncagttgccttccacacacaggttttaaaaagggggttcaaagnggggtgggtgaaggtcnggtggggattggctnccttgggggg

SEQ ID NO: 462528 - DNA, 447 bp, Homo Sapiens
  misc_feature (428)..(428): n is a, c, g, or t
ctattttaaaaatatatatatgtatagtagctgtccaggcgttaccatggtaggagataagttgcaggcagaaatcagtgaatatggtggtcattgtgccagtcattacatcactttataaagcgatgttggtaactgagctgcaatagaaatttcgggagagaataagaaatatgaaagactgtactacagattctaggaaaggtaagaggaaaggagcctcttcatcatgttttgtaggaataaatgttaccattgttcatttaaaacctaggatagaggaaatcatgtgcccggatgtcataatctgtatggttctttcctgtggattacttgattaaaaatgttatggggaatgcatttggggcaggggttaagtttaatggaaaaggatttgggggatactggaacttggggattaaaaaatntggtatttatagggtgtcc

SEQ ID NO: 462529 - DNA, 167 bp, Homo Sapiens
aacactgaccatgaactccttgggggcaagaccactatctcattgggtctttgtaacctgtctccacacagatactactgggttaggagacagtatccatacaatttcacttctgtatcttcaactgcccagcagagtgttaagtgcttcatacatatctgctggaa

SEQ ID NO: 462530 - DNA, 501 bp, Homo Sapiens
  misc_feature (45)..(45): n is a, c, g, or t
  misc_feature (55)..(55): n is a, c, g, or t
  misc_feature (78)..(78): n is a, c, g, or t
  misc_feature (83)..(83): n is a, c, g, or t
gacccctgcaacccccagtaattaaagttttgaattgcctaatgnggaatccccnaaaaacctccctgtaaaaacccnagcancccaggtggggaacaaaaccccctaaaattccagattttaatacatgggcccacctgtatggtccaattttgccaacaacactatgacccaaggcattctgatagctgtccaagattttctgtactagaaattaatatgaagtgtattgacgtgaagaagaatgatttatcatatggaaggaagtcccaaggctccctgggcgctgaggtgggcgacggaggtgggtggcgtaccttcagaggaaagggaaggggtgctcccttgtaccgtgaattgggcaacaggcttggagcagctgtgaaaggaaacatcctcaatttcttctggctagatgccacaggaaataaattatcccaaaggaaaatgtggttggctatgggccagactctcagaatctaggcaaatcagtgactgttt

SEQ ID NO: 462531 - DNA, 573 bp, Homo Sapiens
  misc_feature (16)..(16): n is a, c, g, or t
  misc_feature (34)..(34): n is a, c, g, or t
  misc_feature (93)..(93): n is a, c, g, or t
gtgcctaaactaaacnccaaaccccaaaacaganaatgctgggtggaactgggttacaaagattaaaaactcaagggtctccatcccccaaanaccttcaaaccccaggctcccagggctgccaaccctgaagaacccctaaatcatgaatttgggccactttggctggatttccctagcaactggctgaagagcaggacaggtaaaacagagttgggaggaggaagcaaaaaaaggctaagagtggacatcaagttgactttgcctgcccatggtagagactttcagtcatccaccataatccatccccattctgctgcacagaagtattgtggctgagacacctgcttttctccacccctctagttaatgtgactaaattctccctatggaatgggaatggaagggccatacccaggccagtgtcttcaggtaggggctgtgacccttccacacctgtaccagacacaatcatcatctcactgggttttgccagctttcaggtctatgtgctgaaagctcttacagctaacctctgcagattttcctggcacaggaggcatgcttggccag

SEQ ID NO: 462532 - DNA, 578 bp, Homo Sapiens
  misc_feature (28)..(28): n is a, c, g, or t
  misc_feature (46)..(46): n is a, c, g, or t
  misc_feature (61)..(61): n is a, c, g, or t
  misc_feature (70)..(70): n is a, c, g, or t
  misc_feature (84)..(84): n is a, c, g, or t
  misc_feature (104)..(104): n is a, c, g, or t
cttttgggtctcacctgcccctctgaangcaaaccccggcccctgngggttcccaggagtncgggtgagnagtgctgcccccangatgccaacacgaaaagccntcggcctaatatgccaattctgttcctgaaaatgccagaaaatgcccctcctaagtggttaagactccgttaaaaggcagagcccaacctctcctacttgaactaggtaagttctggggctcctaatggacggcaaggtgactagagtcaacaatactgtacacctgaaatgtgctaacagtaggtctcaactgctctcactacacacacaagcaacaaggtgaggtgacagatgtgttcactaacttgtgtggtaatcatgtcacaatacatacatgtatcaattcagcactttgtacacctttgttacaatttcatttgtcaatcacacctcgatagagttgggaaaaaaataagtaaaaggaaatgcagaaccgcaagtgaaaaggaggcccatgagcacttagcctagcgaagcctgttcccctgaacactcttaagaccctagaattccatgtttattagtacgtatgt

SEQ ID NO: 462533 - DNA, 546 bp, Homo Sapiens
  misc_feature (26)..(26): n is a, c, g, or t
  misc_feature (33)..(33): n is a, c, g, or t
  misc_feature (38)..(38): n is a, c, g, or t
  misc_feature (85)..(85): n is a, c, g, or t
aattttccctggaaccctggaaatgnacactancggantatgaaaaccttatatttaggactctatttggggcaaacttcatccnaaactgaactcattccattcatgcattcaattcattcccataagtgttaccttaaaagcagtattactttttaacagaaacgtgacgggatgcctactttagaccccatttttgggcagttgcatcctcaaacatcagacaaagcagactgaaagctgcaggtgaaacctccatgagggtggcttagaaaactgttctgaaatggggatgccttcttccctggaaacctaagtggaatcaggattttttcctttcccaaaaggaggatgtctctaaatccaaacctagttggcacccaccctccttcatgctggcatctttgtattgagctcccaaatcctaggcttcacctgaaactcaaatggatgggtgcagatactgaggactggtctttgcacactgtgagacctcagctctctggccgactagtctttccatttcacaacttgctgggattccag

SEQ ID NO: 462534 - DNA, 523 bp, Homo Sapiens
gcacctggtgaaaacctactttgtgatcaaccccaaggtcagtatcattgtaaagagtctatgatgaaaagggaggaggagcaaattattgatattcataagtgtttttagtcaatatccaatataattctttgctactctttgtccccaaaatattttaaatgccatatggtggtttaattacagaagatgttttgtaattatgaattcaaatacttattaaatgagcagttgaaatgcactgcttttctgcaggggtgttgatgcaggttgctagttcaggctgtcatgtgtgttagtcggtgtattccttggtggatgctgcatctgaaagcctcccagtgggcacagctgttgatacctcctcctcacaagaagcctggatggtgtcaaagtgcccaggaagcctagacgtggcgacacttggtcctcctaaacttgattccataagatccgtgaatgaggctccccctagtggccagctgcaattcctcctccttgtgctttcgatagcagagataat

SEQ ID NO: 462535 - DNA, 412 bp, Homo Sapiens
  misc_feature (12)..(12): n is a, c, g, or t
  misc_feature (21)..(21): n is a, c, g, or t
  misc_feature (42)..(42): n is a, c, g, or t
  misc_feature (82)..(82): n is a, c, g, or t
ctttagggaatnggttattanttttaaccaaaatggttaaanaattactcccaacttatcctggcttaagcaactggaaggnaaaaagttgcccatcaacaaagtcagggaaattgttaaagccggttggaaagtaaattgtcagtccgcgttgaagtgccaggatgactggaagacacccagtagagatactgggtaggtaagtggagaggagtggttggaattgagaaaatgcagaagctgccctcgtctgatactgacagccacgagcgtgcaggagaccaccgtgaggaagtgtggaaggagcagagaggaggactaggacagggacgtggactggacgtgagacattcctatgctgagaagtcaagaagaatgtgtcctcgcagctcctcctgcagacctcacagtg

SEQ ID NO: 462536 - DNA, 477 bp, Homo Sapiens
  misc_feature (31)..(31): n is a, c, g, or t
tcctttcccctgttttcctgcctaaaagcantcccccctgagcctatggggttaagttcctgagcccacgactgaactgccttaactagcatgccctgttttgccatacccagtagaatcaagtcccagttttgcccatttgtggataactatgacaagatacaaaagcatgtgtttgcccataaatagcccctggctaacagcaaaccgctcacactgagcagatcaaattctctataaggagcacagtctggaccatagccaaatcccactactaatgtttaagactgctattatcaattcctattccaattcaatttgcaaaatatattcagaaatagtaggtgaaatgactgttccgaaacatcagaagtatcattaaacttttaaaggacattttacaaattattttcattacgaccaaataagcaataagagcttcctgcttctactatacaactacttagaaatgtaaat

SEQ ID NO: 462537 - DNA, 400 bp, Homo Sapiens
  misc_feature (383)..(383): n is a, c, g, or t
catccccaagagcagaaaacgcctatgaaaaaagggtgaacttgaagaggctgcctttcctcatcctacccaggcgcaaggcatagttaactttatttcctttctgattcattgaaagtcgtgcctgccagatgtagaataatgaaactacccctagtgagaaaagctttgcatagagaatttaaaataagttcagtgaattctcaataaaagttctttaaaaatcaatagtcacaaaggtacttgtatctctcacacaatttcttcagtgtgaaacattaaagttagttccttctcttggatgcatacagtttcactgagaataacatcatgtttaacagccgctttctattgacctttcccaagtgaccttacagtaaagnaacttttgctcgcttct

SEQ ID NO: 462538 - DNA, 569 bp, Homo Sapiens
  misc_feature (179)..(194): n is a, c, g, or t
ccaaccataaggggcccaaaaataaacccttaaatttaatttaacccttaaaagggtagagccccctacacctgagacccctcccccttttcctggtgttaaaatgtccttttgttaaatgatagtgatagtagatagtagttgttttattaatgatgtccctatcaatctcctccccnnnnnnnnnnnnnnnnctgttcaattaaatacagaagtctaaagaactactgcctaaaagttatcataacattgaatttagcctttgattgactacttcccaaataatgtggaggcttcattgatttattagtatgcactttgaatagtaattactttgtggatgttcagaaaaagccatgcagctacctatgtaacagctcaaactcaaaagctacgggcatttaaagttgcctatgaatagatctataattcaatgtaacaatatgtaacaagagatactataactctcaaaatggactaaaattgtaaatctatagatataaataaatgttcagattctcacatcaaaggaatctttgacatgagatccaggaatctgttgtaatcac

SEQ ID NO: 462539 - DNA, 460 bp, Homo Sapiens
  misc_feature (68)..(68): n is a, c, g, or t
  misc_feature (84)..(84): n is a, c, g, or t
  misc_feature (132)..(132): n is a, c, g, or t
  misc_feature (161)..(161): n is a, c, g, or t
agtgtggagcgcgtaataggaatcaccctcctactgcgcgttttcaaagaccaagcgctgggtgcacncgggccgcgcgtctgntttaggcagggcagggtagtgcagggaaccttccccggggttcgggtntcggggttcggttgcagggctgcagcgcncttggctttctccctcacccaagtttccggagagccgacctaaaagtaacaatagataaggtttcctgctccagtgtatctcaaaagaccgggcgccaggggggggggacctagggcgacgtctttcagagtccgccagtgttggggttgttcgcgcaaaccttgcaggctcccgagtgggggcctgcctggggtctctaagaggggtttgttgccttttcaagcggttgcctaaaggaagttatttttctttgttttaacatatatatttaatttaatttaattttgtcctgtttggg

SEQ ID NO: 462540 - DNA, 466 bp, Homo Sapiens
  misc_feature (30)..(30): n is a, c, g, or t
gttcaattttcccaattaaatgccctgaanaccccagaacccctcaaccctgcccacatccctcttgttcccctaggttcccatatttgctggtggctgctcccagtgaatggggtggagcatatggcactgatgatggggaaacgggaattgaaagtaactagggtggaatgcccaatggtaaatagacctctgcccactgggtccccttacgactgtcctcccaccgacatggtatgcccactgtgaaccaagaggaggctgagttgggagaccttgtggaatgcccagggaaggatgtaggtaggatacttgggaggagggtagcagggtggttgggcaccacccgcacatggaattagggctgggatatgctgaagcatggggtggggcattagattttgaattagaggacctggaaccaaccctaccacctcccacgcatttagccaatgtgtgtggggca

SEQ ID NO: 462541 - DNA, 491 bp, Homo Sapiens
  misc_feature (47)..(47): n is a, c, g, or t
  misc_feature (128)..(128): n is a, c, g, or t
aatacttgtaattataaggaggtatacccctgaatgatggaaaccgncagatgagtaaagactgaagcaagttcccactgaagaccctgggaggtccttctgttgtaatcctccgttgcctcacctgnagtggaatctccaattgggctacaggataaagatgactgccctggttgtttcctgaaaattaactacacttgaatttgatagataactatgtaaggagtgctgtgaaccagtcagttgtgcctgaattgactgggtacctgaaggccgctgatggtgtttaataacactacattctcgaagaagagctctttcaatggaagcagtagaactagtaaagagagttgaactgtaggcttgaggagtctgctgggatcccccaagtgctgaaggcaacaaactaaattgaggttgtaaaagatggggtgcagactcttgagctgagcggtatgttgaagactgaggtggtatgctgttacttaata

SEQ ID NO: 462542 - DNA, 394 bp, Homo Sapiens
  misc_feature (267)..(267): n is a, c, g, or t
  misc_feature (353)..(353): n is a, c, g, or t
caaatagaagttttaattttaagcattccttatgatattttttaagcctaaaaaccattcaaattgcttgacaaaattatttcatggtgaattttataaggttgatagaagtaaaagctatttttcccaaaacaaacaaaataccatacatagttttttgggtttggtttgttgatgtcatgccaatttccaagcaccaactggttaccacaaacatggggaatatttagtgatatctttgtagtcatcgttaaaattcctgggganaaaaaggaaaaagtttacgtcaaagggaaaattcacctcccacaagggaaagtctgaggatgttcatcctggacatttgcgttccnggattatttgtgggggcatttcttcattgtggactgtaggg

SEQ ID NO: 462543 - DNA, 462 bp, Homo Sapiens
  misc_feature (11)..(11): n is a, c, g, or t
  misc_feature (106)..(106): n is a, c, g, or t
  misc_feature (175)..(175): n is a, c, g, or t
  misc_feature (314)..(340): n is a, c, g, or t
gatctccaacnggccatacaggtgaaaataatgtgccccatatgtacccgtaatggatcccactttacaatattccaggtagcattcccaatttttagagataaancctttcccaatcaccttacttttaacatgtagggggcaaataactaagagattagcttgtagcttttangcgtatgtatcctgcacactattcctcctccagatttgcctgcagttgctccccatttaatatatttggtcccatggtcccattgttccaatacgtaattcctacctgtcacaccatacatattttatacataaatacnnnnnnnnnnnnnnnnnnnnnnnnnnnaaataaagtttggcctttgcaaatatggtaacagctatgttaatttttatcctggagaagtaagatgagggatgctgatttcaaaggagtggaagatgctggaaggatgcatgctgtcttca

SEQ ID NO: 462544 - DNA, 552 bp, Homo Sapiens
  misc_feature (29)..(29): n is a, c, g, or t
  misc_feature (45)..(45): n is a, c, g, or t
  misc_feature (57)..(57): n is a, c, g, or t
  misc_feature (67)..(83): n is a, c, g, or t
  misc_feature (100)..(100): n is a, c, g, or t
  misc_feature (121)..(121): n is a, c, g, or t
  misc_feature (143)..(143): n is a, c, g, or t
  misc_feature (191)..(191): n is a, c, g, or t
  misc_feature (252)..(252): n is a, c, g, or t
  misc_feature (254)..(254): n is a, c, g, or t
  misc_feature (260)..(260): n is a, c, g, or t
  misc_feature (476)..(477): n is a, c, g, or t
  misc_feature (486)..(486): n is a, c, g, or t
  misc_feature (525)..(525): n is a, c, g, or t
cctttttgaaatcactgactgaactaatncattccttatttgggnaaccattttggntaaatatttnnnnnnnnnnnnnnnnntgtcaaatgaacactgnacaccgaaatcgtttaataancttgttcctaaaacccaacaanttctccttcttgtgttcccagaattaccacaacatgctcccctggcancggagggaaaggggcggtgggcgtccccagtgctctcagctgggaagggggcccctcgtcncncgcctncgctcggccgcttgcaggtgagcatgagcagcagcagcagcggcaggtccacaggctgcagaagaacagtctcgcgagctctgcggtctgcgtccacgtagaagcggaagccgaggtaggagatgtacgcattgatgggaagggccatgatggggaaggtccatgtggtgatgtccagcacaggggctgctgcggagagcacgagcagggccaggnnagtggcgcngccacgcgccgcacaggcccgggtgggtgaccgacatcnatcagtagccgccccgggagtagtctt

SEQ ID NO: 462545 - DNA, 458 bp, Homo Sapiens
  misc_feature (343)..(343): n is a, c, g, or t
  misc_feature (378)..(378): n is a, c, g, or t
  misc_feature (420)..(420): n is a, c, g, or t
tgaatgataagattaccacttttcagatcattaactttacatataagaaaaattccctgagtaagccattgctgggggaaaaattataaacttttcatgtcatgatactttatttatttccataaaaacttaacatcacttcttgatattttctaattgagagctctttattgaaaaatagcaactttctaaattaagagctccttattgaaaatagcagtttgtgcacacaataggcataacattcttttctgtattttgaggaattaaggaaaataaatgtttttaaaggtatatggcccatagtggatatttaacacattaagggtgtggatgtattttntgaagtgtcttaggaaggaaagccaatgtgggatnttggcaggggtcactgtgggaaatgtgttatccggtggaccnttttagtttgttaaatggcacaaaggggaaggatgttc

SEQ ID NO: 462546 - DNA, 369 bp, Homo Sapiens
  misc_feature (33)..(33): n is a, c, g, or t
  misc_feature (55)..(55): n is a, c, g, or t
ttggggccaggtaacatggcaaccttccaacanttgggaatccaccctaagagancccaaaagcaactgttaaagcagcctccggtaaaatcccatcccacaaacatatatccccctttgattttaaaataatgttgtttcaattaagccccacaaaatatatattgtatatatagtatttctcaagacgtaaattaaatctaaattttgtctttcaaaaactgctttttaaaggtgtcagggttttccaaaacctcatctcagctcctttcttctgattgccgtgtggaccctgtagttttcttgtaatatgtattctagaaggcacatattcaagagtttaagattatgttagttcaagttctacat

SEQ ID NO: 462547 - DNA, 474 bp, Homo Sapiens
  misc_feature (14)..(14): n is a, c, g, or t
  misc_feature (33)..(33): n is a, c, g, or t
  misc_feature (47)..(47): n is a, c, g, or t
  misc_feature (77)..(77): n is a, c, g, or t
  misc_feature (84)..(84): n is a, c, g, or t
  misc_feature (155)..(155): n is a, c, g, or t
caaacctgtggaanttgggcaaaacccctccangcaaaaaacactcnaagcagcaaagattcccccccttgaaggangggtaantgaaagactccactggcccactcctcagtggggaggccaacagcagtttggggttttcctttgccttgaanggaatttggaactgttaactgttaagtttccattggcattttcctgtacaatagtcccttaatccttggaaatgccagcaaagcaacagtaagtcattgcgactgtcccttttccttcccacgtttgcgaagtatagatctcccttttggctcatgtatactctttcatcttgttcgatgtgttctaattcaatattcatccaataaatgtgtaaaggtgggaggcctttgggaggattgcatgggaggacaattggatctcctacgaagttattggctccctcaaaggttcacacacaacattttggtctttactaaa

SEQ ID NO: 462548 - DNA, 429 bp, Homo Sapiens
  misc_feature (371)..(371): n is a, c, g, or t
  misc_feature (417)..(417): n is a, c, g, or t
ttttatgactataacattaccaacagatctataaaagtacagtgtacaacaggaatgaaacttatttaacttaatgaccaacaaatgattgacagcagcttgatctgatgccatgacaactgatacatgaagaaaaaacaagggtttgcattcatgttcacatttgttaatacagtccctcaattatccagaaggcagattgggctatcagtttcctgagggacaaagctggcaaaagatttgctgaggactgttctcaattgctctggggaatttaaaacacttttcatacacattgtctagttcagtgggttctaaactgggggggtggattttcccgggcggggattgttgggggcgatgtctggggngacatttttttaattgtccatgattagggggtacattactgggccnctagtggggtgg

SEQ ID NO: 462549 - DNA, 467 bp, Homo Sapiens
  misc_feature (436)..(436): n is a, c, g, or t
aaccaggtaagactttttaatccagaaattattcctattccctgcaatgtatagggtgctttctatctgcaaaactctaaactcaaatttctgcaggttcagattccaactgtctcatgcgcagagactctcccatcacaaaattcttcccgctccagccatcatctgtttcctcctcagcctttcccttgaaatccagagccctttcctgtccgttagaggcaatcagtcatgtttcagtgaagcttgaggcactgggccccccagtgaaacaaaaccagacatcctgaccccctactcctgcggtctctgcagggcttgctttagcatggcttggcttgtgggggagggggtgtgggcagccattcccacacaaggtcacggcagggatggccacagtgcgttttcaaggagtaggattccacagccttctctncgttaactctggggcttgctgttaaataggc

SEQ ID NO: 462550 - DNA, 605 bp, Homo Sapiens
  misc_feature (11)..(11): n is a, c, g, or t
  misc_feature (40)..(40): n is a, c, g, or t
  misc_feature (53)..(53): n is a, c, g, or t
  misc_feature (72)..(72): n is a, c, g, or t
  misc_feature (392)..(392): n is a, c, g, or t
  misc_feature (487)..(487): n is a, c, g, or t
aactaacaatnatgccattgcatggtaggttgctctggtncggtaagaccttnggagcctgtgaacaagtgncgctccatcaaggtgggacgctctcagaactgttgtgctttagggactactcccctgagtccttgtctcccatttcctcagcattatccccttgtccccagagacaccttatgtcccaggaaccttatgggtgcccataaggttccagatagtgatagcaagagacaggaagaagtaaagcagcatcaaaaagctacatgatagaaatccttgacatctgagtaaggaagcaaagcccagggagatagaagagtgagtagcaggaatgagtgaattgtatatggaacatgattttgactataaactcacctgcctgtganctatagaaattgacttcaagtccccaacctgtgaagagaggaatttgaactcctcaaaatacccctaagttgttttcaggcattcacaatgaggnccaacaaaccaacacaccccagtaattatcattgaagtcccccttttcttctcctcaagctgacattcactgtctgcaaaggcaagacaagtctcttgtctcatccaggcccctgtca

SEQ ID NO: 462551 - DNA, 454 bp, Homo Sapiens
cccacctgtcctggtttcctatcctactaagagcccataaagtaatagaaatacttcctagttgttaagtgccttaatatttgtacctagatttagtcacacgcttttgagaaaacatctagtatgttatgatcagctattcctgagagcttggttgttaatctatatttcctatttccttagtggtagtcatctttgatgaataagactaaagattctcacaggtttaaaattttatgtctactttaagggtaaaattatgaggttatggttctgggtgggttttctctagctaattcatatctcaaagagtctcaaaatgttgaatttcagtgcaagctgaatgagagatgagccatgtacacccaccgtaagacctcattccatgtttgtccagtgcctttcagtgcattatcaaagggaatccttcatggtgttgcctttattttccggg

SEQ ID NO: 462552 - DNA, 362 bp, Homo Sapiens
gattccacatgaactttaaaatcagcctgtgaatttctacaaagaagccagctgctttcctgatagagattgcatagactctgtagatcaattttgggggtattgccatctgaaaaatgttaagtctcctgatacatgaacatcagtctgcttttgggctgccataacaaaataccacggatttggtggcccaacaacaggcatttattttctcacaattcagaagtccaagatcgggtgcaagcaactttagtttctgggtgaggggctctctcctttgggttggcagatgggccgctttcccactcttttgcttcacatgggccttttccttttgtgtgtggggagaggagaaagagttt

SEQ ID NO: 462553 - DNA, 385 bp, Homo Sapiens
  misc_feature (29)..(29): n is a, c, g, or t
aaaaaatttttttaaaatagtttaaaagnctttcccaaatcgaggcatcctgaataatcagacatgtatggtgcctctgcaaatttcaggttactgttgataaaagaccattctaacaactgctgaattgtgggaacgccaactttctcatttttttccataaaaatttgatagaagtaacaatcttgtaccttttgacctgctgatcttatttttagcaaaggttctacccttaaaatatgatgaaacagaatattcaagaattcctcaggatctttttcttcagaggtaaatcctgatgcagcctccaccttttcaagtattttcctcagtttcataatttttgtggcacacacatatccatatattctcagaggattaacaa

SEQ ID NO: 462554 - DNA, 473 bp, Homo Sapiens
  misc_feature (44)..(44): n is a, c, g, or t
aacccccttaaatccccttggccaaaaaaaagagggaagggaanagagtcttaacatttcctaatcccccatacccttattaagcccccaggacagtggactctgccttaccttactcatgccagtaaggtcccattgtacagatggacaatggacaaaaattgtaagttggggaaattatgatttttcaactttacaatggtgtggcgatatgcattcaggagaaaccatacttcgaattctgatgcttttcccagactggtgatatgcagtaaaatactcttacatgagatattcaacactctgttacagaataggctctgtattagatgattttgcccaactgtaggttaacgttaagtgttccgagcaagcttaagttagactaggctaggctataatgttcagtaagttaggtgtcttacacgcattttcaacagacatacaatattttcaacttatgatgggtttat

SEQ ID NO: 462555 - DNA, 459 bp, Homo Sapiens
tgtccatattaaaaatggaataagtgagagttggtcctgtgccattggtggccatatctgggaagaagaggaaaacttggttgaaccaaaccccaacaggtcctgggaggagataaaattgatcccaaatcggttatttaaacttcccactgtttaccttctctgtgcctaggatttgagaacatctgattaggaaaataggggattgaaatatcattggacagtgtaggatgagcaggagagtatggaggatagaaggagggcagagtattttgcggatctaccgggatgagggctggagttcgagtggcactaggctgagtaacctgtggaatgaaagaagcattagcatttattggtggattcatgccaccctcaggaataaaagaaaaaccaaaattttgtgatagtgtatactggtcaggacctgaattatcattaggtacttgtgggcctaat

SEQ ID NO: 462556 - DNA, 407 bp, Homo Sapiens
ttcctttgtcttcttgtcacaaaaagaatttcgtcagtctggaaggggagttttacttacgtaaatggatgtagaccagactcaagcatgtaagaactgtgttaatgtggatttctaagcctctgaatgaatttctaaggcacctaacctattgtttctgaaaatatttactttaaggaccctgtgaggtgatattatgacctccccttccctatgcctcagaaggaaattgaggcaatgaggaaataaagtggtttatccaaggatcacacaggcaagtgggtaggagccacaatctgaacgagggctgccctgaaggcggaccagggtttattggggcaacagctgggggaaaatcagcggttgggacttgggccacatgctcccaaggaaggccacacgtcctt

SEQ ID NO: 462557 - DNA, 188 bp, Homo Sapiens
  misc_feature (86)..(86): n is a, c, g, or t
  misc_feature (131)..(131): n is a, c, g, or t
  misc_feature (154)..(154): n is a, c, g, or t
  misc_feature (178)..(178): n is a, c, g, or t
tgacattcacgcccaggccagttcttcaattcttacagtccctttccatgtcattaaagaactcacactgggagagaaatcttatncaatgttaggaattgtgggtaaagctctctgttgtttcccatttnacatggaaagatgtggaacagtncacattgttggaaaaatagctgtngagagttggg

SEQ ID NO: 462558 - DNA, 196 bp, Homo Sapiens
aataagatgacatgagtgagagtcaacattgatactcagcttcttctttcagacatccaaccacgttgacggtagcgatgatggtggcccctgttgtagacacctgtgcagtaaaagactttatttcacacaggcagataaactgatgtcagatggtatcacttaaagcagtggatctcaaatcttaaagtgcttc

SEQ ID NO: 462559 - DNA, 422 bp, Homo Sapiens
  misc_feature (33)..(33): n is a, c, g, or t
  misc_feature (40)..(40): n is a, c, g, or t
gctttggccctaaaaggggcatttcctctggcngttttcnccccaggagcaagcatgcccaaacttttaccccttttcttaaaagtaccctaactcagggcacaattagacataaattatacccaacaaccctagacagccttcccctccattctcataccctaactcattatttatactttcatgtattgcttctataactaatcttttatcatcaacttctcctccttaccagatcctcttcctctgagctacagatacatttaggttttccatatcctaaaaagcccttcccatgaccatgtcttccctctaaacattaagagagagaggactgtattcatttttcttctcaccgttatcattgcagtctcaatgaaactggcaccctattcctataaccaattacaaccagtaactta

SEQ ID NO: 462560 - DNA, 497 bp, Homo Sapiens
ggaggctgtgtgagaaaggtggaaaaccccaaaacctctggtgaaaacaagaaggcaataatgtagggatatttgaaaaggtcctgccctcatggggatacctattgaagtaagaatggatgattcctaggacaggtgcttgcaaaaatttcaaaggctactactgcatgtgagtcacgtgaggaatgagccaagggactggagtaacatgaccttgattcctaatattgactcccatgtttcattttcttgtgtgactttaatctctttaattttaaattccttatctggaaaatggcaatgatgcttgcctttcttaacacgatgttgtgaggctgaagtgagataagtattagtgaaaatgctttcaaaagattaaagttgttttagtaaaaaggtatttatttctaatagtacatttggaaaaatgttttttgaaaccttcagaggattgcatgatgataatgccactgtagccgtgcttttttgtatctatc

SEQ ID NO: 462561 - DNA, 459 bp, Homo Sapiens
ccagatctaaggcaattttaatagatgggttctcttgttccctacctacaatgaggtaaactgttccatgtcagatcagattcaaaatacctgttcatcttctaatcagatggtaatggccatacccagggcttcctcgaccttgatggttttctccaaatttaaaaagttgggagtagtgtcatccaacttgtcactgagacacttctgtctttaaaatttcacaaatagctctgaagagtatcatgcacctgccccatccacctcagccatgatactgtattaaatcactggaatatggaaacacaggaaacacaaacaatagttttggggtttgtttcttttaaaaatggacatttgtatttaaaagtctttaaatggaggagacatggatttaaacggctggaatttaaaattacattaggttagggatttgggtacatcacaacagtaaaattt

SEQ ID NO: 462562 - DNA, 561 bp, Homo Sapiens
  misc_feature (24)..(24): n is a, c, g, or t
  misc_feature (30)..(30): n is a, c, g, or t
  misc_feature (50)..(50): n is a, c, g, or t
  misc_feature (79)..(93): n is a, c, g, or t
  misc_feature (103)..(103): n is a, c, g, or t
  misc_feature (143)..(143): n is a, c, g, or t
cctgggccttaaaggaaccccctntcaagnggaacctggggaaaagactnccttccccggaggggcacaactggctttnnnnnnnnnnnnnnnctttcatcangccccaaattaacctggatcctaaatattcaaactatccnattattttatatataaatggtccttcccctctcctaactttccccagctcgagcatcctacattccctgacaccgactattagcaaaaatgcacaactccttcccccagctatggggcaaatctttgaaatctgaaacacagcccacaaagttcactgtcaaggcccaggtgatgaggcccacacatgcccggaccttcactcagatttgaaattctagaaatccatactcccagagacatcattttaaaaacaacacaatgtggacgtgcagagtgagatcctctacttccagacctaaacaaagaatatttcaacatatgaccggaatatgatgacaccagattcaccaatgaaaacaaaacctgccgaccattagcagtcgtaccctcatcacaacaactcaactacttagaaat

SEQ ID NO: 462563 - DNA, 471 bp, Homo Sapiens
  misc_feature (13)..(13): n is a, c, g, or t
  misc_feature (79)..(79): n is a, c, g, or t
  misc_feature (128)..(128): n is a, c, g, or t
tttgttaacttanaccaatcccaacttaaagaatccaaactgaactgggaaaaaaggtggttcccccaagcatggaaanggctgttttgtcgaaggcaatggcaataactgtttctttaaaatggganccccaatccatttttccttgctgggcaggtactccccagcccagggcttcctgccacccatgcccatgttctaaggccaacagagttctaatttctccctgggatgggggtgcccaggaggcagagtgggtcaccatctttgctgtttgggcatctcagccagtgcagcctgtgggccttggagagcccaagccaattgggggctgaacaaatccccccaacacagtacagttgctctaccaaaacacagccagactcctcctttaattggttgctcatcccctttcccctgattgggtgagacctccaaaccgtggtctccagccacctcctacagttgtgt

SEQ ID NO: 462564 - DNA, 434 bp, Homo Sapiens
ctgcccaggacacagcagatgcttagtaaacacagatggaattcagagggaaaatgtaggcattgaagaaagttgtcttactgaccatccggaaccaggctaaggatcccctagaaatcatagacctctgaaattatatgcagaattctttatgtgttttcataattaataatagtctaacatattaaattcttagctgtgtgagaggttctgcatgcattatctcatttattctcctcgataaccctgtggaggtaagtattgctattatctctatggtatgtctgtagactttgagattcagacatctgataatggcagaaccagagcctgagtccaagtctgggctccacaccccagcctctttaacactgtgccaattggctttggacactttgcgggggagagatggaatggatcttcaaagggcactc

SEQ ID NO: 462565 - DNA, 502 bp, Homo Sapiens
  misc_feature (29)..(29): n is a, c, g, or t
  misc_feature (84)..(84): n is a, c, g, or t
  misc_feature (91)..(91): n is a, c, g, or t
  misc_feature (102)..(102): n is a, c, g, or t
taaactcccttaaaatggaaaaagggttntcaaaaaaaccctcctgtaaactaccaatgctgggaactcctcctgggtcaacancttaagnctaagcaacanttacggggtccctgcccaaaggcctttggtgaactagtgtctggctatggctgctgtatattcaaatgctcaagggctctttagtccagaggtactgaaatcctgcccacgccctaggtctttcatttccagggccgcaggttcccttctggccccagggtgagtctagaaatgtcatctgggagctatgtcctagtattggggtctttatggattagatttgtgctttattgtactacggctgagctgttaccgaagttgcaagacaaagttctctttactcttctctctcttttcctcaagctggaggaattctcccagaattgtgagctgtgttgccagagttgggggagggatgacactccctttgctgctccagctggtttcttactgagttaca

SEQ ID NO: 462566 - DNA, 402 bp, Homo Sapiens
  misc_feature (326)..(326): n is a, c, g, or t
  misc_feature (338)..(347): n is a, c, g, or t
  misc_feature (381)..(381): n is a, c, g, or t
gtattttaaaaaaatatgtaatttttataaaaagaaaacttgtttttcattcaaacttgtcatttttactttggtaactttttcataggtcctaaaagaaaactgttttgagaaactactgtaagtaccttttccacatccctttgccttctcctctttccaaattctttctacaaaaataacacttgatgctggaaaaacccttgcctacgttctttcaatcgtcacatcaggaactagttccaagagaagcctgcatttctgctctcatgctgatctcaaaaaccccacttcaacactggcaactttattcataggcagttttncatcccaggaannnnnnnnnnaattaatggacaggacatgttgttggaaaaaaantcacaccttgggtttcttagg

SEQ ID NO: 462567 - DNA, 1254 bp, Homo Sapiens
  misc_feature (1222)..(1222): n is a, c, g, or t
  misc_feature (1232)..(1232): n is a, c, g, or t
caagaatagttcctttctagaaatgttttttttgccttactcaccttgcaattttcttctcatctacttaactggttatcttgcctgtgtaagatttaattaatattgactaccttttcttggtgatgaacaaaatgatatcctatacagaaatgaatttcctaagggtttaaaccctgttttcactaacattttctactttttcctttttcagaacaggctattctatttcttagctcataggctttctttttaaagactatatgatcattcactcctttttctctggaagaactgtgtaagttgcttaaaatgcatagcagttagctagaaatatcagtgccatggatggatcaaaaatttggaataactaatttttaaagataaaattctttgcatgattttttttctagggccataccttttggtgcaaccagaatcagaaaatggcctctgttagtaagcttatagaaacctaaaaataataatggaattatattgtaatttgactgcttggaatttgtgtaagtaccatatggcccaaggcactattatagtatcctcactttaaaaagaaaaacacttggaaccacaatgtgagtaaaatattatagcagaacgctttgtggtagacactgaaaatgttgttgattgatggatagaattaacttctcctcccccaccccagcacacacctgtgaagccaatgatactataaagacataaagaaatcagctactttatatttaatagagagtgaggggagggaaaggagagtgtaggagtaagtgaactgggcttatagtcttgaagagttgcctaaaagataatattttctcattgactctgtttttgattaattttacagttatgattgaaaaagaacaaaatgaacttcctttaaaatgaaattaaaatgtgaaacttgctgacttatttttgtagtagaacttgttaacatcatgttaagggtgctttagtatcacagtctgtgatatatcagaaagggcattagagctatctctatgagccagggagtcctagggctttagtatcccatgtctgccgttttctaggctgagtctatttaattctcaggatcctttgtttcctcaggctatccaaatggataaggaatgtaggtaggaccccaaactatgttctgtggggacccaggttcactgttttaggggggataatcgtaggggatgtaggggtatangtatggtaantggggccctctaggtttagggg

SEQ ID NO: 462568 - DNA, 390 bp, Homo Sapiens
ctactttgactccctctgtcttttctctctttgcccccccagaaattgaatcctctccattgactgcacatctgcatttcagtaggcaagctgcaattattcaatgacagcatgccctgatttttaccatggaaaactggggctggttgagatgacccaggcatgacagtcctctgtcagcaaggcaagaaataagtatctgactaaaaatctcacagcaatgggagagcaccgctgtttaccattctcatagggctgttcaaaatgttgggaccaaggatctgtttccatctaggggcccagacatccctggaaggttccttttctctattacgtctccatagggtctcattttatgctcttaaaattgtcctcgtggacaagagtggg

SEQ ID NO: 462569 - DNA, 467 bp, Homo Sapiens
  misc_feature (17)..(17): n is a, c, g, or t
  misc_feature (68)..(68): n is a, c, g, or t
cctttccttccaagtcncctgtaacagaaatgtccacaaataagcctaaatcctaatagttccccttnaaatggaagccacgtccccaactttgtaatatgaaaattatattggacctcttcttcagacttataaatagtgtctttttgtaggagtccctttttcctgtcaggtatcctaagtgattcaacagttatttccccagagacttttttctttcaataaaaccttttgctgaacaccaaaaaatgtaccattcatgaaatgatagatgtcatcaagattcgttgcaatcttcaaaccaatcaaagagagaaataatgtttggattcccttggtgaattcctgaacaagatggctgtaacagttttccaatggtttagttattaactccaatacctgttgtttgtctttttcttgcaatatgaggatactctccccaatagtatctattccagcacgaccag

SEQ ID NO: 462570 - DNA, 431 bp, Homo Sapiens
aaaaccatacagcatatcgtccttaaatacagcacttaacactgtttttattccctcatttttaagtcccccagaacatcaattctttcccaattgctggcagagaaaaaaggaaagttcgacagtgcacaaattggcatcgctgtccctctacttcccagaacaggaatgcaactttggcccagggtgactccgcacaattagtacgagctgtgctacaccaacatgtatgcaaaggggaaaatggtcagataacaatttccaacagtaatgggatgatgcaggagccctgagaagctgaaaatttacttttgttctgggtttaatgaaataatttggtatccattagagggcagcataagaacaaaaactaagcacagcaagggacgtttcccccgcagattgacaagcacttttcctgaggtaaactt

SEQ ID NO: 462571 - DNA, 512 bp, Homo Sapiens
  misc_feature (411)..(411): n is a, c, g, or t
  misc_feature (450)..(450): n is a, c, g, or t
  misc_feature (487)..(487): n is a, c, g, or t
  misc_feature (499)..(499): n is a, c, g, or t
aaatgtttttttctgccacagacttcgttgtcaattcctcctcatcctaccccaccccattctacatttttccctgagaagcttcagaaatacatcttgcaatatcccatggctccaggttagactgccaatgagaagcactcataggcaattccaaaggtagaagaggagatgccattcatttgctgttggtagccttatacagatatgtgggcatctgcagacagcagatacagcccttttccagcaacttccagggcattctcctgagaaagacctctttggtgtacaagcagcagagatcattgacagactctgcccttcactccccagccctctggaaaggttacctaagcctccaattccctgttattaaatgtcttgctggttggtatacttaggaagagtgtntgggtttcccgaatggaaccctaaggtaagggccaattngtaattcacatcattttttaattttttcaaaatgggnggagttaaggcncccttggttttga

SEQ ID NO: 462572 - DNA, 411 bp, Homo Sapiens
tgagccaagccccacatgtctgtgaaatgtggtcttctagccatagaagtagcttgtgctcctagggtattccttgaggctctgtatgaagaatgtccatttgtttgagtccctaacctacagaatattcctgaccatggaaatgtgatagataggagtaagcacatggaccaaaaggcctgggaggctcatcatttaaggtacaagccaattatgtagtctttgaaagaatgctttgaaattcagcttgcttgattcaattcccaatattttcatttgtattaaaagatttgggcccttacaggttaaaaacaatgtcagtgtaacccaagtggacatttcaaatttgggcttcccaacatgtggatttggacattcactttcatgtggaaataggcggacggccccaaa

SEQ ID NO: 462573 - DNA, 422 bp, Homo Sapiens
  misc_feature (366)..(366): n is a, c, g, or t
tcaaagacacagaggtggcgatgacccattctggttgggacagagtgaaaaaggggttcagctggaggggcctgagaggtgagggtggcagaacgtgtggaggtgtaagctcagcagatggtggacaccctggaggccattgtgaggctctggttctccctctgtgtgatttcaagatccattgcatggttgcagctgagaagtgaacaagccttatgacctggtttctcttgaagaggatctttccggtaggtggccttgagaaaaacacaggagggattgggaggatgtagaaattcctatttgtaagggtttgcgatctgggtatatgtccacttgagccgtgaacttactgtctcgagttcntgtatttctagttggggactgtttctggttaactgctgggagggtatttgggcaca

SEQ ID NO: 462574 - DNA, 446 bp, Homo Sapiens
  misc_feature (19)..(19): n is a, c, g, or t
  misc_feature (24)..(24): n is a, c, g, or t
  misc_feature (56)..(56): n is a, c, g, or t
aagctttaaaaaaatctangtctnaagcattggaatatccggggaaccccctttanaactcggcccaggctcagggaatgaaactccttaaaactggccccaaaacccaggagctccctggggctgagacagatgcagacctgctctcctgcccctcctaccatcccctggcccccatcatccaacagaagtcccaggccagcctgcctcccgctccagtggggcctccattgcgacctgatagacctgtatgggtggctggccccataatcagcatctaccacatcccacgcgcatggggtctctcacagggcccctgcccatggacagatggactgacccacaggcaatcgacatgtggtgctgaagaagccgtgaggaaagggggaggtgggaagggcctcgtccagggtgtctggctgcacaggagacatagagctcccact

SEQ ID NO: 462575 - DNA, 413 bp, Homo Sapiens
  misc_feature (366)..(366): n is a, c, g, or t
  misc_feature (385)..(385): n is a, c, g, or t
taccaatatcccagggatggaattatggtagggtcattctaattccattttatacaagggaaactaaggacccagaaagtttaaatcggtcatttatttgtttgtttatgcatatatccagcaaatatttgttgggtacatactatatataggtcactgtcgtgagcattataatgtctaagcaatcaaatttggagtaaagaacttgaattaagttcattcaattcctagactaacattatttctatatgtagttctgatcagtattctagaattatggtttaaatatccagttataaataatatatattacaggatttattattatgtacctggaaactctactgaggtacttttccatggccnttatcttcattttaatccnatccttaattcccatggaggttaggccc

SEQ ID NO: 462576 - DNA, 470 bp, Homo Sapiens
aaccccctcccataaggcgggaccccacaaagggacttccctgtttcctgtccaccataaaagggatccagaaactccagccccccatttcctggccaaccccttgtttggggtcccactccttgcctgcctgaagagccttttctgttgccttaatgaatgttaatttgccttactcactctctggtatttgtgtgccttattctcttggttgtgggacaagatcttggacctcactaaattaaggagtgaggagactgcaacactaataataaatggatcaattcaccagtaaacataacaattccaaatatatatgcaccaaataacaaagtcttaaacaacatgaagagaaaaattatagaactaaaaaataataaattatagttgtgggttttaacagccttatctcagcaattgatagaattattggacaaaaatttcacaatcagcaagcatgtagaagatct

SEQ ID NO: 462577 - DNA, 505 bp, Homo Sapiens
  misc_feature (17)..(17): n is a, c, g, or t
  misc_feature (366)..(366): n is a, c, g, or t
gaaatgaatgaaatganagtaatacttgtatatacctaaaagcctaaaagaagcttaaagtaactccacactctggtgtgtttccttctggtctgtttttgcctctgatagtattaataggattatataatgtatcctttcaaaaatatatagttttattttgttttcctcccaattaacattgtatcatgctttctcatatcatatgcttctttgaaacatgaacttaggagtgggcaaggtgttctctgaggatgggacattctgctgttttctctttacagtttcaggaaggagggagccccgccgagggcatgaggggccgtgctccccccagagggaaggggatgggttttcctgggtccntgaaggactttgggtcccggagggaggaatttttggatgcttcttgagggaagccgggcccgagggacggagattcttcaggagggtccgaaggttcgggggtacccccacgtagggagggaagggaagggttttactt

SEQ ID NO: 462578 - DNA, 492 bp, Homo Sapiens
  misc_feature (61)..(61): n is a, c, g, or t
aaggggaaagaacactggcccactcgttccactagtccagcctcacccagggatgtggganggagtccaacacctccaaaagctgcctggtgtccatggaacttgggccgccagaagttaaatggagtattggaaacacgaattaattgttcctgaaaaatatgttcctttgaaatggcaaagccctatatgcctagcaagcacaaatcagctatcactaagattagaaaaatctgaattaaagggaaaaaaaatccccactccctccaccccaaggcatgttggtaaagcccaaagattcttcttactttagcattttggctcggctgcaaagcaaaccgccttagggatgttactgatgtttcatatgtactatagcaggtaatccccagaaaagccaaattcctattaagtataagagaacaacagtaaagataataaaatcaatgttaactacttataaaatctttattatttttcctttgtattaag

SEQ ID NO: 462579 - DNA, 487 bp, Homo Sapiens
  misc_feature (31)..(31): n is a, c, g, or t
tctttaaaccgaaaggctgaaacgttaagantttggtaactgtggtaatcccctgtgtaggctgaaataatatttctcggggtctgttgagcaggtgaaggaatctgtcaacaatcttgttttttcctacacccctggttgcccaaccaataataagtgttctccaaggagaaagtctttcagcatatcttccatcactatcacatgctgaatgttgtcatagaaaagaacatcaggcactttcattttctcatgtgcattatagatcggtgcactaacagcaccaatcctcagagttccagatgttacttcacatttgtaatccttcagttctggctccaaattgtcatcagtatttatttctattgtagcatctgccagattttttctaatgctgacctagcaagactgggtaaaaacctggaaaggcaggctttagtaacagcactgtgaagattttcattaggatactgtgacagccgacgag

SEQ ID NO: 462580 - DNA, 417 bp, Homo Sapiens
  misc_feature (22)..(22): n is a, c, g, or t
ggcaactttaccacatatccangttcctccccatcctccagtacccccaagaagaaaggtgttgggtattatccatccattttaccagataacaaagcctggtgccagtgcagaggtccaaataacttgtcccaagattaccttgccctagcttataattagccagagttagggttgcctaaaatttgacaaataggagaaaagggagaggacatactgatgaaattatagagaaagaaaaatacctttgatattgttatctggcagcattacattttgacttcttatgttgagattcaaatataaaataatttggtttatattccttaaactgaattaactttttaagcttaatacttttttagagaaaatgtttatgaatttggtatattctaagcacattgacactaactctac

SEQ ID NO: 462581 - DNA, 114 bp, Homo Sapiens
tttttagaagattcagtgagagccaagttttcttttctcactgtaatcatagggattggttcattaggtaaattaagaaaatgaaattaaaaattaaaacagaaaaggaactcc

SEQ ID NO: 462582 - DNA, 551 bp, Homo Sapiens
  misc_feature (477)..(477): n is a, c, g, or t
  misc_feature (500)..(500): n is a, c, g, or t
  misc_feature (508)..(508): n is a, c, g, or t
  misc_feature (532)..(532): n is a, c, g, or t
ttttttttatgcagaaaaaaatggcaagtgtttatatgaagccagtggttaaaagtaatagggccttttgcttttccattcatttccaaagaggaagattatcttccaaagaccccagtggtgagtaagtggcaggcaacatgcaggaaatgacgcagctgaggagaggaaaattgcagcaacaaacaggtggattttctggggaaggatccctcaatgtgccgtattaagcagccatagatgggtcatttttactgtaaaggctgatcaaggaagataccctgggtttggtagatctctttgaggacgagcaatactgtatcttcagactcccagtagcatagatggctttgtaaagcaaataaatactcatttaaaactttcaataggcttctcctgtagcacatagtcaatgcgttggcctcccttcaggcatccccacattgatagggcaggacttcttctttttacttgccncagggggtctcttcttgtgtttncctcactnggggtttctctggagtttgttccnggtcctgcttcagttcttc

SEQ ID NO: 462583 - DNA, 480 bp, Homo Sapiens
  misc_feature (441)..(441): n is a, c, g, or t
  misc_feature (449)..(449): n is a, c, g, or t
cgggtgcaagtcgtttattcgggagctgattcctggaatcacggagaggtggtgaggaagacagccagggaaggaggagagctgctgagggccacgcgaatgagctctggccagggagccaccaagagtcagtgtaggatgcacctcggaatcatgccactaagggcatggaggctggagtggtaaggaagctggggtatttccactcaatctgggctcttattgttagagaggtgcctctggaaggcatcgaacccctgaaactttcagtctaagctgtccatgtgcagatgatgtcagagaaagccctcagggagagagtcacaggtccttgggtgaaggaagtcatctgcctgtacaggaactttcctccagtagaccaacggaaagtgttgctgggacataaacaacaccacacttgacccaaggccccagaggagntttgggantttggcagccagggggtttcagtgtttcgca

SEQ ID NO: 462584 - DNA, 513 bp, Homo Sapiens
  misc_feature (384)..(384): n is a, c, g, or t
ttttttctggtagttctttattgctctgggtgcttgcacagtactctagaataaaaatgcagtagaatgctaacagttttccagttttgttcaacttctcggtccccagcatgaagcacacagtaggtactttaaaaatattcctgaattgttactgctctcctacccttccccaacagaagctttctgttgtgaagaagtcaatggcttcacaggcagagctctgtttaaatgccacctcaagggagaagccactctatctaaataggccatccactctacctccctactcccctggcatcactttattttcttcctagttccttattcaccacctggacattatataatggaaaacagaggcacagctttgtctttgttggngttcatggctctatcctaatcatctagaacagggattggcaaacttctcatagaaaaaggctacagagtaaatatttttggcttcacatgacctgatgtctttgtttcaactactcaactctgcccttg

SEQ ID NO: 462585 - DNA, 539 bp, Homo Sapiens
atgcctttgacaaccttcagtcactagtggagatcaacctggcacacaataatctaacattactgcctcatgacctcttcactcccttgcatcatctagagcggatacatttacatcacaacccttggaactgtaactgtgacatactgtggctcagctggtggataaaagacatggccccctcgaacacagcttgttgtgcccggtgtaacactcctcccaatctaaaggggaggtacattggagagctcgaccagaattacttcacatgctatgctccggtgattgtggagccccctgcagacctcaatgtcactgaaggcatggcagctgagctgaaatgttcgggcctccacatccctgacatctgtatcttgggttactccaaatgggaacagtcatggacacatggggcgtacaaagtgcggatagctgtgctcagtgatggtacgttaaatttcacaaatgtaactgtgcaagatacaggcatgtacacatgtatggtgagtaattccgttgggaatactactgcttcagcc

SEQ ID NO: 462586 - DNA, 680 bp, Homo Sapiens
ttttttttggcatgactaacaattcattcaatgtgtgtgtactgctatgtgtcctcatgcatgagctatgtcaacaaggacaatctactgataagagaaaatgaaaatgtacaagttgtaggagactaaacatggttttaacttagtacacatttttctgaaatgtcccccgtgattaagttgtgaacaaatgaacatgccacatgtcaacaaactgaacaaacatgggattgttagtgacttagaggtggagggagggctagagagaggctagctgtgttggtctgccaatctcctgtgtcccacactggctacaaaaatacaaccactgggtaggtagggctcatctagaaccagaattaggaataaggattgagaagaaaactcagcaagggtgatgaatgagtttcagctcattgctggagttagctgaagaatgaataggacacagtggatgaaggaacaagctattccggggaccttttgaagccctcggacctcacatccctaatagctaaggaaggataaaatggatgtaggccagtgctaatcgtttgagaaattttgctaaaggaagattttgattcggtagatctgcagtgggcctgaaattctgcatttctgtaagctcccaggtaatattgatgctgctggcccatggatcacattttgagtagcaa

SEQ ID NO: 462587 - DNA, 504 bp, Homo Sapiens
  misc_feature (325)..(333): n is a, c, g, or t
tttttttcatcagcttccgtttagtattatcgtctgcccagaaatgacttttgctgcaactctgcaagccgtccttttcaaacagggctgcactctgggcacattgtattctctgaacttaaccaggacaaagagatggtgagacaatagttagtcaatctcaggatggcagagtctggcattttaaaaataaaccattctgaaattgacatttgtgctaaagtataactttccctttcattttgctctatccacatgggaactagatctctttaaatgtcctctaggaatgtcaggcgtaacaaaggcaggtatttgcatctgnnnnnnnnnaccagcatatcaggaagtgcttaaaacagcgcctggattatttatagtaggtgctcaataaatatgggtttgaacatttattgacacagaaccttgcaaggagcaaaacttggagagattcattgtataaatcaaattgctttatatgaatcatggcctccatgcagacaa

SEQ ID NO: 462588 - DNA, 435 bp, Homo Sapiens
  misc_feature (64)..(64): n is a, c, g, or t
  misc_feature (134)..(134): n is a, c, g, or t
cttttcttatctccagataaggaaacccagaaaagtttagtaacctgacccaaggtcacatatnctgcaaaagtgggggggtcaaaggtcaaattacagtttgacccacccctgtaaggcccacccagatgagnactttgtgcagtagtttgtggggctccagccctgtgttctggttggagaagctgagcttgggacaagggagcactttgccaaggatgggcagggccatctctgccaaacctgtgcaatcttcagggcagcaagaaggctggagatttgcaagtgagaggggaacatgctttgtcttcagaggcccactgagctgctgaaactctggcttgaccagctcttctctcagagtaaacatgggtttttgagggctgtcatcaggcctccatcccagcggcacgtcagccacagcagtgtgagcgg

SEQ ID NO: 462589 - DNA, 459 bp, Homo Sapiens
  misc_feature (15)..(15): n is a, c, g, or t
cagatgtagttttanccttcaaaatgggtcctgcaaagagcctgtgtctgccctcaattgccccgttcccactcggcgagtacttccctttcctcaagttttgtccggaggatcaaggctgatgtctgaatggcccagaactttggttgtgaaagcaaacatgatgtaaatgccagaagctccacttcagttaatgtgtgcactgggttattcttttgaaaattagtgcagattccaagaataatagcgatctcttcagcacacagatccggcatctggaactgttcacaatctgctaactttatgtcattcagaatggtgtcatcattgagctcaagattcttggttaaatgttcctgaggagtgggtgctggagtgaattcacaatttgaaaggacatccccttcccttcttacatctagaatcagttgtgccacataattttcctgaaccgtgttc

SEQ ID NO: 462590 - DNA, 542 bp, Homo Sapiens
ttttttttcatggaggcatcttctatattatggaaatctgaacaattgatataaaacatccttgaaggcaatgatggaaaatgacttacttagaaaacatgttaatatgtaatttctaaagacccagttctggctgcagcactatcatttgctatatgaatctgcacaggctgaattcactgctctgagattcagtgcattcatctaaaatgtattatatgcattattcacctcgttggggttgttttgaaccccaactgaagctcaaacatgtcaatacatcataacgctaaagcactttttaattcttgaaaactgttcttaacaaacagtataggatttgagttgtttatactgtcatagggtgaaaactatatgtgtggtttcactaaaggtctgagggaaaagataatttcagtatttcccactatcaaagcctcccatttcagaaggcatttggctcaaaatattgaaatttcaaaagttgggtgaaaacttggatcactattttcttatttccatgggtaggacctcccttgtgg

SEQ ID NO: 462591 - DNA, 535 bp, Homo Sapiens
gtgaaaggcatgatagtttaacacgttgatcgatactacactttatttagcaagcactgctgtccggtttttggagatgacatgctacttttgcaaagaaaataaagattcagagactatcaattgcaaatggtatataatccatcatgaaagcaaaagagtcagtactagcaattacagatcaacatctttgtaaagcacgtgatgcctaatcccaaaactgctaaatcacaaattcaagaggaaacaagtgtgagcttaggatactgcagcttcttcagggagctcattttgtttaaaagcataccatgttttaaaacttttcactgtgggtattttgtactgaaggtatttgagggatatatttttctccaaggcagaaatacattatatctaggaatgcttggggtttcgtatttcctgtggggcaagtaggttttcccttcagtgtttcaaggtgaaagctgcagcagagtcatgccctttggccctctggttacctttgtttaatcatctggagaaactgcctgctgaa

SEQ ID NO: 462592 - DNA, 503 bp, Homo Sapiens
ttttttttactcaaatgaccacatgccactctaatagagacaaatacttttgtgagttgatagaggtctttatgatgaaggcctgagatctacaaatagaaactagtataagcagagtgcaagtagaaagagaaggccccaggtctcatgcacttaaaaataattagcatttaacagttctgacgtacagattttcaccctaacatgattgtagcaaaatgatcacagaacttggaaaccagtgtggctggctataggcataggcaggatagggaccagtacttaagagctgtggggtcccagttctgggctttgacttctggcgtcaaagttaattgaacaatggtgtcaggattatatcttaattggaaatattgagtatgactgagttgaaatactgtcctcttcttttctatttggccaatatgtcccagagctcttaaagcacaaaggtcctacatgtaagtaaggctgattccctacgtggctacatggagagtcta

SEQ ID NO: 462593 - DNA, 429 bp, Homo Sapiens
  misc_feature (32)..(32): n is a, c, g, or t
  misc_feature (412)..(412): n is a, c, g, or t
atgattacagctcactgcagcctcaacctccnttggctcaactgattctctcatgatgagacaggagtttggcaggactggttttacaaggtacaaatcacaaagaccccactggtaaaatgagatgcgtaaagcagccagaagaacgcacaaaaaccaagatggcaacgaaagcaacctctggtcatccttaaggttcttatacattagcatgggtaaaagacactctcaccagtgccatgacagtttacaaatgacatgggtaacatctgggaatctaccctatatggattaaagggggggagggaactctcagttccggaattccccacccctttcccggaaaactcatgaatagcccactgcttgtttagcatatgatcgagaaacaaccataaaaatagccaaccancagcccccagaatcaaa

SEQ ID NO: 462594 - DNA, 642 bp, Homo Sapiens
  misc_feature (42)..(42): n is a, c, g, or t
  misc_feature (428)..(525): n is a, c, g, or t
cccgtagacaatactggaaaaacagtaaaagcaaacaccagnaaagaagtctacagaacacataaaacaatgtggatggttttgccttaattacctaacactctaaaaataaaaaggctcggtacagacagtggtgaacagagctgttttaaagtattttacatcaacacttgctaaaatgtaaaaagaagtaatttcaaaatattgctttaaatcagagcactgcctacttatgacaaatgtcattctgctactactgagacagaacacagagaaatgccatgggtccaaggctcacaggtccagtttctgggaggagtctcagtctactttaatacaaattcacaaggaaagcactagcagtcactactagaataaactttgaaatgacctcgattccaagcctcactcctctcatggatatgacnnnnnnnnnnnnnnnnnnnnnnnnnnnnnnnnnnnnnnnnnnnnnnnnnnnnnnnnnnnnnnnnnnnnnnnnnnnnnnnnnnnnnnnnnnnnnnnnnnctgataaggggtggtaaatgctcaataaatttattacagcaagcacttcaaagccccaaaataatttcaaaaacctttaagaatgaaacattaggcaaatgccagggccactctcaa

SEQ ID NO: 462595 - DNA, 482 bp, Homo Sapiens
  misc_feature (184)..(184): n is a, c, g, or t
gttttgtaagtattcatgatttttattcattaaagtataaatgtaaattttcctggtttagactcacttatcttcagagttataaacaatattaaattataaaacttacaaccaaagttataatgcttccataaagactaacttcaaatattcatttattcaacaaatatttgttttactgagnctccaaaggagtaacagggcagtctctgtctttatgaggagtaatatttatggggggcaaacagataataaaaatacaaggtaaaataactggcatcattatggggcaattaaggaactataaataatactgtaatagaaactatcaataggcaaggcccctgtttagaataatcagggaagggcttcttgtgttatatttaagcttaggcatgaagaatgagaaggaatcagacataagaacttctggaacagctgtctagtggagaaaagaacagcaaaacttccgtgaagaaaag

SEQ ID NO: 462596 - DNA, 448 bp, Homo Sapiens
ttttttttgtttaaatctgcattagagagatatgcaacattctcaggtaacattgtttctttggttacatcaagattcttctcttcagtgaactctagatgcttcaaagataaagataaaatattttcttctttttcagagataatatcttcattgtctcttgggctagtgcttctatcctcacaagaatatgcacacaactcaatacgttcaattttctctgggaaccgaagaactcataattattgggcactgaaacaaaacattgataatgttccaacattcttgttattttttctttggcttaccccgtggaatgttacgccttgcaagttcctttgggtttaaacttccaccatgtgtctgggttcccgaaaaagggactttatatttgtgtttctgaggacaaaggcaacatatgggttccattccctggcccgtagggttg

SEQ ID NO: 462597 - DNA, 452 bp, Homo Sapiens
  misc_feature (425)..(425): n is a, c, g, or t
gctgctgctctttaaggcactcttgcatagaggaaacagcagaggagacacaaggaaatgcactctcctttataacatgctgctgattctctgaactaggtgtcctctcatttaagcctcaaaagaagctgtgtattaactagatgaaggaactaacactcaaacctgtgatacagcttggccagagtcacactgctggggagcagcaaggttactcatcaagatgtgtctgaccctcaagtttaagtgctctgatttaataactttgctcacaccctgattccagtgtcttagtagcttttgatctataaaatgtcatctaaggatctttgagccttaattctttgtctttaaagtggggaatgataatacctgccacagagtactagttttgggaggttaaataagtggaagggcatttttanatgttcctttaaatgtgtggtcacctt

SEQ ID NO: 462598 - DNA, 549 bp, Homo Sapiens
agatttctttcaggcatttattttaaagagagactacttcatacaaccaggtttgggggatttgagggcttaagagagttactagaaattactgtcagttcttgctgtaaagctatctctgcccctgggacgaatggcctgccaaatggcctcataaatctgattattctcctttcctttttctctttccatgttaaaattcttctggatttaccaggcaacttcagggagagttaaaacaaatgaaacctaacagaaattctgaccctccactgccaccaatggcactcaaggatgcatcatcatgaactgtatttttagaggacttgcaaggtgttatattggggctaactcatattttgggtcatctttggtcacctcctccaaatccctctgatatttattttgaagaccttctgagagtctacaaccacacttgctagaaattcttactcacttaatcttacatgtctcatgctactgtttaattctgttctcttgattttcaaagctctgtctgatggaccttgtattacaatggaccttgta

SEQ ID NO: 462599 - DNA, 549 bp, Homo Sapiens
actcatgagaaaactagaaggagctacctggtcactggcacaaactcacaaagagcttgtaaaaactgcttttgtctgcctaagttggtccaaaaggaatgaggaataaactggcagaaacgcctattcaaagtctatttggaatgctatccttaaaggtactttcctctataaagaaatacaatttagctagatgaaataaatcacaactgttttcacttccttaggttggtttcctttagctagtttgatgtatggtaaatggctaggttagggtcatgtgttaggttaactggaggtttgtggaatagcttattaacgagtatttaaagaaaaagctagttaagggaagctggttaccaaatatctagtaggactgttggataaaaccatctaatccttcactccaacacatcatgatggagattttacaatagcaatctggaatccaacagcctttctaaccaggttaatgtagcacttaagagtacttgctccagttcttatttaatcagtgttattttagaagttactttggattaatccttg

SEQ ID NO: 462600 - DNA, 232 bp, Homo Sapiens
  misc_feature (211)..(211): n is a, c, g, or t
agatgtactatttgagtgcatagagtatgttttacctcatctcaccttcacaacagccctatgggtggggctcaactcttatcctcattttccagatgaggaaagcaaggctcagaggagggaagagacttgcctgagatcatgaaggtggtaagcagtgggaactggggcttcggcggctgggaggtcttggcctcttgggagggggttngggaccaggggaacagaaggt

SEQ ID NO: 462601 - DNA, 436 bp, Homo Sapiens
  misc_feature (382)..(382): n is a, c, g, or t
ttttttttcctctttaatcttactgcccctcattatagtccattgccaaaacaaactgcctcctgttctcagtctcacctcagccaatccatttttcactcttcctccagagtaatatttcaaatagccaaatataaccataacatccctttgcttaaatgcattcaatgcacccttttgcttaaatgcattaaatccatcaccattactgtgggttctcaagctgggatgaatgggtgtaaaaccaggggggcacatgctggcagaggactgggctaaaacctcaccaaatctattttcctctttctcctgaggaacatggactaggaccactttccagctccccttttcagttatagggtcttaggtaaggtcaggaccnggaattcaaatattggggtatggcaattgtggtcaggctaggctctttggctac

SEQ ID NO: 462602 - DNA, 411 bp, Homo Sapiens
aaagaaaacttcctctttattgatcatggctgtggataggaaggcatttgctgaatcacctttatcctgtatggattataattctcaaacaagactattttttaaaggtttaaacatgtatttgttttgtcctcatcccttgactaagggcaaagtttgaaagggactgatgcttcccaaaacagaatttcagaaaatgtctttaattactaaagggataacatcagtaataaagatgggatgggaaatactgtactatgcttctcttgggaatgttctgaccaaattacaaggaactgtagggaggataccgagttttgttggcttgattatcaaatcctagggtaacacccctgtaggttcggtcttttggattccaaccgggtcttaactgtagctcagaatttaaca

SEQ ID NO: 462603 - DNA, 489 bp, Homo Sapiens
gcctgttgttatatagtttattactgtcatagctaagaaaaaggcagtcgatttcaacataatccatatctatgttcaaattctcaaactataggatatctatgtttcaaattgtaatttataacctggtaagtattctaaacaaaatattgacaatccattagctgacctaaaatcttatgaagctgtatcatcagtttaacaaatacacacgactttagcaaaagtatatacagatagtatttataatacttataatacagggcatgggactaaaaaatacaggataaaattggggcaatttaaaagaggagttgcattcaaaatattttttccatttgatatcattaggaattacaaaagcagtaataaaagaatctaatgttaaggcaatgacaaataacaaagataacagttgcccaaggagcgaggggttgggaggtgaatgcacaatcaaggaggggcacaaaacagccttcaggttaattt

SEQ ID NO: 462604 - DNA, 539 bp, Homo Sapiens
aggtcattcttcagtttattaactgagacccaggagagataattccaaagtcattatcaggattaaacaagtcttttgacagactgatgccttttccatcataaactctacaaactgaagagcaacagtgttccagagaacagtgtgaccttcctgtagttttgactctaagccttcagtctaaactctgggatacttcctctttccttttggggaaaattgatctgggcactatttgatccctaccttgaaaggggtgctcaaggaaaaacataaaatatttatgaagtgctttgtttcatgggaagcaatgttccaggatgcaaaacttctgtatgctctgagcagcagtgttggaaacgtacttcagcttaccatacattgtatcagctcttccaaggttgcacatttcactcctgactgcccatgtgtgaaaatctaagaatgtcacacatccctttgccacctttcattaaccatgtttgttcctgagaatggtgcgacatattattaaaatgtccaaaaagggaaataaagga

SEQ ID NO: 462605 - DNA, 550 bp, Homo Sapiens
cattgctaaaacattccaaaatgagtttattacaaaataaatgcacagtcactggaggaaggggttattttatttatacactcgatcttagatttagcaacctttcattttgactcaggattcattgactaacttaagatgggctagtttctgccaacagggcaagagtgtgcaatctcagagtcccacccaacctgggccaaagcaaatgacttctgcattaattaggaagtcatccccaaaggacttgcccttcatgttttccccattttgcccgcttaggatacttggcacaaaaggatggcaccctttgtctttaaagttccctaggttcgatgtttagggcagaaggggcaaatcccgggttattattctgcaaataattttacatttcctttattccaaaaatgtagctaccaacttaaatgtatcatgacacacaaggggtaaaagttagatacgaacttccaatagctagggcatgtttcctgaaacactatcgttcattagtacattattcaagaagttaccttaaccccaaagaatctaa

SEQ ID NO: 462606 - DNA, 432 bp, Homo Sapiens
  misc_feature (203)..(330): n is a, c, g, or t
  misc_feature (353)..(353): n is a, c, g, or t
  misc_feature (373)..(373): n is a, c, g, or t
ggtaaaccagctgtgtttaaagctgggagttaggggactttagaaaggtatttgaatagtacagtatccctccttaaaaagtttttcagctccagtaagagaaacaaattaatatataaataaggtttccacagataacctgcctttaaaacaaaccaaaccaaagaggcaatatgcagttctcataaaaaaatctccagtcnnnnnnnnnnnnnnnnnnnnnnnnnnnnnnnnnnnnnnnnnnnnnnnnnnnnnnnnnnnnnnnnnnnnnnnnnnnnnnnnnnnnnnnnnnnnnnnnnnnnnnnnnnnnnnnnnnnnnnnnnnnnnnnngggaaagttgaggctggcggatntaggacaggcgagcttgggngctttgcaccgggtgaatttttgggccggggtcttaggggcttggacttttttccaggt

SEQ ID NO: 462607 - DNA, 458 bp, Homo Sapiens
  misc_feature (431)..(431): n is a, c, g, or t
  misc_feature (439)..(439): n is a, c, g, or t
aagttcactgctttactattcaataaaatagctttaaaaactgtgaaacagccaagtggccacattctaaacagcgacggagacctccaaaatattctgtccaccaaaaaaacacgaagtttctgaatatgtaaaaattagtagaaaatcaattaggtgacaaagtcattatagtagtggctttcaaaccctttataaaaaataggcaggaatcattttaaatgtgggaattattttatctactgaggatctgaaggcaggcactcagtatacacaagtgtgggctggcattgactgcagtgaggaagggcagggcggcttccatgggcttcactgccccttgggagggcgcactgcacttaacttcctggaggcaactccttgttccccccaacactgcatggggtcacagttccaaaaactggtttccncatttggnttcttacccttttttgttg

SEQ ID NO: 462608 - DNA, 481 bp, Homo Sapiens
gccttaggaaaagttcatggcaaggcagaatgcagaagcctaaagaacacttaccttcatagttttggttttcaaaacctgagaccactgggacaattatgtccataatttttaggaaagtagaaggtaggacccttggagaaaacacggatggagaacgctttgggttctgtgggaagcagggcgctgtgcccctcactctgctctgcagtagttcctctaggaatggggcaagactccaaaaaggaaagattccaaactcaccagagagtgcccagccctaagcacacagcaaagagtactatgtgaaatcagaggtttaggctaatcattgagacctgtggaacctccccaggctctagatgcttcctaagacttgggggtctttacacaacactgtgaagtggggaaccccaaaaatgacagaagtttgatgtcccactgttcttatgggatgggagttcaaagtcaaactcaagat

SEQ ID NO: 462609 - DNA, 507 bp, Homo Sapiens
  misc_feature (302)..(316): n is a, c, g, or t
  misc_feature (438)..(438): n is a, c, g, or t
  misc_feature (463)..(463): n is a, c, g, or t
ttttttttggtgaggggtatgagcaagggggagagaggtggataaacttcaagtaaagccgtcattttggaagagccactatttttatactgtttgcaaacccttcaccagagtgaacattacagaaacggcacttccctttccatttatctatcttcctcctttatacatagatagacaaataaaaatgaatctttccagaggacagacatgcatgccacttctatatattcttcagatgggcttatttttattcagcttaaagcataacctatcatttttattcaagattccatccagcnnnnnnnnnnnnnnncaaggcaagtcttcaaggaaggccctgctggccctgctttgttccaggggactctggcttaaagggccaaaaggatgggaggataggcacacccatctgggtttgtttttcacatcctcagnggaagggggttggggagaggccccntccgtggggaggggacaggtggttggggattcaggctttaccat

SEQ ID NO: 462610 - DNA, 549 bp, Homo Sapiens
  misc_feature (425)..(425): n is a, c, g, or t
ttttattaaccttttcagaagacaaacagatccctgataagggaataaaattttaaacacatttttaaaacaaattttaaatgttaagcaaatgtgaaacattgggctagttttctttgttcattaatttctaggctcagacaacattttgcattgtatcaggcccaggcagtcagtttttgtggttacttttggggctgtgttggccctccctcatggtggtgtgaccctaggaacataggcccctaaaccgtttccctgatcttttcccagtaataaggcatttattgcaacatagcatcaactccattatgttgtatacacaagaactgttttgcttttttgaggcttggtcatgggatactgattatgaacagacaaaaaatcttcagcatgtcctctttaggagaagttgtccttgggantccatttgccagggatttgtttagggtggccatggcaggacagagggaccttgtcttacagagcattaaaggatcatcatgggggcagccaacaatttattaccgtaaatttggtgggtgtggg

SEQ ID NO: 462611 - DNA, 452 bp, Homo Sapiens
  misc_feature (42)..(42): n is a, c, g, or t
gtgggaaaaacccttaaccacttgttgtgaaactaataatantgtttactcctctggaaagggaaaggtggaaaaggggaatcctatgcccagtgagcacaacacaggccgcatatggacacacatgaggtcgctcggcatgctcttaggcccagaggagacagaatcagatactagcctatcctctggctgctcccaggctagcagggaggtaggtgtctaaaccaggatgtgagctagaggggactatagccgtgcacaggaggggcacagaggacggagcaagcagggcaggcttcacggaggagggcttgtgagctgaatcttgagagagaggagatcctccaagttgagggaactgtgggagcagttagacagcttggattttggggggtgtagcacattgctccttatgggctggggtgtaatgtgcagaggagggcagagggaag

SEQ ID NO: 462612 - DNA, 491 bp, Homo Sapiens
gctgactttaattacaaactttatttgtcaatacaattcacagtttatacatggcgcattccaccatataaattttcggaacagttatttgaggaaatgggtgtagctttctttctaaaagagcctgactttctaaaattttggttggattttttttaactttataaaagtacttttaacaaattaattgaatatttacatttctagcttaaatttaaattttggaaaataagcgtctattagtttatttggcttcttttaaagattctgggtttatttttcaagaccctaatctgaatgccacttattcagatacagctcccacccccacacacaaaaaagtaaaagaaatcagtttgcaattatatttagggaaattattttctttctgcattttaaaaattatatatatatacaatgtacagcagatctaagtatgaaaataaaggaaagggtagcaatttacggggtgcatttactgaattttttct

SEQ ID NO: 462613 - DNA, 529 bp, Homo Sapiens
tttaaagagttcctcacggacgggaccttttattccaatcacctctcaaaataggtctccgaacgaggaccctgaagagaaggctatgcagggggacgggccgctgcgtggctcagggcttccctctggtttcttcacggtccacagatgctacccggagcctttctcgaaagcgctgactcagtgtctcaggtgcgcgcccgaggagtggcaaacccggcctggctcagaaagggggcaggagcctcgtgagaatcttccatgagcatcttccgaggggattcctgtcctgtcttctctgtgtgaacgccagtgtggacagatgaggatagatgatggagtccaggccacccaggagggggtgatggggaccatgcgtggcccctgcctgggacttccctccccacacaccccttggcattaacgtctccacagaggggagagggttataggacaacctggtgtggggggcgccggggactctcaagagcccccactgtccagatgctggtcttgccttttgtaaaag

SEQ ID NO: 462614 - DNA, 469 bp, Homo Sapiens
cctcacggacgggaccttttattccaatcacctctcaaaataggtctccgaacgaggaccctgaagagaaggctatgcagggggacgggccgctgcctggctcagggcttccctctggtttcttcacggtccacagatgctacccggagcctttctcgaaagcgctgactcagtgtctcaggtgcgcgcccgaggagtggcaaacccggacctggctcagaaagggggcaggagccttcgtgagaatcttccatgagcatcttccgaggggattcctgtcctgtcttctctgtgtgaacgccagtttgggacagatgagggatagatgatgggagtccaggggcacccagggagggggttgatggggggaccattgcgttggcccctgcctgggggactttcccttccccacaacaccctttgggcatttaacgttttccacagagggggagagggtttttaggacaac

SEQ ID NO: 462615 - DNA, 416 bp, Homo Sapiens
  misc_feature (400)..(400): n is a, c, g, or t
gtaacttaatcttttatttgttcattaatagagcaattttgatgtgaagactaaaaacacacatttcctgtttctttaatactcagtgtatacattttgcagattaaatttaaatacgtattttggaccagttatttgataaaatttcttcagacgttgtttttcaaaccatcatcataaatttaacatatctgattttcgtaagtacttcaaacccctagtcaaggggaaaactgtaaatctaatgaataaggatcttctcagggcaattaggacaatatttacaaacagggctgcttgactcaagggtgacttccttaaatccgaggtttctcagccccggcactgtgggatgttttgagcggggtaattctttgttatgggggggctgtccctacancggggttttagggggg

SEQ ID NO: 462616 - DNA, 497 bp, Homo Sapiens
gtagttgtgatatttaaatttaatattatttagaatttcaatttgagcacaatctgtgtttgggataaagtaaataactctggccattcatacatcatccactaaacacatcttgggaagacaggaatcaatggtccacagaattactcttagaagcaaggggtgatattcagaatagttaacagctggtgtgacatggggatatccaagcagagggagcccttgctgcatcagggcttaagggcttaaactttcatttgccaggttgtgaaggaagttgcttagtcctaggaaaatgggcagggcagggatggttgcctgtgaggaactaagggcagcagcttttatcaaccaattcagaatatttcagcaaccattacagccaaatcaccagctcctggctgagtacactctgcagtgaggttcattatactatgcctataatagtctggaccccatctctctggaatagtacatattttacacgaagggaaaag

SEQ ID NO: 462617 - DNA, 211 bp, Homo Sapiens
aatattgctgagaatgtagggtaagggacactcccatgcactgcaggtagttgtcaggctggtaacactgttggaaggatgatttgatcacaacttaaaatgaaggtagcctatgatccactcttagacttcttgaaattcttcaaatcaggcaagcctaggttgactggaaaaacagacaatgatgtaaaccaaacaacgtaataataat

SEQ ID NO: 462618 - DNA, 544 bp, Homo Sapiens
  misc_feature (186)..(292): n is a, c, g, or t
acaggaggagggagtacttcccaatttattccgtggacgaacaactttaccttagggcaatcattgcctactccttcactgcagaaattgatggtaacagtccagaatgcttaaccatgaaaataggttcagactgatcaggcaccacagagcagcagttaactctggatacacttaagtacttgnnnnnnnnnnnnnnnnnnnnnnnnnnnnnnnnnnnnnnnnnnnnnnnnnnnnnnnnnnnnnnnnnnnnnnnnnnnnnnnnnnnnnnnnnnnnnnnnnnnnnnnnnnncataactataagaaaacacaaaaggaaagctaagggatatggatgatagaagtgccaaactttttctatacagaatcatatcaatctccttccccattcctgctaaactctcagaactgacagattaaaacctaggaccccctgcactcaattctgctctttcctagtagttaacaggtgaaatattgaccagtgaggttgtctggtggtagctataggagtgatgatcacaggctttatggtacctagggc

SEQ ID NO: 462619 - DNA, 543 bp, Homo Sapiens
  misc_feature (222)..(222): n is a, c, g, or t
  misc_feature (513)..(513): n is a, c, g, or t
  misc_feature (526)..(526): n is a, c, g, or t
acatggtggccatccaaagccccgttaatgaacagtgtggtaaagtcacattgctggttacttggaagaaccttaacactttccaaaaaagacaaacctctcaatcctttcagttagattaggttggctgttaaatggaaaccaacctggtccttgcatgttgtctcatgctttgattccacagaccttaactccttcaataatgggaaactcacacagccnactttcgcccacaatcaagcccacatagggaaatgggaaaaaatagcataaggccttttacttcgaagaaatgagttcatcattagtgttcatgtattttttaagtcttataataatatgtaagttctattcctgaatttgggtatttcctttccttttcttttttccttccaaatgtcctttaggaaaatcagcactgaattcaaaaacactgtgttacgcatcatacgtttcaccagcactgagagtggagcataacttatgaccaactttgcttctgccaagatcggngtgtcagggaatnctccctagtgccaagct

SEQ ID NO: 462620 - DNA, 531 bp, Homo Sapiens
tctaatcttattctccataagctgaagaactcttagtatgtctaagaccagcaaaatctgtcttcgtaattcttgtgatgttatttccatttaaatccagtctctcggtgttgcgggggatattcctgggcacgctgcgcagcgccagcccgtgacagtccactgtgctgcccgagcaagagcactgcgccgggcacgcctgcggtgccaccttgttcaggatcgccagcactaaccccagcgacagggacagcatctgccagccaacgccgcgcatctttccccgccgcctccttcctcgccggcactgggggctttctttagcttgctgctccgagggaaccgcggcagtgtctgaggcccagttgcccggcggggctagcaacccagagtgccagggaaaatgtgcacaaaataatatggaacaaggcagtagagcccactcaggcacacgcctcccaccgccctctccaccctcctctggcagagcaggagctccttgggcaactttaggtcctgaggatgaatccg

SEQ ID NO: 462621 - DNA, 277 bp, Homo Sapiens
  misc_feature (194)..(194): n is a, c, g, or t
  misc_feature (231)..(231): n is a, c, g, or t
  misc_feature (243)..(243): n is a, c, g, or t
ggcacagctctctttaatcgtcacatcagccccatgaggcagccagcccttactatctgtatctcacagaagagcaaacaggctcgggttaaaggaaacgctgcaacatcgtatcacaggcatttgcttcacctcagactacagaggcttttcacttcttatttaaaaactgggaggtttcctaccgtaaacgnaacacatgcttcttaaagaacatctgaggacacaganggggaaaaaagnccacccacaggacaatccctgttgggcattttcc

SEQ ID NO: 462622 - DNA, 443 bp, Homo Sapiens
  misc_feature (51)..(51): n is a, c, g, or t
  misc_feature (54)..(91): n is a, c, g, or t
aggtttgggatttgggggggtccacagggaaaagaacacgatgtctctttnacnnnnnnnnnnnnnnnnnnnnnnnnnnnnnnnnnnnnnntcccaaaagtaatttttgggacagaatcagaagtgaagcaaaaatccaaacgagctctccgttttcttaatacctgtctccccttgtctttttctgtcaggtttgaagccgggctggaaaatgttggagattttcagcctggggaagagtcgaggttcaggacatttttccttttcctaggaaaactcagagcagggttagacagttcgcacatccaagaccaacacgcataggcacacacgtagccctctgtctagggcctgattcagtctgcattcgagagtgttctgaatgagagcactgtgttggcgtcttccacaccagcctcacttcacaggagaatttttcagga

SEQ ID NO: 462623 - DNA, 499 bp, Homo Sapiens
  misc_feature (377)..(377): n is a, c, g, or t
  misc_feature (427)..(427): n is a, c, g, or t
ttttttttcataggctttcctgatggattaagactctgctgctcagtgaggtatttgaatttttgtcttcatttgtctattccacacccatggcagacatcattagtcaatcatggcatatttgctgctttcaatcagtaagatccagtgtgtgagttgaaaccttagacctcctgcaagcaaggatgcaaaacctggtgtcattgtcttcatcttattcttcttttactttttgaaatttcatcaatcacctgaatgttttttttcccagaagcctcaatgataaggcatttccccagtaaaaccttaatgaatcaaataacagtgaagtgaatcactggaaggcatagctgtactcttctttaggctttctcctntggccctattctctccccaacagaccaggagcttaactctaaaatccagnaaactttctgcagagccattcagcccagcccatactgattaagaacaagccctcattaatatttcccataat

SEQ ID NO: 462624 - DNA, 494 bp, Homo Sapiens
  misc_feature (292)..(292): n is a, c, g, or t
caagcatattattactaagtgtctgagcatccaggaaagctgcctaaaacgctgctgaactgggctaagatgccagggctcctgcctccatcaagaagctgtggaattcagaagccaccattacaactgccagctccagcattaggcctgcactctaccaccatccacacagcaaaatggatgcttgggatgctccatgccctgcctctctccccacgaaactcagttccaaattctagtcttgtgcgtttgcattcaatggcaggatttccatgccatcagaaacactagnctgcaagagagtctgggaaatgtggttaagtttcccagcctctgcagcacgggaagggatgccacatgggaatcccttgagtccatggggattcttgggggccatttagtggctgcccccgacagggcttgaggggaaggacctcaccacaggctccagtccccagcccagtgcctctgaggagggatggggaagggtgggg

SEQ ID NO: 462625 - DNA, 491 bp, Homo Sapiens
  misc_feature (180)..(180): n is a, c, g, or t
  misc_feature (195)..(195): n is a, c, g, or t
  misc_feature (201)..(201): n is a, c, g, or t
  misc_feature (374)..(374): n is a, c, g, or t
  misc_feature (442)..(442): n is a, c, g, or t
gaggtgggggagagaggaaggttgttgttttgttttttaaactaaaatactgtcacccagcttgcccagatttgattccctcttccccagattttcccgaatggagttgggctgtttccaaaaaccaaattagtattcaaaaacagttctgaagttttaatcaccactaaggatatattncccccaattttcaantttaanaaataaaaagtaaccctggcaccatcagatcaattgggctgttccccagaatgcaggatccacagttgggaacacagggcaggcatcccggggcatgagcctggccttcaaggccgtgctgtgagggagagtaaccctcatctgggaagtgggtcagtgagggcagttcaggncatggctattcacctaattaagtgccctcaggaaaaccaaattcccagagggacagaggagggaaggntgggcttttgatttccaggaggaaaacagttttaaaatgcccccagcag

SEQ ID NO: 462626 - DNA, 504 bp, Homo Sapiens
  misc_feature (425)..(425): n is a, c, g, or t
  misc_feature (441)..(441): n is a, c, g, or t
  misc_feature (467)..(467): n is a, c, g, or t
cagttaattgaattccagggagatttattcccaatgttattaataaattctaatgccacctataactttcaattgccagttaattaacttgcaatgggtgcattgtaaaaggcaaattaaatactttttcaggcaggggctggcaaatttaatgagctgatgtgtcccaagggagacggccgggctcacacatcccatcaaatactcctcccatcagcagatgagagtgtgatctgggtgagtgacaactggacctccgcatcctcatctgtaaaaagggatcacaaaacctgcctccagggaccctcagatacctggagtgggatgctgtgttttattcatacacaaattacaacaaaggggcccgggggcgggttgaactttatgtgtcaacttggactgaggcctgggggtggcccagacanttggttcaaacacgtntgccctgcccagcccgggtcatttcntttggtcagtttacagggggtttgggggcaggccagc

SEQ ID NO: 462627 - DNA, 534 bp, Homo Sapiens
actgctgcacagttttatttggtattgttaaattaatagtttattttcctattgatgggcatttattaccaatttttctgctattacaacaaaaaagagctgtagtaaaccttattcaagccttgtttggataggattagtaggctgcatataaaagaaaactgactttttaaggtggtttaaacaaggataaaaggttttattgtgattgacttttctttcacaggaagcagtgtaaactcggaaactagggctggtatagtggcttctcagccatctggtactcagcctcttcctcatccttctatcatattagcctgtggcttccaccctcaaggtcagaaattccaggatggctcctggagctccagtcatcaagatgacattcaaccagaggaagggagaaggcaggccaaaccaagcacacctttcaagtggagtcaacttcttttaagcagcctacttgaacattgcatacatttctgtttacatctcattggctggaacctagctctccaagggaggctgagaaat

SEQ ID NO: 462628 - DNA, 467 bp, Homo Sapiens
ttgggatctgtgtgatgtttttctcatgattagactgacatagcgtcttgggaggaagagcacatgggtaaagtatcgttttctttgtgtcacatcaaggttacatacatggcttatcagtgatgtgtagccttgaccacccctactgaggtagtattggtcaagtttctctctctttcttggggtgcaagcggggggacctttctatactgtactcttgagaaggaagtcagtatgtgctcccccatccccgtatgatgttatgaaatcagccaggttgatcgtaagcagatttttcaagtgtttcctaccctctaactcttgttaattccttgtagatgtttgttattattgtttaatcattgcttagcaccctatggagcagtctttaagagtatgggtagtggggagtgacagtatgtttttgccccaagctttctttgggttgccaaacaaaacatttgtcc

SEQ ID NO: 462629 - DNA, 541 bp, Homo Sapiens
  misc_feature (298)..(298): n is a, c, g, or t
ggtgtagaaccggtctatgcagatggagaggagaacgtagatctggacacctggagtgagatattgaaaatatcgcacaaccttgcacgttgcactacccagcgtccaccttccagtggtgaaactggagccaggacgaaaggcgtgctggcaacgctgatgaagaaggtccagcacatgcccatggagaccacaaagtagttggtggtagactgagtcctcctactcctatggatgaccaaacaaaccagggaattgccgaagatagaaaacaaccacagaatcccaaagaagatgnctggctgtggccacttccccgggtttcagcacatagtgaaggtctgtttggttgctcatccaactgtgctcctcacttaattccatcaggtattggcttggcagaggtgtggctgtttcagtgcagctgcggttttggaggggcaccagaagtgtaggaataatcaaatgtggcttgctgttatccattctgtgagcaaaaaccatattcactttttttctcttaattcttcatccggacttg

SEQ ID NO: 462630 - DNA, 460 bp, Homo Sapiens
gtatttccaatggttcctttattttcaaaattcttaaaagtacttgtaatcactgattcattcaacaatcatttattaacacctaataggtgctaggaacttttctaggtgctagggatccaacagggaaaaattccctacattacattccagccaattatgttctgctcttaacagcaaggtgactggttaaaaattgaacgaacaaacactgattaataacctctaaagatcgagagccttccatctggttcactgctatttttcaatttgctaatctctgccccctaagaggctgatacctctccctttccagaatggggaataggactgggtgtaatgggtgaaggtctgggaaccgcgggtcagggagacgggggctgtgttcacaaaaagtaggcttcttggggaaaatttacttggatccagggtatttacttcaaaatacaagtgttgatca

SEQ ID NO: 462631 - DNA, 138 bp, Homo Sapiens
  misc_feature (110)..(110): n is a, c, g, or t
gtctggcctatatcatatttttattgtaccttttctatacctttaggatacatttagataacacaaatacttaccattgcctacagtaaacagtttggtaatatgctttnacaggtttgttagcctaagagcaacagg

SEQ ID NO: 462632 - DNA, 497 bp, Homo Sapiens
  misc_feature (140)..(140): n is a, c, g, or t
  misc_feature (411)..(411): n is a, c, g, or t
acaataactcactagcagttttattgcttaaatattcaaactacaatattttttctgcagttatttgaaatgtctttgtctttaaatgtttataagcagtcagtaaatactttaccaacttaacttttaagtacttaggngacttagaatataagccaaatatatctatatacatataaaattaaggagagaaatagaaaaatacctgggcaatcctgctctcttattcagtgtgatatttttagtcataagttgttatgaaaacacactacaaaaggcagtttgatacaggtctcctttctatatccagattttatagtctgcagtaatagctagctattattgattgggttttaggaaaatatccacttgggtcaaaatatgtgtacctgaaccatgttaaagagctgngttcatttaagtttctcttttcattttgcttatataatcaatacagaatggttagagaacgaatgttgcttttggtctaagtatca

SEQ ID NO: 462633 - DNA, 525 bp, Homo Sapiens
gaaattcccactcaaaagccagagctccctgtttagacattttaatatggatgttttctgtttttagatactattcctgttagcttattcataccatttcacctacacatatgaaaaaaatatttcaggactagaatgatatacaaaattatttcaacgagacataaattatcgggggactagtgccatctagtgccatggcccctctaagtgaggatggcagggggtggaaaagagacacaaggactccaattgctacccccactcaattggggtccagctcccaactttgctgccccatccccaaaagcccaagttgctccacatctggaactcacctggtggcattacaggccagcaacacctcacctttcctgcccccatttcaggccaaaggtccagggcaatttgctcccataagcccatgggatccatctggggaagaatgaagggtgatggcacaatctgcagctagggtatttaaacttgggaataagggagacacaaaccatttctctcccgcac

SEQ ID NO: 462634 - DNA, 282 bp, Homo Sapiens
tgagccactgcgccaggccaagttttatgtcttaaatgtagagccaaaactctgtgacaggaacgtgttacaaatcagtttcctcagccctggtatccactgagggatgaaagtttgcaaggtacagggaagggagcaagatttagactttggaaaagttgggtttcaaatttttgactttatccttgtggtttgtggcctcgggcacattttttatcctcgcctctcttagtcttagttttctcacctataaaagtagtagttttgtgattatagtaaaaa

SEQ ID NO: 462635 - DNA, 543 bp, Homo Sapiens
  misc_feature (56)..(56): n is a, c, g, or t
  misc_feature (67)..(67): n is a, c, g, or t
  misc_feature (85)..(85): n is a, c, g, or t
aagccgtttgaacaggtactcacacaaacaccccttgggcctgtaacacagcacantccaagaatcnggggaattaggatgtggnacgtctttggaggagtcactattctgcgtatcacacaggggttgaacaatagcccatgagccaaatctgacctgccatctgttgtaagttactttttattgaaatacagccaacacctatcggttcatattgtcaatggctgctttcagattataacaccatatttcagtggatgtgacagaagccattatggctctcatgtctgaaattctttacgatctgactcttatctaaaaaagtttgctgaccccctgctccaacaatagcacaatcatactaaagtgtttttaaagaatatcaattatgtattataattaacaataaactaaatttgaaacatgagaaggatgtctactgaagaaatttaggctataaccaaaaatgtagccagagagcaatttctatctcaatttcagttgttggaagagcctttaatctccttgtctagtagcatttca

SEQ ID NO: 462636 - DNA, 487 bp, Homo Sapiens
  misc_feature (189)..(189): n is a, c, g, or t
ttttttacaagcatagcgctttattcatgccatcatacagtcgatctgtattcttcaagtacattttgaatttataatgagaacagtttaaggcataactcttcccactcaaatctaggtctttctcaagtgagacactagagagagtagaaagggaggaagagatagggcgagaagaaaaggagggangggacagagatgaggacgagaaagaagaaaaaagggaaagagaaaataccgtctgaagtccacaggcttatctatcccaagcatgtctaccccacgcatgtgggcatcatatccaggttgtaacaaagaggtgaccatggcgtttatttttggctccagacaggcggattcagcctgcattgcatgcatgcatgtctgtcacctcatctaagtccccattccttccggagttgtgagctccagatccaagagtgcccagtgcacggtgctgggcacgctgtcccttggcgaggctgcc

SEQ ID NO: 462637 - DNA, 352 bp, Homo Sapiens
  misc_feature (294)..(303): n is a, c, g, or t
aagtgtaccacatgtttatttgaattatcttggttagttctcacaagatacaagccagaggaagaaattaagagatgctaaataacttggccaaggatttacagtggataagtggcaaagcaaatactgaacttaaccaggcttcatgactccagaatctatacttctaaccaaccagtgagtctcgtggagcaccagtatctgcggtgcttcctaaaaatgcggctttctaggcatcaagccaaaccagctgaatctgaatctcagaggggtagggtgctaggaaatctgaannnnnnnnnnccaagatgggagtcttgctctgtcccccggggctggggagttgcaatgg

SEQ ID NO: 462638 - DNA, 558 bp, Homo Sapiens
ttttttttcacagttctagttgtttttattaattttgaactatctcatttactttagacaacaaagtattttttataagacacagtaagcctgtttagttcccatcttgatatagtcaagtttattgaaaaagtacaaatagaaatgtttcagaatgtcttaagttttatctacctagcaaataccaatttataattatgtaacagtgcaggatctaggaatgtgtacaggtactttgggagtaaccagaagagcatttcttgtcttcaaagagattaaggcatgacaaatttggaatactgacttaggataataggttttaattatatctaaaggtctatgttggatattggtcctctggcagttcctctactaggactccggccgggggctccggaactgctgtcttcactcttaatacattaccctatccattcgtctggtaaattactttccaatagtttggcatgtgtatttatgacaaaggttgattacaaattctacactgagggagggttactaaaacaagacagaaaacaacctgtattaaatcattta

SEQ ID NO: 462639 - DNA, 552 bp, Homo Sapiens
  misc_feature (197)..(197): n is a, c, g, or t
  misc_feature (389)..(389): n is a, c, g, or t
gccagtggggctgggggctatgtttatatgaggctcctccaagttcggtggtttagcacaatggagaccagggaaaagggtcagattcgatctggggggatttgggtgagagagagatggaggaatcaccttttcccccctggcaaccttctgtaccccctctttgtccccaggataccctcccattctgaagattnattgcaggtgccctgggacccccacccattcagcctggcccaggggtgcccttgcagtggttatgcatagaataaaggccagggttgctgaggagagggcagccttctcctccagagaagggaagggtggcagaagctaagcacaagggggtaacctctctgtcccctggggagttttctgtctccagaaanccaggccaggcctggacagggccttccttttccacttccacatctcccactctagagtttttcctccccatacctctaccggcagcagccaaggacccagaaatgtcctatcctctccccaaccagaatggcacattgaagctcctttcctccccagccccag

SEQ ID NO: 462640 - DNA, 455 bp, Homo Sapiens
  misc_feature (211)..(211): n is a, c, g, or t
  misc_feature (217)..(217): n is a, c, g, or t
aaattttaacactttttattattagttacgtatgtttcattccctcatttatttggcttatgacatatgaattatccccatttatctgagggaacaggcttggatggcaagagtcctctttgcctgatcaaatacgttctgtgacccaccccatgctaactccctattagagccagtgtccttcaaaacatgcttgctccacttagctggntctggnaagccatccttcctgccaaagaggtcttttatgcttctctctgctgctatcaccccctcctccatagcctactattctttcttacacaaaatacacgcattcctgttataaaaggatttgaatacacaggcaaatagaggtccttactgatgggaaattgacattggggaccatttggtttactattattaaacaatgctggcaatggaacctaatagtatggtatgtcttattaaaa

SEQ ID NO: 462641 - DNA, 520 bp, Homo Sapiens
actgagaaaaaaagaatgtgactttattaattcacagtgaacaacagaatagggcataactgaattactctatcagcctgatagtgaattatctccttgaaaaggcagtttccagagggaagcttggtgtgtgtggaagcacagcaagtggagttaattatgtaggattccagtgccacaggggttagacatctgccaggtggactgaatgcttgcctcaatctggcaggtgttgttgatctgacagtgctttgttaggaaccgtaacagtgacattaatagctttactttttctctgttttaggagacaggaaaaactgctattctgatgggagactgtgtgagtgtgtttaagatgtccaatgccctcgattaggttataggtaaaaaccttactccccaaagagtctttatgtctcttaagattatgttgcctctcttgaccttaatctattaggtgttcacttctcagtttacttttcagggggtaatttcatgtccctgctgcctgggatcaaga

SEQ ID NO: 462642 - DNA, 471 bp, Homo Sapiens
  misc_feature (298)..(298): n is a, c, g, or t
gtggttaggcttcatcctttattaggtagtgaataaaagacaactgatgcttacaactccaatttaaaagaccatttaaacaaaaatggttccatagcgaagtgaggcagaagggatccaggtatttctgagatttcttatatggctgatggagaaaatatggctgattcgtttgttcccaggcaaatcattaaagacagtaatgccttgtgacccgggacactgtgtatcccatagggccctgatttttagtgggactgggctcattcactttgggtgaaaatggggaaagaacagncaaaagcacgttttagtgagactgctttaattaacactaagttatctaacagaaagtgaggctgtatcagttgtaaaggttgttggatagggactcaggatgattatggaaaatcaaaatatttgacatagcagaaaagggaaactaaagttcaaaatggttagaagctggtc

SEQ ID NO: 462643 - DNA, 571 bp, Homo Sapiens
  misc_feature (496)..(496): n is a, c, g, or t
  misc_feature (540)..(540): n is a, c, g, or t
caagataccactgtacctttaatttattagctttccataaaaacacataacatacacaatctacagtatagaaagtataatttacaaaaatataaaatcttggttattttttagtattcccacgttactatatgtgttatttcaatatgcatgtttaaacaacccacactcagcatgactatctctgtggggaatggtgtcaacgccctccctttttgttgttttaaaataaaatatatatattaagaaaaagaaaccaatattggctacatgtgcataccatatggataaaagctctgcagtggactttgaaaggaaacactcatttacaccacggttatcctgttttccaaaatcactatgtggcccaaagtgttctgaactgagcatttaaacagagttctttccgtgtgcagggagcgagcgccctaagatttgcatagtcttcttgctcagttatgagatgatgatcacatcaagccaatgttgtgggaanggtttggtttcaagccttcagaacagtgggtatgaaggagggcncttcaggccagggcaattccagatccctcag

SEQ ID NO: 462644 - DNA, 320 bp, Homo Sapiens
  misc_feature (136)..(136): n is a, c, g, or t
  misc_feature (206)..(206): n is a, c, g, or t
  misc_feature (256)..(256): n is a, c, g, or t
caaattaattccataaaatgcacattttattctgtatcatgaaaaaatatccacatttaaataaagtgtgaaaaaaagcaaagttagtcctccctgatgaaatacagtttattgtgctgaaacccagatttctttngggctaaaagcttccacctgccaattcacttttcaaaatgaccattttttgagaacaaacgttaaataangggataatcaccacaaacttcccagaagcaactgaattttgatcacaatngtttcataattgaccctaaagtcacaaagttaaaatattttcacacatcctgtcagcagtcagg

SEQ ID NO: 462645 - DNA, 415 bp, Homo Sapiens
tttttttaatgcaaaggtttttattcatctaaagaaggtaacataagaaaaatagttgagcaagaaagagatgaatattagaaggcagcaaatgacaatggacagacttaaacccaatgaggtcaataattacattaaacataagggactcagacactccaattacaagacaaatagtgcagaggggtaaaaataaataactaaataaataatcatgggctgtttacaaaagacataatttcagtagaaggtaaagaaaagttgaaagtaaaaggatagagaataccagacaaacattcatgaaagaccacatggagacgccatttagaaaaattacaggatatgagtctcctgagacatagagtacacgtagacagctcacaaggtctttttcccttttttcagagacagggtc

SEQ ID NO: 462646 - DNA, 484 bp, Homo Sapiens
aaaagtatatttgtgtttgtattttttgtagagaccgaactggtctcttcccgagctcaagcaatccatctcccaaagtgagccaccatgcccagcccttaaagagatctttggagattttttatgatgtaggatgaatgctttgcctcaagcagtaagtcccaacacatgacaaggttgggacagtttccccatttacttgggaaacacggaagtgaggcagtataaagttcacacggagggtctgctttggctttgagctatcttccttaatcctttctgagctgccttctcccgtgtcaaaatattgatcctaaagtgatccgggccttgtatatgcagatgctgcaactcatgaaaataggatgaaacccattattaggagcaagtactaattcttagggccaactggcctgtttccatcacaccccaccacattctaccttttggggcgtgctcctaccacacctgctagagtgccttt

SEQ ID NO: 462647 - DNA, 524 bp, Homo Sapiens
aagatttaaaacattttttattaaaactgtacaataatttacaaacgagtaaaaaattctctggtatatatcataggaatcacaatacaaaaatatttgtaaaatcttgtagatcaccatacaaacctattttaggcctgtgaatactgcttagcatggaacggaatgtcacgtggttagagggtgactatgaagggagtgcctgggagaatacacacactacctggcatgccgccgtaagaaaacaggcccggttagtttttgcataaatttacaataaagctttttaaaaaatatacagtaaacaaatatatgatttgatacctatattcacaatatgagtttcctgagggctaaactgaattcccttactgtgataaaacacacactctctctcagggtttcaaggatgggatgacggtgagttggcgaatgcgtcagtgcctccaaacccacacttgggcactctcttctttttgacttctagtatcggtgttcacaagccctgtaaggcactcggggta

SEQ ID NO: 462648 - DNA, 507 bp, Homo Sapiens
  misc_feature (365)..(365): n is a, c, g, or t
gttttattgcaaggcaggcacaattgcaaaacataaatctgaaatactacagttttcataaacacaatcacagaagcatgccttgttttttactccaaaatggacagatccacagacagacctgagcaacattatggatgaggtcagttgatctctaattcctgctttgtcttaggaatatggtattctgggaaccatccacttactgttgactaggcttatattcagggtatttgaagtcacttttgatatttgcaatttctttaggcattctaggctgcagggatcaaacagggatttacattttcaacatacaagggtttgtggtttctttgtaggagtaacatatatatatcaaatagtgngcaagagccccaggtataacgtatgtttgattatgtttcaactctaagcgataacatattgagatcgcttcagtagctaagcaaatgtgactcaggccattacctggatccagacttttaaaaaaagaatgaaacaaaagaa

SEQ ID NO: 462649 - DNA, 545 bp, Homo Sapiens
ttctttctgataatgtagagtagaatttacaataatgccctccctaactataagttgttctttttggaaatttgggtataggtaggtttacttctgtatacctttttgataactgaaaattttgaattcagtatatgagaatcagtccacgttgccacaatattgtctctctgactatattgtaagtgggaaggcatttctgagtcatttgtttccattatcattcttcaacctgttttcccctagacagccccatgtgtactgagtagcacaccaatatattataatttatccttctggtgtttgtaataccatttggtgcttaaatgtcatatgctaatgctttgtgacgtgcaggggatatgaaatctctaggtaaggtaactttcagggttacattaattagcataaagctgaaacatggcttctacagatatgaagcaagtacaagggcactgacaccatagaaacttgtcagaagggcaagaagggtgatgtctttagaagagaaacaggacattctcaatctacttcttcaaggtaaa

SEQ ID NO: 462650 - DNA, 449 bp, Homo Sapiens
ttttttttaaaccagaagagggttttaacctggcttcacttcagctagggtaatggcagcctccctcccaaagattccttctacccttccaactggcaaacacttgcttcatttcctcctgtagaataagaatcatgcagaatgactgcctgagcatggcagctcctcattcggcacttctctggtgttttggagcaagttgtttattctttcaataatttgctaagcgtttactctgtgcacggtaagaataccaagacaaagatgatactgcctatttccaaaagactcaaaatgcagtaggattccattgcctgcgatgcactgtaacatgataggattaaaggggattgtttctgttgaggattttagaatgagggttagattgttctaacttgaattaaatagatggtgctattgctctggggctaactagtgttttcagttgg

SEQ ID NO: 462651 - DNA, 553 bp, Homo Sapiens
  misc_feature (193)..(193): n is a, c, g, or t
  misc_feature (219)..(219): n is a, c, g, or t
  misc_feature (526)..(526): n is a, c, g, or t
ttttttttaagattcaggtgcacgttaaattttaattccagtttcagtttacatattatacataattagacaatgaagtgatggattttcttttcaaaacgtcccatgtttgctgctttgggtaagaccaggcaaagtgttatctcaggaagtttaagagcttagaggatccaagagcgagagtttatctggnaaaatttgttttgtccatgatcaagnaatgtcctgttaaaggccaaatatcacaattcagtgttgggaagtgacaagaagaaaatttccagaaagttccatttgttaggctgacatgtattgtagaggaataattttggggggtaattgggggcccactttctactatgtgtttatggaacgattagaggactgttacagggacacagtgattggcttaatatcacgatgttaatcagggacgatgctgctgcaggacaaattaaccaaacccttgaaaatatacacaaagaatataaaaaaggactcatgcgggaattattctaaagaaagntgttgcgagtcatgaggggctcagtcc

SEQ ID NO: 462652 - DNA, 438 bp, Homo Sapiens
  misc_feature (330)..(330): n is a, c, g, or t
ttttttagaattaaagtcaacagtcctgtgaacacccaagttgagtctcttaagtaggcccaaggccccacgagtaatcactggtcctctggctcttgcacagaagttcgagtggggtaaggggtaattcaggccccaaaagctatttttagagcaaaaacttcagaatgattttccacaaagaaccagagaatttagttcacttcattgggcatagcactggctgagctcagtgagtaaacaccccagattttaattgatatttccatttgttaactgttaaatgtgaaaccatgtcattctaacattgtttcttaaaccatttcagtncaagagtttaatggaccttttgaaaatatttaatattttactgtcacaacaatttggattgtcctatgtttttcttatagtctaataccttgttaataataacccata

SEQ ID NO: 462653 - DNA, 480 bp, Homo Sapiens
  misc_feature (282)..(282): n is a, c, g, or t
cacgattattccataggaagaaaatttatttcatgttgtgagtgcaaattttagtaacaattctgttgaagtcacttttctaggactctgtttccaaagcaattagttcagctattcaagatgaaacacattatttatcaagatgtgatattttgaaatgtcacaggagagaaacacatgacaaaagggcaacacatttgtttaatttcattagttacaaggcgaacttctagggtaagtcatgattttcgatgtttataatatttctattaaggatgtgcngggtcttcaatgatagtgatgagtgggtatggctgtggagagattccaggtgagtccagcagggaccatctgtggggacccattaacgacacttcacaatcttaaaacaacaaagagcttttatttcatggtgtggtttatgagcattcagaagtaatgtcatctctgcttggagacttttctagcaggacattaggg

SEQ ID NO: 462654 - DNA, 689 bp, Homo Sapiens
  misc_feature (222)..(222): n is a, c, g, or t
ccatttattttagacatttattccacaaacaagttttcaagaagacatctaagtgaacactgatacaaaacaatgaatggacatccatttgcaccaggtcttggaatgcattcagaggcagaggcttccagtttcacaagttactcagacattcctttagccagggctgccccagctccctcacagctgtcttgtctgtcactggggcgccagacctcctgnacagagggcttccttcacttcagcctacctgccactgggttatcgagggtgcttgggggggtgcctgctgtgggaccacgagggacttgccctttctccttccccaacaagctcctgggctgagtttgctgtcacagcatcccctccctttcctgaagcatgcgatggatttggtatggccagatgtggcaggcacaggacagctgggccggcatcctggtcttctaacctcttccgcatctatatcacgctccacagcctcatgaaacattagagccagagcaacttagcagttaagttcaacttctcttcagatgaggagccgaggcccagagaggctatgatgtgtcaaacaacactcatttagtgacaagattaaaacttgcttctttcagcttccagtctcatgctcattccaccaaggccaggctgccctgagccatttacgtgtgaggtttcccttttta

SEQ ID NO: 462655 - DNA, 510 bp, Homo Sapiens
  misc_feature (190)..(190): n is a, c, g, or t
  misc_feature (345)..(345): n is a, c, g, or t
aggaccactattatctcaatgtcaaaatctttgggtcatcctcgatttattctttctcctctacttgtccagcctctcactaggtcttggttgtttttccccaagtccttttaaatccctgccttcctaacatcctctcgaccagccaccatcctcacgcaggacctcactgttagtgcctcacccacgnaacttcactccaaaattccattttgcaagcaagcccaaaatactgtttctgacatgtttttaatagtgtttgttgaatccttccgtaccaggacactatggctaagtgtgctatttcatttaattcctataacccattttacactttgcaaatgnggcaaattgatctctagagagtctggaataactcacccaagcaactaagtagaaaagtgtgtctaactccaaaaccagagcccttagccactgtggcataatacttcctgtggccatgtataaaagagacgatggtgaccagactccaggagataaagctgggta

SEQ ID NO: 462656 - DNA, 537 bp, Homo Sapiens
gtaatttgtaatctaatttattcaagttgaagagacttgcacattatttaaaaagtataaaatgaagtcacagtcatcaaaaatacagtacagtgtgttttgaccatacagtaattagggtgattttctcaggagacttagtcacatagcatgcaacatttaaaatgtgtcttcctcagccaagagcaacaaagtgagaccagccaagagtcagtcatatgaccaccggcaaagttgccaatgcagtttttccatttcatgtgccctgtgggaagggcaaaagtgggaaaaggcaggacccaatcgcaatggggcaaaagtggaaaagcagactcaattggaatgctagtttttttcacattgtgtaagttaaaggtacaacagctgctatatgctaaattatcactagttatgggactttagttacagtacttgaatttccccccaatccaacttcttaaaatgtgttgaaataccaactagcaataagttaatttctccagtgtaattgaatagtctaacttggtatcttactcc

SEQ ID NO: 462657 - DNA, 478 bp, Homo Sapiens
  misc_feature (42)..(42): n is a, c, g, or t
  misc_feature (110)..(110): n is a, c, g, or t
aacttaataactgtatccacttcacctttgaaaaatcttaanaggtccattgcatccaccggcatccgggaaatttattcttatttctgcttcttaaacaggctctgggnaggagcagtttcgacggagaagttcatagcagcagttattacggaacttgcaacagttggtgccgggcgataggcaggttggaagtgataaatggggctggcgtaaaaaacaaaaagccccggggagggcgggggcagccgtggccttgggggacagtgcgaaggcggcgcggggccagcgggactgacttccggctgtgggaaggcgaccgtcccgggcggccagaggtcgccccagaccagggaggaagctggggaagtggcaattgctgctccggcccgcccgcccaggccaccgttagcagagcttctccctccatttcaatgtcttcccctcctccgaccacctctgaccgtatacgccagcc

SEQ ID NO: 462658 - DNA, 460 bp, Homo Sapiens
attgaagccaatttttattagttatacatcactaccttgttttatattttttcctaatgttaaagggtcagttcattcttttcaactccaaatattttacagaaaataaatgggaaaaaaaccagagtatttatataaatgatcctcataaggataagcctttacatttaaaactttagtcaacaataataactacacataaaggttgataagaatatcttgctactaagaggataatctgccactagaattaaaaaaattcatacttcctaggaaacatcaattcaatcagtgatctacacaaagagttagaatataccagttcataattcttgttctaagatttcataaattattatcccaagcaatgtcatctgctagctttaaagccttctagaaagaagacactataatatctccttctgataaaactcttgcattaaattttttccttttatcg

SEQ ID NO: 462659 - DNA, 494 bp, Homo Sapiens
  misc_feature (421)..(421): n is a, c, g, or t
  misc_feature (479)..(479): n is a, c, g, or t
tgtttttgttttcataataaacattctacttagtacaaagaagtaggctggtctatttttcattcactgtgcctggaactggctcacttctaatatgtttacacatagaagaaaaattgtgtttatgtcaatttgggcagggatcaagtttacttctcttctccttacgtttcctattctgttctctttgtttttatagtcaatcatttttacatatcttttgctgtcattttaatggggctttgggagggaaagaaggtcgatatatgttgatagttgttgtgggcagagattcagtaaactgtcccttccctttcctgcctgacgtctccatctgttgaagaataaggacaaaagggtaaagccagatagggaagttaaaatattgtctttataactaatacacggatattagagatgnggctaatatctctgcaagaaagtaggtttccagacaacaaaaccagagctgaacttgnccaccccagtcctta

SEQ ID NO: 462660 - DNA, 436 bp, Homo Sapiens
  misc_feature (63)..(63): n is a, c, g, or t
gggtttttgtctttttgccgtctgcttgttttgcgggtcacaagatggcacaggcctccctcnatgagcaaatttcaaaggcagggtggggctcggcaagtaagtggccagaaaggccttgccctaagcgtggctctctccctccgtcagcacacagaagcttctcccaagagccacccccacccctcctgctccacagacttttccagacccctaagggcctcctgcctcccctaggtgtaagggaggctgggacaaggcctattgggaaagggggatggggtaactgtggctggcttcctccctggactgggcacggggccacctgagcaatgtggggagaggagaactccgcggtggggtgggcagctcaaaatgccacacctcccgggctgctcctccagctcggccacctggtaaagcatgcacctccccg

SEQ ID NO: 462661 - DNA, 655 bp, Homo Sapiens
  misc_feature (331)..(331): n is a, c, g, or t
ctattttaagtgcaaatatcataagggaagactgaacttcttttaggagtataggacaagcagcaaggaggtgggatggctggagtagagtgaggaagagcaatacagagataaagtaagaggaagaataagccgggtcacatagatctcacagcaaagttttaggttttcttttgagtaatatgaaaagccatcggagggttttgaagagaagagagagacatgatctgacctacattttcaaaagcttactctggctattgtgtggaagtagaagcaaaaagtccctatggtggttgttgcaaccatcctggggacagaacgtggtggnctttgaaggaaggcagtggtagtgatggtgctgatgacaaaagaagtcagattcaggatgtccaaggagcatttctaaatgaaaggacaactgaggcatccaagtaactgaggacaacttcataaaaagaatgtggcttatgctaagaagaatgcaaccaagcaaaggtgctagtttctttttttctcagtaattggacacttggatattaattgagcacatgactgtccagacatgtctctctggaaactaagtgtgaccatgtaagcaagcattagctaatggagtatcagcagaagtagtgggtgcatctagtgggagcta

SEQ ID NO: 462662 - DNA, 523 bp, Homo Sapiens
  misc_feature (501)..(501): n is a, c, g, or t
cccccgctggcccacgggctcatcttcagagccagcccacggctgatgcagaagccagcgccgcccgtggcaaaccagaagtggacaggacgcaccttgttctcgctgacccgctccatggcctggatgggcctgtccaggctgggcttgccgacgtagacgtcccgcgtgtgcgggtcagctggccagcagccgcagcagggcccgcaggttgacgtagttgtcatcgtccacgtggcagaaccacttcctgccggactcgatgaagcggtcatactccacggccatcttgcaggacagcaggctggcggctgtgggcggccgagcagtttgtgatgaccacgttgcccgtgtgcctggccagggcctcatcttccccgtcagtgaagatgaacgtcatctccttgtggcgcgagatccaggtctccagcagcaggtcgaggcgcgcgcggtggaactttttggtggtcttgacagcgatgaagacgtctcggggcgcgnagcggctcggccagggggcgcg

SEQ ID NO: 462663 - DNA, 540 bp, Homo Sapiens
ttttttttgctcaggccaaataaaacaagcccaagggccagttttgacccattttgccacttctgatgtagggcttccaaactgtacatgttttctttccctacaaagcatcttgtcattcagagattggcagaggaattctttgtgcttggtttggccccatttttatcaatggctttaacacttggtcatagagcatccactgagggaaggatgggatatcctggggaatgttttaccatcttcctgcctggagtgtctttcactaactccgtccttcccagagggccccatgaggcgagtcatcttctgggtttacgaatctgatcccattatcaggccctgccccatccctgcagctagtccccaggttccttagtccggtgtccaagacccttcatatactgaccttcctagcttcacactgtatactttagtacatgtgtttccctccacttggaacgccttttctctctttttaaacctgatgaacacctattcaaccttcaaagccttgctcaaaggacgcctcgcctagga

SEQ ID NO: 462664 - DNA, 549 bp, Homo Sapiens
aagcaacccacaacaatgctgtttggaatcactgttttattcatcgagaagctttggtatccaaagaaatttcaccaagtctgatggatgtattgaaaaatgcagtgaaaactgttaattttattaaaggaagctcactgaatagccgacttctcgaaatattttgttcagagattggagtgaaccacacccacttattgtttcatacagaagttcgttggctttctcaaggaaaagtattgagcagagtatatgaactcaggaacgagatttacatttttctcgttgaaaagcaatctcatttggcaaatatttttgaagacgacatttgggtaacaaaattgggcatatttaagtgatatttttgggcattcttaatggaattaagcctgaaaatgcagggggaaaaacaatgatatattttcagtatcttgaacatattctaggattccaaaagacgttattattgtggcaagcaagacttaaaagtaaccgccctagctactatatgtttccaacattattgcaacacatcgaagagaacattat

SEQ ID NO: 462665 - DNA, 411 bp, Homo Sapiens
  misc_feature (140)..(161): n is a, c, g, or t
  misc_feature (224)..(224): n is a, c, g, or t
  misc_feature (286)..(286): n is a, c, g, or t
  misc_feature (293)..(293): n is a, c, g, or t
  misc_feature (327)..(327): n is a, c, g, or t
  misc_feature (340)..(340): n is a, c, g, or t
  misc_feature (344)..(344): n is a, c, g, or t
  misc_feature (372)..(372): n is a, c, g, or t
  misc_feature (382)..(382): n is a, c, g, or t
acggaaaagggggactttattcattctctggagcagcggccccgcctgcccgcgcacaaccgctccgcaaggttctactgagttcaggaccaagactgtctggcactggaaacacactgaaaacatcaactctcttcccnnnnnnnnnnnnnnnnnnnnnngggacaaaatgatacaaacaacaatacaaaatagttgtgctgttgacgattacaaaaaaaggngggaacgtttaacctcgcgatgctcaggatttgcagggtgtgagttacatcatactccagtnttctttnccccaaaacaactgtggcttcatggcagggctgnctacacattttgncccnttttcaaaagggaacatggcaaaaaaantcggggttgnaaaaagggaggggaaaggaaaggttaaac

SEQ ID NO: 462666 - DNA, 506 bp, Homo Sapiens
  misc_feature (188)..(188): n is a, c, g, or t
  misc_feature (256)..(256): n is a, c, g, or t
  misc_feature (448)..(448): n is a, c, g, or t
aaaagaacatctttaatggtgctctccaaaaatacaattcggttgcttatgagtgatgcctttgacaggctgattagattataaaacagttttgtttttttaaacatagggtctcagattgggtcttgtgcattctatgtaatctcaaatggcagttcagtttgactttcttttaaaactaagctggnaaatggtatatttggtgaaactaatgaaagactcttttgctgggaaattccatacagcacccgccagncagccatcctgtctcagtctgggcgtataattcaacctcctactgagtgtccctgtaaattatttttaatatatagcatgagagtgaactgaggtaagtcattgatgtttcccagagatgatgaatgaacaaaagcaaataggatctgctaaacatttttattcccacagtagtgagcagttttgttcttgntttgataatgttcatttctgcctaatcttaagcttcaaatacacctttaagaaagccc

SEQ ID NO: 462667 - DNA, 519 bp, Homo Sapiens
  misc_feature (393)..(443): n is a, c, g, or t
  misc_feature (448)..(448): n is a, c, g, or t
  misc_feature (465)..(465): n is a, c, g, or t
  misc_feature (477)..(477): n is a, c, g, or t
  misc_feature (486)..(486): n is a, c, g, or t
ttttttttctcatcaatgttacaaagaaatgctgttgagtggaaagtcattcaaggacccactgtctaagctgtgttctattattgccttcttctttgttcatcttcttacaatgctggatctgggataactttgcattaaatatctttcttatttaatgactggcatctataaaaatgtaaagctcactgggaagtcagggaagcatttttctgctgacctgaagcatgatttgcatttttaaaaatgcacgtcataagcacttagctggagtgaaataaacttgcagtgctctcagaaactgaagcgtgggccaatgtcacggcatttatgaagtcttatcagtgggactcttgtgggctgttaccctcataattagccttactcaggacnnnnnnnnnnnnnnnnnnnnnnnnnnnnnnnnnnnnnnnnnnnnnnnnnnnggggncttttgccccaccacantgggccaagggnaatcagggnaaaaaccctatattgatcagggtgggggagggg

SEQ ID NO: 462668 - DNA, 453 bp, Homo Sapiens
  misc_feature (391)..(391): n is a, c, g, or t
  misc_feature (397)..(397): n is a, c, g, or t
  misc_feature (404)..(404): n is a, c, g, or t
  misc_feature (423)..(423): n is a, c, g, or t
  misc_feature (428)..(428): n is a, c, g, or t
ttttttttgaaataaaatgactaatatttattacacaagtacttagttacacttatctgaaaattataataggacaattggtgcatgtcacattcatattactatccatataagaacaaatacatttagtcaactatatcaggataacacacaaggtttttgtttgttttaggcttctcagttgaaagaaaacatcgagtaaggaaaatcaatttccagtgattaagtattaacaatataaataataaaaattacttctaaatgtcttacattttgacaactttggaattatacttacatactaatatttcccaaaaatgcatttaggttacagggggtcactggtcgggggtggaaaatattatttttggaaaggccttttttaagggtntggttntttattntggcttttaacctcctttnctttnttcctgggggccaccggggcttcgg

SEQ ID NO: 462669 - DNA, 530 bp, Homo Sapiens
  misc_feature (17)..(17): n is a, c, g, or t
  misc_feature (107)..(120): n is a, c, g, or t
cccacacccattcactnatgcctcgccagcttccatgccacctgtcagcactgagtaattaggagaccgcatggcccacaaagctgcttgtgtggcccgttatgggnnnnnnnnnnnnnnggctaactcctgaattgcacaaatcttgatggatagaggggagaaaagcaaggcaggtccacacccccattaagaaaaggacaccaactgtagcttgaaggatctgaggggtctactccagatatcgcagagtgggagtggagaaaaaacagtagatgtgctgaaatgcttccggggcccttgaaaaagagatgggaagatgacaactttggtctcagcagagaacagcaaggaattggccaacaagagaacatagatgtttcggtcaagctagtcctttgggtgagataagttggaaaaaaaggtgtttctgccacttgaagtgtttggtacaggtttcacatctttgtgagatgacatacatgagttcttgagagacattcagaaagtgtaaattgatatgccagcta

SEQ ID NO: 462670 - DNA, 494 bp, Homo Sapiens
ttttttcttttgattacattaatgcttctataatattctttgtacaatcatatttttaagtcatgctgaaacattcatcaatatgagatttcataaggtttagttttcgctgcttcaattatttaaaatgaggcttccactactttccttttagatttgaggactaatgtgttaatgttgaatgtttattaaatgataaaaaatattactatgcagaatgaaatctcaaagccaaaatttgaaagtaacctgggattcagcctaaggatgttttatttttaaataataccatgcagaattaattcatatcagcaaaactgtagttcatatggacacttattccagcaatatcatgtaggagattcctgagtgcagggtaatttgtgtagtatgatcagatctcatggatatcatgtgatgcctgaagacaatgctgtctttcagactacaggttgccagaacaataagttgaaagcaggaaattccagtggata

SEQ ID NO: 462671 - DNA, 440 bp, Homo Sapiens
  misc_feature (417)..(417): n is a, c, g, or t
gccaaaagacagaaatttattgactcacgtatcaagaatggcaggattgcactgggcttcagggaccagggtaacgccattagcaatatccgttatcagccttattctttcccactgagcctggctgaactacagctgccagcatttcctgggcttgcattttcccagcttcgtcacatcttaatttcaagctgaaaaatcctggggaagagacatacttcactgaagtcatttctctattctattgtagccagggcaaaatgagattagggattagctcagccagagttagggtgactatccttgcctaatcattctgcatataggatgatttatatttgggaccctgtgtcagactggagagaggagggtcatttcccaaaaaaggggagtaacagtccagaagaattaggattncacaaaaatatcttacggataca

SEQ ID NO: 462672 - DNA, 433 bp, Homo Sapiens
ttggggacaatcacttgcttcagaagacagtattgtgtgatacaaggaatatctggagtcagacagaactgtgtccaaattccagctctgtctgaccctgacctgttcctcttcttggtctcagcgtccttcactctaacacttgggtagtgagacctaccctgagggtcactgagaggaataaaggggccatgtgtgtataaagtatatacccagaacctagtggatgttcagcacgggatttcttaccttctctttagaagtagggacatcgtaagacttgtcatcctattttattggtctccctcttgggcagaaaccctaaacattctgctctgtcatccccatgagccacaactctgccaaacggggcctgcggatttgggagatcttgggagcttaggggtcatggatgagtcagagcacacactat

SEQ ID NO: 462673 - DNA, 482 bp, Homo Sapiens
  misc_feature (54)..(54): n is a, c, g, or t
  misc_feature (247)..(247): n is a, c, g, or t
ttttttttcttcaaaaaggcacttttctgactatttctgctaaaagctagtagnaagcctttatagcattgatgccaggggttaagcctccattataggacatttcgtgatattctgtgtaggcaaatgtaggccaatgtgtttctgaatatgcacatgtatatgatatctttaacaatgtataaaataaatgttgtacatcataaatagagttctgtaactaactagacttccataactaactagnctgtgggaaactctatgggagttgtctatattcctgggcttcaaattcaccaggctgttaattgaggaactttgggattaattggatctctaaatctattcctgtttgaagagcccatgatgttagtgcatgcgtggattatgtggtttcatctgaataattgaataaaagacttaaaagttgagagtataaaaggcattttatccttaattcatgtagcattttttaagttctg

SEQ ID NO: 462674 - DNA, 621 bp, Homo Sapiens
  misc_feature (477)..(501): n is a, c, g, or t
ggagatgagacaatatttattaaatgcacacatgaatcatttagttgtatttttattgatttctagccaaatttcactgtattcgaaaacatagtatttcagtattttgaaatcccatatcattttactcatttgtacaaatcttatgtgcgcctgaaaagatgtgcattttaatttttgctagaatctttctttcccccagcttcatataggtgtcaaaagtgctgcagagattctagggcttttcagatcctaggactaggaccatcatccccggggggaaaagtaggccccaaatggcatgactctcccaactgtttctggaattttgggcccaccatttctccattatcttgtcttttgatgtcttttgacatttaaaaagtttgctcacctttcctctgctacatgtttgttccaaatcactcattttattattactagaagtggaagtatacaaaatattattctgtcccnnnnnnnnnnnnnnnnnnnnnnnnncaaaaaaatcacctattatcagattgatcctctttaatatgtaaaccgtatggattttcaaaaacatttccttggaaaggagttaaataaagaatcaaatagtttcatctcttaatagtg

SEQ ID NO: 462675 - DNA, 547 bp, Homo Sapiens
  misc_feature (335)..(335): n is a, c, g, or t
  misc_feature (417)..(417): n is a, c, g, or t
ttttttttggtgctactgtaaacaatgctatggtgatcatctttgtaactgagtctttgaggtcagtaacaaactatcctctggagtgatttatgctgactaagcagtgactgagcaagaatacaggtttccccattttggttggcattacctttacccctgttctaagcacattagaaaagccctgaggcctcagctgtgggttttgggctcttccaaggagacaaaggagctatcataatgctgggaatgatggatccagggctgtggggatgctattgtggacacagggcagcatcagagcttgggaaaagcctgcatggctggccaggctncagcgtttccaagaaaggatctaaagatggatgaaagccatctcctatcctcaacagggcagcctcagggatgggctatttncagctaggtgctttttacctccaagtaattaagcatcctgactcaaccagcgtaggtggcaaggaaaatttactatcttaatgccaaggcaatttgccaaagaggaaccagaatgtgcaatacacaagtg

SEQ ID NO: 462676 - DNA, 527 bp, Homo Sapiens
ttttttttctaaaaaagaagcagagctttaaaatacaagaaaagtcacatatcatctcctggtgaatctatcacctgcatatcactgcctttggcatataccttaccttcacagtcagttaatgtccacaggacaaccataaactgcatattcttatttctctggatagagaatgtgctctctctccccaagtctggggcaatggattgagagctagtaggctccagtacacatcagtgttcctttacaatactagctcttcccagcctatctgccacctaacactatgttaaacatactaatacttttaccaggaaagggagaaaaaaataaagtaaaaaggaaactgagaggaagagtggtgggaggaggggaagtaaatatgatcatctctgcaaatgtccagtggcaaatagacttaagagtttatgactctgcaatcatctcagctccttaagggtgcatcttaacagttccccaagtacacaggttactgcctttgccaggccagcatgactcccttcaag

SEQ ID NO: 462677 - DNA, 432 bp, Homo Sapiens
  misc_feature (294)..(294): n is a, c, g, or t
gactggtgaagccgttagcttgtattcatatagaaatataacaacagaaacagtgtcaatatttactcatatacctccaacctggcaataaataaagataagccctgatcgctaggaccttctaagtgcctcaatctgtgtagagtttaatagatctcttttcaactgctttttatgcagatacatttccacctacaagttttttgaagttaggaagttgatattcattgtattcatttgctgcttaggaatattgggatgaggaggggagggttatatataggtgaaacgtgnctcagagccctattaattcctttgttttcatcctgcatgggtacctgcattagggtgtcatggctggaactggagtcacgtgaccagcttggattcaggttcaatatattggagtgagggaaagttaggcaaggttgg

SEQ ID NO: 462678 - DNA, 262 bp, Homo Sapiens
aaaataggaaagtgtttatttgtaaattagaaaacatatacataaataactattggactaaagaaaagaacaattatgattacagattattcaaaaaataataatgattagaagattacatatcaaatcttacaagatagaactaaaactatcagtagggaaagcagatttatgtgcttgctttattagagcatgagtaacataaaataattaagctgaattaaatttaagaagttaaaagatgaagttagcttttgaagcc

SEQ ID NO: 462679 - DNA, 323 bp, Homo Sapiens
gctaaggagtccggcttacaggaagtgctcaatgttttatttggggaccaggacttaacagggtgaatctggtatgtttggtcaacctcaggatgcaacctaatttttcttcctgactatgatatgccatgaatgtgatgattttcctttcagatgtattgcttataaaataaagaagttaagaactttgtaagggaaaaaagaagaaaagccaaagatatggaacaattgtgagacatatttcaatgtgaggaaatatttaaaatgttaaataacctaacaacttcagccatcaattaaaatatttttttactgggcccggg

SEQ ID NO: 462680 - DNA, 413 bp, Homo Sapiens
acacataccaaaaacatatttaatcaggtaaacaaaaattccaaatacattgttgcttatttataaatattgatttataataatcctaaacttttttttaaccttaaaaaaatcatccaaagacttcaagttaaatatatttcaggattagccagggatttttgtttttcgagggttggtttttaaccacttcttcatccagcggtctattatgaggaacacaacacagtcctctgtcccttaaggcatgcaggttccttctactggctctcagtgtgggtcttgtctgccggggctgtgattctccctagggactgtcttttcctctgggggggactggactcacctgtggatttgtgggtatttcaaactaggtggaaaaaggggaaaaccaaagtgggcctttggattcc

SEQ ID NO: 462681 - DNA, 475 bp, Homo Sapiens
acctgttattcacatttttaataacacctgttgacttcatcactttattcttttcccaatatcagtgtagaaataacaaactggctttgaaaatagtatattgttaacatcatcaaacatcaaaggcatcaggctttgaaaatatataactttggaactacagaatttatctaaataagacattgaaaaggcaaacttttaaaatatcctaatttaatagaaaattgttcaaaatatgggtgaagcaaacaggaaaaaacttagcaagcagtatcatgaaaagaaacctacaaggttattgtagcattgattataatgcatagtagcagtctattctcagagctttagatgcctatttacctgatgcactggcaccaatgcccccattttggtgtgccatcttcccttcaccacttgggacaacacagataataaaatcagctccaaaagcttacatatggtggatcccttcaca

SEQ ID NO: 462682 - DNA, 531 bp, Homo Sapiens
tttttttacaaacagcagaagttatttaatgtagcaatttatacattcaatattgacttaatgaacttaaagtcacttgcttaaaaattcagattttcagggaagataaaagtacagaaagttgttagaatttccattaaattaggggtattcagtactataatatcaatttgttgaacccaaagtgatactattcaaatgctagtaactattaggctctattcatacagtctttaatgtaggtcataaaagtaaaggattttcatctgtgggcctgaaagagaatatttcaaaatattgaagtcttcagtgaacacatttacaaattactgagttggattacaaaatgcaaattatgcttgaggaagaaggctctctcatcttctttcatgctaaaagatgacttttttctttgcaggatgaaaaagggaagagtcccttttctgtgtttacatagaaataatatttgggttttatctctgtatgtttctgggttccacctggtattaaccacaagagaggaaattctgt

SEQ ID NO: 462683 - DNA, 376 bp, Homo Sapiens
atggtcttgaactcctggcctcaaataatcttccctccttagccgccgtaagtgccgagattacaggagagagcctccgcgcctggcctacagtatttttattataatccatcatactagcgtatttttaacgttccccaccatggcgggtatttttattacccaccatgctatgctatagtatttcaaaaattaatcctattgtagcatgtaaaaatattccattctataccatactatattgcatcattacctctgatactacagtatttttaacatggactcattgtggctattgtattttgttcattacccacaataccacaatattactgtatttgtcagcactgcctgccattccttattattattattt

SEQ ID NO: 462684 - DNA, 409 bp, Homo Sapiens
ttttctttatattcttttatcgaattcatatcttctcatttatgccagtaatgttctcacccataaactctaccctaaggtcaaaatgtttccttcctcctcttttaaataactgtcaatatgggctctcccaataaacaaaccaccgccaaaaaaagaacaacaaaaagcctgtatctgggatgctatgtgaggaaataattacccttcacaaaccctatcttcaggatatttctgtattttaaggccacaccaacataaggtaggatgtatttgtgtgtgttatgtttttccaccttggaaatatttttaaggaggttgggatatattatcttaaatttcattatcagaggtgaggttaggaaattaaatacattgtattttaaatggaccaaggtgttcccaaaca

SEQ ID NO: 462685 - DNA, 569 bp, Homo Sapiens
gttgaataacttctggaagttgaagccatcatgacattttattcctaaatacttcaggatgtatctcctaagatcaagaagaatctcctacataaccacaccattatcactctcaagaaatttaataattctgtactagttatctgatatatgatctatattcaaatctcacaaattatcccaattatgttctttatagctattctctccctttaatccagggttcaatcagaattcagattttgtgcatagttgccatgccctggcataaattactttcctggcaacttctaatcaagtcctattgagtctacttttaaaatatctcccaaatctattcctttcaccatcttgcctttactccctctcacttgggttattttcgtaaatatactttcaacctacagactgcttccatttaatcttaagattcaactatactaagactcaaatctgccccctgtccaccttcaatgactctccattacttaccaaataaatactcaacttctcactcctcaacctgacattcaagatcctccacaatttacttgtacaacacatttccg

SEQ ID NO: 462686 - DNA, 518 bp, Homo Sapiens
  misc_feature (431)..(431): n is a, c, g, or t
  misc_feature (471)..(471): n is a, c, g, or t
  misc_feature (508)..(508): n is a, c, g, or t
acagtagataaaaatgcatggggtttacttccagggatttacagaccaatataagtaaacagctggggtttctttttaggctgtttctcttggaggtggtgcaggaggttgaggaaagcacctctgatgagcagatagctggaggctgttcccacagtcatgtctcagcgaagaagtcggagttcagcagccatcagaaccaaggtatgtgtggtgatcttcggaatgccactccaaatcctttgcactttcttttgcacacagcaggagttgtaaaagaatgcttccttttattattaacactgagaatccatgcagagagtttacactaaacacatgaatacattgtgtttttaggaaggctgggtgccctcagtccccagatctttgaattctaccattaagttcaggtaggtttttggagacagagntttgcccgcatcatatctgtgacactgactcttctgggtntagggttttctttggccaggggtttcttgagttcagnccctgatcat

SEQ ID NO: 462687 - DNA, 560 bp, Homo Sapiens
  misc_feature (56)..(56): n is a, c, g, or t
ttttttttacaaataagttttaccttttattgtattccattatacaattttacatnattaccattattttaagcaataattaagcaaattgaactactgttttttagctctacttttcagcatatagatttacctaaaaaagtacaaaccaagcacagtggtgcaattttccaggcactttcaagttgcttatttacaaatatgtaagcaccctgttggaacacatgaaaattttggtgtcgagaagaaacactccatgtatatcaaatctttaaattttaacatttgcacagctccaaatattcctgagaaaggtcagtctcattgtcacgtacatctgcatttcctcacacttcagcgtatcttggggaaccataacctcggtcacttgatgtaccactaattgcacaaaatacatgtaatgtgttgctcatccggggagaatggcttgtgtcttcttgtaatatcgacttaagtcttcaaagctgctcatggataatgtcagataattcttttaccatgtctctgaaatttgactttagcccttcatggtactcaac

SEQ ID NO: 462688 - DNA, 488 bp, Homo Sapiens
aaagaaaataagtaaagtttatttctgtttaaagcacagtaagtttcaccatgaaaagttaacatacacatacaacaaacagtaagaacaaagtttcctttaatattcttacatttttggcatttagttgcacaaagttaggatggaacccactgtaggggacagaactcttaatagtgtcttaggatttttctcacattttgttaatctaactgggtgtgttgttatgatagaaagcagtaagctccatggtaatacttgttccctgtgacagaagaaagggacaaagatgtgacatggtcataacccctgcaacctccgaagatgctgctgtgtcctgtcccaggagggctccactctttttagggaatggctatatttacccagtttacagcttacgagaaacacgttgagggcaagactcaaatgaaactaatggggggccgtgaaaggctattttaagaatgcagaaagcagggaaaaaaggt

SEQ ID NO: 462689 - DNA, 450 bp, Homo Sapiens
aactatattttggaagaatttaatagtgcaataaatatatgcctctcaacgcttaagtacaattcattaataactctgagcctgctaggcctttatatttcatcacacaaagactggaaaacacagagacacagaaaaatcacagctgtgcaagtgagacacatggacattcacagacactctttcctgaaaacagggaccaccactgagacacatgggacctcccaggatacaccaatatatgtccccacagaattacccagactttgtcactaggaaaaacggttggacacacccaagcacactcacgagatgagagtcccagaggtagtaacagactatcccacagacacacatagtccaggccctctgcaccccttaagcccatctttgtttttccttcttaggaattaccactgtccatacaaagtgtacttgacttgcattccc

SEQ ID NO: 462690 - DNA, 493 bp, Homo Sapiens
  misc_feature (355)..(355): n is a, c, g, or t
ctgggtttgaaggactcttttattctggaatgacaccctgtccatctggtgcgttgatatgttagtatggaaccatggtgcgagcaggttacaaaatgccttcacttagcaacagaaaagcttgtgccggcctccaaaatctggggagcgattttgtggttcccaaaaagcagaaacctggggccagctgcctaggaaatgtttttcttggctttgggcatacgtacaacctgacgggcttctcccaagctttagctccatttttcaagcaggtgtttcgaatcaaagagagcagatgctcttacatagctggctaaaagaaccgactggttcagcattcctgaggaaacatggntgagtttggatgtgacaaagtcaaagcgaaaagccatgggggtcaggagcccgtggaagagtcggatcggctggtgccaaggggaaagagtgcaccctgtttcctcatacgtaaagcaggggactcagctgcccgtgt

SEQ ID NO: 462691 - DNA, 367 bp, Homo Sapiens
  misc_feature (269)..(269): n is a, c, g, or t
attatatatatgagaaaattcctattttatatttattatacatttgatcatttttaaaatagccaaaactcaaaaaaggcaagattgtgtgaagtctggtagtcactttagttaaaggagcatctttcatttaattagtcaggcaaaagacaaaagcaaacccaaataaaaaacaagaataaccctccccccacaactgttataattcggtaaaatatttcataaagtactatttcatcctctgagtatgaaaataataaatagcaccnggggggatttttaaaaatctttgggccaaactgtttaaagttaccaagttaacttgactcagtgataccttgggttgttcataaattttcaagacctc

SEQ ID NO: 462692 - DNA, 619 bp, Homo Sapiens
aaaagggaaaagttaatttttaatacaaatacaaaatttatttccatagaaagcaaaatttataagttaaatataaagattaaaatagtgtttgaaaagctcactatagtgctaacaaactaaatgaaaataaggctattttgcatttaaaactgaaatacctcttaaaataatttgatccccagtgtttgctctttttgaagtaaccaacttactcttaaaaaggatgggctgccaagatgggaaagtcttactggggttttcatgttaacctattctttgggacataactatggaattttgtatacaatggcacttcatggaaaggttgtgggctcccccagattgcccacaagtgtgatcttgaagtcctaaacatttgtccatgtaagcttcaaaacagcgttaactgagttattcaagtagcagtacttaaagatacaattcttgaagcagtttcaatggtttctgatccaaataatcagtttctgaacattactacttcacataatagagtccatcttcagtttcttctcactttctctttcccttttgggtttcctttttgtggcctgaggccaccagttctttgggtactatcaagatacttccatcatgg

SEQ ID NO: 462693 - DNA, 570 bp, Homo Sapiens
  misc_feature (14)..(14): n is a, c, g, or t
  misc_feature (31)..(31): n is a, c, g, or t
  misc_feature (36)..(36): n is a, c, g, or t
  misc_feature (61)..(61): n is a, c, g, or t
  misc_feature (76)..(76): n is a, c, g, or t
  misc_feature (154)..(154): n is a, c, g, or t
ggttaaccaccccnttcctctcaaacacagnacaanttgttttcatccctcgctgccttcntttacttcctcaaangaatcttccaagaaaatctttaaaaactcctaccatcccatactgaatgtcctactgtgcctcccaaaaccctgctgngaagcttgctgtggggaggagggatggtgcctgctctttgtgcacagcccagctagggagacagcagctctggcccagcacagggtgggcgagggctgggatggagggtggggaagctggcccagcatacaagagggcagagagctgaggcgggcacggtgggacagctcccagaaggcagtcctttgtaagctcttatcagacacaaaaactgtagttagccagtgcacccagaaaggtgaggtgggagaaggcgggggcagaagaacagccataggccgcaaggggatgagagggccgggaaagtccagatggtccctctaagccaagcggaggagttcgagcttgatcctgagggtgacagaagccacacgagtatttctacctgcagagcgaggtgaccatgcttgcattta

SEQ ID NO: 462694 - DNA, 541 bp, Homo Sapiens
  misc_feature (393)..(415): n is a, c, g, or t
  misc_feature (452)..(476): n is a, c, g, or t
aaatgacatttattttttctaataattcaagtacataacacattttcaaagggaaatttgaaaatactgaacaatgtaaagaaaagagatagaacttatagtcctatcattaggagataattattaagtattaacttgtgcgtacttatgctttcttttttcagcctatagcatctggtctcccatccaagtaataacctgggatcaatcctgcttaaatttccaatattagggcattttcagggtgttgtgaccacaggatgatgtaactattaacttttaaatatttttctgggtctttacatatctcaaggtttatacatgtctacatggtaattatatgggttacttaattaaaattttgggctccaaactggcatacatatatttggnnnnnnnnnnnnnnnnnnnnnnnactttgaattcacgaggatataaaacacatattcagnnnnnnnnnnnnnnnnnnnnnnnnnacttaaaattgcatgattagcatatactcttcaaatatagaatatttggtggctgtgttaaaatt

SEQ ID NO: 462695 - DNA, 445 bp, Homo Sapiens
  misc_feature (348)..(348): n is a, c, g, or t
  misc_feature (398)..(398): n is a, c, g, or t
  misc_feature (409)..(409): n is a, c, g, or t
  misc_feature (418)..(418): n is a, c, g, or t
  misc_feature (427)..(427): n is a, c, g, or t
cataagttgatatttgtattctcttaataccttacttattttatatatctttacatataaagcatattaatagaatttgtggccaatattactagttattacatcctttttatacactaatcattgctgaaacagtcttttatgcactgtatcattaatcgtcagagccatgttaagatgtaggtagcagttatgttctatttactttcttattttggggggtttatttatatagatgtataatttatttatttatataggcaagatgggggtcttgctctgtctcccagtctaggaggtataggtgggccgcgatctcaggctcaccgcggccctcaaccctcccangggcccaaggcgggatccctccctctcttcaggcctctcaagtagggctnggggtctaacntaggggccnggtacccanccaacccccgggttaact

SEQ ID NO: 462696 - DNA, 490 bp, Homo Sapiens
  misc_feature (410)..(410): n is a, c, g, or t
  misc_feature (429)..(429): n is a, c, g, or t
  misc_feature (439)..(439): n is a, c, g, or t
  misc_feature (450)..(450): n is a, c, g, or t
  misc_feature (472)..(472): n is a, c, g, or t
tttgagaattttgttggctttatttttgtttacttgttgagaagatgaacatgaaattaataagaaaatatagttatagcttctggcaagtatttagtaaggcaaagatttaacacatttcaggggatttctgccacttccttttagatcagcagtaatttcttatatttatcaactctcaatttttagttttcatagatacctggggtattataaggctgatttgtaattactgatttatacttggacttttgaaatcattatgtgtccttaaaaataaggttatacaagctaaccttcttaacagggatcacatgggctaattaggtgactaaactgatgtttgggtaccactcagcccagtgttcatttcagcactgtcacttggtttccccttatcttgccagggngggcctggaaaaaaacggnatttttcccnttttctacccngactctcagggatttctgaggnctggttaccctggggggc

SEQ ID NO: 462697 - DNA, 466 bp, Homo Sapiens
  misc_feature (211)..(211): n is a, c, g, or t
caagcacacacataaaattctttcctagacataagctgccttatttccttgctgccttacctccatgcttctctcaatttaatggtagctaccatgaggccatctgggatcatgatgggagagccacccccttaattccatatttaccaaaagaccaagttattttgttcagatgagaagttttattatgcctttattgctgaaagcaatntttgaatcttaccttttctcattagagtttgaggaaagtcttttgcaaccttttgatgctaattttttttaggattgttgcctttccatttctgcttgcaaactagccagttctttcctccttactgtggataggcattccaaaatgcagttcaacagtagccaactcacactgcacatcctatctggcctgtccctttcccctagagctgctgtctctggggcacataacctgcctcccaagttagcatgagag

SEQ ID NO: 462698 - DNA, 440 bp, Homo Sapiens
ttttttttattgaaaaaggaaagaagaaagaactataagagatctattactgtgcttgttattgaaattctataaaagctatagctatctaacttttcgtcataatctctaaagatgcttccacattctagaaatgccttttttcagcttctcttatgggtaattgcttttaaaaaaacactgagaaaaatggtattatggaaaattatttgttagttatatctttatcaaccttttaatactgtttttaaataaacttttactaccagaaggctataaactcaaattactgtacattatctatattaaaccaaaaggtataaaataacaagggaatgactgatctaccttaatgtataggaaagggaatggaacttccattctaccagttccatccatacacttaattcggtggtttaaacccttgttccctgggccct

SEQ ID NO: 462699 - DNA, 446 bp, Homo Sapiens
caaaagtcttggaggatgaagaattatgactttcaccaccactatagtgttcatataaagttttagcagctttcaaaatggagttaggagaattcagaccaacaagttggcccagaacatatttcatttcttcagtggttcccttggccatttggttaactggatgagtttgaatttgaacatagggatgagccagggagctcagggaatgggatatcctctgttttgggtccctttttaaacaacactttaacacatcttgaagatctttctctgggaatatcgggaaattcaatttcatgattaggatcaattatggcatgtaatttagaaatctgattaattatctgctgaaatggtgttttcccgtaagtcatatagtacaaaatacatcctaaggaccaaacatcacttttggggcttatctttgacttagatttcccatt

SEQ ID NO: 462700 - DNA, 282 bp, Homo Sapiens
acttgaactaataaagtttattaatgtcacaaaatacgagattaatatacaagatgaaataatacttttatataacagtaatcgacatactaaaaattaagtcaagaaaaaatttaataataacattggaaaaaccatttgggaacatatttttaaaagcaagtacacatactttacagtgaaaattatttaaaatgctggaaggaaatttttaaaactgtataagggaaggatatatctaatattcaaggttatcaataagaaacgttatgatcaaaatac

SEQ ID NO: 462701 - DNA, 542 bp, Homo Sapiens
gagaaatctaatttggtggaaattatactggttcttacctcaataagccaagtttggaaatttatgtgttttatggaactagacaacactagctagtcggtgcatgtcttgttttagagaaacacaagtgtgtaaacagcatccttgtccagggcacaagtaagctaaatgagcacctgctaaggacaagtgaggcgcagattggggaggagggctaacagtgtaggtatccatggttttgtttggtttacctgaccctggaaactgtgtacaatggtgattcagagaggaaacctagtcaacccatccagatggtaattccctcttgaatatttcctatctttacggtttcaggaattcactcactctgtgcctcagtttttccacctgtaaaatggagctaaaatcaaatcagctaatgaaatcaattgtcagctgcttacaaaagttctgagaattaactaagctcataactaggaactgtttagcacattttatgacatattacaaacattggatacattttaacgaatgttagtgtg

SEQ ID NO: 462702 - DNA, 536 bp, Homo Sapiens
  misc_feature (20)..(20): n is a, c, g, or t
  misc_feature (34)..(34): n is a, c, g, or t
  misc_feature (40)..(40): n is a, c, g, or t
  misc_feature (68)..(68): n is a, c, g, or t
  misc_feature (86)..(86): n is a, c, g, or t
  misc_feature (97)..(97): n is a, c, g, or t
  misc_feature (102)..(102): n is a, c, g, or t
  misc_feature (114)..(114): n is a, c, g, or t
acgggtccctacccctcaanaaacccaagttggnaaattnaggtgttttaagggaacctagaacaaanactagccaatcggtgccngtcctggtttnaagangaaaaccacaantgtgtaaaacagccatcttgtccaggggccacagtagctaatggagcaccctgcctaaggaacaagtgaaggccgcaagattggggaggagggcctaacagtgtaggtatcccatggttttgtttggtttacctgacccctggaaactgtgtacaatggtgattcagagaggaaacctagtcaacccatccagatggtaattccctcttgaatatttcctatctttacggtttcaggaattcactcactctgtgcctcagtttttccacctgtaaaatggagctaaaatcaaatcagctaatgaaatcaatttttagctgcttacaaagttctgagaattaactaagctcataactaggaactgtttagcacattttatgacatattacaaacattggatacattttaacgaatgttagtgt

SEQ ID NO: 462703 - DNA, 517 bp, Homo Sapiens
gggtttacctactgggaccattttattttgcgattctgtccttttactacctttacaaaaaccacttttgcaaaacagtagagagagttcaaattctaaagtgagggaggggtggattgaggagcagattgcccagtttgtccacagatcttcatgctattctgcatctgctgggagtgggaaaagcttgggggctgccacccctgaggatcagatatttatgtgacagatgaaccctcctgctaacgctgctgtattgaaaagtcccaagaaagagcagtcccaaagggagtccagctgggccctgggacctgcactgatcccaaagctgcctaaaagaaaacgcctggggcgcacctatagctccaggaggaaaatggccaagggcgcgcagcagactgccgatgggaaacacctgttctccgggctcgtgggggctggccaggcattgttctctatttgcgtgttttgctttcagctcattcaaactcaatatagtggtgaaattaagtacatc

SEQ ID NO: 462704 - DNA, 405 bp, Homo Sapiens
  misc_feature (292)..(292): n is a, c, g, or t
  misc_feature (367)..(367): n is a, c, g, or t
ctacaggaaggaggctttgttcttgcaaatgtagggggagcattccggcccaggggaagctcagtgagtagcgggtgtggatttgccctgccggacttggatgcatggcgtggcacaattgtttattctccttaattaaattttggctgtgagttcccatctacctgggccagaaatttaaccccaatcatttttatggggtgtctctcctgctctcagaatcaaaccagaacattctgggagaggaacctccagtctttcagggcccctgtgggggaaacctagggtggtnttgggggccagggtgttccacaaccccagtgcagaaacggatgttcggtttccctttcatgttcccatggggaanctttgggcaaagtttcccggggaattgggtcaaggttc

SEQ ID NO: 462705 - DNA, 496 bp, Homo Sapiens
ggtttgggtcaggtttattagattgttatgaatcccagcttttcctcctaaagcaggcccacacaatgagatctgcaaatccagaaacctaacaaaggcattaagttccaaaagcctgtttcctcctacaaaattcccattatcagtactgtgatttctgcttttcagtgttgaccccaagccatgttcctgagtcatgggctctgagtggcccagcattaataaggcccagcgtgcaagggcttgttgacagaactctgaaccgctttcagggcagctgattaggaaaaaactgggcgagtctccaagttgagtgatttagaggccttctgggggtcagaacatgagaacagagaccaggaacctgagtagggctgtctggagattttttgccccattttctgagaagctctgtccttgggaggtaaaagctactttggttcatccaactgggtgattatgaaatggggtttctgaagactgggcttccttggaa

SEQ ID NO: 462706 - DNA, 478 bp, Homo Sapiens
  misc_feature (392)..(392): n is a, c, g, or t
gatttaagagacataactaatttattaatttatttcacactcacatatcacggaatcaaggcttttctcagttatagacttgcagacacatggatcacagatgacagacatatggagagattttggctttggccctgcaaattcagccacaggccagaagtaagcaacacaccctcttaccaatcccaagtctcaaagagctgtgctttgcagcgggcactaaatttctaactgactgggagctcaaaataaacaaacaagaaagggacccaacaaaccggatttcctgttgtctctcacttgaaaggaattagatctgtgtcatccatctacagagatgactaaatggtcaggccaaaaaccaaattctcaatcactgttgtcaagaatangggaataaccttatagtcaggaataaacccagaaataaaaccacaggccccaaattcagtaaagattagaaaaaataaaactagag

SEQ ID NO: 462707 - DNA, 501 bp, Homo Sapiens
  misc_feature (238)..(238): n is a, c, g, or t
  misc_feature (308)..(308): n is a, c, g, or t
agtttttgctgtgagtttgcatccatctcataggaagacatatatcaaaataaggaccagactggagagtgtgtaaattacttttcaatactaatggcttattaatttgatattgtcagcaagtatgttgcaaaaacaaattccaccagaatgtgagttccatgagagcaggaactgggttgttcaccttgttggcacttggagtagagccactgagcttcgtgctgcataaaattgncttggaagaaagaagggagggcattcccggtaactgaagcattgctatgtcaaagtaagcatttgccctnctgaaatattttaacaatgtttatagaaacctttctcaattgtattaaactttgtaaattgtaaaaattattctgttataccttttctatttactaggcacaggcagccataggtgctaggtatgttttgaaaacatattgaacctacagtgtacatatcattccatgccattaaatattcttatttaatcat

SEQ ID NO: 462708 - DNA, 549 bp, Homo Sapiens
ttagacttgtaaaacaattttaatgtttactcaaaataaatgagatgtcatcattagcccttatctctcacacttgaaaaatggagacagttgttcagaatagaaagggaaacagctattagagtttaagctcaagtttcaagaagaattcagataaggcaggtaaaaactctagatacttttccactgtccaacatcaccaaatattaatttccacatacctctttatttcataaaaatataaatatttattagaaatagtatgtttaagattagtttttctttctaaataacatgatttcttgctttaaaggaagattccctaatagtgccacctatttcataaactgtcctgcagttttgtgctttttaaaaattctaatttactttgatttaaagaataaatatctcatacccatggtgaactattttatcaccccaaaatacaaatgatccgtattttacaatgaagaaattcatagcatctaccaccacatcactgtactatgattggactgactgaagtatgggcctgtgaatatagattga

SEQ ID NO: 462709 - DNA, 510 bp, Homo Sapiens
ggctgattcctttctttattattttttccgaaaaagggtttttgtagcaaaaacaggccgtgagatcccttgctcctgtcttgcatagctttattgggaaactgggggaggggcatcaccccccagcctttatcagagaagaggaggtgtatcttttccagagatttggaggaggattacctcctgggaaggagttgaagggtgggtgaggaatctgcttcttcagaacagcatggagactcctgggctgctagtctggagatttggagcaaggatcttgacagagggctgtcaaagtgtgatcttgtcttgctctggacaaatgtgtcattgggagggatccgatgggttccaaggtgcacaaaacagacccccagggtcatcctcaggtggttttacacagccttggttaaagcaactgctgtctccagcacttcttagcttcagtctggtgaaaggaagaaagtccccttggcagtgtcttacaggcagtcatagagggaccccaca

SEQ ID NO: 462710 - DNA, 529 bp, Homo Sapiens
catatcaatatggtttattgaatgaatggctagacctatcaggaaaacagcctacttttttccccctacaatataattaaaagtttgtaattctcattccttaagtggtactttgcaaggtgtccattaacagacaaaataacctcggaagccctggagcacctgtcttcaagataagacagcagacacaggcggtggaaatgtggaaatacgcattccccagagcagatgtttcagttcctgaatttccatcgccttttgtgcaggcaagcggggggaaagttttcaaaagaatctcgggctgactaggagggaagggaagccaatagcgaagggaaaggtacattttcacggtaagttagaggcatcaccaaaggagaacatggttgtgcccacccagagtgagaagcatagagcggagtggctgaaagaacaccctctggagccacagttctcaggctggctcctggcttttcaaacccttggtcagagactgaaggcaaacctgagtcacttaatttctacccga

SEQ ID NO: 462711 - DNA, 441 bp, Homo Sapiens
  misc_feature (268)..(268): n is a, c, g, or t
  misc_feature (380)..(380): n is a, c, g, or t
ggctcatttggaattgaagatataagacgacaataataaccatcccttccccatggccagtcactatcctgactttggtatttgtcattcccatgcatgttttcacacatttacaacatatgtatccaaataagcaatatgtggtgctttttatgaggttttgaagtgccgtggtttgccacggttactacgggactgaatgaaggaggatgaacgcagaaatgaaaacttaaaagaaactgttttaaaagaaggggtcgggggaagnaaggaagaggactccctgcttctactgaggcaaaagcaggcagctctgaggcttctacagccctttgtatttactgggtagaaagagcagggaagaggaggtaatgattggncagctgcttaattgatcacaggttcacattattgctaacaggcttcagatgtacctaatca

SEQ ID NO: 462712 - DNA, 524 bp, Homo Sapiens
atctaaacgatgtcatttcagacattcaaaactcataataataaatttcaggaaatcaagctcctaaacattaatagccaagataccaaataaattatcatattaaaatatttaagtttatttaaagagagaagtaaacataaacttatgtcaaagagaaattctcttaatctatttcctgacttcacagtcaaaacagtataagatagtgaagtaacttataatcttatttggtcattctgttctataaacagacaaatataatttaggctgctatatgacatgataaattaaaaactgaggaaagtaaaattatgtcggggtctacacattaaatgactgttttgggcagtttttccacctggaattttaaaaataaaatttgtcctgttctatctgtatggacagaatatgacaaccatagaccaaaagatatcattgtatagatgtaaagagacaaaagtcatggttggcatgttctttaatttagggccttgtttatacttgtgagtttaataatttct

SEQ ID NO: 462713 - DNA, 1173 bp, Homo Sapiens
  misc_feature (790)..(833): n is a, c, g, or t
  misc_feature (873)..(1027): n is a, c, g, or t
  misc_feature (1048)..(1058): n is a, c, g, or t
gtacaggttaggtctcactctgttgaccaggctggtctggacctcaatcgattctcttgtcttgggcctcccaaggcagtgggattacaggcgttatcccgtgcctgaccctctttctacatctcaatcattgtatcattagcctgagctgcccatattccttattctgcccatccctgatcaatctcctcctttaacagaacttccatctcgatatcatggggcctgctgggcactgcaaacagcctaaggaaagtggaaattttacttcacctgaaattctattacaaattccacattgaacttaatttatatttgaactataaaaattttctgtaagttgaaacatgacctataaaggtctctacaccctgaagcaacgttttagaaagaaatcaattggtccttttctgcagaaaccattaaccataggagagataaaggaaaaacttcaatgcactgattgaacttccatgcccatagcttaacttctaaaaggtaaccattccatactgttaaactgccttaggttatcattactgttcttaaagaggccctcaaagccagcagttgaatcttgactgtagcacttggacgtacacgcacactcttgcaactgaaaccactcagattgtcctaaagctgctccccatagcaacaaccacctggaattttacatttgtttttaagcatcagtcgtaatcttcacttgcacccaaacacaccgcacctgtgagagccacgtgacattaaaaaaatcccttcagtgaggccgggcgtggtggctcannnnnnnnnnnnnnnnnnnnnnnnnnnnnnnnnnnnnnnnnnnntgatgtcaagagattgagaccatcctggccaccgtggtannnnnnnnnnnnnnnnnnnnnnnnnnnnnnnnnnnnnnnnnnnnnnnnnnnnnnnnnnnnnnnnnnnnnnnnnnnnnnnnnnnnnnnnnnnnnnnnnnnnnnnnnnnnnnnnnnnnnnnnnnnnnnnnnnnnnnnnnnnnnnnnnnnnnnnnnnncgacagagggatactgtctgnnnnnnnnnnntcccttcagtgccgcgaattcttccagattcagatccaagagagatgacatttgtccctcaccagacactgcacaccaagataaagatttcttctggccaggcgcggtggctcat

SEQ ID NO: 462714 - DNA, 530 bp, Homo Sapiens
  misc_feature (404)..(404): n is a, c, g, or t
  misc_feature (416)..(416): n is a, c, g, or t
aacaaccagaaggatttaaagtgatcggaaaggaatacagttctcaatgtgtgattcagtgttatgccatcctagtgccaaggttcctacactttaaaaaacatgggcataactaagaatatcgcattacagatgaggaatctaaggcccagggatttcatttgccctccaaggcaaaataaatttggttactggttggacaaggattagaatccagggtgtcctgactttgtgggtttccatctcactctttccactaaagtgaccaatcctcagacttaagtggtttgtctagcttctcaggaaacagctaacctacagacccctttacagatctggggaggaaactgagggccacagaggggtcaaggaacaagtttcaaccccctgctcaccgtcctttnttctccaccctnttctccataggtgttgacagacttccgggtgggggtcaacacagcaaagaaagaagggagggttgagaagagaaaagtggattcagagaggggaggttagtaagcgtgggcaga

SEQ ID NO: 462715 - DNA, 475 bp, Homo Sapiens
  misc_feature (81)..(81): n is a, c, g, or t
aagtatatcaacaaagtgaaagatgggtttaatttttcccacaaaaagttaaaagaaataacagcagttttagaggaaganggaaaaaataataagaaaattacatgcagttgcaaaatgtgtgactatttacaaactctaacatataactacaaaacggaccagaagaatcattatcataggaagcaaagggtcatttcaaaaatcagaggagggatgattcatatttaatttaattctgtgggaaaacatttaagtaacctttgaggacaaaaataggtgatatgttgaaatgcgggaaaccacagtggaaggaaaaagaattcaagaaagctcagtttcagtaaccagtatctagtaaaatcttcaggacctagaggctacaatctgcattaatagtgtctgaagacctagaaatgtcattaaataccattttggataattcttgtagacttgagatgatgtctatttaaag

SEQ ID NO: 462716 - DNA, 448 bp, Homo Sapiens
  misc_feature (333)..(333): n is a, c, g, or t
  misc_feature (375)..(375): n is a, c, g, or t
caaggagagtcattttattatgaatcattgtgcaaagaacataaactaaattgtaagctcttctagggcaacacccaaatatcctaattttgaattctgtacttcaaagtgattataaaggaataagactttttataaaacaaacgtatcatatagctcatatatgcaaaggagttttatcctttcaaataagtccctgtatcgcttaaaacatttttgggaagttctatctaaaattttgtttcatgtgagggcaggtgtcaggcaccgaaaaggtactagggtccacttcacactattccacctggttagaccatactcatgatggccagncagttatgggaccgtaaacaaaatgatactggactagcttanaacaagttcaacttgtcctgaatgatgaagggacttgaaattcaaagaagagttgacagaactgaggctacaa

SEQ ID NO: 462717 - DNA, 547 bp, Homo Sapiens
aaaaaagttctcaccaattagagaatttatattctcaccactttaacaaacggagttaagtaagaaacctctaaaatggttgctagaaattaaatattgtcaccgacctggtcaaaaccttttaagtaaaatgattagccaatcacagccttggcttacactggcatcagagtctggtgtgtgtcgcacacacgtgctgtaggtggaatgtttcatgacgaggactttctggaactcagaagccctttttgagtggggcccgggtagctgtaggatgggcagatctgaattcccagtacagtgtggcattttgaaaaagaaagaatgtataagaataaaagggtcagtcaagaagtaggagcaattattaccccaactattccgaaggatgacccttttaaaatcaataaaaacctatctggagtgaaagaccaacttaaatgagcaatagcatgaattacgtaatataaagacaagcgttcctgcttcaaagcacacgaaatattctgagtctgcctgcggagcttcagctgcagtcatcttttta

SEQ ID NO: 462718 - DNA, 519 bp, Homo Sapiens
  misc_feature (102)..(469): n is a, c, g, or t
gccctgacctctccaggctcaagcaatcttcctacctcagcctcctgggactaaaggtgcacatcaccacacctgctaactaaaaaaattttttttgtagannnnnnnnnnnnnnnnnnnnnnnnnnnnnnnnnnnnnnnnnnnnnnnnnnnnnnnnnnnnnnnnnnnnnnnnnnnnnnnnnnnnnnnnnnnnnnnnnnnnnnnnnnnnnnnnnnnnnnnnnnnnnnnnnnnnnnnnnnnnnnnnnnnnnnnnnnnnnnnnnnnnnnnnnnnnnnnnnnnnnnnnnnnnnnnnnnnnnnnnnnnnnnnnnnnnnnnnnnnnnnnnnnnnnnnnnnnnnnnnnnnnnnnnnnnnnnnnnnnnnnnnnnnnnnnnnnnnnnnnnnnnnnnnnnnnnnnnnnnnnnnnnnnnnnnnnnnnnnnnnnnnnnnnnnnnnnnnnnnnnnnnnnnnnnnnnnnnnnnnnnnnnnnnatcacggtggaccctgtacatcttttctttggcacaactgtaagaactgg

SEQ ID NO: 462719 - DNA, 457 bp, Homo Sapiens
  misc_feature (414)..(414): n is a, c, g, or t
  misc_feature (433)..(433): n is a, c, g, or t
tacaggcttggctcctagtctttgagatgaggcgtcttgcaaatctctgttttcactccttggaatgtctccattgttagcattaaagtccccaagaagtttttattgctgtacggttttgaacccaatgagtctcatttccaaaagattcctaattctatataggagaggttgcaaatgtcagtgcctcagaaggaccaggcaagttctgtaaatgattgatgtggataaggcaaagaggaacacaagaatggtggagaccagggttgaactgcagaacacatgccctctttgaaggggtgcccacactcagctctagacaattcagaaccatggcagaaatcagggcccggggttgcttagttctttcttgacgttgggagttttgatattttccctgacacgtaagttttngaacaacttaacttcaaantctttgggccaacattgtggcagg

SEQ ID NO: 462720 - DNA, 320 bp, Homo Sapiens
ggcttcttttatagttgagtaaaagctagtggcttccaaggtaaatacaagacaaatattccatcctagaacttcagctgattattctcactttgggctcatttgcattcattaaaattcaagttctgggcattacactttatctgggactttttgttttaattaagaaaatagatgtatatgtggtaagaattgaaattctgagtctcttaagaatataggagttattccttgttattatatcgttaccaaaccatcagttgccactttgaagttgctaagaaagtgtcgttttggaagacgatgaaatgttaagaaca

SEQ ID NO: 462721 - DNA, 503 bp, Homo Sapiens
  misc_feature (46)..(54): n is a, c, g, or t
ttttttttcctttgtagttttaagtatcttgtagggagatactttnnnnnnnnnttatgcttttcctcagaatttcacccactagttttgtagcctctagtggtgactcttgcctgatggttttcttggtggtgatcttctaatttcacgattctacatttatcactttatattacactaaggtaagacagtttcattttccatttattgatttttatcagtatggactcatgaattcttattttattctatggatgatcattcatttctatcattgttttatgccccaaacctccactcctgatcctgtattcttcaaggacgtccctatttttcttccatcccttccttactttctgggcatagccaaggatgggcctacacccatctgggtactttccctgcaccaactttgggcaacagttatttttctaaggagccctagttccttttaatggagactggttatttacaaactaccatttcaatagtaggtttatctt

SEQ ID NO: 462722 - DNA, 498 bp, Homo Sapiens
  misc_feature (322)..(322): n is a, c, g, or t
  misc_feature (397)..(397): n is a, c, g, or t
  misc_feature (433)..(433): n is a, c, g, or t
  misc_feature (484)..(484): n is a, c, g, or t
attcattcaacagatatttattaaacgctcgttgccagtcgctgggatcgagtagagagcaaaacatattcctgccctcggggagcttcctgtcgggttcacagacacacacgcacgcacagggactcagagccccagagacacacaccgaggcacccacagacacgagctaactcccagcttcagtcacaccactgaccctcccagaggacacgaacctccgctccagccccgcgggtgcgcttaggagacccacgagagttaggaggacccgcaaccacgaggtgcttcacgaacaccagttacacttgacctctaggcncgcacacagacacacaaggtaactcacacgcagcactccagaggactaaagtccctgcaattgggtctgggggantaagtgaggggcgtcggcccaaagtcttcttcccantacctgtgtgggcaagggggggtgagatctgacccccaaaaacttcctaantgggggacgactcg

SEQ ID NO: 462723 - DNA, 528 bp, Homo Sapiens
ggggaaaattccgaagtgctcccttctgcaacccaaagaggtacagtccgtgggctctgcccttcagtgagaaaccacattgaaagcactcagcacaggctgccccaatagaattagagagtaagcttcccaataaaggttagccagtgtcggtatcccattgtagaacatttacagctttttaaaggatatttgtgatttcaaaccattactggtatcttcaaatgctaatatggaatccagaatatcatttagagttggcatggatcattgaaggcttttatatcttaggcaaaatacaaatattacttagccctatcttttgcattttgcataaacattataataaaatatttttaaatccttaagtttaaggaacactagatgcatgcatatataatttatggatttcccaattaatgtgctgtttttgtcctgtcacagcagtaaatatttattaattacatacatttccagtatcattaagcatgctaagtgttgagaaagtggaagacacgcaggccctta

SEQ ID NO: 462724 - DNA, 568 bp, Homo Sapiens
ttttttttctgggaaaggacaaacagaactgtttatttctgcatactgaagaaaaatactttgatgtcacttgagaaaataaactaataacaatacataatgatgctatttaatccttaatgtccagggacttctgaagtgacccttacaaggcagggcttgctggacacctgtgtcctcaccagggcatatcagtgctaaggaaccagagacataggtcagaaatttcaatgcctgggaacaagttacaagaactgaggtttgagttgactgcaagtttgaaatccaagtcaaacatgaggtgggtgcccagaacagcagctaaggaccaaaataacacaattacagggttgagggtgaatgggcaagtgatgggtggttggttggttgttccatgactgtgttgggggtcttggaaacagtaaccaggaaaagcttgacagtgatttgacaactggccaggtgccaatggtacattaaaaattccacatgggttatatcttttaatccttacaaccactctgtgtggtaggagctattatccagtcttacagatgagaaaacagag

SEQ ID NO: 462725 - DNA, 420 bp, Homo Sapiens
  misc_feature (109)..(109): n is a, c, g, or t
  misc_feature (190)..(190): n is a, c, g, or t
  misc_feature (332)..(332): n is a, c, g, or t
  misc_feature (347)..(347): n is a, c, g, or t
  misc_feature (368)..(368): n is a, c, g, or t
  misc_feature (392)..(392): n is a, c, g, or t
aagcctcaaacaggggatttattaaaactttacccacaccaataaaattcaaactagctacattattaatgttttgctgaaattacatttctactcaagcataaatggngctgttggggagttttttaaaaaaatgtaatggctttactgaggaaataaggtaggtgtacagtaaaggtgcacataaagngtgtactttggatgaggttttgaggatgtctacatctgtgaaggtcatcctacaattaaaataatccatgtatccataacccctaaagtttcatcttgttcctttgcaattcatgcttccttgagtataaacacagtaaagngcccaaataatcgtncagcatgataaatttttgcanggtctatacatccatgcaaagaanatccagatgaatcattatcgccacccta

SEQ ID NO: 462726 - DNA, 628 bp, Homo Sapiens
  misc_feature (316)..(316): n is a, c, g, or t
gaaaataaccttttaaaatttatttgttcagtaccaatttggcataatagcttaggggaagcatttctttaagcaacgatgtgtggacaattgttttataggataaacatttgttttccatgacagtacaaaaataagataaaaataggtgaacattcactcactctgacagttaatatgtatttgctgaccacccactgaacaggcctggttgcattgtatgggaacttatgttagcaacctcaaatttaatgtctctcatgtaagagcatccttacaacccagggccatgggagaacgtgtcccttgggtgagnactcccacccaccgacatgctctgcatgtgaagggtgaggtttttagccgggtagcgaactgaggttcagcatccctgtctcagtggagccttgacaccacctctgctgttaaatattggggagcaactaaacctgggggcattaaaaagcagcctcctaaacaatatcctcaacgtcgatgacagaaatgaagaggtctaagaaaatgataaatcagttacatgtggaatttggcagggccaaatttagacatgagtaagtctatcacacaccctataatgaaatgaagaaagcaatctatgaaaatttca

SEQ ID NO: 462727 - DNA, 437 bp, Homo Sapiens
caaggttccacccttgaaactgggattaaacaccctgtaaacacgtgaattgcccccacagttccttcctgaagctgtccttccttgaaagcccgcatgcctatcctaatactgttttaatatttgccagacttattaaatcccaggtggcggtaattctctgtgaggtcaccctcaatgagaactattcgcacaggctgattctgcaattccttgatcacaggattattagatactgacacaacagtgatatatcctggacaaacacaagaagaagtttcaggtaagcctggtagacagcaagtgaaaattcttgaaatgtcaaacataaatggttttgtacagttgccttgttgcacacaagcattctgatattgcagctgtactgcttcttctactaacttcatgctgctgtgatctccatgactcaagcctac

SEQ ID NO: 462728 - DNA, 569 bp, Homo Sapiens
  misc_feature (234)..(234): n is a, c, g, or t
atttcatatgcctttttatttcatgtcaaatgtaatatccaaacaatgttgaggtatttccagaactgcctatttggacatttaaaatcttttgaatattcttagttcttggcccgctcattcacatttgagagcacatgacacaagagggttcccatagcctcccacaggtaaaacttctgcagtgacttccagggctactgattcagcaatagagacaatattctgattttnttttattacatttcccagggataaagcctgcagggttttgcccaggattacatttctgttcatgggagtattccagtgagggcctctatctgaggttaggattttcattaaacatcaccaaagtgaactctcattgaatgctatttggctttgcttgggaaaaaagacacaagcctctcccttaatagattggaaatacgtatgaaatgagcttgctatattagagcctatattctatcgattttacaggaaaggaatccatttttacaggaataggcattggattaacaaaaaatattcattatgtttatgtttcctttgttcttttgtgaaga

SEQ ID NO: 462729 - DNA, 279 bp, Homo Sapiens
aaagatgagattcattccttttttgaaagaataaagactgagaattataggtaagaggggatagaaaaggaaaatggataagaattattaaaagttatgcaaatctctaatgtgaaaacttgggttcaaggaaaattctgtttgagccagtggtttaatttaagaaaaattaaaatctgcagagaaaagctttcctaatcatcctgatataaattactcaacagcactaaggctgttcataatgtaccgggctgaggaaatctgattgcagaggaaggg

SEQ ID NO: 462730 - DNA, 439 bp, Homo Sapiens
taaattcaaattctaagaatttatttcaccacagaataaaatttttttctaacacagttgcttgactaagtttatataggcccacactaaatgcatgtggtgtagtgccagaggcaatgtctagtacacaccaggctaagcatactaaaactataagacagagcagtgaaaaaattcagaggcttaataagaaacacagaagattgcaacaaacttcttttccctttcggaaatcagaagataaagtagtatagacgtaagttggtttccccttttccctttttgcaatgtctataatttttttaacctctaataatccaatgaggaaatctggaactgaaaatataagggaaagactgtcctgcttgaggaaacagctatttgaacatgagaaaagaaatttgaaaactacgcattaacctaaagagtttgaggctgt

SEQ ID NO: 462731 - DNA, 434 bp, Homo Sapiens
cagagagattttaatttgggctgagtttcaaatacagtcatgcaccacataatgacattttggtcaagtgatagacctcatataccacagtggtcccttaagattataatggagcagaaaaattactactgcctagtgacagaacaattgtaacattgtagcacaacacattactatgtctgtgattatactggtgtaaacaaacctactgagctgtaaaaagtctaggttatacacttacgtacagtacataatacttgatagtaagtattaccggtttatgcacttactatacaatactttttatcattattttagagtgcattccttctacttagaaaaattaactgtaaaacagcctcaggcaagtcctccagaaggtgacagctccatgcatgttattgcccctaaagaccttccaataggacaagatg

SEQ ID NO: 462732 - DNA, 521 bp, Homo Sapiens
  misc_feature (90)..(112): n is a, c, g, or t
  misc_feature (372)..(372): n is a, c, g, or t
  misc_feature (401)..(401): n is a, c, g, or t
atctcaggtctttatttgctgctaatctgttgcaatactctgggattcataggaaatttgcctgtgaagtaactgctaccattcatgcannnnnnnnnnnnnnnnnnnnnnncaatagtaacagctaaaaaagaaacagaacctcacctatgaacacatgactgtttggcagcccactgattctcctctcgcctctatccctgtcagaggttaggacactgccctgtcttaagagctacactactagttttcaaataataaaatgatgtcttatatgcacaatgaccattcacacaaatgtgacctttgaggtttatctcctggatgttttgaactgttgtcagtattcagatggggatttacaatggaatncaaggctactgctgggtcacactacattnccatctacaatggagtgcaatgagataccataatattttcatttggtactttttattagcctacagttcagttcagttctagtcaatgaaatacacagtactttttaggttgaaagcctc

SEQ ID NO: 462733 - DNA, 540 bp, Homo Sapiens
  misc_feature (331)..(331): n is a, c, g, or t
ttttttttgggaaaggcattggccactttggactttattagcaacagtaatgtcccctgacatccgcacaagcttgtagctccacggccaggtcttcccccaacctcacaatggccccgtgatgcaggcaggcaggcgagtgggggtctcccctccttatccacaggccaccgaggcccagagagggctttgccacgaggtcacccagggagtggcttgctgggagccctgggaataacagccccacacaaggctctctccctccgcagctggacctgtacgcgggggctctgtttgtgcacatctgcctggggctgggaacttctacctnttccaccatccttcacggttgggcattcacagccctgtaacaccattcgcaggtatgggtgcctgcagcaggggaggtccacccagggggacgttttaaaggggttcagaagggcatttccccttacaggcccgagggagcagcccagggaagttggccccagcaggagccccagaagttcctccccgtgtccctcctccctggggcca

SEQ ID NO: 462734 - DNA, 510 bp, Homo Sapiens
  misc_feature (62)..(62): n is a, c, g, or t
  misc_feature (184)..(184): n is a, c, g, or t
  misc_feature (198)..(198): n is a, c, g, or t
ccaaatataaaaatgtttaataaaatttaaggcacatgcaaatttaacatcatatacaaagnaacagtactttataacaaagtgaggtttacaaggggtttgtctctctaaaaacagaccttcttctttcccgatagattgtaagtctgtgcttgtaaagtcatgattctctgtgagaagatgnaattgtatgcatgnactgttttactattggttactactgcatctatcaacttggggagaaatgtattagagacaaaataaaatggttttaatcttagagagaacaatggtggtggtaacatctgccttgccagcctcccaggtagaatcccaggtggtgagtcagacgactgtgagtttacaaatatgcaacacagcagcaatcgatgaacccttcatgatgtgctggacgctgtttagggacccaaatagaccatttaccgtcactgcatgcagatctgaaagctcctgtttctaaaggaggtttctagccatttgggtttccat

SEQ ID NO: 462735 - DNA, 250 bp, Homo Sapiens
gagtgagccatggtgcctgggcagcaagtaaccattttaaagaaatactctcaacaagttcttttttttatggggtatttcagttgttaacaaagttaaaatacttattgggaactaattctttgtattttattcgaggaagaagaatctataagattgacttactcattgttgactggttttttgaagccttactgggtatatggacagtttgggataaaaagcaaatcaatcactttttcaaaagctg

SEQ ID NO: 462736 - DNA, 449 bp, Homo Sapiens
  misc_feature (359)..(398): n is a, c, g, or t
cagatgcattaggaggcttcttttaaaccagcccttctgctattaaccttctgatgatttttctcctactaccttgctgtttttacaggcccactaatttgcctgcttgactaaaataaggacgagttatgtgctgatgagagacatgtttgtaatgttattcgttgtgacacagttcaaaagaatttgcctttgattctcactaaaatgtaaagttttgcatattaagatcctttttcaacaactgagcaactctttataatgaagggcagaagacgccaaagggaagaaaatatttacctttgtggggcttttactttctttcctggggaatgggtagggccatagctattgggtannnnnnnnnnnnnnnnnnnnnnnnnnnnnnnnnnnnnnnnaggaggggagtctctctctgtcgcccaggctgtagtgtagttggcctgatc

SEQ ID NO: 462737 - DNA, 512 bp, Homo Sapiens
aaaatttgaatgggcatttattagtataatatatattatggaaaaatataatgaatacacaaaactcattagttcttgaatattattgcttaagattaaaacaataaattaagaatgggttaacttaaagaacaatattatgcaaataggacgagtggaacacaagcaaaatagctgtggcgtgtaggctagctgctggctggggcacttcagctctcctccacgtggtactctcatcctccattagggctagctttcgtagggcttgttcacattgtagtagaaagcatatgcatgccggagaaagcatatgcatgcaagaaattttgagagtacgctagtgaggtatgtctaccctgcccattactgtaataaaatgaccttttagaaggaaaatcatcttgattccaaaaaaggatcccgatagagagattagaaaagtcataaattcagatttcctacgtttctttacattcccaggtccatatatgatgtcaccagggttcccaacg

SEQ ID NO: 462738 - DNA, 539 bp, Homo Sapiens
ttttttttctcagtttggaatgtcctagcctatccacctgccaagggagatctacttcttttttcctccatgcaatgcttaaatgtctcatctttcctaagcctctcttccagttaaaattaatgacaaagatttggggcacttgcctttattctattttttaatactgggtcttcctctcctactatgtaatctctctgagagcagacacaaaattgtgtacatttttgtcccctatgcatccccaccctgatgtctatcacaaagacctgtagtagggtattcatgtttcggcaaacataattatggatgtgtacaccatggaatattactctacatcacacaactctatggcaacgtcagtcattacatcttcttaatggcaaagttttacttaatacttatctatttaattaaaactacattatttatactctgccttcccaaaaggacttcttgcaacgtagaataatagatacaggtaatataaaaatactaagtatgaaagaaggagagtcctcaataaaggggatgaggaa

SEQ ID NO: 462739 - DNA, 506 bp, Homo Sapiens
  misc_feature (142)..(154): n is a, c, g, or t
  misc_feature (376)..(376): n is a, c, g, or t
  misc_feature (409)..(409): n is a, c, g, or t
  misc_feature (444)..(444): n is a, c, g, or t
  misc_feature (464)..(464): n is a, c, g, or t
  misc_feature (494)..(494): n is a, c, g, or t
agttctattttttattgtatgaattcatacaaaactattctgacaatgatcaaggatgtttccaggacctgctctcacacgttccctcacccccaccagcttttggcaaagatagttgactaaataccactaaatagtggcnnnnnnnnnnnnnaacaatgaccttattttatcttttaactttaactgagtcttatatacagacctgcccaactggaaagcttttacacgtgcttcagaatgcggcagtattgcacaatggtttggggcaggttctgtggttaaacatgggatggaaccccaggctctacctgggctcagctgttacggccctgaggcaagtgactcaacattcctacacatgggggccccccgntgggaaaatgggagatgggtaacaggtaccagnccttcaacacctagggagggcgttcattttcatgnttcactggttaagtttcttntcgtttgttcccgatttttattaggttttnccccaattggtt

SEQ ID NO: 462740 - DNA, 458 bp, Homo Sapiens
agactcagggggtgcatgtacatgcttgtcccatggatatattgggtataggtggggattgggcttctattgtacacattacccaaagagtgaacactgtacttaaacggagtaattttaaagggagtgcaacgtaaccaaaagctcagtagccaagattaaatcatgttgggagcagcagaaacaggttttcaagaaagtaaatcaattttagtgacgaatttgacaagcattcctaaaacagagaattaaaaaggaatgaaaataatgagggtaaccacataaagggtgctaatcatggagaattaacaaatttctgaagaaaacaaacaagacaggtattaaagttgttaacagcttattcaaaaacgtcaaaagaattctccccaaagcaaaacaaaacaaagcccgtttgaagagatcaggaagactcatgtattccaggcaacattaagaag

SEQ ID NO: 462741 - DNA, 477 bp, Homo Sapiens
ttttttttctgggaaatcttctttaattttgttctctgggaagtggtaggttttggagataaagctgagttgatacattggggatttgaccattctcccagaaactcctcaaccaggaaggaaggtggtgggccctggacacttcaagtcgggcaggccgggcttcagagcccccaaaacagtgcactgcctcctcacctgccatgagggccggtgtcccctagccggcctggagagcatctgccactatggctgggacatatggtctcccggccaccaagcagcaccatggaagggaaagtgagatgctcgtacggggactgggaccccacgggcaccccggccccgtcagaaggcaggtccaaggcacagcatgtgtttgcagggttggacggcatggggtgatggcttgaggttcagccaccctgggaccccctttccgaggccttttcaggccactcccaaggatggtgcgtc

SEQ ID NO: 462742 - DNA, 473 bp, Homo Sapiens
  misc_feature (406)..(406): n is a, c, g, or t
aaataaaaaaaaaattcacttcaggagagttaacccctttatgccattcaacttcatcaactgaatcttggtcagtatgcctataatgtacaaagagtggtaagtgctaactagaaagaagtgcaaaagtagaccagcaagggaagatacaaacatcaaattttagcacatcagagagggagaacaccaaaccttatactcactaaatctctcattgacattttgtaacatgagtaagaagaaaatacttttggaatacaaggtcttgtatgtcaggtactaatataagcactttatatacactatgtactttatattcattatcttatttaacattcagaatgattttttgaggcaggtaatgttatctccattttatagaacacaaaatgaagcttaaaaaggntaaatcacttttcaagattgctaaattacttactacacatttatttactagtatgaaacctgacata

SEQ ID NO: 462743 - DNA, 499 bp, Homo Sapiens
tcagaatattttccatccacagttggttgaacagagtgccatctgtacctagaatgctgtctcagcccaaggtaccttcttcacatcattcatgaagtgctttaaaccactccccctcaagaagccctttagaacactcagaaaaagatcctcatctcataattcttggtccaaatacaaaactccagactcctcaattactgcatcactaaaattcccaccatttcagtgcatataattaggctttttaagttatatatttattattaggcttgggtgtttgtgtgtttccatcagtgggtaacaccattaaacatggattcttccaattttactacttctgtaacacagttgcatgtggaaaacggacattcgataaatttatcctgacttcacatgccaaatagtacctttacacagccctcagttaaagccaccagtttataagtaacttagtggaatagcctagaggtgacaaaggaagagttgggcagcagca

SEQ ID NO: 462744 - DNA, 416 bp, Homo Sapiens
  misc_feature (395)..(395): n is a, c, g, or t
  misc_feature (406)..(406): n is a, c, g, or t
tttttttggccaaaatattaactctctgacaagatattagggacccatccactgtgcttccagagattaggaggtaacatatatatgtgaattggtgcacaggtattggacctatgaattagataattgatattaaaaagggaaaaacaaacaggcacgtctaaatccatatttcagaaagctgggctctgcatcggttaccagcttaatttggcaaagttttgactaaaagagaaaactctgaagctgaatttgattcagaaaactattcagaaaatagttgattcagaacactattttataactacccaatatcaggttggaatatatatttacatagggattcttagggccaacccttttaattttaaaaatattgtgggggggccattttngtttgcagggnattcctgggc

SEQ ID NO: 462745 - DNA, 513 bp, Homo Sapiens
ttttttttaacaggtaacagcaatttatttaaaatgtaattagatttcttaaataagtaaataatttaagtaaacttagtttatattacttgtataaattattttacatattatcctcaatcttaaaaaaatttagctaggtatgcaattcaaaattgatagattttttaaaaaataggcaacttaaaaacattttattgggacaagttgggtaatattaattctcaaatattttatcttaggaaatcaacacacttgacaattgatattcatagtatctatgaaagtgacattctggaatgtgccttttatacttgccaaaaatttaagagaaaaaaatctattctgggccttcagtaggtaaaacttaaagattaaaggaaataaggttaaatttactgggctaaattacccacaaaaactgaaatagattcatttacttgctctttatctttcagcatctgataatgaacagattttaagacgttcagaatctgcttcagcatagaaata

SEQ ID NO: 462746 - DNA, 488 bp, Homo Sapiens
  misc_feature (235)..(235): n is a, c, g, or t
  misc_feature (399)..(399): n is a, c, g, or t
  misc_feature (452)..(452): n is a, c, g, or t
attattataatcatttatcctcataaatgatcatataaaaagccacatacaccaggcaaaaataaatcttaaaatcattatgatactttaaaatagttttacaataatatggctaagggctttggtatttgcattaacaaatactcaaatcagttaactatatttgttccagtccagccaaataaataaatacataaatagggcggaataggaaatatttactgactaactatgncaaacatcatttcaagtaactgaattacagaatttaacagtatcatatcacttgaaaatttgtgaatgggagcatcataagagaaaaaagaaagtatgcatccccacggttcttcaaacaattcaaagttggccaaaatgtatactacagattctattacttgnatttttttatttgaatgctctgttagaaggttatacttcaaatttcttaatgnattatcattatcattatttcactggtctatttttta

SEQ ID NO: 462747 - DNA, 393 bp, Homo Sapiens
  misc_feature (68)..(68): n is a, c, g, or t
ctgcctatcaaagccgggaagaagggagcctggagcttccaactgccatgttgctgcccgcatggggnaaatctggtttgggttatagagaatcaaatacccatgcgggggagacacagtccagggcagcatcctgcccccagcccaggaatacccctgactgttacagttatgggtggcaacatatctcttgttgcctatgcaactttgaaatgggattctgaagcttacaaccaaaatatcccaacttatcacaatcccccttccaaagaataaccctacatttcttggctggagaaattgagtgaaacatgctagaagagaccctaatgcctggcagaagacaggactgaatgtccttaacagatctacccaattccacttgcaaaatct

SEQ ID NO: 462748 - DNA, 377 bp, Homo Sapiens
  misc_feature (95)..(114): n is a, c, g, or t
  misc_feature (313)..(313): n is a, c, g, or t
  misc_feature (354)..(354): n is a, c, g, or t
cccttgcggccgcaggaattttgatgtttgcccgtgtgcgtgtgtctcctgggtgtagtggatgccagtcttgttgctgtgacaagtaacaaccnnnnnnnnnnnnnnnnnnnnatacaaacactcgcaatccgacatttggtgctaagggtttcctggtgcagacggtgggcctgggggctgggctggaccagggcgtgggtctctggggttggggtcccttgctgctcagggaggcagtactgactgggcactgcctctgcccccagcacccaccctcccccattccccagggagaaggggccccactggntttgggctgcagtagtagggagacaagttccagggccaagnccagtgggccccttcttcctggg

SEQ ID NO: 462749 - DNA, 424 bp, Homo Sapiens
  misc_feature (30)..(30): n is a, c, g, or t
  misc_feature (88)..(88): n is a, c, g, or t
  misc_feature (94)..(95): n is a, c, g, or t
  misc_feature (99)..(99): n is a, c, g, or t
  misc_feature (103)..(103): n is a, c, g, or t
  misc_feature (124)..(124): n is a, c, g, or t
  misc_feature (135)..(135): n is a, c, g, or t
  misc_feature (138)..(138): n is a, c, g, or t
  misc_feature (142)..(142): n is a, c, g, or t
  misc_feature (156)..(156): n is a, c, g, or t
  misc_feature (173)..(173): n is a, c, g, or t
  misc_feature (177)..(177): n is a, c, g, or t
  misc_feature (181)..(181): n is a, c, g, or t
  misc_feature (187)..(187): n is a, c, g, or t
  misc_feature (193)..(193): n is a, c, g, or t
  misc_feature (196)..(220): n is a, c, g, or t
  misc_feature (223)..(267): n is a, c, g, or t
tgtgccaaattcctaattttcatttggtantatttccttctgccctgaaggacttcatttaaaaattttgctgttgctgggcaggatntctcanncctntaanccctagaattttgggaggctnaggtgggaggntcncttnagttcaggagtttnagaccaccctgggcaanaaancaanaccctntctctnccnnnnnnnnnnnnnnnnnnnnnnnnntcnnnnnnnnnnnnnnnnnnnnnnnnnnnnnnnnnnnnnnnnnnnnntagctgggcatggtggcatatacctgtagtctcagctactcaggaggctcaaacaggagggaggattgcctgagcccaggagtttgaagccaggcatggtggctcataccataatcccagcactttgggtgggaagattgcttgagactgtctctac

SEQ ID NO: 462750 - DNA, 491 bp, Homo Sapiens
  misc_feature (443)..(443): n is a, c, g, or t
ggtgctttacacttttaatctctgttggtacatcagatgccacggaccaagcaatttaagttctggagcccgaagcagttccaaaccaaagcaaggattaaaacctaactcaacccagcaaggtccttatccaagctctctagaagagaccattctgtttctagaaatgacgggacactgtgttcaaattgcttctgtcaagatacttaaaaataagtaagtgttcctcattggttacaaagctggggctaatgctcatctcaaaacgactccaactctctgagtccagccatttcaaaggacatcctttagtctctggaaatggagagtgcgatttcagaaatgagctccaggggcccttttttacaatcaccaagggtttttctccactcgtgagggtccggcttcctccagtgcatccttctcttcaggctggaggaagntttctatggcagagttcatcatgcccttccatcttcccgtcactgatt

SEQ ID NO: 462751 - DNA, 537 bp, Homo Sapiens
tggcacgagggtcaggattttccagtgtctagaaatgcactgcttgaagagcagcagaatatattacactggagaagagaagactgtaaggggctagatgcttcatctgcaagaagagtagacttgccctgaaggaataatcaggccagtgagaaagagcatatgcacatagatttgagctcagtaaagaataaacctgagcagtcccacaagggaacagtactccccagaggataagctgccaaatatgggcagtgttcaagcagaggtgcaaggaacacctgccaggtaaacaatggacacctgccctgaggaggccgtgagatagatcatctccaaagacaccatcaacctctatgaaaaggaaggatgggcttattatgaccactattcagagagaagaaactcttaatgttttcctgtgatattagtattgttttctagtgcaaattcctatcatcatgctgctcttcaactggaaccaaaacaaaaatttaacattatattatactactaataaaattaatgattaaggaa

SEQ ID NO: 462752 - DNA, 347 bp, Homo Sapiens
  misc_feature (171)..(171): n is a, c, g, or t
  misc_feature (309)..(309): n is a, c, g, or t
  misc_feature (316)..(316): n is a, c, g, or t
attatatgaaaactgtttattctatagcctactgggaattggccagaagttagaaggacattggaaatgacttttaaatctccatttgagaaaaagcatgccatgagtctaaataaccaatttcatttagcaaacaaaatacaagtaaacaaaacacaacttctctgatgnaatgaagtggttaccatattttttcccattgtgtaaaggatagttctcatatggaaatatatcacctaaggcagtagttaatcaggaatattctggcaaacttattggggggtaatttaaaccccaaatcgggaaggnataggantaaaaggacattaaaggtcttttctttcaaa

SEQ ID NO: 462753 - DNA, 534 bp, Homo Sapiens
taactattattgttcaatttttttcttgcaattctcagttatcattcaatttgaactttacaattattttatctctatttccctaaagccttccagagatttgtattagaattaacatcgatttctatgttaagacaggtaatttgatcataaatttccttatttgcaaacatggtatctctgtactatccacctagtgctttatatcctatcctttaataaaaatttcacaattttcttcacatagattctgttcctttcttgtgatatttattactgtatatttaaatgtgtggtacaaagataaatgacattttccccctaactttgatttctaatttacgaagacataaagaaaagctgctaatctttgtatgctatcttatatttagccaccttactaaattcttttaggtgtctgaaagattttttttggtagcatatcttgagttttctaggtattcaagcatatcacctataaaggtctttctggttctttttttcccagtatttataatgtctatttcctttttt

SEQ ID NO: 462754 - DNA, 441 bp, Homo Sapiens
  misc_feature (283)..(283): n is a, c, g, or t
  misc_feature (338)..(338): n is a, c, g, or t
  misc_feature (357)..(357): n is a, c, g, or t
tagaacagagaaccattaaccctagcttttaggaacatttagatgacttacattttggaggggaaatgtctatgtacctttaaagtgtctctacatcaggaacacacaaagaaaacaattccagcaaccctaaaattaggctcaaatgaaatcaataaatattgtctggctgatcattataaattttatcttttaaaagcctggacctgctcttttttcttcaggcttctattttcttcaatggctacggttcttaactatctaggtggaatgttacaggctncaattctttggaaagtgcactttaggtcttaatggaggggaaataaggcccaggngagggtggccccacatggntttggggtcttcctggcctttttttggcatatttgccatttggacccacaggccaaccacccaaccaaggggaaacccaggtta

SEQ ID NO: 462755 - DNA, 519 bp, Homo Sapiens
gaagttgtttattgagaggtttaatcatttgtatatcagggaaagccttatgccttaattacagtgataatagaaaaaagtattgattaggcctggatttctgtcatgaaagtagagattacaaggtatcttctttatcagtagaccttgctgactttaagaaaggcagactttccttcagtcttagttttacggaaaaatgaaaacttatttaataaaatttttataaaaaagggaacgaaaacctcagagatataaataaatgattcagagtcacacactgggcagtcaatttcacttaggaccctaaggcccaccctcttttcaccacatccaaggattggggttacccttcaacaattgactgggatacaagtgtaggagtgttactggaattccccccaaccgactgatctgttttgttctaaatatgctgtggtgcggcaaagggcacaccaatcgagcatagtaatgaatgatacatgtaaaatgggtgcattgcattcacacttttactgt

SEQ ID NO: 462756 - DNA, 564 bp, Homo Sapiens
  misc_feature (453)..(453): n is a, c, g, or t
  misc_feature (529)..(529): n is a, c, g, or t
  misc_feature (546)..(546): n is a, c, g, or t
ttttttttagactataagcttctgaagggcagagaatatctctgtatcccttagggaatattggtttgtatcctcagtgcttatagatagtaggtaagtaataaactttctttgttcccctaatatcttacacatacttcaccaaagccctcgtcaccttgtattaaaagtgcctattcatatgtaatttcctgttattttccttatttatcattttattgttgctggcacctacagatggagcttcataaacatttgctgaaacactattaagttggtagcaataaagatgcccgggaagatcaaaacaccctacaagagatgtcctgtagggtaggatggggcagggcctgggtgtcagctgtgggaggggtggtaatctgatggctgttgaagggggcagacagcttccgggcagccgagagtggcatgggttgcctagcaggtggttgnttctgagcttggccgtgtttaatcacatgtgggcacccttagagaaacttatggaggtttaagagccagttgcttnttggattgacagctttntggggcttccatgctgac

SEQ ID NO: 462757 - DNA, 624 bp, Homo Sapiens
  misc_feature (192)..(192): n is a, c, g, or t
aattaataagaactttgattttattgcctttgcccactctcctgattctgttccccttttctttaaaaacaacccaaatacattccccatactacatactgattttagcagtgaaatgaaagaactctctttatatcttcctgtgtaagggctcacaaaaacaggcccagggaacagtgacctaaaatcagnacaaatccagggttcccagttccccatcacagtttctccatcctactaacacacttaaggctcaaaaagcaaaattaatgcccaaacagcctgtgaggcacataaaaatggaaaaattttctatcctcatcataccaggcatcagataagatactaaaatcttccacagaccattcatttagaaggggttctaacctttaaaatcatgtactaacatcatcaacactacgacagggatcttggatcacacccatgatggcttctttgtcaaggaagcaaggaagttatatcattttggtgcctggaaattcctatgtggtcgattgaactgcaaagatcttggatccctgttaaaggttgtggatctccacataaatgatatctctgttacagagaaagaaggggctgctgcacttgctagaatgtctctgg

SEQ ID NO: 462758 - DNA, 536 bp, Homo Sapiens
gtctgaagttagtcagacctattccttttttctgtgatcgaagaatccctactgatacactggggaaatgtgctaaacttggagaactgcaaagccaagagtttggttaaaggtttgctaaaagccaactcttcatcataccctgcaatgcctccctgatgcctctgtgaatcggcgctgactttatgtattgacagctaagagaaaggagctcttggtttagggcacacgcagggctagatgcttacctgaatttgtacatctttttgggtcagttctcagtcatcaagagcaggtaggcacaggaagagaggtctgtgcttcagggtctttgggaactctgtccttccctgtaggagtaaggatattccccccaaccccaggggaccacccccgtgcccacagataaaggatctgtatcagtatcaaagatatatcagtatcagaggaacttgtgatgttacgggatcatcacatgtctctctgccaacttcttccttctcagagtacccttcaaaggccactgagaatgttta

SEQ ID NO: 462759 - DNA, 545 bp, Homo Sapiens
gtcttagagaaagcctcagccatggtggaggcagtggccactggatggcaagaacagacaatgacggttgtggaacaggggaagggtgggggggaaatttagtgtggccacatggctctatgtcacagtcccaactcgaccatctgattgcatgaaagtgtcaccccagggagcctgtcagccatcctccctgcattgaaggtgactggatgatcctgttgcttggtatcatgtcaaccaatcacagtgggcacctgccggcctaagtggccccagttgcctccctcagacaaaagtacacagatagataccccacagggcaaaaccacatcaaccctccccagctgatccatgccacaccgtgagcactttgaagggtgtcacggaaaactcccaaagtttagcaatttcagctcatgctccttgaagagggcttgacctcctgagcccaagtccattatgccagaggaatgacagtggccacgtgtggaccacttctcacccatctcagaatcttctgttatcaacggctaagccaccccggc

SEQ ID NO: 462760 - DNA, 479 bp, Homo Sapiens
ctggtatccaatttaatccaatccataggaaaacagcccaagggtgccccatcgtttgccacccctaatgaggaaacaatccagtcctctgataggtggagtcgttcatctctgcagtaaaaagctaatgcttagtctagctttattcatcctttttggcacatagggtatatacggtatggctccatggagccaaccaggagcctctgcctggtggaatgatctgtgtgccaggctggaagagacagacactctgtttgaccaacaaatgtatagaaaatagtgggccagtaagtaggcaattacgtaataatcttatccaaagaaaatgtggggctcaaattaagatgatttcaccggggaaaacattaaggtattacaaagagttcttaataaatagaaataaatagtgcagggtttgcgccatggtgattttcgatggttatctgccctcgccgctgctgctccagctgcatctt

SEQ ID NO: 462761 - DNA, 494 bp, Homo Sapiens
ctaataaattatatttatttacaaaaggtctaattttatataactatgaggttcttttacatcagaataatatataaacagaggtgaaaatctggtaattacaaacacagaaaatagaaaccttgttcccttatttattactcacctttcagaacaagtccttggctcagttgtagaggtggggaagaccaacacctaccgaagtttgcaggcaggagcccccaaaattgtttataaataacacatttagataccctaagggaacagcagtgaagattaggcttcaagggatgggcttaggtttgaatctgatctaattcaccagccactcactgtttcattgtccacgactaggggcagggaggattagccagtatgaatgtcaactttacaagtagggtaattaccatcaaattaacaattaccaatcactagcactgagatggctttgaactagatcctactgagaatcacaaaagcagttttgatagcct

SEQ ID NO: 462762 - DNA, 421 bp, Homo Sapiens
  misc_feature (309)..(309): n is a, c, g, or t
ggctgtggatctggcaacaacctctactttttagtttgatctatgaaaccaatcaccacatcacaagccatagccattgcttcagggccgggcatgtgacctaaattggtccaattcgagtgaatctgaggatttttgaggatgcaagaaaggattctaatacttcttttgctaaacttgaatgaacctgaggaatttctaaagctagggccaacatgtagtgggctcaacataaagccagcatgggaggaacaacacaatagtgaaagaaaaagtgtgagtgccaatgcagtgttttgagtgctggantccaagtgtaactgggagccagtccttcccctggacttttagttgctagagccaatcaatttcttttcttgcttgagctggtttgaattgggttctcagtcgttcataacta

SEQ ID NO: 462763 - DNA, 387 bp, Homo Sapiens
gctttggaaaatatatttatcgcagaaatgcctacaataagcaactctatctggcagtatgttaatgtgaaatatacaaaatataactagactgtttttacttcaaaattcacatcatcatgaaaaatacagcaaaagtacagaatggtgagctcattatgtatctactctatataataactagggaattgatgacttcaaaatattcattcttacaatgtttaattttgattgctaactgacaaggcacgggtgctagggtgttatatgaggcactggaataaaacaaaaaagtttctctggcaaggaaaaaaaccttgggtctgggggaggtactcaatatatcccttaccaaatttaaattggggcttttggaaacccaaacca

SEQ ID NO: 462764 - DNA, 493 bp, Homo Sapiens
ggcagtacaaaaattatttattgaaaagggaaagggtggccccttgctggtgcccccctggccctggccagaaggggttgccactgctcattatctgaatgcagaaagtctgtccaccccttacctttaataaccttaaaggggaagtgccgtggtggactggtaagtcaagagaatccatctcaggaacagcacttccaggcccttgcctttaagaactccttaaaggcaaagtggacacatgccgcaccagatgagagccagaacgttttcgggaaggtccctgggaggaagtgttttcgtgtctttacctttaagactctcttaaaggtgagggcatgttcacgtagcgtacaaaggaggtcaaactccgtcaaggagtctacgaagcacttttccagatcttgcttttagaatctctttacagatgaggtggccaagcgcgaattaataaaaaacaaaataccttgcagaattatttttcttcccgacc

SEQ ID NO: 462765 - DNA, 516 bp, Homo Sapiens
aaaaaatttaatccatttatttattcaaaaaaatagtcattgagttcccagcactgttctcaatgttggagatggagtagtaataaagacacaaaactgtggtcaggaagacgtgttctagtggttgataaactagatttaagtaaataaacaatgttcaggcagttgtaagtgctgtgaaagaaaacagatgaggaaagagacaaagtggcgtatgtggaagctgcctggcctgacgggctgagcacctgatgaaacacctacctccatacccgaccttcagcacctgctgtcacacatccctgttacctgtggtcaccacacacctaaggacccctgccaaccactgacatgggttaatttgagtgagtccttttccctaacacagcattggatggatgagaaaaagacagcccttcacttatgttccctgaaaggacatcctcaacggagaatgaaaaaattaatgtacatgttgggaaggacatgatctcatgatgagttcttgatctgcca

SEQ ID NO: 462766 - DNA, 535 bp, Homo Sapiens
tctatacatgcacacaaagttgggaacagtagatactagggaatactagagggtggagagatggaggggccagggctgaaacactacctgtggggtgctatgctcagtacctgggtgatgggatcatctgcattccaaacctcagtgtcacatgatatacccatgaaacaaacctgtaccctgtacccactcaaatcctaaaataaaaggtaaaattatatataaaaaaggaatatgatcccacagaatgtatcagacaaaaggtgtttgttatggtggctaatacacttggggttcagaaagtcagtggtggccacacacggtggctcatgcctgtaatactagtgctttgggaggctgaggcgggaggatcatgtgaagccaggagatcgagacctctctgctacaaaaagtaaacaaacaaaaattggctgggtgtggctatgcatgcttgtggtcccagctacttgggagactgaggtaggaggatcacctgagcccaggaggtcaaggctacagtgagctacgattgcac

SEQ ID NO: 462767 - DNA, 496 bp, Homo Sapiens
ggttaaaggactgacactttatttactcatccagccatgtttattaagaacttctattgccagttgctcaggatctggcaggcaacagaacagagatagtccatgccctcatggagcttatggtctggtggggagctgatattaagggcaatgactgttcctcaagcagaagtagagggttccattggaggaaaactgaggcaagaatgttagaaaggagaaagtgagcagggatcaacatagcttgaagtacagcttctgtggggaatggaaaacacaccaactcccaggtgaagttagaacttaaaccattataatctggtctacagagctccaagtcctctaagaatcctgagttctcctcaggtcccatggatcaccaggaaaccatgtcttagctcattagctcagtctaggggttactaacttgagtagacatgcatactagggctggaatttaacataaatatgagaaacaggctgtgtgtaaactaaa

SEQ ID NO: 462768 - DNA, 510 bp, Homo Sapiens
  misc_feature (15)..(15): n is a, c, g, or t
  misc_feature (33)..(33): n is a, c, g, or t
ttttttttaaagtcntttacacggtatttatanggcaaatggatttccactttaagacagataaagaatgtgagattaaaataagcatgcatgacattccttttattgtttccttttgctttaactgtgtctgtggtatttttaagtgctgtatttaactactatactattacagtcaaatactgattatccatgtgtactgctgacaccatttacagtcattgcatctatttgtatcaggaactcttgctaccaagttaatactctgctcagctagagtgagaccacagccctgctctgtctctgataaaagtggttagactacccatacatttctactgtctatactcatgctgatcccctttttaaggacaaacgatcaagacctaaggtatatggaaaactggtgaaaaatacattaattctagttgtgtaaggggaaacaaatccatctaaaaaattaatggcagtagaaataaaaatcataagccctttacagtaaaaatatta

SEQ ID NO: 462769 - DNA, 306 bp, Homo Sapiens
  misc_feature (99)..(99): n is a, c, g, or t
  misc_feature (160)..(201): n is a, c, g, or t
tgagccaccatgcccagccagggcaacccctttatatttgaacacctgacctgacctctgacatgtggtctctggtccccatttgtctccaacggtggncacatcttcatctttgttatatatctgcaggaacactcagtctcttcagcagccgagaaannnnnnnnnnnnnnnnnnnnnnnnnnnnnnnnnnnnnnnnnnccaccccattctccccctctgggccaggggatggcttccttccttgctttctggtgacttatacttcacttggaaccatatgcctgattaccagattcttcttgc

SEQ ID NO: 462770 - DNA, 470 bp, Homo Sapiens
  misc_feature (346)..(389): n is a, c, g, or t
  misc_feature (392)..(392): n is a, c, g, or t
ttttttttaatgtaatggcctcaggatttggtgggtatgctgtgattgtacagaacagcctgcatggatagtcacaaaagtactccttaaagatgaattggcaccagtgaggggtgatggttcacttatttgtttgtttactcaaaggtgataactttgttaggaatgggaccagtcgtctttggaaatctgaattaattggcagtattttaaaacgatttctctaatgtttagtacatgtcctaaaatggctgcttgatcgaatcacatcccaaactggcctagatctgagcaccctttggcccactgtgtttgggggggataggagttccctaggagcaagggnnnnnnnnnnnnnnnnnnnnnnnnnnnnnnnnnnnnnnnnnnnnggncacagggcttgaaggcacttttaaggtatttttaatacctgagggaggaggccattttttttaaattaaaaaggcagt

SEQ ID NO: 462771 - DNA, 401 bp, Homo Sapiens
  misc_feature (70)..(70): n is a, c, g, or t
  misc_feature (365)..(365): n is a, c, g, or t
  misc_feature (369)..(369): n is a, c, g, or t
  misc_feature (379)..(379): n is a, c, g, or t
gtgtgactcattcattctatgtctatttatattgaataatcaacttctgggctgaatggaagactttggncttttagctttcatgtacagcagacagacatcttagaaaaatccccaggacaacagaaaattattaacatgcctttgatgtccagtgaatcctttcgagtcagatttttgctgtgtactcttgaaaaggcattaaaatattttaagtagggcttagcaaaaggatcgaaaacattaggattatatttaaaataaaatctatttcttaggattgcttttgattatccggggcaggaaattttgtttcattgttgctctataatgataggaatttgtgtttattgggattatttggncagnaatattttgntttgggaaatattcatgttaaa

SEQ ID NO: 462772 - DNA, 510 bp, Homo Sapiens
tatttgggaaggatggatcatgagtgaaagcaagtaactgaacataagccacatcattatatctcgggatttaattccaagaacaacacccttgtacataacccgggcattaaaaacacaaagtaggcccaatggtaagttggtgttaaaggctcaagaattgcaggctgttgtgtgtgcacacaggtgcatctgtggatactatgtatgctacattgtacatactatgtatgtacaccatgttacattgtagctaagtcagtttagttaatacaagaattgcccattacattatcaaatagcttaactgaaaagtaatgtttgcattatatctgatagcttccatatagaagaaagggaagggccaatgaagactcttggaagctagggaccaagtgcagtctttagatgggctttatgttacctctcatcttcaggtgggtaaaacttgtgttccaatacttgttgatgttaatgtagattttggcagagttcttgttttcctgggca

SEQ ID NO: 462773 - DNA, 389 bp, Homo Sapiens
  misc_feature (96)..(96): n is a, c, g, or t
  misc_feature (170)..(170): n is a, c, g, or t
  misc_feature (205)..(205): n is a, c, g, or t
  misc_feature (236)..(236): n is a, c, g, or t
  misc_feature (246)..(246): n is a, c, g, or t
  misc_feature (353)..(353): n is a, c, g, or t
  misc_feature (356)..(356): n is a, c, g, or t
tttgctctaagtaatatagtgtttacactcagtcactgaagcaaagaaacaaaagttattttgtgggaccattaagttaatgtcaattacaaagangctaaaaatgttcactcttttcatactttaaatatatgcaatatactttgcatgtccttccaaaatagccaaangggagcctaaggaggaccttatcttatttaactgnggatgacagcacattcccttagttaatctgnggctaccaanggggcataagctctcgagctcagttcccagagtagggtcagtgtatctgggctgtttgctgttgcctttatagattacaaaccttgagcccaacccttgcaagactnttntcaaagcatgaggatcaaatcagagaatatgag

SEQ ID NO: 462774 - DNA, 397 bp, Homo Sapiens
  misc_feature (317)..(317): n is a, c, g, or t
gatgaatgcagtctttattttctctaaaaattgaaaggcaaacggaactctttacaaaaagaaaccatctgcatgattgaaatgggaaggtccagggtgagaggaaggaatctaaataggccagggttagccagggatctttgtgtgttggtctagactccagggtggtggcaaatatttttaaaaagaaagagatcaaccaagagttgggagtgtatagcccctaggaaatagggcagtgatgggtgctcttcttgcctcagctgagcctctgggtgctgatgagggaactgacccaatttctcgggctcttctgnccacccccatgcccagcctgggatctgcccagtcctgctgcccccagagggttgctgactttccaggtcttagagaagaa

SEQ ID NO: 462775 - DNA, 490 bp, Homo Sapiens
  misc_feature (475)..(475): n is a, c, g, or t
aaacaggtcccatcaggaaaagtccagattgttagtattagtatggtccagaatacactgaagcagcttctagaccacactgaaattctcctcctctttgtgtctgggtctcatggggggccactgaaaatctttgcagcagcatactaggatcaaaactggatggattctgaaaggaatagctatttttactagattgtaaaggcaagcctgaaaggtcaataggctgtgtttcatttagtctggaataggcagtagtcttactatgtatttcatataaagtgggtaataaagtcagtttctcactgatgttcagatccaaactatgtgattttctatgaaaagctcttgtagcgcatctgccagtcacaagctggggaacaaaaagctggtattttggttctgatgctttggacagcagtttttcgttcttcatctcaaaatatgttggtcgcacctccaggcagagtgcttncccggtgccaagctt

SEQ ID NO: 462776 - DNA, 514 bp, Homo Sapiens
  misc_feature (434)..(434): n is a, c, g, or t
  misc_feature (455)..(455): n is a, c, g, or t
  misc_feature (478)..(478): n is a, c, g, or t
ttttttttaacaattctaggtttggtggaattaaaaagagctttgcccagtctgagctgtaaaagacctcatggcggaggagtgctccgggcctggaggcggaatctctgctgtgagctcaggctgtgcatgggtgatccctgggcatgacacctcaggtctctcagccttcaggtcctcatcactcaaagaagggaactgttcagccctgaaatcatcagatttgggactctagggatttcagaatcaggattcctccaagattgaaaccatatcagtgtatatacatgatccccagagaaatatgccaagagggaaaaaagccaatcccaaaagggtcacacacgtatgggctccatttattttaactacatggaaatgacaaggtttttaggaaatgaggattgggtccagtgggtttttcaggggttctnggttgggtaggggctttggangggattggtccttaaaggccacngggggggtcccttgagggcagaatttcccgttttcc

SEQ ID NO: 462777 - DNA, 260 bp, Homo Sapiens
aagatgcatttatttttgcatattattagattgtgcctatagaactttttgctagagtctttatagagatggatccagtggcaaggacagaacagatttcttcataagaagatactttgctaatgaggatttaggaagcaagcacattcactaatgcagagaaataatacgagagaacaaagtttactcctttcctcttgatcaaacagacattcatctcttgtgtctgcaacagctggaagtgaagctagagaaaaact

SEQ ID NO: 462778 - DNA, 544 bp, Homo Sapiens
  misc_feature (84)..(100): n is a, c, g, or t
gtctggactctccttctaggttctgctgaccttgtctgtgtctcctgttattcctgttccataccaagtagcattttcttgggnnnnnnnnnnnnnnnnngtacctattccctgtttcagtgcatgtacaggaagagttgtctcataaggtgccactaaggaaaactttctccataaagctgcctgctgtgcacgttgcctgggctttgctacccctggtgctgcatctgcctgtgttctgtcttctggttctgctgtgctgtgggggaggggacgcttgtactcctctccttttggcaggaagagtcacttccacattgaggtcagaattgaaaatgggatttccccgttgggcagaggggatgggaggcctgcacttcctgtgtagtgtaaattaatcgctgccccttccctgcctgcagccgtccagggttcaggggccggccctgatttaaccattttcctgcccaacgttgtgaaggctaacgaaagacctgtgtgagctttcggatcctttccttcctacaagttcgtaattaacttt

SEQ ID NO: 462779 - DNA, 424 bp, Homo Sapiens
aactgttaagaaaattaacttccaatcgagagggaggtcttccaatgccaaatctccagttcatttttctctggtctgagaggtttgaagtggaaacattggctctccctgccgatctggtggcagcactcctgcttactgatgcatttgacaagatttgggataataacatatgacagtgcagctaggtagaaattcactcctttattttttgaattaggaatttcactgttaggcatctttgaattgggagggatatctctaacgtccctttcagttcccaaaccgtaggatctctgatttctcaatgaggcagggaattggggttgaatgtggcagggatattatattttccagaataggtcaggctgtttcatctgctgaggaaagggtggggtgagggagggtatttttaactcgaatg

SEQ ID NO: 462780 - DNA, 603 bp, Homo Sapiens
agtttgagaacggatttataattttcctcatgccaagcaaacaagttaacccctttggtgacatatacagaataatctggacaaagggaacacaaatctcaagtctgaacatttcttgtgctatttgccaggaagttgtaatattgaaaaactgtgctcttctgagaatgggaaaatgaggacataaactctggttccaaatggttggaagtgcagtttatgtggtcaggttgtttttcccctttcattaaaaaaactttcaagattccacttgatccgggtttcttcgaaaatgtattactttttacaaatataattctttataggggacagacttcaggctgtgtagcagggcaaagctacagaagaggaacgttcttgaaagactgctggggtgtttcttaggcacaaaccacctctgaaagagttttcaagctcagtggttggtgaagcaaagccaagttcctgtcccacccatctctgggatgaggagttctccatggtgaccctgagtcaggcttcttctgcacccctctgcctggttaatgaggactcaactgaactgcccatctgcaaacaaaccctttctgcatttttctctct

SEQ ID NO: 462781 - DNA, 512 bp, Homo Sapiens
  misc_feature (435)..(435): n is a, c, g, or t
gggaaatagaactctttatttaaatatcagtacagaacaataaattactaaaggaaacaatcattaatataaattttttcttattaaataatttaaaaattctctttcaggacacggaaagaatccccagaggtctgaagtctaacgtgattattttactgacaatatcatttgcaagaaagagatcatcattcaaaggaagtacttggattttccaaacaaaaagagaaggaaaggaaaatgatatatcttgtttagtcagccaggaactttaagtgcagggaattccatcaggtagcaccaagagaaaattgcataatatgttaggtataactgctggtaaaattgttggcaaaaggaatcaaggcagtgaatgagctattgggtccatgatgtcatcatgatctgctggaggccactggacatacaccgtangtcgtgggcagctggccagacagaagggcgagtttgatcaagaccgtgctcacaggagccttttggtatcagcttta

SEQ ID NO: 462782 - DNA, 475 bp, Homo Sapiens
  misc_feature (384)..(384): n is a, c, g, or t
  misc_feature (435)..(435): n is a, c, g, or t
  misc_feature (440)..(440): n is a, c, g, or t
  misc_feature (453)..(453): n is a, c, g, or t
  misc_feature (463)..(463): n is a, c, g, or t
aaaagaagtttcaggtgattttaatgaaataaatttggtggtcatccccgcatcagttttaacaaccataagagccagacttacagatagctgacatttcttctccttgtcaaagggaaggaagaccctgtattttaaaacagatctgtcttgcagtttactctcagctactttttgcagcctcaggacatttcatcatcttgttggtttataaatgttacagaataaccttaagttgcacctaagtggttactttacaatgcaagaagcgagccattgaagttcaaatgtttattcaacctctagttctttgatgacatgatgaaaaaggggatatggctatgcattaggttggggagagggactactgatgtgcccatatcnggataaaggggtttagggaaattttggggggaaattgaaaaacccggaccnttttntttccgggggccnaattttaaantgtaggcttcca

SEQ ID NO: 462783 - DNA, 512 bp, Homo Sapiens
  misc_feature (449)..(449): n is a, c, g, or t
  misc_feature (458)..(458): n is a, c, g, or t
  misc_feature (469)..(469): n is a, c, g, or t
  misc_feature (493)..(493): n is a, c, g, or t
ttttttttacgtaaaataacttgcattcttatcaatttattttcacttgtacacatatttttcagactcataagcaaaataaaactgtataattaataaccattacatagccatatagtcagtatacatctttattttcagtttcaagaagatacagtttcacattttcatgataaagagaatatgcatcacatcttatctctttgaaatataatcgcttatcaccgggaagcctgttctgaaatattaggatggtagccctttataggtttatcatcttttctttgtcacatccaccatgagttacccttcataaggatgctattttgggttgcctaatttttcactccacaaagttttatggctttcatctttttctctcaattaaggctcaagggtaagggctgtgagtggggtagggagaggggccaaggtggatttgaaggacngggggtttncctggcttttntgggccggggaggggaaggtggcncgggcttatccaagggggg

SEQ ID NO: 462784 - DNA, 503 bp, Homo Sapiens
  misc_feature (166)..(166): n is a, c, g, or t
attcactacattttattaatgtttgagattttacaatgagaatattttcctgaaatattcgtctgatgctaaaaattaaagaagaaaagcagctggccacatggctgggagcctgaagcagggctcagtctgggcgctcataagaggcagggtctgtgggggtcanggcctgtttggtagtctcaagctacatctggagactcttcctaaatccactgtggctccctctccccaaggccagagccagagagagctggtttccacagcagcagtagcatacgcagggtccctgcaatctgggaggtatgtgacaccgggacatttaccctgtgcggtgggcccacctctgccacctctgctccttgaggcagggcaggacttcagaattggccagagggcgacctgagacatgcaggcagagaagggagccagtgacctctaggacccccagggcttaggcaggatgccgcgtggaacccagagcagtctccccagcctgggct

SEQ ID NO: 462785 - DNA, 507 bp, Homo Sapiens
  misc_feature (161)..(161): n is a, c, g, or t
ggtaaccagaagacttttttatttcaaaaatgtctagacattataatgctttatcttgcactccaaacatattggcaacaaatattaactttgaatattgcccacagtcctgggatagttttatttaaaacatcccagatatggattgaatagcccttggntaaaggtgaatttggttaaacattgagcccgctcctgaaattcacttgggcattctggaagtcttcagcccagatccaaagggtatcatttagcaagccactataagagttatagcttctgaagacataatttaaacaaggattagtttgggcactggaagagtcaagcactttggagtttagaatctgacaagcagcagctaagctactgaaagatgagagccttgtgggcatttatctgatggtttttcaaacaggcagccagattaactacaatcatcgtttgaaatctttaagaaagcaaaaggccttctgaaaacattgcttttggtttctctacctccaa

SEQ ID NO: 462786 - DNA, 517 bp, Homo Sapiens
  misc_feature (387)..(387): n is a, c, g, or t
  misc_feature (452)..(452): n is a, c, g, or t
  misc_feature (471)..(471): n is a, c, g, or t
  misc_feature (478)..(478): n is a, c, g, or t
  misc_feature (506)..(506): n is a, c, g, or t
gcagaaaatgaggtcagttttatttgcataatactgcaactttgtagatggagagatgccattgggtacttatgagaaataactttggaattcagaatctgacttctacattgttcaaatcagtatccaagtggcgtctcggctgcttctaaccttgggcctcaattccatttcaccaccgcaatcagatgacagatatgccactggcaaagctggcattcacaagcagccgtggccaccctaagtggggcagtaagaggcttcatctaccacgtgaccaggcacaaactaggaaaatagcctgctgtgtccactgtgggaaagaggaatcgtacctgggtgatgaagagataggcaggttttgggtgggcatctgtggggcagctnggagcagattgggctttgggtgattgacgtaccagtgttctggtcccccgtggaaaaagggtacntgagggtgggagttgcacngggcttnggagccacgcccagttaggagggcattnttttttagggg

SEQ ID NO: 462787 - DNA, 480 bp, Homo Sapiens
  misc_feature (342)..(342): n is a, c, g, or t
cacatatatttttattacataaataaaataatactagttacagttatcccaaatgaggttaacaaacaaaaaggaggaaaagaggattagcctcatatagtttacattactggaagtcacaatacaaactttagaatatttaagatcttactttgtaaaaatgaaacaaaataaaacatatatctgccacttgtaaggaaatctttcaaaatttaataataataattaatatgttaaaataattactattgataaagtaccttcacatgtatttggatcataggattatttttaaaggtagtaaggattgacaggaatcttagggagaggacatgaggaaanatatttaattaaacaaataatatttaccgtattaaaaagaatgctttccttagaactacttagaatgctgacatcccttttaaaacttggaacataaaactattaactgagaaattttacaaaaaggactacccacaa

SEQ ID NO: 462788 - DNA, 423 bp, Homo Sapiens
  misc_feature (51)..(51): n is a, c, g, or t
  misc_feature (60)..(60): n is a, c, g, or t
  misc_feature (66)..(66): n is a, c, g, or t
tttggccttggcctaaaaaaattttaaaatcctcctaataataataattgnataataagnaccatnatgtaagtgaacacctgaagtccatcctgtttccctgccttcccccacactctgccctctcctgacatctgggtctctgggttatgcccatatatggtggattagtggctgcagcccactttacctgtgtgacttacccacagcaatgggatggtaacagcaaagctaaccaaagtgctctgtgcccctttgggttgcatgtggggagactggccacccaatgcctctccagtggggtaggggttgtcttttggtgcatctgtttttcctgtgattattggtgagggcagcaaagattagcaggtggttgtaaactaccttgagtaggttgtaataaatagtctggcctcagcctgt

SEQ ID NO: 462789 - DNA, 489 bp, Homo Sapiens
attgtaaccataaaaagttattaagatatgtgccataatgttatgcttaaaatctaaaacaaacacattcaaaatttacaaaatcagcacaaactgatgccaggcaggtatatataaaatatttacacggtatacaagcaagtgatgtgggatatggcatgaagggagtaacttattttaagagtttggagaacagacggaaggaagaatcaaaacaaatctactctatcttagtcaatataggctactataacaatgtaccatagactgagtggcttataaacaacagaaatttctcacagttctggaggctggaagtccgagatcaaggtgccagtatggttaggttctggtgaggctctcttccaggttgcagactgctgacttctcattgtatcctcacatggaaaacaggtgagcgctctctgggatcccttttctaacggcactaatcccattcatgagggctccactttcctgacctaatca

SEQ ID NO: 462790 - DNA, 401 bp, Homo Sapiens
gaagcttgatcaattttctatttgaaacatctgatgactttgatatacaattggaattatttaactgtttgcaaagttcttctattgttaatggagccaacagttcagcatggctttgcacatgcacaagaaatgttggtactgaaaatgattgaaattaacttagaagaacagacatttaatctaaatgaaaagtcacttcaaagaatgatgtagaaataaacctttccacagctgcacatattaaattgttttctctgaccacaatcctcttaggataacttccaactttgaagtaggtgctgttgctttttcggcagatgcgtgtcatctgctttttataggtttagtgatatcactaaaaccctttgatggatagtaaatgtcaacattttttgggc

SEQ ID NO: 462791 - DNA, 502 bp, Homo Sapiens
  misc_feature (348)..(365): n is a, c, g, or t
  misc_feature (485)..(485): n is a, c, g, or t
ctttaatgcacaaacatataagaaaaaacatctcctttatcttaggactgaccaactgtgcctgctttctttattctcaacagtctatcacatactcgtactcgtggcaacaatactgtgttagattacgaatgcttgtcttggcaaaagagagacaaattcccatcttattactccaaagttctatgttagtagactataacagcaactcaaattctgggcattttagatgtacagaattagaaaaatgatcaagcaaagaagcaaatgttctatgaaggaaatttttgaatatcagtttacactaaaaggccaaagtcttaatattaaacatatttcctttttcannnnnnnnnnnnnnnnnnattactgaggcatatttatattgacaggtcacaaacaaggggcacgggggctccactttggggaggccaaggtgggcggatgcactttgaggccggggtttgacaccaaccgggccattntggcgaaaccgtctcta

SEQ ID NO: 462792 - DNA, 474 bp, Homo Sapiens
aaagacatttgtgtaaaaagggtcaatttcaataatttcttagatcagagtgaatctaaggcttccttgataatataaaacataggtcaccaattccataattatagccactggaaaaactgtgaagacttaataagatgaagaggagtgttcattagaaataaggcagctcaatctccaaattctttataattttctggcattaaaaatgctataattttagtccaacaaatatttgctggaatctatgaggtttattttttactgcaagcttttaaaatcatttgtttcaacttttttcaattagtcattttgtaaaaacatctcctgaatatcaaagttgagtgtgtccacataaaacgaaattccttagcatgatttaaagaatttgttgaagggccagaacattcagatattcaaagacagagactgagagaagcaatggaaaagatactcaatcttgttggcaggaaa

SEQ ID NO: 462793 - DNA, 508 bp, Homo Sapiens
  misc_feature (362)..(454): n is a, c, g, or t
  misc_feature (471)..(471): n is a, c, g, or t
  misc_feature (485)..(485): n is a, c, g, or t
ttttttttctgaaaggcagggaaagcttagcactttttaatgcccattcccattcaaatatactcaatttgaagttattcaataaagtcaaataataggtaaatacatatgcatacaagaaaatcagaaaatcttaaaatatttaatccaaaatgaagcaagaaggatcttatgtggtctgaatattgtcactttttataaaaccaagcctttcctccttcagcagagaaggctgaaggtgaacaggaccaacagagatcaaacaggggcacagaacagaaagtagggggaggaagaagagatgttttattccagaaatgaaggaaagtaaattatgtttttgtatcccaaagtcttagagnnnnnnnnnnnnnnnnnnnnnnnnnnnnnnnnnnnnnnnnnnnnnnnnnnnnnnnnnnnnnnnnnnnnnnnnnnnnnnnnnnnnnnnnnnnnnggcatcattagttgagntcccctctttacanccccccacccccaacacacacac

SEQ ID NO: 462794 - DNA, 444 bp, Homo Sapiens
  misc_feature (195)..(230): n is a, c, g, or t
  misc_feature (387)..(397): n is a, c, g, or t
  misc_feature (406)..(406): n is a, c, g, or t
ttttttttctgttattggaactttgatttgactttcccagtggtaaaaaggaggcactaaaattttgcctgtattgagccaagatggtaaattgaagcctaaattcaaaagcagggtagataattttaaaagggattcacattctgtgcatacttcttagccctccacttaggccattcttatttccctctcatnnnnnnnnnnnnnnnnnnnnnnnnnnnnnnnnnnnnggtgtgcactggtatgcctcttctcaaaaacagagaagaaataagattagggtaataatccattcaacgttggttttattgttgctttattttcaacagctatattcaaaaataaaccagcatcaaaggggaaacaaaaagtaaatgctattaaagnnnnnnnnnnnccttgcctngatgtttatttgccgagggaaactaaacactatgtccg

SEQ ID NO: 462795 - DNA, 506 bp, Homo Sapiens
agttaatgaaatgtgtgaacagtttgttcccagctaaaaacaagcgctgatgggtttcatacctttctgtgtaggaggaagaggtaggttctgagcaaggcactggctggcagtgggagaggccactggtgggaggtgaggtggggagaaagaaggagaagggaaagatccatacaaaacatcacgtgtgatctgtccctcttttgctctccctgtgcacaaaccctgctggggtccctgtgattggcacatgggcacagggacttgggaaggctccaccctttgggaagtgagtcagtacatccatgggtcaggagaaagggactgatgcttgggaatggccagtagtggggaggtagaatcctcctaagagtttatttccttgttatccatctccaggggaagaaagaaaggcaaggtattgataagaaaatcactacttcctggcttgaggatgacaacagcacacatatatctgcctgcatttgtgcacatacgtgtctatg

SEQ ID NO: 462796 - DNA, 493 bp, Homo Sapiens
aacaatagtccttacactgaattcatttatcctgaaatggcagacatcattcatttttcttgaaatggcagaatagcagctgcagacattaatctatggtacataccaagcaattcaactttttcttgtaatgtcagacttttctcttcttcttgggagcacttccagtatcactagtgctaagtggcatcactttatacgagtcttatggtattattcaaagtttacagtattgcattaaacacgatgaaaaatacatgagaaccacaagagattaccttttactgtgggtaggcaatttactacagggacaaactgctgaaacagaggtgatcagtgccgattaaaatgtgtggcattttaagtggatacttgcagcacctgaactcactgcaatagcaataggatgtggctatgaaaattattagagaagtatagtatataccacagtaactttttgccactctcacttaatactgcatctttacatttg

SEQ ID NO: 462797 - DNA, 504 bp, Homo Sapiens
  misc_feature (44)..(44): n is a, c, g, or t
  misc_feature (47)..(57): n is a, c, g, or t
ttttttttgcttctatgttttttgtttatatgctcccaagagangannnnnnnnnnnacctatgaccaaaaatagatcaaaggagggtagtcatagcaagtgggggagtgaatgtctggattcaaaacaggttacttaatacagctctgtctgtgggctcatgggtgtcacaataacaatgacaatgatgatagtattagctaccgtttgctaagcacctactgcgtatcaggcacctgactcggtgctttacatacattacctcacagccagggttggcaaatggtcattttgacacacacacacagggaatacaggtggatcttttgcaggtttttgcatttcccctagggtgaccggtttagaggggtgctttggctggggctttcagataaagactggggaggagagccctgtggcctgggctgggtccctttcgtagcatactctgccccagcttcacacacaaaggagacctgacccagcaagggtctcactgtgcct

SEQ ID NO: 462798 - DNA, 534 bp, Homo Sapiens
  misc_feature (385)..(398): n is a, c, g, or t
gatgactggttatttacagcacaaaaaaaggcttagaatgaaaactagaagaggccttttgtttttcactcccagtcaggagagtagaaatcttaagatgctctactgggctacctgtagcactgactggagtttgctgcctacagagttttgaatgtactagtccttagtttccatagaactgaatgcacctctttagtaagttgctgatttatggtgctaaagaaaatgattattcccatttttttcttcttccccaagccccttaagcatttaaggaaaatttaaaataaaagcgttagagggccctttttatggaatgtaacctaagtttctgtttgacatatgacactgcaacttaaaaatgttaggaaattatttgccnnnnnnnnnnnnnnagagttaagctttataaataatctgtagaattaattgaagtttaaagcttaaggatcactcttaagacgtctacaaaatcttgtatatttttaagtgtgccaatttgtaacatattttgtaagtgtatatttttct

SEQ ID NO: 462799 - DNA, 442 bp, Homo Sapiens
  misc_feature (424)..(424): n is a, c, g, or t
ggctttcatggagaaaaccagaaagaatatgacttacgtatgcaaaaccatagtacactaaagcccagagacactcaataatcctggttaatcctggcccactgtatttatgcaaagccaatttagtaatggaagtaaagcagtagactcaatacaaaataacaatcaaaataatatctttttgaccttgtaaattattaataaatattaataaaacatgaaatgtatatatgttctacaccaacggttatcaaaagaccacctgcactaggatttaaatggggatgttgataatagttcttcctagggacccagactgggacttcattggattccaaactctctgggatatggggtgtccccgaaattattacatttttcaagggggctcccccggtggcctttttatggcatttaggtaccnctggactggagggctgga

SEQ ID NO: 462800 - DNA, 502 bp, Homo Sapiens
  misc_feature (261)..(261): n is a, c, g, or t
  misc_feature (306)..(307): n is a, c, g, or t
caggattcactgcctggggtatcccactatatatatctcacctatgatgtagtggtgcttgaaatactcatctcattagctcgattttattattctaatctaaggttttttatattattcatactatgatatttttagggacaatcagtaatatttggggcagagtactgagggacctcttgaagtctgcaacagcatgcattttctttgtttttgtggggagtgcttccctgtaggctgtctttgttctaggaacactgnctccaaatttatttccatgggatgtagggctagtagcccatgtgnnagtcttctgtaatctccttggggtgtgagttattgggttattctaacaggagttttccaaagggatggcccatttttaattcaacatttgctttttgaaaatccagaagtagacagttggatataatagtggtggaagagcatgggctgtaagcagaaggaaatagagatgacaaatgcctcttaaaggggatct

SEQ ID NO: 462801 - DNA, 378 bp, Homo Sapiens
  misc_feature (31)..(31): n is a, c, g, or t
ggtaggcaatcgaaataacataataatacanggcatctctgaatgagaaaggctgggcatctaatataatttctgaaagccaggacagttacatgatccagtgaaatgacataagacaaggaataaatgtagctaaagaatcacaccagaaaccagtataccttcctatatcaactttccactattctctactcatcagatcctaacccaacacccagatttgaaccagtgttcaaaagactgatatgagctaatgtagacaatcagagcaaacacaatgattttcaaaggtaacaggaacttccttggcctagtgcacagagaacatttaatctaccagagaactctgcggagatatggaactaatgcaatctctac

SEQ ID NO: 462802 - DNA, 485 bp, Homo Sapiens
aactttttaaaaattaactttttattataaaggtaagatggcttattaagaaaaaacctgaaacattacatacaggtatacagtaaaaaggaatgctccctcccttcataccactgcttcccccaaaccagcattaccctaaagtaaccactgttaattgtttgaatatctttcgggaaatcatctatgcatgcacagtgataggagtaaacatacataatttctactgttactatggggcattatttaacacaaatgggaatctcatttaaaatattcatctggcatatcttcttttttcacataatcttgggatattcttgggatataggcaatatatatagggtatttctcatttttaaaatgtctgcgttgtatttaattctatgtctctaccacactttctttaaacagactattattgatgaacatctagattatttccaatttgggagccattacaaacaatgctgtacatgctattc

SEQ ID NO: 462803 - DNA, 429 bp, Homo Sapiens
  misc_feature (373)..(373): n is a, c, g, or t
  misc_feature (406)..(406): n is a, c, g, or t
aaacatttttaatttataccattctttagtagtttctgtcgtttttctaattcctttgagatcactcagaaacatcaggacacagttttcatctgcctggaggaatgtttttctggtgtgctttcattatctgtgggaggttatctggttcactttctccccgcaatatctttgtacagggtgtgatcagcatcttttcctgttctttcagcaggatgttctacgtacgggcagttgtgggtcagagtagctttctgaactccacagctggagaggcctttcccctgctgtgggtcggtctgtgtagtccttgctcctgtactttctggggattgggccacctctttcttgtatctaaagcttttctcctttnaccccaagtgttcctgctctgttcaatcccagncctttttttcttggggtgagctc

SEQ ID NO: 462804 - DNA, 649 bp, Homo Sapiens
  misc_feature (573)..(573): n is a, c, g, or t
  misc_feature (597)..(597): n is a, c, g, or t
  misc_feature (603)..(603): n is a, c, g, or t
  misc_feature (627)..(627): n is a, c, g, or t
tgaaatgtaatataatttaatatagggctacaatttagggacacaaggtataaattgttttggtgaggttaaaataacatttaatttgtggtttactcattattaagaaaccaacatcagaaagcagcttagacagattaattgattttttttcccatgaaatctttatcatccagcaaatatacctgtgtgtttttttaatccattcaagtatcttcaggagatatgttattacacttgcatgtaccttaattcacttcaacattgacaaaataacactgacaaacaaaacaacagaaaacacccataaacattaatgagaatttcaacaaacatgactctccagtagttgtcttaggattgttgtaagtgacattttaaattccacattctctgaaatcttcatgtaaaagacagttgtattggtgggtgcttcagacacacttacttcagctatgactgtgggtaccttatatgttaaaataattttgtgtatccattttgcataatatgctactcggggcaaaaataccgggggcggtttgggaatgggcacatccacggaccgggggncaatggacaccaggaacctttctncttttntgttgctcacaaacagtgggggcnccttaatccccctcactggggc

SEQ ID NO: 462805 - DNA, 531 bp, Homo Sapiens
  misc_feature (41)..(41): n is a, c, g, or t
gaaccactcccagggctgcggggagggccaagtggcttgtnctctttgaggatgtggtccccatgaactacatggtgtacttcaacttctttgcctgtgtgctggtgcccctgctgctcatgctgggtgtctatttgcggatcttcctggcggcgcgacgacagctgaagcagatggagagccagcctctgccgggggagcgggcacggtccacactgcagaaggaggtccatgctgccaagtcactggctgcccctacacatcatcaactgcttcactttcttctgccccgactgcagccacgcccctctctggctcatgtacctggccatcgtcctctcccacaccaattcggttgtgaatcccttcatctacgcctaccgtatccgcgagtttccgccagaccttccgcaagatcattcgcagccacgttcctgagggcagcaaggaacctttcaaggcagctggcaccagtggccggggtcttgggcagttcatgggagtgacggagagcaggtcagcctccgtctc

SEQ ID NO: 462806 - DNA, 489 bp, Homo Sapiens
attactcaacaaaaggttttaaatccatgtaaaagaattcaagaggttgtgaaatagttctaggcttgctaagaatatcctttggctattttgaaaatgaagaaggccaataggatatatcttagcatccaagattaggaaaaattagtgtggaagagagcactttgatttgaggctacttgatttaatacaaaaagtagcttatttaaaagtaagatctttttaaaacaagtaactcatttgaaatatgggaagctataataggagaaaaataggggattttagtttcttctgaaatctaaaattactgagcagtataaaaacagtatattagaatgatgtcatgcaagcaatatatgcatatgttcttgaaaagattcagacaatttcaggaaatagagtaaaaatttaagagcccctatcccatttatctcgagcagtattaggtttttttaaaagagcagaattgtcctttttcccctagaaatt

SEQ ID NO: 462807 - DNA, 517 bp, Homo Sapiens
tttaaatatctaatcaaaatcttttattgaatttaatcagaagtatacagttttcgggatttttttccattgtaagagtagtatacaagtgaaaagttctgtgacatatatctggaccaactttctgaatttgcaaaatgaataacaaatatacaattctcattttatccagtgactttggccaacacgtaaaaaatacatcattccttttgatctcctgtggatccctatagttatttcaagtaaagaataggaaagataaacaatgcatcaaactacagaggcaacaaagggatttatagcagaaacactgattaaaatgatgaccatcccaaactgtggaagcagcagtttgcccgaggatgcagaaggatggcttttgggacctggaacaggaactggacctggagcaggtatttgggtgggttcaaggattttcacaccatggtcttcaagcttctggtttttctcaccatggtcttcaagcttccagtttttctcactatggtcttcaagc

SEQ ID NO: 462808 - DNA, 436 bp, Homo Sapiens
  misc_feature (410)..(410): n is a, c, g, or t
cagagaaaggtaaatttcagagcaaaatgatcttgaataaaaagcctcatggtctcatgggaaatgcagaacaaggttgtaggcaataggtatgctgaagtgtggcataaccagttgtctctgccaaaagacatctaaacacttaaacaaaaatctgatctatctgccaccattggaactgacttaaccctttatttcttttttcttcttgttacatgcaaaaacttgggaagtacatttggtcttcatgcttttcctcttgtccttcatgccccttcctcttgtcattccacctacttctctgggctccttcacatctcttgtctttaggggaactgggcattgtttcttaggtataggtatcttgggtttatatgggtttgggctcttctggtccacacccaaatctnatgtcggaattgtaaattccacgggc

SEQ ID NO: 462809 - DNA, 555 bp, Homo Sapiens
  misc_feature (202)..(202): n is a, c, g, or t
aaccatttcaattattgttcagaacatttgcctcctcccttgctctggtgatacattttctgctgtctcagagctcagaatgtcagtttgtaaagcatgatttaaaactctctcagtatgtcattgtagcagtccatttttatttttactgcgggcaacatgaagattcccttaaggggtgaagcctactgcacattcaccnaaagacctaaagtggacaaatagcactgtgctcacttttccctataacacatcctcaattattgtgcagagacttgatcctatgtactcctatgtttaaagaatgtaattctttatgtgcttgagcatcaatgtttttacatatggtcagctttttccctagaaccttggcatgtaaggcgaaagagcaacacttcctgaaacaagttctgagttgctttatattaaatagttgccctaaagcaccgtacattagacaaaggagggtggcatctgcatatttgtcattgagacaccacaaaggttttcgttagtggtattcttaccatcgtgcttcctgtcaaaaccgatagc

SEQ ID NO: 462810 - DNA, 403 bp, Homo Sapiens
  misc_feature (338)..(338): n is a, c, g, or t
  misc_feature (343)..(343): n is a, c, g, or t
  misc_feature (349)..(349): n is a, c, g, or t
tgccccccaaaatagaggaacgtttcatagattttggagtactgagtgctacagaagcaagtaatattttatttgcaattataaacagcaatccaattgagttggctataaaaagttggcatatcataggagacggtttatcaatagaacttgtagctgtggaaagaggcaatagaactacaataatttcaagcctgccagagtttgaaaaatcctctttatcagatcaatcatcggtaacattagcttcaggctattttgcagtcttcagagtcaaacttactgcaaaaaaattaggagggggttcctgatgggagccctcccggtccacaacagantatgngatccnggacattcccgtggagggctgtggtttgcagtagggttcattgacccgctttcc

SEQ ID NO: 462811 - DNA, 443 bp, Homo Sapiens
  misc_feature (69)..(69): n is a, c, g, or t
  misc_feature (358)..(358): n is a, c, g, or t
  misc_feature (392)..(392): n is a, c, g, or t
  misc_feature (402)..(402): n is a, c, g, or t
ttttttttatgagggaggcattttattcattaccattttatagataagacgaagaccgaatctggaganggtcacatcacttgcccaagcccaagtggtgaaagctgggatttgagcctgatattcacactacctacattccctccagtataataggaactcatcgctaactttgagcacttagtgttctgagtacttcgtataggttatctcaatcctactccagctttgcgaactagagggtagtagtagtattattttatatgtgggggaaacttgaagccagacaggattagtgaattgcccacagctcataccccacccggtggtaggagtggggatctggggcttgggatcnacacttgtttcttgtcatcagtctttatttcccntgtctttccncctctgtcttgggcaggcacccccaagtggggggatttgtg

SEQ ID NO: 462812 - DNA, 406 bp, Homo Sapiens
ccattgccctcaaatatgattccattccacaaacatttattgaacagttaccataagcaagagagtgagaagtgtatagaggtgatttaagagtggtccctgtcctcgaggggtttatagtctaacaggggaacaacctctcacgtgacagagttatttcaggccactttatttttgcactaactcttccctcctcctaggaatttcctttcatccacctcaaagccctccccctgggcttaaaacttacttcatattaagccccaccttcccttaaagactttctgtggctcttattctagggttatggctctttatcgggcttttataacaccctgggtgtccccatgaaagcagctatcacactgcattgaaaatgtctgtatcggtttctatctcctcacct

SEQ ID NO: 462813 - DNA, 546 bp, Homo Sapiens
  misc_feature (485)..(485): n is a, c, g, or t
agaactttaacctaaaactttaattggaaagacaatcttataaaaatcttataacatattctagaaatggtccaaatactatcacaaatggaagaagttcagcttgaggagcatccaatcatgtgaggtaaaagtcttctagtagaaccagcatgatcttccagaaaattacaaagtaaccattatctaccccgtcatctccttcttgcctggcatccccagagctgttttaaaatgtcctcttgctggttggattctgagctcctagctcttccccatgggctgaccttgaggagttgtggggtttcttcaccaggctcccagaacttcccttttcttcctcatcttcaaacaccttttaggcatcttttcccacggcaaccagtgagtttggggctgggccagtttttgaggcagggaacaaggggccaaatggtaggacccgctgggagaaagtgggagaagcagatcagaggtggcaggcntttccattaaccaatttctttgaggtcacatttgcagtaccagttcaagtgggattaggtt

SEQ ID NO: 462814 - DNA, 483 bp, Homo Sapiens
  misc_feature (388)..(388): n is a, c, g, or t
caagaaaactcacctgttttaatacaaggaaaatgtcttaaagattttacccatatattttccaaagtttgaagccaagtggccttacccttttccttaatttagctatttcaagttttcttaattagaatgctttattaattatcttcattaagtagaagttatcttcttaagctatcagcattaatgtaactagaaatatttgacgcaagatttttaaaattcacatctcatttatcaagatatacaaataaaaggacagaagtaagccattgcctgggatttgttcatcaaacttcccagacataatttgtcattaaatatcatttttaaataaattaatattatcatcacaaatacataattgaagggatggtccaaggggctngtttttttaatctttttctgacccttgctacataggcagtctggagttgttttcttaaacgttcaccaaattacattaaacttcatgtatattct

SEQ ID NO: 462815 - DNA, 434 bp, Homo Sapiens
  misc_feature (417)..(417): n is a, c, g, or t
ttttttttggttgagaagtgtttattgtaaaaatggagtttataatgaaaataaaaaattatttcataacattctgataccactacacctgagttcgatgccagcatggtttgaaagtgaagctgatacaagttttctaaaggatgttaaaaaactatagtatgaagaatgtaataatattttagaagacattaaaacttaaatatttaggatgctgtatatgagaaatcacaccaaggctctcttaattaggttaacattagacaactacatctcaatttccaagcttccaaaaataggtaaaaaaattattttagtttaagttgatattaaaaacacattggggagcagggaatccattctttcaggttttaaggaataatgttatggattattagggttattatccatggtttntaaagttaatgtccaat

SEQ ID NO: 462816 - DNA, 484 bp, Homo Sapiens
  misc_feature (339)..(339): n is a, c, g, or t
ctaatcagacatccacaggaggaaaatgttttaactctgcctcctaaaatggagaatgtacttcaccttcattaggtgatgaggcagtccaccacaaatacaagagctaaaaattccttagcacaagaaaattagctctttgtcatgtccatggaacatctattgtttggctagcttactctggaaggggtttctaagttagttgggctgtcattaatctaagcgcatatgggggcagctaattagagagggcacttttctgtttgaggcaacactgcctcaggtgaggcttgaattaggtaggccaactttcaccctacacccctacttcactcttgnaatcaggcacttctgtctgggaacacctaccactccacttttggaatgtggcctgcctcctccacctgaccaccaaggctccccctccggaaagccacaaattatagtgctcaattgcagccaagagaagaaagcacttggaggt

SEQ ID NO: 462817 - DNA, 349 bp, Homo Sapiens
  misc_feature (339)..(339): n is a, c, g, or t
aacacctactatgtattattctggtagactgggctaatggacatgaggactcaaggcggaacccaaagagatcacagctctggctgaagatgcaaagaaatgatttggtgattacacttttctttgttatctctagctacccttcattagcatgaatgattgagagattacgatacttaaaatgctggcatacaatatacagtcagctctcaatttccagtgtgcaacgaaataactgaggctctctaaggcttaccctaagtcccaggggatctgctaggcagctcagcacatccccagctcacaccccttcactgctcagcctgtgtgtctgcacanactgcagccc

SEQ ID NO: 462818 - DNA, 414 bp, Homo Sapiens
  misc_feature (70)..(70): n is a, c, g, or t
  misc_feature (356)..(356): n is a, c, g, or t
gtgaggagacaaagacaggaatttgtttgctgcaggatggtaaccaggagcctttcaaagtgcggctgcncttagccaaagacattttgatgatccaggaacaggatgtgatatgtgtgtctggtgagcctttctattctggtgaaagaacggtgaccatcagaagacaaacagtaggaggatttggattaagcataaagggaggagcagaacataacattccagttgtcgtttcaaaaatctccaagggaacaaagagcgggaactttcagggactactttttattgggagatgcaattctacagattaaatgggcatttaatgtggaggaaaatgttaggacattgaggaagtnggttccaggttctttcgggattgctgggaggaaggagttgactcttaaccagtgttcc

SEQ ID NO: 462819 - DNA, 369 bp, Homo Sapiens
  misc_feature (299)..(299): n is a, c, g, or t
  misc_feature (340)..(340): n is a, c, g, or t
  misc_feature (348)..(348): n is a, c, g, or t
ggatcaaagagagaaaattttattcaacagaatttttccaaggacggcacatttgtttgccaagtgtttggtaaagcaagagagacctgtacagttttggtacaggaagggcccatgaatgtgggcggaactattccacaggagacaaggagaagctgttctctggagggagggaatggagagggagaggtggtttagggatctgcaggatggcagaatcatccagaaatgactttcctatcatttccccaccactgcctcaagcccttttcttctacgattttatgaaactcatgggntaaatgcttgaaagtgagtaggctagaagccagcaaagggntgcagggntgtcccagacacatacaggtt

SEQ ID NO: 462820 - DNA, 463 bp, Homo Sapiens
aaaataaaaattagaggaaagcccatgaactcattttccatgaacataatataatagtactcacctatctcctctacccaacttgtgttttagatgagtccttttggatctttttccccataatggcctctctccttttgctttacagtgcaatcagggcagaataacagatatgttgagtagctaatttatatttctgaagatctccatagaactcttaagttctaagtcttcatagtctttgcaccttgccaagtttgctttccttgtgggaattctgtcataaccacaaggttattccccagacatgcagtttggggggaaattaacccggcagtagtaaacagactgggattaggaaaaggtggcagtcgtaataaggatattccaataaccggggaaagctacagaaggatcttgagttaggatgatgacagttacaatagaaaggagaccagtacaa

SEQ ID NO: 462821 - DNA, 307 bp, Homo Sapiens
  misc_feature (211)..(211): n is a, c, g, or t
  misc_feature (215)..(215): n is a, c, g, or t
aagcagaaaaaagagaatttttaatggcacaacaaaaaagatttacagcctacttttctacagaaatgatggaagtcagaagacaatggagtgacatcttcaggtaaagtattaaaagaaaataagtgccaatttataattctataccagcaaaaatatgcttcaaaaatgaaagtaaaataaagatgtctactaggacaaacaaaacagnggantttatcaccaggcaaacctgtactgaaagaaatgctaaagaattctttagacacaaggaaaatgatcccagagggaaacatgaatttttaca

SEQ ID NO: 462822 - DNA, 313 bp, Homo Sapiens
aaatcagtagaggtttattgggccaaagtttaaagacatgccagagaaaaaacgcaagccacatgagcatctgtgacctgagctttctaaagagggttttggaaactcattatttaggggagagagtgaggagggaaaagggagaggggttaggcagtgaggcaaatgattacattcttgtgaggctctgattaacgctcagtaaatctatgtttcatataagataaactgaaaaaagggagtaaagactcagttattcatctgtttcagggtaggcagaagagtggttgattttgtctcatccttattctgt

SEQ ID NO: 462823 - DNA, 549 bp, Homo Sapiens
  misc_feature (388)..(388): n is a, c, g, or t
  misc_feature (401)..(401): n is a, c, g, or t
  misc_feature (404)..(412): n is a, c, g, or t
  misc_feature (424)..(424): n is a, c, g, or t
  misc_feature (440)..(440): n is a, c, g, or t
  misc_feature (459)..(459): n is a, c, g, or t
  misc_feature (483)..(483): n is a, c, g, or t
  misc_feature (490)..(490): n is a, c, g, or t
  misc_feature (507)..(507): n is a, c, g, or t
  misc_feature (523)..(523): n is a, c, g, or t
attttctaggtaaaccaaatataaatttattaaagatcctaagattcagagaaatactatacttaattggaggtccaggttttgcctggcaacctggctctttaaccagcgtaaaggttaatagtgttgcactgcaacagccccgaagacttcacagtattcacaatgccgttaactggtgacattgagctaagggtcacatgaacacagctggatgttcattgcagtctgaagccttgaccgttccagtctctactgaactcagcctaacacataagagtaaagaaactccaattgagtgttgtttgttgggagaaaaatgggaatgaactaaggataaaggacaggaccagttacacttaaaggcctcaaggcatttcccttcttnccccccaacgttntgnnnnnnnnnagaaatttttgntgggtaaaattttccnggctgggtgggagtgggtnttttcgaaggtggggtttggttcncacatanttttgtcgtacgtattntaccccaggtagtcanttttcgcttaaagttttaaaatgttt

SEQ ID NO: 462824 - DNA, 118 bp, Homo Sapiens
ttttttttgaccaaagatcagaaatctttatttgacaaaggtatacatggtgaaaatgggcagtcatcttaccatgcaatccaaatctaccaataccaagcaaatgcttattgttaag

SEQ ID NO: 462825 - DNA, 556 bp, Homo Sapiens
aatctttaaagttttgtatattgacagtcctttaaaaaaagtacactatcatactgtacatgggatctttacatacttttagcatgagcggtaatcttttaaggttctcttaactctaggaattgtggttggccagcatgttatcttgaccagacacttctgaaaatctgctttgtgtgtcttaagttggcaatgtcattgttccagaccagcatgaatcctggtctccagtccacacctctgccggacagaggtccatgccagtgataccatgactgggaagccaccactgagcccatgtcctcagtcttcctcaggccttcagtgtgtgtcactgagtggacctctgtgacatctcgtcttcctcaggccttcaatgtgtgtttgtcactgagtggacctctgtgacatctagtcttcctcaggccttcagtgtgtgtttgtcactgagtggacctctgtgacatctcgtcttcctcaggccttcagtgtgtgtttgtcactgagtggacctctgtgacatctagtcttcctcaggccttcagtgtgtgtttgt

SEQ ID NO: 462826 - DNA, 527 bp, Homo Sapiens
aggttagatggttattaataggtttttgcacaccgaaagcctcctggggagtagggagcgggcagagggcaaggccttcaaccatacagcaaagtaggcaaggaattgtgcttggggagggtggaaagcctaggcttgtgatggatgcaggttttgcagaggcagagtgagcctgaaggggcctccagcttcctgccacttcctctcggtctcaccccagggcatcctcctgaactggaccaagggtttcaaggcatcagactgcgagggccaagatgtcgtgagtctgttgcgggaagccatcactcgcagacaggtagggagccttttctagggggtgctttggggctttggcaggcctttgagggggagcaaagagtttcctacttttttgaggggggagccttttgcggtagagacctctgggtccagtgctggttgctgtgacgaccgcgttgcccagcaactagcagcatccttttgtgtgcaggcagtggagctgaatgtggttgccattgtcaatgaca

SEQ ID NO: 462827 - DNA, 480 bp, Homo Sapiens
  misc_feature (272)..(272): n is a, c, g, or t
ttttttttaaatagttaacaaaaatttattgcaagagatatttttcactgaatttacagtttcaaggaacatgatacaaaacatagtgccatcagctttgtctaaacattaaataggtgcaaatacacaaagattaagaaaaaccaagggagcatactttacaacataaattagagtactataaatatattttatgtacattatacatactcttaagggcatcattttaatatataggcatatattgtattggattttcaaacctattcagntgctttaataatattatatatcagaaacttagggatttatttgcatcattgcacttacagtaaatgatttcaaaccaatgacgccatgtatcggccagtttatttccaccagttaaatagccatgtacccacatagatgaacacttaacgcatatagcaatagttttcacaagagtatttttttcccattatggtgatgactagaaga

SEQ ID NO: 462828 - DNA, 521 bp, Homo Sapiens
  misc_feature (197)..(205): n is a, c, g, or t
aaatttatctttgcattttatttctcctattctttggttgttggtaactctttcagaatcaaagtgagagaggccaattaaaacatttccatttatgattaaaagcaaaaaagttcctgggtagaaaagctttcagtttgagtagaaagcaaaacgggtaggccgaggtcaccatttcactttttcatcagtgccannnnnnnnnatccttccgcactgattttattttatcattttcaatacctttttaagtaattcagcccactcaattattccttaacaaatttttattgatgacctctcttgaggatgggatgtgggttgctggctattagcttaatgtcgtacaattaatatcttctcggtattccttctttattcaacaagtagtactggtaagggccaacccatcttttaaaggtaaaccttgtcccagttaaacacaagaatgaaatcactatagatctattatttctcggaacagaatatttccatttgcataaaataattttcctttgaca

SEQ ID NO: 462829 - DNA, 510 bp, Homo Sapiens
ttttttttggtgagtaggtaacatgatacctagtgtatgtcacatgaagaacctaagtggaaagactataatgtttccctgtcttacttctatccattcaactaacaagtatttgtttggccagacctgttactacaatgcagacagctctagtcactttggtctcccttttggctcagttttgcctcaatccaaggggttaatattgactttgggcaggaagaggacaaggagctcaccttcaggtcaaattccagttctccaactttggcctgctccatggtccccaaactctcctgggtttctgaatttctggctttatatcaaccattctctggtaatgggacttcctggtactaggacatcagtctaggtctgggcagtatttcctgccaaaggacatgtggggcaaggggctgagtcacgggatttttttgaactatgccagctgatcatcagttgctatgcctgctttaacagccatcctgcatggtggatttgttttgggca

SEQ ID NO: 462830 - DNA, 531 bp, Homo Sapiens
  misc_feature (216)..(216): n is a, c, g, or t
tttctgccagaggtggcttgcagggttgtttctcagacccagaatattgatggctagcctaggaggatatttggtaggggcagcccatggggctgtttctcagacctaagacaaggatgcacagttgctaggtcagcctggggatgtaatttgccaggggcagcctaatggagctgtttctcaggcaggggatgcagaacacacagatgcctcggntcagcctggggctgtgtctgccagaagtcacccagtgggctgtttctcgggacctgggcacagacacatagccactctaccagcctgagggtatgtaagccactcagtggttcaaggatctctcctgctcaggggaaggtacacagcagtttggctggctcaagggcaggtttgccctggggaggactgccagacttttcctcttacttgagtgtgggcagtggggactggttccccctgctgtgcaggaccagagtcacagccgatcatgggccccaggctctgagcagctgaggctgtggtgttcagccacac

SEQ ID NO: 462831 - DNA, 515 bp, Homo Sapiens
catcaggctgtgtcttgcattgcccttcagaagccctgccaaagatggcctccagctcgagatctgagcagagcgctgcagtctgtcccctcccccaaccacgcagctgctgccggcttagcctgagggaaccggagagcggcacgcccagctccagctggggtctctcctggaggagctaagacaaacgctgagcatcgtcttagctcgtctgagcatcgcagcccgtggctggaaggatgccgggtggagtaagagaaatgaatggccacactaacatctgcagtggtgaagaagaacgacagagctgtggatttcagcacgtttgggggccctgggtcagggaggcagtagtgagtgccccacagtctgattgaaagaggctatttagaattactgctctgcataatcaacttgagtggggacggaggatttttatttgtggttcaccatgcgtgctttattctcactcctacctttcctttgtccccatctttttctttcctccaccacac

SEQ ID NO: 462832 - DNA, 503 bp, Homo Sapiens
  misc_feature (390)..(390): n is a, c, g, or t
gaaacaaaaaagtgactttattggcttatgtgatggaaaagcctggaggttaatcccgggctctgggcgtggtggaatccaggagccgaaccccgttcttgggatggagtctcctcttcttgcagttctgctttagtctgagggaggcttgtgctttccggtggtaagaacagcccggctcctgccctctagggtgaggagaaatgccttcttttcgggagttctggataaagccccgcatggaagctccccgagttgcctggggccgtgcaccaaccctagacccctctgggcctaggggatggtctgctgtgagtgccgctcctgatgcggctgcctttaaggagctggggagggatctgttccttgcaaggcaagggacagtgagtngggaagagggtgggtttcccaagggtttttttccaaaaaggtgagggttccgggcaggtgcctggggcagagtccaggcaggagcagagggcacacaccagcagagcgagttg

SEQ ID NO: 462833 - DNA, 227 bp, Homo Sapiens
gttgattggtcatcttaccaaagaatatgggaacatactatattcagagcctactgaaagacaatgccatttttacagtagaagtcactggggaaaaacaatttgcttaataaacattcactttactgcaaactttaagggaatgcatccattacacaactgggaacaagagccacatgttcacatacacatatctatcctatgttactcgtgtgtgtgacggaggc

SEQ ID NO: 462834 - DNA, 406 bp, Homo Sapiens
  misc_feature (156)..(156): n is a, c, g, or t
  misc_feature (167)..(167): n is a, c, g, or t
  misc_feature (190)..(190): n is a, c, g, or t
  misc_feature (304)..(304): n is a, c, g, or t
  misc_feature (350)..(350): n is a, c, g, or t
  misc_feature (390)..(390): n is a, c, g, or t
cattttctgatgtttttaatttataagaattaagggaaataaatacaatatagttatataaattttattaaattaaaaatatcttaaaatttttaaaattcatgtacatttccatttatgcaaaccataattttttgctgactatatacaaaaaanaaaatattcangtggcagagaaaatcatttctgnggaattacttttatcatgttttctggataatatccataagattgggctcctgtaaccaggatcattctgtgtctgttttatctttctgttgttcctttctcttctgggtcatgnagggtagggggggatttaataactgagggggggaggatgggatccngtgggggctttactcggttttggccaatatccccggaggngtcttttttggaaatt

SEQ ID NO: 462835 - DNA, 412 bp, Homo Sapiens
  misc_feature (208)..(208): n is a, c, g, or t
accttcagtgtctgggttttttcatttcttccaccctaattagtttctttctgactctgcgagtggagtttaccagcttgtgtaacctcttaaacttcaccgactcctcagtctcatcatccgattgttctcttgactggcaaagaaacaaaggaaaaagttaatcaggtaattgctccgagctttgcccgtgtggctgggatgtagnccggaccttgctgccagtctgaacctcgggcagctctgttgctgaacttggggaaccaacaaaaatttggcccaagaggtttacaaagtgccacataccatcttaagatctaaatcggcgtagaattaggtcctaggcacggaaacacacatccttgccctcaagggcaagtggggggcaagtggcctgggggggcatctggct

SEQ ID NO: 462836 - DNA, 500 bp, Homo Sapiens
gcttcgtaatctcactttaatgagccaagcatccatgccatcatctagtaacaattttcaatatgcacattatattatactggaaacaaagaatacggattgtgtagggaagagcatagaggaccaccatcagcaaccctcttgattcccttctctacccaggactgacttctgctcgcagtgcattctgtgttcttttaggtcttttttgtgcacttacaaaacagacatgaatatacttatatatacacacttcacctatgtcttctttaatcacacaatgacctttgggggcttataaatggacagacaagggcaatgtttctctccattttttaaaccaacttaactttcccacatgggccgaaaattatttctatatttctaggggcaaaagcttcctccatcaaaacagcaggagactatcctaacctgagggcatggccagggtgagctgtgagtgaggggaggccacattgttgccccatgagacaggttca

SEQ ID NO: 462837 - DNA, 537 bp, Homo Sapiens
ctgatgcaggtcttcggaatgtatttattgccaaagatcttagcctcgtttcctcggcaggtgcccaacctcactgagaagaatattgtagtagcctcttacccttggagaaatctctgctgactccctggcaagtggaaaaaccatgagccaattagtgttttgcaggctacttcattactatggtcttactaattatgaaaaaggaatgccaaggttattttattaattttccccatgttacagttttcttctatttggaaacatcccccaggaaaatacaaaaagtgttttttctatgaatatttggactttttctggtagattatctccctccaaccttctgattgtgttattgcatttttattctattctctggactgggtccaatatctccacattcctctaaatcatgctgcctctaactagacccagaagtacagtcagctcctgaccaaacaccaaataaagtggagaatgactttttggctgtggtgtgatatctatctctccttcctcctgcaggggcagtttctt

SEQ ID NO: 462838 - DNA, 547 bp, Homo Sapiens
  misc_feature (230)..(230): n is a, c, g, or t
  misc_feature (366)..(366): n is a, c, g, or t
acattgctttgtataatttttatttttcctttgattaataacttgatttttttcttatttgtacctatccctaattcattcccaactgaattttaaacattttaaagttcagcttacacattgatttttaaaattgtgtttacacgttgattttaaaatgtaagcattagggataggtaaaaagtgaataagcaaagtgaataaggcacattctgtggaataagcactgnaactaatgggagttaaaacatggaatcaaaatatatacaggataaattaggatgtaggggaaaacaatcaggaaccttcagtggacattttacaatcttatccaaaaggatatgttaggcatttaggactatttcngggtaatataggtaaacagttggattccccgtaagcaatgtatcaaagaaataactatcaaaataactgcatttatgtatagtgtgtactaaaatctctagtgttaacttatgtaacctcattttgttcatctccatcataaacattgtatccttctaatttaattagttcaatgtttttt

SEQ ID NO: 462839 - DNA, 506 bp, Homo Sapiens
tgaagtcgtaaagaagggtaacttttctgtagatttttgtatttttaaaaaaggtcaagatcttcggcagttttctgaattgaattgtttgtgatatttgctctgtttttaaaatcttctaaggccattaccaggttcagtgcttatcttagtacaatttaaattgattccgtgaataatttttcctgcctccagtttcccttttacatagtgggctcatgttttaatatgttaaacaattctgacattgaaataattttattttatatttttgcatccacaaatactaattttctccatatattaatggtgatgtagtttctcctctgcaatattttattgcctactcatgttttatgtcccctggattacagcactgtcattccactgtgccctatttcttggttatgatgaaaagactcttaattccagtatgaaatcatttctgcattccataaatttcatttggcatctgtggaattaaggcatcttcattgtatttggat

SEQ ID NO: 462840 - DNA, 538 bp, Homo Sapiens
gtattaaatataatttattcattaccactatatgtattaatgccaataatttaagtgtcaggattgaacagatcaggccatgacaagtaaagaaggggaatagtattgtaaacaatttagaactgacatcgttctttcggttctatatctgtatttgtgacattagcttcttgggatgagtataaaatctgaaataagcacagtccatagcaaaatcaaacattaaaaatgtgcaggaaaatatagggtttcataaaatcataatcagggaatttagcacataaaaattaaaagatatcttttgagagatcaaataatctcccattaatcaataaataaatatttaggataaaatgttagggatcttagtaaagtaagtcagttgaaaagtgaagttagtaggtgaaaaattccatatgttaataggttcaaagttatcacattgctctgtgattcactaacacaataccacattcacttttctgtttcagccaaatataatgcattagttctcatctttatgtgaaatactattatc

SEQ ID NO: 462841 - DNA, 563 bp, Homo Sapiens
  misc_feature (403)..(403): n is a, c, g, or t
acataaaaataagtaccatttaataatttttaaaccaaggatcattttttattgtcattgggatattatggtcaaagcagttagtatctggacataatctataatgtcacatggttttattgctaacttgggttattatctaaatttgccttaataatctatttgttgctttaaaggaaacttcttaagaactactataaatttattggattctagaatctaggatttaggctactaatgctgtaggcatactgggtttctcttataatttctatttcagaaagctatgttcagcaattgtatagttagagttagccaaaataaacaaagtcctgatgtatttgacatgtgatattaccaaatatcacacagaaatggagactgcataataaagggcatggcntgtaatggaaagtgaaaattcctactttttaggggccctcacctttatttcactaaggtatggttaaatgacttatccaggcacatcacctctatgggtatttgtacatttgaaaatgaaaaaatatatatatagtcttaggttgtgtacagtcatgccc

SEQ ID NO: 462842 - DNA, 476 bp, Homo Sapiens
  misc_feature (85)..(85): n is a, c, g, or t
gaacgattcctaaaacttgaccatttattagatgtaacagttgggactgaaatcagctgaaagaggaacttcccacaagagtggntttaaaccacatggcagttaatttttctcatgtaacatgaaatccagagataagcagcacaggattagtgcaaccagataatattgtatctcccctgttgtttcatttagtatcctttctctgtcctcctcttggtgtatatattttctaggaaataagggacaagacaaagggcaaatagttaaggaaaaaaacaccagatgaggatattcccatttccatgaggcttccttaggcagctgtatccagtgacttctgcctactttgcatggggctaggggatgtggaacatatttgggccgctcacagctgtaagggaagctgggtgaaaactgtccacattgccagcttgaactaaatggtaaattttattactttaagaaagaaggga

SEQ ID NO: 462843 - DNA, 489 bp, Homo Sapiens
  misc_feature (451)..(451): n is a, c, g, or t
gaatatagaaatagtatttttattaggcttggggccacattttggttagaaagtgcagaatcagatgataaaaggaaggggtaagagcaagaggtagtggaagtcgcaaaaataatttgcaaagtgaccaatccagctgtccacaaggaattcatccatatataaacactcagatgtttctgggacggttgagtaagtatctaatccatgtcagaaaaatcagctacttttctcaggaggcctgccacaccaaacattcatcttcctacagtttttattcatgtttattggtatgggtgccttgagttttcgatttataataacatccctctctcactgtgcagcattcaccgggtggttccacagccagcagaaaatgtggggctgacagcattgcctgacttcagtaatgagcagaaagcttccttaaaactgtggttctcaacctggntgtcacaacaagggggttggtactatgtctattggata

SEQ ID NO: 462844 - DNA, 472 bp, Homo Sapiens
attatttatattttcctttctgtggaaaatatattgtttatatattacatagtcatattaaacctgacttctcagaccacattttaaaaatagattgcagtcgttttattgcacgtgttctgtattcacacaagtcagaattttgtgtatttgtttctcataaacatcatgctttgacccactggaaagcaagactgtgaagtgacacatgactcctgagcaggggctgcatgcgaggcattgagagacttctcagagctccccatgagctgagctggctgcctgctccaggagtaatcaggacctaccctatggagctagagtttcatccctctgggcatgtgctaaatcacactaattcacacaatgctcctaaggggtgacaattaatgcactgtctcttcgggggcacttgtattgcttacaatgagtggatccctaactggcatgacatgaatcccagggctatccc

SEQ ID NO: 462845 - DNA, 533 bp, Homo Sapiens
  misc_feature (440)..(440): n is a, c, g, or t
ttttttttgccacaacacaaagtttattcaaatcagaaaacagataagcttcatgacaggtggtgatgttataaaaggtaatctatatcaagggttcagtacaaattagtctcggagcctgatacaatatgcaatttattctaaagtactgtatcgtcagtgtgatattttccaaggtaagtctgaatcgtgagtggtcagcacacatggtgggctgctatccgatagggcaattcaacagacactgctaattagcatactatatatttaaaaatggacttttatggggaaactagtgtcttgttaattgtcatgaaaggttctcgtgggcaaaattaaatggattcaaggctggccagaatagctttcatgactagggggtaagaatccatgaactttccttcagtccctagcgacagtggctgaggcctgtgtctgtntggtccagtccacttgccaatacaggagtattatagaatcttaccccaggaatattgctgcatctacctcaagaaaaccttatatacagggtg

SEQ ID NO: 462846 - DNA, 535 bp, Homo Sapiens
  misc_feature (296)..(296): n is a, c, g, or t
  misc_feature (308)..(308): n is a, c, g, or t
aagtaggtacaatatttattcagtgattggaacttctagggagaattctgtctcagatttgtgtcatccgtccccatgtgaactctagtaccctaatcttcctgcatgtggattcttctggacctgccactggattccagagcagaccttcttactaccacctccactattgccctaattccctagcttcctcttctgcacactggtgattcccaaacaggcttgaggagagcaaggtaaggaggctctggtggtgaccaggcttcaggaatggcaacagtgcagctgctcctggntcccagaatggncatccattcctccacccctctgctagtgcccctcggagattgggcatgttcatttaataagatgacttttaatggaaacaacctgaaagtcccagccagggtctaaaccaccagcattacgggccagggcaggttaagagataggagaacaagtcctccagaaactgtttaagagtttttgcaggccgcgggttcagcaaggggaagtggacttggcctccaaagca

SEQ ID NO: 462847 - DNA, 105 bp, Homo Sapiens
aaacaacgaactgatgaattaacagtaggtatcaatctcttttccttctccaagcttcagacaaattatgggaaaataatttttaaaaagccaatttatagaagt

SEQ ID NO: 462848 - DNA, 496 bp, Homo Sapiens
  misc_feature (468)..(468): n is a, c, g, or t
  misc_feature (482)..(482): n is a, c, g, or t
ttttttttggagcttattagaacatttatttttttctgaatgacaggccgggagtgggagtagctgaacagggcatgttagtggtgtgagtgctggcttaagcgaaggagctggagtgggggtttgtgttgggggagcagtgggatgggaaacacacctgtggggcagctgaactagaaagaaggatgcccagggatagctatgagacacctacaaagcatgggaacccagttccccttaagcccaccccatccccagatccctttttttctcccttaagttaaaaaaattccttgagggcagcttaagtcagaggctgtaagggtcagactgggtcacaggttagacagcagagtttgctccggccagcagagccacgttctggctgggatgggcagcttcagggcttcctcagctgtggcattcaattgcccgcgtaagtgaagtttttcaaacagcgacattttnaaaataggggtttnccgggttttccagg

SEQ ID NO: 462849 - DNA, 432 bp, Homo Sapiens
gctttattcatcaaagatttattgagtatctatctcaaggcagatacagagtagagaaccagaggaacaaagtctctgccctcatggagcttttattctagcgtctgaagattcagtgtaagagtgcagagcaaagcttgggacctagcaatgcatccaggaagtgttagctattatcatttctcatctcttgttcttgtcttgttttggccccagctcttacattctcatcagatcagatactgacccccagggcaaagattgtatctcttcctccaaagtgcattagctctgaagttggactgaatcccagctctgttcgtgatctgcggtgtccctgggaaacttaacttctctgaatctcaattttcccatacgtgaaataaggacaatacagctaccttaggggagtcaatgtgagggttaaataaa

SEQ ID NO: 462850 - DNA, 513 bp, Homo Sapiens
  misc_feature (93)..(93): n is a, c, g, or t
cactggaagccctgtgggctgaccccatgcactgtcctgtcacagccgcacttctccagctccccactgctgcacgcccgcgtcactgcaaanggccacacctgccgaaagagatggcgttacacgaaggccgcctcccgagtcccttgcgtcacccaccttgccgaagacgggcaaggagtcgagtgtggagcagttccagcgccggttccggaactggtactggcactcctcaatggccagctgggcaccgcggcgcaccgagtccatgacttcccaggttccgcttgcacatctgcacctgcctctggatcaggcccttgagtttctcgcacgtctcctcctctgagatgctccccaccgacgacagcttggccaggtacagccagttgctcgcggcggctgagaagacggcgaagacgaggaggcgcagcgaacgcaggcacgagcggggactcatggtgccgccgcgggcgcccggcccggggcagcggctgcggccgcaagggaatc

SEQ ID NO: 462851 - DNA, 370 bp, Homo Sapiens
  misc_feature (317)..(317): n is a, c, g, or t
ctgagatccagtaaatgagaaataggaatctatagccctgctgaacatttcataaggcctggcataattcaaattctgccctgtaatcaggctgtcccaggcaacacaggcaagattaaagaaatatttaagtttatttgctttgggctggaatatatataactcagtgtagttccactggttaccttatgttctgttgatctgcatttctaagtgggcaattgattgtatgctgttaattcatttttttaaataaaatcgattagtacttaattaatgtattttgttttggccggcaaaacacacagtataccctngacggtaaaaagccgcaggataagaagagtccctggtgaagaaaaggtgagga

SEQ ID NO: 462852 - DNA, 384 bp, Homo Sapiens
  misc_feature (218)..(218): n is a, c, g, or t
  misc_feature (227)..(227): n is a, c, g, or t
  misc_feature (232)..(232): n is a, c, g, or t
  misc_feature (333)..(333): n is a, c, g, or t
  misc_feature (338)..(338): n is a, c, g, or t
  misc_feature (373)..(373): n is a, c, g, or t
ccacatctcatttgactttatttttcagcatataacagtgctagtatataaaatcctcaaataattggttaatgaatcaataaattaatgaataaaggaatggaatgcctctttttattcatctctttccttttctgttctccacatcttcccttgttttacttttgtttctgcccttcttccactgtgactaaatttttgcaatatagaaataatangggctttgngaccnttaggcgttttcttaggctctacaaatgttgggaaaatgggattttggaaccttaggcaaacaaggctggaaacagtttaaacatttgtttgtggggtgcnggcanggggaggaaaggacttcattgggccatttggttanggagggggagg

SEQ ID NO: 462853 - DNA, 467 bp, Homo Sapiens
attgctatttttctttaatggggaaaattggactcccgcgtgtcagatctgtggatttccgaaaggcaatggaaatggtactgacatcactttgcactttaacaatcggatttggtcagggtacaagttgtttgtttaacccgacagctcggtgcaccccgtcgcacgctttgcacactcattaaaacgattattcacgacctgtcgagtgttttcgggttcattcacaggaaaggcttggaacgagggacagcaattcaagtcaacactgtccactacccctatgcacgtgaggacgagttgctgcgtgcgtaaaaagacgaagggaggggtgggtgagtacgccttagctataagtcccgttcatccgatgctctggaatctcaatctcgacagaatgccaagaatgcttggtcctacaaggaccacgtcgtcgctacgttaacttcaagggcttggcacaagac

SEQ ID NO: 462854 - DNA, 456 bp, Homo Sapiens
  misc_feature (341)..(341): n is a, c, g, or t
aatactatataggatattttaatataatatagtatttatactattttttatagtactgttagccagtactcactacgtttccggcgactgttttctggctgtgaagacaaggcaatattggttgactctttgtagtctatatgattccacacagtttgctactaaaccaaccatggtcttgctttcctagtccctaagcacccaaacgtgggagaacctgatcctctgttgtattaatttagggtgcactgatggaaatgtgtccagcgagaatgaacacaagaacctagaggcaatgagacctgaagccatttttagggtttggcctttaatatgcttgngaaccaatctactggctcatagttaaaatactgatggactgggtcacctcattaatttaacaagaagtacattttacaatcaacatatcttaaagttggcagctgcctgggccca

SEQ ID NO: 462855 - DNA, 379 bp, Homo Sapiens
atgagccaccatgcccagccacaaagacatttcaaaatgcctcctgtaagcaaggcctaggcataaaagttacatcacctgagtgttaaacccagcaatatgtcacaatgccccaagtgggcaaatcacaggcagaagagtcacaaattatcagtgcagggcccagcaatatgtcacaatgttccctgaagggcaaacctaaaagaagaatcacataagctaggtgttgggtgtagcaatatgctacagtttccctgtaagcaaggaccaacagaagaagagagtcacatcatctggatgctgggcccagtaatatgtcaatcatctttcctgtaataaagacccaggcaggagaaatatatcatctggttgctgacca

SEQ ID NO: 462856 - DNA, 471 bp, Homo Sapiens
  misc_feature (306)..(306): n is a, c, g, or t
gagacctagaattaggaaggagttcaatcgctttctgttacaaggtttttggaccacaggagatgggaaaaacacagtttggaagactaaattatactgattgcccagaatagtctggttatccaaggcctctaaggaatgactgagacagctaagtctctcttcctttttattccttcttagactgtggggaacttcaaagagcctagccatctcttgatgaggttttttcagagagtggttttagaatttagaatggttctttgcaatcagggatcccattccttatgtttttcttgccctggntgaaagggtatttcaaattttcttctgggtttcctctaaatttcagggacctgggacctgcatagatctagggtttttatggtttgaatacaaatggagaggagtctagaagttcaaggtgtgtctcactcttccctgcttcatttccaactcttccataggtcc

SEQ ID NO: 462857 - DNA, 179 bp, Homo Sapiens
aaggatatattcctttaatttttggaactggaaaacttctttaatccagtctatgcttgtatgacacacacgtccaagaatccaccacccacccaaccaggggctcaggccgttttgtaagcaaccagctacgtaaatgtgaacgtggctgttaggtagcatcttccaacacttaaatg

SEQ ID NO: 462858 - DNA, 447 bp, Homo Sapiens
ttttttttctcatccaattctgaactttattaaaggacattaatcatagagaccatttactcttttgaggttgctgactagatgtctgtggaactatatgaatctactaagacaaacacacgtctataagagagtgaggcaaatagttggttatggctgctaatacgcttctgaaaggcaattttaaagaagataaaatgtgttttgtgcaatcaatgtcagtgaaatcagttgaattttccaaagcaattgctctaaaagacaacactcatctgttttgctggatatttgatttgtttttgtggtcgttgtttaaatccatttctactcttttaaagttataacttattgggtatatgggttcattcttcaccaatgcagatatattgagaagaatggaacctgtcacatataacacatatttgggcaaagagtactttcttaagg

SEQ ID NO: 462859 - DNA, 373 bp, Homo Sapiens
  misc_feature (201)..(201): n is a, c, g, or t
  misc_feature (330)..(330): n is a, c, g, or t
agttcaggagcacaacatactttattaaattctgtaagactaggatcagtgctgtaaattacattgaaatactgaggaagttacaatttttagaaataataaattctgacccctaagtaatctttgaaacaagctgttgcaaatttccaagcattcttcagtactttaaagtaataaaaacacaggaggatagatgcattnggcactctaaaggaatcatcaggacattatgtagctgaaatttcctatgttacagaaatggacatattctcatttattttatgttctcttaaaatttgggtttctaaaactagtagttaaattgaatgngacagaaattattgatcataataattttctataaaattacctc

SEQ ID NO: 462860 - DNA, 469 bp, Homo Sapiens
atatttaaggcagaaacaagagtttattgaagcaaaaaaaagtacacttggatggaacgaagggggacgtcaaaagattgagtacccagcttgacctttgtcttagggctcttagagatttattatttcctatttttttccccatctcttccctccctgtatgtgcagtggtttgccagtatctggaagggccttttggggattgaagttatgcacatgctctcttagggcaattttcccttactgggctagcactcccggccaagccccatgggaaggtcatatatttgtcaaactctgtcattttgccccttactgcgcatgtctgggtcatgcccccagaggaaggccaaactttgccatcttaaattcttattgggggagtttttgcccatgagctcaagatgtctccctgttaggattttcccttccctgtcacccaggcctcacagtctttgtggggggttgt

SEQ ID NO: 462861 - DNA, 466 bp, Homo Sapiens
agagttatacattttatttgagcttcatctctttggagaaaggggaacagggatgagaggattaagttagagatggtctggcacaaagcccagagatgtggggtgtgtgaagaaggaaattcatgactagaatatatgctgaaggtgaaatgaggggagcctggatagggaattcagagataattgttggcatttagtaatgtgatttgggagtatgatcccagcgcagagcaaggaagaaggctggcaggtagtaggagtcacagtcaggaaggaagtactgctagttcgtatccagtctaggtctctggacaattgacccctttttgggtaggaggatttgccagcattattctgaccccttatttctagttcatctcctagacatcttcattgctgtttgccctctggtgagtatgaatccttagggtgggcgtctcctttccactgaccatgtccgagtctg

SEQ ID NO: 462862 - DNA, 533 bp, Homo Sapiens
aacagcaataacaactaggcatttatttaggcactaaccatgtgccaggctctgttctgaacagtttatacgaattcacttctagttctcacatcatcccctgtgagcatgtattaactcctcatagggtaaaccaattttatccccactttacagaggaggaaactggggttcaaagagattcactcttttgcccagcctcccacagctggtatgttgggcagacagagggtgagaaagggagagggtttgcccaaagttctgtagcctggagaccacagagatgtcctgcctccacccggggccctgccccatgggagaaagactggggctgcagggctgcacttctaattgtctagattccagctcaggcaccgggtagtttttagagaatccctttggtattggggtggtgaaggatccaccaccggcggggaggttgagaaagtcccttcctctgcctcgtcaaagtgcctctgcgtggtctggccttgctggatcgtgccgggctttggtggagaacaatgtctcta

SEQ ID NO: 462863 - DNA, 684 bp, Homo Sapiens
  misc_feature (410)..(569): n is a, c, g, or t
ttttttttatatgctaaaaaacaaaagcattaaataaaggtttattaacatcatattaaagacacattatgccatatgtaagcattacatcaaactctatataataagacacaaacaaataccaaacaaagtttttatggtagtatgagtcaccattaaaatgggaaagttctacacaataagagcaacttagacaatactttgtcaattattcgtcttctgtccctaatgcttgatatttatctacgtcagagaaaacttgtttataaatatgcaggccaagctttaatatactttgactttctccagttttagtaagggacttgtcatgtattctattctgggtgaggattcactaagtagcactagaactcacaagcatacagatggatgtggaaaaacgcattcannnnnnnnnnnnnnnnnnnnnnnnnnnnnnnnnnnnnnnnnnnnnnnnnnnnnnnnnnnnnnnnnnnnnnnnnnnnnnnnnnnnnnnnnnnnnnnnnnnnnnnnnnnnnnnnnnnnnnnnnnnnnnnnnnnnnnnnnnnnnnnnnnnnnnnnnnnnnnnncggtatttcaaatgcttggcactcagtatgtgcttaaaggttggtagtttccctgcttctccaaaaaggaatctaggagatcatcacccttctcattttacaaatgagaaagctc

SEQ ID NO: 462864 - DNA, 532 bp, Homo Sapiens
agctattgtttctacctcaccctggcccaggaagacagatctactgaggaaagccctgaacactctgcggcttctctgagaaaccctatcgaaggggatgtggaatcccagagctactcttgctatcaactcgccgcatgaccttgggaaaatcatttcacctggttcagcaatgatttactgagctattgaaggccttactttccagatccagatccttgtgcatacaactgacttgtgtggggtgaggcttgcaggaaaaaatcagctaggaacagccttgggggtagtgggcaaggtggccagagcaattgactgggagctgggaacaggaatgaagaggaagagctgataagaaacatgcccagagcagattttgatggctactgccaatgtacctgaataagaagacaactctttctggaaaaagggaaaacttgaagggctattgaaggccgctagaaagatggagtttcactcttgtcgcccaggatggagtacaatggcatgatcttggctcactgcaacctct

SEQ ID NO: 462865 - DNA, 479 bp, Homo Sapiens
  misc_feature (324)..(324): n is a, c, g, or t
  misc_feature (375)..(375): n is a, c, g, or t
gcttgctttataaatcttttaattcttacaaccagctggtaagatgggaattgtttttgttttgatggaaaaattgggaaatgaagtgacttcaccaagtttatagagtaagcaagcgacagtcccaataggctgaattcacacctaggaatttggatccagagcatagaacatttaattgtctcaatgcagcacacagtgcaaacacaaggcccagttgctgctgctattaacagtattgtattatgattatagtttttccctatttatctttgatgccagagtgcttacactctggcacctcttggggccatatggccttgntcattgtcttgtatcttggcatcaattacttttgcatataaagcttttttnctcttaacacaattggcaatttgtttaaagactgactccccctcagcagcaaaaaaataagttcccaggaagtgctcagtgatatgtgccttgcttctttctag

SEQ ID NO: 462866 - DNA, 296 bp, Homo Sapiens
tgattacacattcttcctttcatcctcactaggcagaatcctcattttgcttagcaggcagcatgggtctgggcctggggaaatgtcagtgaaaattccttgggtggtgcttcctgggagagctctttgatagggggcaaattcaggtggttacatgccttttgtcattcctctttgtcctacctcttataaagaaatgatactggagttgccatcccaaaacagtgagacgacaggcaaaaggaacaaagtcacccatgaagcatggagaaacagaaggagcataagtttaaata

SEQ ID NO: 462867 - DNA, 548 bp, Homo Sapiens
ttttttttatctgagtcagaaatatatacattatgcaagctcatcaataggcttttcggtcctttcatcattttacccataagctatcacagtccacagtgtacattaggtacattagaactagacctctataggtctctcacatttctgtacatattgagagcaaagatactaactatgcttttgttctgaactcttttcaataatgttttgatagtaaacaggctgggaatatagagttagtgtctcccatggaaacagatggtaggggcagctttgtttatggcccaatataataaagatagtggttctcttccgaggcaaagttcagggcaggattcatttgttcatcccttacaaaacattcaggattcctaaacttaggattcctcagctgtgatgcaaacccactaattgcacagtacccaccgaggcccctctatgtcaaccccaaagcacttggagggacaagggagttcgttttgcttgctgtgctgtaatgaagtctttgtctctgatctaggagtatcatgtcttctgccagcatc

SEQ ID NO: 462868 - DNA, 507 bp, Homo Sapiens
  misc_feature (467)..(467): n is a, c, g, or t
acaatgtgttttatttatttagatcttgattcaaacatgttgtttcaaaaaaacatgagacaatcaagtacatttgaataatgaatatttgatgaaattaaggaattattgttagttttttaatgtataataatggtttagtggatttaggaaatgggataccgaaacgtttacagataaatgctataacgtctggggtattgtttcaaactaagccatgagggatagtggggtgggagaatagattcaaaagatggctgtaaattgataatacttgacctagggggatggatacacagaggtccattctttctattatttttgtatatatttaaattttttccataataataagttttaaaaagtgctataagcttagcctactatttatatatacaatgtgtagtagatatgagtttgcttcacaacttcagggcaaaaagtggcacattatttttaagaatcangtccaatctgctccaagcccccactggtagaatgttgagg

SEQ ID NO: 462869 - DNA, 179 bp, Homo Sapiens
aaattaggacaatggttgcctgacgtgcaagaagactgattagaagcaggcaagagaggactttctgaggtgatattgttctaattcttgacagaggtttgagctacacagttgtagatcaaaactcaccaaatggtatattttaaatttgtgcatttcactgtatgcaaatcttacct

SEQ ID NO: 462870 - DNA, 394 bp, Homo Sapiens
  misc_feature (154)..(154): n is a, c, g, or t
  misc_feature (177)..(177): n is a, c, g, or t
  misc_feature (232)..(232): n is a, c, g, or t
  misc_feature (302)..(302): n is a, c, g, or t
attattattatactttaagttttatgttcatttttggggatttggttcattatttcttctctaatataattgctattttcagtcagactttaaatatcatttttattttgactcattctctggataaatttaaagttgggcaataacacacagnctcttttctacatgggcagtggntcagggatttttggcactgatccttagggtgcctttaggtggaatttgaaaagtntggcttcccttcctcggatacattcatggtcatttgccagaaaaacatagtaaatttacctatccacaantgcaaatgccacgtcttacatgtagcaccctagattaagtgcaaaacctgcctaatgctatgtggtggtcctgctttgctttaaatgtgagg

SEQ ID NO: 462871 - DNA, 425 bp, Homo Sapiens
  misc_feature (130)..(160): n is a, c, g, or t
  misc_feature (381)..(381): n is a, c, g, or t
  misc_feature (406)..(406): n is a, c, g, or t
ttttttttgaagcatgaccaaacttttagacagaaaaacaacacaatcagaaaatatacatatatatactggataaagaaaaacaaataattgaacttcatttttcttttccattagaagacatgagggnnnnnnnnnnnnnnnnnnnnnnnnnnnnnnntgaaagaaaatgttgcaaatttcaagaggtgtaaaacatttgctatttaaaaacttcccaaagggacagtttaattttaggcaatttaaggacaatggaaaagcctgggaaagccctaggctttgtgtgtttgtaaaatttgtgttcccgaatctttctgtggggtgtaggggacagacctaactctaaggcccaagtcttattattgatggaggggagantaacattaatgggcccggggtaggntcatctggacagtatcccg

SEQ ID NO: 462872 - DNA, 543 bp, Homo Sapiens
  misc_feature (437)..(437): n is a, c, g, or t
  misc_feature (486)..(486): n is a, c, g, or t
ttttttttgccgatggaggtgagaagaaataacatgtgactttttcaggagaaatctccaagaaacagcgttctattccgcatgcttttttctcttttctatagcaatggggatcttgacggtccctccttccttctggattcctgtgttaggatgacacagcacagagctacctctcacctgaccagtcatgagatgtaaataaatgaggaagaagatttttgagccactgaaatttggaggttgtttgtcaccacagtttaagctagcccccactgactgatgcacggctgaagaatgagtccgaactgggctctgggacaagacatgtgaagagcgctccagggctgaggtaaaattcaagggttgcctcaaagataacagtgaggcacgatatgttattggggtgggtgtgggataaataaggtacatcaggngagaataacaagaaactcaactttaaaagacggcgctgatttgcactgnggagagattcaaatgccctgcttagcatttgagattgtgatggatgaacaaactaat

SEQ ID NO: 462873 - DNA, 319 bp, Homo Sapiens
  misc_feature (261)..(261): n is a, c, g, or t
  misc_feature (282)..(282): n is a, c, g, or t
  misc_feature (293)..(293): n is a, c, g, or t
gaaaaccatagacacatatgttttattttagtaaaaatttcaaattatgactttagtagtctttaaaaggttacaaccatatcacagaccttggcaaagctgcagtgtattaatttttatccccagtttccattctttaaccttcaaggaacgaaaatgaaatcaaaattttaaaacacatgattataagcctttgtatcaactgaggaattaggaatttaagtcatgaatctttttcttaataaggctacttgacggtancaaaacggtaaacctaagggntatcttactanccgctggtactcttaggggtttggaa

SEQ ID NO: 462874 - DNA, 189 bp, Homo Sapiens
  misc_feature (157)..(157): n is a, c, g, or t
aatcacaaaaataacaacagaatcctaagatcatttttaccttttatactaatgctcctagatggtctttgaaggtctagttacaaatggataaatggaggccagctccatctctaacgacctaccagcttaacctcactaggcccgcctccctttnctgttgagttagatgcccttaaattcatttcc

SEQ ID NO: 462875 - DNA, 556 bp, Homo Sapiens
ttttttttaccacttcgctaatacttttattttctgtccatattcaagcgtgttgagattatctagtttcctaaagtaacaaatataatatatccactccaccacacatttcagcatttaatactcttgtttttccttatgtactagtgacatccttaatacagaaatcatcaatagaaaaatgcagtgtggacattcaacagagcaggaataaaacaacaggtaattgtgtgggcttcaatttcctaaggaataactgttaatatttgggtaggatttcatgtgttaccttagggcacaattcataacaatccatatgttaaggatattcttatcattctggcttttctggattagaaaattgagacataaaaagattcaacaacttgctgagggtcacataagcaccaagtgatgaggctgggaattatatgtaagtggtctgacttatgagcctaaggttttaaccagcaaggcatgctgcctcatgaggagcctctgctaggatactccactgttgataggaaatatgtgaaatatctgattattttagtga

SEQ ID NO: 462876 - DNA, 436 bp, Homo Sapiens
ttttttttagcatttgacatttaatgatggggtaaaaaaccttagataatggtccgtggccctccaaagtccaacccatccaacaaaaatctttatgtcttagtattgctctcactgaattttcttaggtgtcacacaggcagctttgacattcagttaatggaactatatataaaatatgtataatatcagtgctacaaaaccacggcaaatggatgactgtgctttgaaagactgcttgatctttaaaacgtattgtgagaggtggtttgcacatgcctgttggctgtcactggcacccttgtggatatttatgtttgatcctcagtgcttttatgtatggcctgggcttgaataattaaataaaattagtttgtattttattattttaattctaaccaaggttatttaccccatcattaaatgtcaaatgcta

SEQ ID NO: 462877 - DNA, 456 bp, Homo Sapiens
tttcctctaatactttttattataaattacatacaacatctgttttacaaaattctatctactcttccttttgaatgcacatgcataaagagatgtctgatgtaatgtgaccacctatttctgagtagtaggatttgtgatatttttctttgaatatttaaaaatcatttttataatttaacactttagagatgaacaggaagtaagaattaaccaaagggactgatgggggtttcgtgtgagaggaacattgagggggtgggaatctggggagcaggtgtgataaaaacacggagaatagaaagtagaaacagggaaaagtacatgtgcctaaccacgccgcccgccacaccctcaggactagaagccgtggtaagagaaagggggtaagtccgggacacaggctgccaggtcggggaggcaggccacaggattgatgctgcagagcccagcatc

SEQ ID NO: 462878 - DNA, 420 bp, Homo Sapiens
  misc_feature (60)..(95): n is a, c, g, or t
  misc_feature (365)..(365): n is a, c, g, or t
  misc_feature (380)..(380): n is a, c, g, or t
  misc_feature (388)..(388): n is a, c, g, or t
gttaaatatttattgaagtgtttgtagtaatttataaccaataactaatttgtacagtgnnnnnnnnnnnnnnnnnnnnnnnnnnnnnnnnnnnngtcactgtaaaagctcataggaagtaacttttaaagtactttgcagaaatattgatctgtggcaaattggaaattcaagaaaaaaggtaatcatttaccacagagagtttgagaagcactgacttattacagagctctgcctgggcacatcataatatgaaacacattaaaaagtgcagccaaatagggaagtgttcagtgaatactcactattactactttcatttgataggatggaggaacccttagggcaggagagggagttcaggnacttacccatgtccngtgtcccnggtcccggggcccctgagggcacactgcgtcg

SEQ ID NO: 462879 - DNA, 451 bp, Homo Sapiens
  misc_feature (187)..(187): n is a, c, g, or t
attacaaaccacttttgaaaagaatccaagtaaaacaataatcatctgtgaatgacaaaagacttagaagagccatgattactgatgcaattgacaaagaaatttcattatttctgtggtatacaataatttaacaggataacaattattaccaataacatataacaagatctatcaacattttagncaatatgatacaattttgggatgcatattaataacagatttatacaaatacaactcaaagaaatttaaacaacattttttcatttgatcaggcttcctgtatggattttaatataccaaattaggcctaatatgtttcttttgggacttccaggggccctatttgggcttccaaggggtttaatggccaaaagttaggcttgaggtcggaaacctttaagttaggattttacatttgattttggaaagtttgtcaaatatcaaa

SEQ ID NO: 462880 - DNA, 2280 bp, Homo Sapiens
  misc_feature (862)..(1103): n is a, c, g, or t
  misc_feature (1126)..(1151): n is a, c, g, or t
  misc_feature (1935)..(1935): n is a, c, g, or t
aaaacaacacacatttattacctaaaagtttttgtgaatcaataattcaagagcagcttcggtgggcttagaatcgctcatgagttgcagtcaagatgccagctggggctgcagttgtctgaaggttctgtttgggctggcggatctgtttctaacatgggtcactcacacggccactgacaggaagtcttagctcttcatcacagtcacatgggcatctccatggagctatgtggtatgtgctcacaacatggcagctggcttgtactagaggaagtgatagaagagagataaacatggaggaagtacacaattttttatgacctagtctataatttaaacaccattgtttcattgtattcattagatgggaatcactaaatccaacacatagtcaaaaggaggaagtgaccgagcatgagaaaatttgtgaatatattttaaaacaaccacaactagaattcataatgtgagtatcccttaatgtagaaagggtgtttcacagatgataagtaggcatggttatgacagatgatgaaactacagatatcaaaaggaaagtgactttggatttgggggctgagtttcaatggatctccttgatctcctatagacattcccaaatggtagccatgaacctgttgcaagtggctagactatctactaagtaagtggtaagggtgaatgggaagtgtagatattgcagcccaagaagtgaacaaagtagacataccaatggaatccataacttattccccttgcaggataaagtatagctagtccagggcatgggagagattattaatggagagccagccttgaaaattaaaaattgtttttctggctgggggcggtggctcannnnnnnnnnnnnnnnnnnnnnnnnnnnnnnnnnnnnnnnnnnnnnnnnnnnnnnnnnnnnnnnnnnnnnnnnnnnnnnnnnnnnnnnnnnnnnnnnnnnnnnnnnnnnnnnnnnnnnnnnnnnnnnnnnnnnnnnnnnnnnnnnnnnnnnnnnnnnnnnnnnnnnnnnnnnnnnnnnnnnnnnnnnnnnnnnnnnnnnnnnnnnnnnnnnnnnnnnnnnnnnnnnnnnnnnnnnnnnnnnntgacaagagtgaaactctatctnnnnnnnnnnnnnnnnnnnnnnnnnntctttttccttaatctttgagttaattgatgtcttcaagtatgtgtatatacatatatgaaaggttttgtgaaatctgtgattttcttatctggagaaagatggagagagtaataaaaaattgaagtaaacactgcttagtatgaagaaataaacattacactgactcacattaggtttttatactgagtatgttttggttcatgatttgacatgaattagaaataagttttaatggatcactaattcctggctggaagaatgttttgacttctaagtgataaagtatactccctaagtaagataaagctgtttgaatcagtagaagttagacctgcctcccatccccaccacatacaaacatgtactctgttgactgccacttgggtgaaatgaggcaaaaaatgataaacttccattataagagattgtaaggctgtattgtaatagtcttttggaagatggaccagtaaagagctagacatactctttggacttacaattggagaaggggctctagacaacgaaacttctgaagtttgggttacttagttgctgtcaacagctttatacacatcttgttctaagattgcacgaaatctaatcttgctccttcagttctatgtagaaaagatatgtgcactcttgatatccttcaggaggcactattaagagatcacttgttgttatacacatccatcttgagggaaaaaatgcttggtgtaaagagaatattttgtctctgagacaataacatggagaatgaggaaaatggggtagttgantgccattccttactgttccacatagtccaagaaatagactttcctttgaagccccatgggtggcacctaagaaaaatctggatcagctggtcccaaaagctgttttacatcaaacacatgtatatgcttatgcatatgtgtgtctggctggccgggtgaaaattatgtggctatagcagtcatgatttgatcctcatacccaaatgagcaaaccaatataaaaatttcttaaatattatgaggttgtcatatttacttataaccagatataatgcatattacgtcctttctgctgtggaaaagatttactctatacatgtctttgtgatgaggctgtccctcgtg

SEQ ID NO: 462881 - DNA, 365 bp, Homo Sapiens
  misc_feature (284)..(284): n is a, c, g, or t
  misc_feature (306)..(306): n is a, c, g, or t
gaaaatgtatacaatgttctttattttgcaaagctctccattcttgccaaatttattcatacattcattacaatattaaacaaccctcaataggacttcttttttagaacttggcaaatagtttccaaaatgtaatgcaaaggttcaagagttaaaaagacacttatgaagaagaccaacaaggtaggagggcattttctatagacaacactcattacaaagctataatatctaaggtaggacagtatttgcccatggacatagacaaataaaatgggattggnagggttcagtaagtaggatttnggagacacttgcctatggcacagacggaactgcaaaacagtggaaaggacagagcttac

SEQ ID NO: 462882 - DNA, 560 bp, Homo Sapiens
gggttaagacaaaaggctttattactcacaacagttagcagatgaaccaaccagactggcttggagttgccattaggagaaaaataaaaacatcatgcccaggaatatttgggcagagtcctgaatttttaaaataagtctatataactctcacctctttgctcctaatcattactcaggaagcaactgagagtaaatgatcccttcccagtaaggactgggcattgaatgatcaattgtcttactaaggtgtgttgatcaggagaaggtgagggaagaagattaggagatgttaatgaggagaccattccaatgttccacaataccagatgcccacagatgggctcagttgacgagcatgggaggttcatcaaataacttcaacatcagcacactgttgaatgacttttgtgataaaaggcacactagtgtcagacttcagatcatttagacagcccaaaacatggcatggattagtttcaaatgccataatggtgtggccagaattggatgatcaactggaacaaaaacaccataatctggaaaagagtccacagcag

SEQ ID NO: 462883 - DNA, 126 bp, Homo Sapiens
gccattgacagaaatttattcttctattaagactacagcaatctgaattgcctatttatagctgcaagtccatccagggttgatgctaattaaggttttttccctatcaagaataagactcctatg

SEQ ID NO: 462884 - DNA, 547 bp, Homo Sapiens
attgtctgatcaaatttaaagtaaacaataaaatgtttgattctaatggcagctttttcatcactgctgcctaccaagtaaaaaaagttttaactttcctcaaacagcaggaaaaaatgttagaaaaatcatcttctaataaactactttttattcccactgatgaagaaagactataaaataagcttgctacattctaattggcagtaaacactgaaaagtacctgcagtggtctatacagcgcatactcatctctgaaaagctggtcgtgatgactaacacaatccagccaacgtccatcaaccattgcttgtccaattgctatagcttgtgccctgaaatcaagacccacaagaatgaaaagttttaaaagtcagtcagaatagttaagtaccagataaggcacaaccttaaaatattttttttcagttctaatcagagttaggatttgcaatggcccttggataagtaaaggacgaaacgagagagttaaagcaaactaaaagattcttccaggtactatagtaaaggagaagaaactactgg

SEQ ID NO: 462885 - DNA, 710 bp, Homo Sapiens
  misc_feature (202)..(220): n is a, c, g, or t
  misc_feature (417)..(444): n is a, c, g, or t
  misc_feature (552)..(552): n is a, c, g, or t
  misc_feature (648)..(648): n is a, c, g, or t
gaaataaacacaatttttattgttaatctttctgaagaaactagtatatatctttttacacaaaatctatcagtaagagattgattggttaaagaaaaaaagcaaagcaaaacaagttgagagaatccaggctttatcaatataagtaataattttttagaatggtgatttgatttcaccatttcaattcagcagagcctgnnnnnnnnnnnnnnnnnnntacaatgatctgtatttcctattgctagaaggatgaaagtgaatccatataaaccataccaacgccgttatgtgtaactggtggtaaaactttattattcaagtttagatgtaacagacatctttgctgcctgaagattgtttgcataagaaatacaccaagaacatgtttgtgagtagaaatgaacatgcactatnnnnnnnnnnnnnnnnnnnnnnnnnnnntttcatgtgttgtaagaacagaactattatagccaacattctagtattcaaatcaggactacaaattgaattctttttcttaggcaacatgaaatcattccatatganagacattttctgctgggtgaatattgctgtaagttaaattttacattgggcattttgaggatgttcccccctcatggcctcccccaaagttttccntgtgggttggtcaaatggtccgccctagggaatttgggcgtttattattgtggatatttgcc

SEQ ID NO: 462886 - DNA, 539 bp, Homo Sapiens
  misc_feature (230)..(230): n is a, c, g, or t
aaaaagtaaaaaattaaactcattagtcaagcatgctagatatttataagtcctagttatccttgactatgtaaaacccagtattatcatacattaaatatcagacacatattacatgtagcaatcaatcttaaatgaagactgaagacttagatggcagcaaggaaacttaaatttacgcaattatgattcgtgattccaacttttcaaggggattaaggatgctatgnactgaagactctaatccctgtaaatacccagggctcgcctcactccttcttccctctgtcagcccttgtttatttccttcagaatacttgtttcagtctaaatttcaatatttatcaaatacctatactccccactggaataaactccataaggagaccataagaacacctatgtctacctttgtatcccaacatctaatgagtcttcaataaatatttgctagatgaacaaacatcttcataggtaagggttgaaacacacagtcacaatcaagaaatagctccacaacgtctgatgggaatatttct

SEQ ID NO: 462887 - DNA, 534 bp, Homo Sapiens
  misc_feature (258)..(258): n is a, c, g, or t
  misc_feature (422)..(422): n is a, c, g, or t
aagctcttaagatatttcacatttatttttcagaaatacagaggttcatctaagtatcgcttcttaaacagatgtctatttcaatgacagctctctgtccccgctgtccccacatcaagagcagtacatagtccaacgctctgcacaaagcacacactcgggaattgctgcgctaacagggttatcaagggttactgggttctgcgctaatgtaattttctgaaccagagaactgtcattgtccaattcgattttagnaaagagggaatgtgtaaaaggttgtccagtaatatactgtttgacatattcaagtaatactcaataaataaaatttttaggtctgaaaagtctagtaataaacttcaacatcagttcacctagacctccctgtgtgactaaactctctttaattatttcaaaanattaaaaaagaaaccataggtcattaagacaggccaatttctattcaattccgtgaatttttatgctggcattcagagacaccccgaatataaccaccacacagagaaagtc

SEQ ID NO: 462888 - DNA, 513 bp, Homo Sapiens
acttaatagaaaattttaatttgctagagggacagtatacatccattaggtaaaagtcatatgtcatattaaaggtggagtaagtcctaagtagaaatcagtggaaagacatttccgcttttaagtacagtaaggaccagttggtggtaattataacaaatttattggaagaactatgataggcaagagatgaccaaaaatgggaactgggatatttagtttcaagtcattggaaaataaggcaggaaactaggatgtttatgtacccggattaacgggtttctctggtcagcttattagggtgattttcaatgggaaggaatatgtttgagttcttaaataggaacctaagaaaatacttattctagaaattagaatgtggctaagaataaaaggggaaaccaaaaatagcagggacggaagaagctaagtagactgcagcataaggaacgcagaaattccaactgtgttaggaactttgaatgtcaattattcaagcaagacaataaccac

SEQ ID NO: 462889 - DNA, 707 bp, Homo Sapiens
  misc_feature (647)..(647): n is a, c, g, or t
ccattttatatctttattcagttaacctaactggcctctgtcaaaaccagatggattataggatgaatgcacattagcataaacttaagtcacacttgcacattcgctctaggatgtggtatcttcactgagcagaatgtggtttccagcactttgtatgcggcttttgatttagctaatgctttttaatctacacacattgtgggaggaaaatcaaaacaatttgctttgggtgtgggtaaaaacaaggaacactgcttcactgttttctgtcagggctgtcacttctgctttcagtttaattgacattttggcaaaacatcatggttaattcaatatattaataatattacataaagtggtacccataagcaggaagtggcaagttccttaagtatagtaaaatattataacattgaacagaagtaaaatactggaagaagagacataaacttcagcagattcaaagacctataacatagatgaagtttataggggtccaatgcttctggtccttttgtcaaaacatcctttttacagtaaatggcatgttgccctatatatatatatttcctatcactaaaagggaaatacagttttatgggggcttattgggggttttgaattcaacatataccacatttaanggatatttctctgactcactaaaggagtttgcaagggctgcttgtctcaagtcaaacccg

SEQ ID NO: 462890 - DNA, 507 bp, Homo Sapiens
  misc_feature (346)..(346): n is a, c, g, or t
agtctcaagaacaagtttttattatgcatgggtttcgcagtgatacaagacacctgctcacaacttacagtattaattttttagaaaaacaaaacaggtatatggcatgagtgaaacagttccccattaaaagcacttaaaacctatgacatggctagtaagatgtaaaatattaagtccccttggggtcttgcaaacttgtatttcctaacaatttggaagccatgatgatagtctgaagctaaaggaactccaatttcttggtatgatactaaataaagattcttatcttttggggagaaagagccaaaacagaagggtgtgaaagcagtgaatttcccctccntatggccaataaagcaagagggcagattatattcatgaatgcttctcatatacaaaaaattcctccataccaggaaggagagtattgaccagtttatctttaaaaagaaaatgagtaattctggagaaatgtagcttgttcattcacctacagactatggc

SEQ ID NO: 462891 - DNA, 464 bp, Homo Sapiens
ttttttttggtatgagtttggtaagaaatctctaccttttaaacatttttaaatgttggctccctggtgtgtgcctgtggtagttctcaaggaagcagggtgggcagcctaaggatgcgggcagcgagttgtgtgcctctcctatatcatccaggaagtgctaccacgggtgcacgggtgaccctgccccatctggcaccaactcaagtcatcaccctccaagcagctcctgccacatggaccctattgcagctagacctggcccccaacttccccactcctgtgctatcccaaataccagcgtacttttgggtccaaagaggcacagagacttgcttgcacatagcaggcaccaagtaaacgttagctattcacctgctagtctcttatgctgagaactttggatgcctaatcctaaatacagcatggcggccccagtgcagtggctcattgcccatagtttt

SEQ ID NO: 462892 - DNA, 500 bp, Homo Sapiens
  misc_feature (35)..(35): n is a, c, g, or t
  misc_feature (158)..(158): n is a, c, g, or t
tgtttcttgaatgaagatgtgaacggaatgagccntgaacttgagtcacagtggtgacacatagtgcatgtggggatgaggcagcccagggggtgagggagtcctgaaggcatggctttgcgtgtgccacttctctccagagccactggctcaagaancaagtgtttttgtctcttggcaaaattgggaaagtgaatggagtggtcttaattaacctgtgtttgaatttactctgtagctgctggactcaattaaggaaatggaggaatacaggctctcaccagcaattccctgagcttttaaagttttttcttggaaggcctgggattccaaagactcctccacattcacaccaatcagacaccagggcaatgatcagatatggcagttctgtaccaatgtgaccgttgatagaatatttaaaaactcccagtgtaatcagggggaaaaaacccactaaacctacagctaaggtttaggtttgttctatgtgtgtgtac

SEQ ID NO: 462893 - DNA, 522 bp, Homo Sapiens
  misc_feature (506)..(506): n is a, c, g, or t
taatacaagtgttcaggctttcaatagttaactatttaatatttatatagattgaggtgactaaagaatgtgttcaccaaaaaaggcctaaattcattaagacagtctctgtgaaaaagggatgttaaaggttatgagaaaagttactagatctgcatttttaaaataaaaatgactttctgagatattgggacagaaggcagctttagttatttgggaggtcgaggcatacatgtctactatgattcaccataaagccatattaggcaggccattggcccaggtacatttcggcattatttccttttgcatatttcatatggataaattccttttaaggtttgaggcaccaataaaaaattaggcatttcttttttaaaatagtaggcttcctttaatcaggtattttgaattatcttttgattctcttttccattgtaaattagcaaattacagagattatattaatttattataaatgatactcccattttatttaaaaaggngatagtattatacatt

SEQ ID NO: 462894 - DNA, 539 bp, Homo Sapiens
  misc_feature (257)..(363): n is a, c, g, or t
  misc_feature (451)..(451): n is a, c, g, or t
  misc_feature (460)..(460): n is a, c, g, or t
  misc_feature (474)..(474): n is a, c, g, or t
  misc_feature (488)..(488): n is a, c, g, or t
  misc_feature (514)..(514): n is a, c, g, or t
  misc_feature (519)..(519): n is a, c, g, or t
accattactcaagactctctttaattttcacaataacctttgcagttttacagctcctataaaatcttagggaagaaattctgagttttcttttctgaatcattattccttgaacttatactgtataagaccagatgtaagtttacaaaatatcacatgtgaaagtattgacagaacactgataatacagaagataaaagtgaaatgcataagagcctccaatattttaaaagtaaaatagtcagatgggcttgttnnnnnnnnnnnnnnnnnnnnnnnnnnnnnnnnnnnnnnnnnnnnnnnnnnnnnnnnnnnnnnnnnnnnnnnnnnnnnnnnnnnnnnnnnnnnnnnnnnnnnnnnnnnttgaactcttgaccttgtgatctgcccaccttggcctccaaaagtgttggggattacagggcatgagccaccgcaccagggccaaagnaagcatttnctttgcctgggctnagcatggatagctntaacaaggagcaagcttactttcctnagggnttcctttttgtcttttattg

SEQ ID NO: 462895 - DNA, 483 bp, Homo Sapiens
  misc_feature (187)..(187): n is a, c, g, or t
ggttccagttgtatttattaaaatacataagcaagtcaaaatgtaagagccaaaggaaaataaaaaagagaaagtactattatatttggttggcttgatattaagaagagaaattaaataaaacgttttggaggcaaacagtgttatctgtattattaataacactaatagcaccatatatctctgncataacttcttttctgctatcactatcaattaggctgatctctatgttccagtgtaagttctgggaaaaaaagtcaatcttactgatttagctaattgtagaaatggtttgctacattggtcacaattaggaaactggacaatcaggaagcagctatatctactgctggttctagaatcacatccctttgctgagatcctgagaccagaatgttattgccagagctgctgcctgcagcaacaccctgccttagctttgacagaagtgactgccagaattgttggctctacagccat

SEQ ID NO: 462896 - DNA, 487 bp, Homo Sapiens
attctcttcagttcccctcttcattagtctcttgccttcttttgccccaagaggaagaacactatgaacttcatcacctgggtttccttagcttctgacttccagggtttcagtaataattaccagcaagaaatctgaaggtaagaggagagagcccagggtacctatatccttctgtcttccaatcctgtctgttgtggcattgttttgcagaggttatgacttcctacaaggctgtagctcttacccgggatcccctccaacatggcgatagttcttgctggattccggcagcagcctccctcctcatgattctttagaccaaaaggtagtaatggctttttgttggggttagttcctgtgtgcttgcttcatcttccctagttagttcctttctccttcttccctttgtaggagctcatttcattaaattctttttaactaccctcttgaacatgtcagctgattcttgctaggaccttatgta

SEQ ID NO: 462897 - DNA, 500 bp, Homo Sapiens
  misc_feature (386)..(386): n is a, c, g, or t
  misc_feature (433)..(433): n is a, c, g, or t
  misc_feature (470)..(470): n is a, c, g, or t
  misc_feature (490)..(490): n is a, c, g, or t
ccttccatttcctctatcttatcccttaatatggtaggtaaataactacttctagccaagccagcttaaacatttactctttaactaaatatttggagagacagggataaaagcaaaaaaggtgtatttgactaccatactctagtgagaagtatatatgacacaacaaagtcataactccaatgtactgttttctcaagttttatcttttacaatgcttatgtttactattcggttgctgcagatatacataaataaggtcatgattctccaattttctttttactcctggggtatgccaagactaggcataaagaaagggccgcagttaactttggaattaaggtaaacaaagagaacagaggaaatcaaatcataaaatatgncattatattccataagtattcatataacaggctgaccttgcctgaanaaaatccatctttgagggaagatcctcctgcatcagnggaaataatacccaaagcantgaaagcaca

SEQ ID NO: 462898 - DNA, 418 bp, Homo Sapiens
  misc_feature (404)..(404): n is a, c, g, or t
ccgagctattgcacccagccaactattaattcttactggaaattttgcttgcatatagggaaattggctgtaggtgttgctgtataaaaacatgtttatcacctaacacaaggcctgcctctatgcaatccttcagtccagcattttatgaagaatcacaattcagatagagatgccagaatgcaaaatttctgtgcaaagactttctccattatcctttttgtattggtctctttgccaacatgtaggctaatatattaaactgagtcttttactcttggggacaagactgggtctggggtgctctcacattgtacatggaatggggccctgaatcctctaaggggattcatacatcttggttattttactctaggaatgtctgttgaagcttgagtttttgnacatctctggggaa

SEQ ID NO: 462899 - DNA, 348 bp, Homo Sapiens
  misc_feature (144)..(145): n is a, c, g, or t
  misc_feature (157)..(157): n is a, c, g, or t
  misc_feature (185)..(185): n is a, c, g, or t
  misc_feature (196)..(196): n is a, c, g, or t
  misc_feature (208)..(208): n is a, c, g, or t
  misc_feature (222)..(222): n is a, c, g, or t
  misc_feature (236)..(236): n is a, c, g, or t
  misc_feature (241)..(241): n is a, c, g, or t
  misc_feature (302)..(302): n is a, c, g, or t
aaaactgcagccttgccccaggggggaccatgtctgcgtcagaaggaaagtcggcaggtgcgcatcggggcacactcctgcagctaagggggctgctgtctctgctcagcacggggaggccggtgcctgggtggccccaggctnnagcagcatgagnttttgctcctcaccttccaccagacggntgggaaggganttgagtgcggantgagctatttgccngcctcctccagggntccanttgaaatcgtcctttgcaggtggtcattgtccttctttcaggataacccaaggtcccccanccctggggccaatggggtttccagttaattgggcatcttccctttt

SEQ ID NO: 462900 - DNA, 520 bp, Homo Sapiens
ggtgtctaatacttttacttcccagcagcataataccactttggtcaggttgaaccactgcacaattttgcagctctttcagaaaaataatgaaaacaattggaaagacatgatgtacatgcaaatggtgagaaaatgatactattgtccaatcctttcccgtaaatgtaaaatatccttagttcatctccaaactgtgtatttattataagcccttacatcagggattttgtttctttcagtttttgtagcaccaaatagacacagcggctaacaagaaataaatctgaaaagtcactgaaatatttatcacatgtcaggaaattttctggtctgtacctttaaccatgttcctgggcttcacatattcttcttaagagtaagctataacataaggttgagttcccaccctgtgtttggctactgatgtggtttgtttaccatggataatactttgttaatatcttttgtatattactttacaatttccaagtattttatatacagtgactcacttagt

SEQ ID NO: 462901 - DNA, 647 bp, Homo Sapiens
tgtcaactgaagccaaacagctcagaaccacccacagcggggttcctaaaccagcaggtgtgtgtttgtgggtggcttccagtcaacatttcacccccacagcccctttaaaaaaaacccaaccctgactcagccaaactaaattcagcttcagattcccttaacagaggtaattttgtgcaagatattttctgcatggcaaacagataaataagcacccaaccctggcttccagagtgcttggtctggctatggagatgggcataaccaaaaacacaaacatcacctgacataggaaccaagagaggtggggccacgggtttagaggcacaagggtcagacaaggtcaggccttgaagaatgaagagctgaactggcagagagaggggtgtggcactccaggtgaagggaggcagcacaaggcagaacactctggggggctggcatggggaagggacaggaaagccaaatccaacattgattctgccaaaatctttagtagttagcaccaagtagtcaggcttctactttttttcctttcagctaatctgaattcattaatatttatataattatagtacttatagaactaaaattatttgaaaactcaggttattggacaaataggttcagtataatcccaaata

SEQ ID NO: 462902 - DNA, 426 bp, Homo Sapiens
  misc_feature (320)..(320): n is a, c, g, or t
  misc_feature (331)..(331): n is a, c, g, or t
  misc_feature (338)..(338): n is a, c, g, or t
  misc_feature (346)..(346): n is a, c, g, or t
  misc_feature (370)..(370): n is a, c, g, or t
  misc_feature (375)..(375): n is a, c, g, or t
  misc_feature (380)..(380): n is a, c, g, or t
  misc_feature (398)..(398): n is a, c, g, or t
  misc_feature (412)..(412): n is a, c, g, or t
gctgggctcataaatatgtaataatcccctctcttggcagagtccagaatagaaaggagatacatacaacccagggcacaagctggagagacacatcatctagctcataggcccagagatatgtgataatatcccctgttgacagggcccaggcagaagagtcacattcatatgattctgacgcagtgatatgtaacaatgcacccatgggaaaggattttaaggattaaagtctcaacacctggggtactaggcccagtgatatgacacaatctcatcatctttgaggggtgacacctttaacttttaggctgagtgtnttatttttggngtcacantctcaccntgtttgctggggccaaccgttttnacccntctcnttgggcatcttgaggggnttttttttaaaccncgcttggggatttt

SEQ ID NO: 462903 - DNA, 552 bp, Homo Sapiens
ttttttttcatctttcttttatttattgtactggaggagcaggaaattacacaagcctattaaaggctaagcaaattccaagtaaattgcataaatgggatttttttaaaggacacaaaataactctaaaacaatctatccatttcagaacatcatcagatacctggggactgcgcatgaagagatgtgctcagcagcatcttatacaaattatccagactcaagccttttcctctcctatccagcctcatctcctgggacccacaaaccaaaagagagtgcctggggaatgagagagcaaaagagagacagacagacagggaggactttgatgggaaaccaagacatcaggaggtctctgcctctgattcaggggttatttgaatcaaggggaactcatttgggcctcaaggcacttaatccttttattcctcttttctgggtttatttttgaggcattaagggggaagaagcattatggggattgaagaggggtttttctctttctagctgctgcttctggagtcccttacccaatgcccagtgcgtatg

SEQ ID NO: 462904 - DNA, 544 bp, Homo Sapiens
  misc_feature (384)..(384): n is a, c, g, or t
tctactttttataatagagaatgtggttgtgtgggctttttttgaacagaaaacacaacaatgacctataccgtgagaaaagccattttatcttcttcgtggtatttttacccccaaaggaactgaagatggaaaatatgactaataagttattgcagttttggtcttgaattctgtgccatctgaagttagcatccagcttcttaaaaagcagccacgcctacagcctgttttttgggaaggctgtaggtggagagatgggcttattttgcataccaccctcagggcccagagacccactgcattttccaaagttaagcaaatgacaccattttcttccatcagctaaactttacagataatagtgtttccacctcatatccnttttctttggccccttctcaaatgagtcagaatagtcatgttccccttgagggatgtctgacttgaatggagaattgttctttcctctcttgaatcagctcactagctccctgatggtctgggttcaaggaaatggttaatgaggtagaggccacttata

SEQ ID NO: 462905 - DNA, 532 bp, Homo Sapiens
ttaaaggtacaaatttattaaaactttgcagttaacaattattgaagaaattagtatgttaactataaaaacctagaagtcccaggaattagatttcaaaggatttggtttcaaagaattccttataagtgattttaacattacattctttgttaaactgggactttttctactttggggattattttgccccagctgtggccatgtttaaaattagtcagcagcacatgaagttgtggagagatgagaggttcgcactcttatccaagttttaggcaaatagcactgtatttcccatttaatgggaatgcagtttcttctgcggttctttgggcataaagaggctctaggactccccatttctttcacttcaagggaaggagccatttggcattcttgtcctcacacctgagtacttgttcacaagttaaaacactggccaaatcaccacctcaggactccttgtatgcattcagataaaaacgtctggggtgggggaaggtgctttccctcagttcttgttctcacacat

SEQ ID NO: 462906 - DNA, 486 bp, Homo Sapiens
  misc_feature (326)..(400): n is a, c, g, or t
  misc_feature (416)..(416): n is a, c, g, or t
  misc_feature (433)..(433): n is a, c, g, or t
  misc_feature (446)..(446): n is a, c, g, or t
  misc_feature (451)..(451): n is a, c, g, or t
  misc_feature (466)..(466): n is a, c, g, or t
  misc_feature (473)..(473): n is a, c, g, or t
atgaaataattaaatggcaatttactttatagcaatgaacaaatatttgtcaaagggcaaatattttttgtctggagttaataaagttaatatcttttaccacaaagctagaggtcaacagtaccactattattgattgccactacctggctccggctcaacttccccttgctcaggaggaaagcacagcaggcaatccctcagctctggtttagggcagctgccacaaattagtctgacaattaggttaacaatttcaaatgacaatgcaaccaatgggtaaaacatgcataaagaatcctcataaaggccaggcaggttggctnnnnnnnnnnnnnnnnnnnnnnnnnnnnnnnnnnnnnnnnnnnnnnnnnnnnnnnnnnnnnnnnnnnnnnnnnnncttagtgaggttcccnttctctgccaaaatgtntttaaaatttcantggcngtagtggtgcacacngttagtncccgggtagtccg

SEQ ID NO: 462907 - DNA, 189 bp, Homo Sapiens
agaattccattgaggtttatctgtggtatttttgagtatatctctgtgtgcagacatcttagtggatgctgtaggttttacagcacatgtaataacttatcatggtttaatagggtcaaaattttagtactttgaaagatgtacggaaaccttattccttgattccctatatgtctctttaccataaag

SEQ ID NO: 462908 - DNA, 486 bp, Homo Sapiens
aatgtatcagaactgacataaagttgccaaagggaagaagattcacacctctgctgtaggtttctgcaccacagcttaaaatgacccaagtattagtgacccacagcacagctgaatctgtggaaagatactttgtactggaattttgtgatattttgataagtccaagaggaactcagggaccttcccacacatatatctcacattcccctgacaaacaatgggcagttgctagacacccaaggtctccatcacttcattaaatcttttgtaagagtattacagggcaggcaaccagtgagtgttgaggtacacaggtatgggctgacagttaatgtgaatgcacatgaaagaggggcaacctcagagttaggaaaagaagaatcatcttcatccaaaagaaacagctaggaaggactggtagaaggtgcagagttgtaaagacttgagcttacctaaaatggcctcgaactctccagctcgaac

SEQ ID NO: 462909 - DNA, 429 bp, Homo Sapiens
  misc_feature (313)..(313): n is a, c, g, or t
ccagcatgtttgtttatttacatacatacagagacacaagtacatacatacatatatcctattactggcatctcactttgacttaaagatgatgaaagccatttcagtcactatctcaggggatgccacttcccttacctcccctgtcacgttggacatacccacaatagacccaatacagaggaaaacaaaaattcttagaagttcatactgacttacctactgaaggcaatgtaccaggattacgtgttctttacatgccttccaattctaaaaatctataaggaaatcacaactggcacacacaacaggngctctacagttttgtaaatgatgcagtatgtgcccaggcgtggcagcagatagactttcaggcttcaggagtccaaacctctgtcaataccaggattattatccacaccgttagtt

SEQ ID NO: 462910 - DNA, 469 bp, Homo Sapiens
gccattgaaaagaaagtttaatgttacaattctccccagaaatgagggtcatggcatgccacagggggccacatgaaactctgtcacaagcagagaccacaaagcagagagaggacctgagactatgcctttattgctaagtcagtgggatggatctaggtggggatgtcccctgttgggcataaagcaaaaacagacattctatggttgtcactgggaagtctgtgatatgagttttgtgcacccacgagagagggcttaaaaggatgatgtaaacaactttagcctttagtttgtccctgtacttaatatatgtcaaatagggcaaacacaaaatctaaggtaaacacagattagttccgggagcagcttggcttatggcacacatttcagggaaacaccttggcttaaatcttacaggggaccacctgtttttttcaaactttggggttattccgtttctgacttt

SEQ ID NO: 462911 - DNA, 402 bp, Homo Sapiens
cattttgttcatttaaacaaaagtgtaattcatacatatatagatacatatcttaattgatttctcaactattttataagtaactggaatttttcattagatcttatacagagaagtattttattaaaaattcaaaagggaagacttttatgtgctcattttgtaatttttgattttaaatatctttacattgtctgccaattaaagtgttttaaacttgcattggaatggactccgaatgtatttttgtggtgttacgttatccgtagatttctagcatgaagttagcctcacgatgctgtgcaaaggattttaaaatatgagagtcactgaaagagtttaaacatctgttcatgttaaatgctctatggattttaattaaagacttgagaatgattttat

SEQ ID NO: 462912 - DNA, 525 bp, Homo Sapiens
agttttcttttttcctccaaccatttaaaaatgtaaacattagtcttagcttgcaggcagcacaaaagcgggtggtagaccaaatgtggacccagggtgtagtttgccaaacccttttattagatcaccaaagttacttttcttaaaataccttctatttttcacagaaggtataaatggtaaacaacatcttaaagcatcggtagtagtggatacccttggatatcactgtcactctcttaccgggtttaattttgcatggctggtgtgggcgtaattgagtgtgcatgtagagcatctttataatattaccatcagcacatttggtacttgcacccttgtagttctaggaaaagtcctaaaaatctataaatgcaattacttctagggaaagtaaattgaaatgcacattggcttataagaaactcattcttctaaggctcaggaaacaacactgtttcccatttattgcttcaaacttcttttatatatggtgtcagaattattcccagtcctaaatcaagg

SEQ ID NO: 462913 - DNA, 502 bp, Homo Sapiens
  misc_feature (371)..(371): n is a, c, g, or t
  misc_feature (393)..(393): n is a, c, g, or t
  misc_feature (426)..(426): n is a, c, g, or t
  misc_feature (447)..(447): n is a, c, g, or t
  misc_feature (458)..(458): n is a, c, g, or t
  misc_feature (461)..(461): n is a, c, g, or t
  misc_feature (467)..(467): n is a, c, g, or t
ctacatgttttataatgtaaccaactaaaaggctgctaacggtgcagcatttttgaagtaatgcattctcaggatttcatatttagaaggtttatttgaaaacatcctactctccactgtataaataagaggaaacagaatgacaaaaagtgtcataactacggttcttggcatctagcaagatgatcttccttttgtatcacactgcgggatgacgatctgggtttcagaaagcggtaagtggctggttccgtggggttagcgatcacattgccacgtgtcatgcccacagtggccattctcctgttgattttctctctcatgaaatgttagggtctctgtgcagctctgggttggccagaatcatccanaaatgccagacctttctctcanagctctatgatgaaagttgcatatacagaaagngcctctggcttataaataagngacagctgcanagngggganaggcttttgccactaaaaacttccaggatgcatga

SEQ ID NO: 462914 - DNA, 141 bp, Homo Sapiens
gctagttattaagaacaaagggcatgtgtcgtaacaggggatctaattactgtaagccagaatgattgctgaaatgtcaaaatgtaagattgaatgaggctatttaaacattttagtatattttgtcttactgaaattgat

SEQ ID NO: 462915 - DNA, 399 bp, Homo Sapiens
actttaaatatatcttttaatgacttagtacactgttaggcttgtaagacagccttaaaaaatcataaaggggaacatgatcacatggcatgaaatgaacatttacatgctgttaaataacattttaaaatgtatgtatctatagccaataccatagaataccatatccaatatgaatagaaacagcacaattacttcaaaaaggaaatctgcatcaggctttagtgtgttgtcaaagtactttcggatattacctcatttgagagtaaggaaactgaggcctcaggaaaacaagtgacttgctaatgctgagggtcaaggtctttgggattcaaataccctgtgctttgccccattcctttttccttccattaaaccaatatcctcaaaatgccagtt

SEQ ID NO: 462916 - DNA, 537 bp, Homo Sapiens
tttttttctctttttaagtgaggttttgcctgacaatctagaaactgaacacactctgacaggtgatgctatttgaagcatttgttactgtgaggataggaggcgtgaggcggggcacctagcagattcacctccctctgtccccagagaaagtttctgagcttcgtggagctcatgtgcctcaagcgtgtggcttctgcctttccattttccgttgacacaagtacacctgtggtagcaaacgggtctggaacacatgtgctgcggctgaggatccagcaaaccatacctgagtgtgcactgtgtccttggcactgcattccacctgggatgtgcactgtttggtttaatcctccctaccatcccacaggatagatatatttctgtccacattgtacagatgtggaaactgggttattgaaagtttaaagtgctaagatcaccgaggccagtctgtgactctagcagaggcgtttatccaggggagatttggcccctcggctttgtcctttaaaatgtggattggactggccagga

SEQ ID NO: 462917 - DNA, 542 bp, Homo Sapiens
gtgatgactagagtagaataattttagaaaaattaatttatgatagagctggctttgggaaaaaatcatattcactcaaatatgacttttaattaattcatcttaatagtctgacatttgaaatgcatgggacaagatgaagtggctgaaaggatgctgcaaataagccaggaaaaccgcaaaatgatgtttgagagttcctgtttcctacctctgaccgattataatacttttctcttatcagtggaatgctatctccattgtgggttattttgtatggccctgaacctatactttttctattgtgtatttttgatgccatgacaacagataatgtacttaatgtggaaacttaagaaaaataattttccaaggggcttttcaacctggttcttctgatttcttcaagtaatggtgaaggaccattttctcggttgcccatgcttgtggaatgagcacatgaatcagacagaccaagatctgtcagttctgaaaagaccacatgcatttcctcgaaatgatcacagtgactttgtgcaaag

SEQ ID NO: 462918 - DNA, 525 bp, Homo Sapiens
  misc_feature (56)..(109): n is a, c, g, or t
  misc_feature (339)..(339): n is a, c, g, or t
aagagtttgtgtataatatatttatttgcatacagaaatatgtatttctattgtannnnnnnnnnnnnnnnnnnnnnnnnnnnnnnnnnnnnnnnnnnnnnnnnnnnnnccaggaagatacattaaatatgcacacatttcatgctacagcgtgcaccctttaagagaagcatttttaagaggcatggtattgaatatacatgctgagaatacactttgcacaatttcatccagctttgggtgctttcctaaactatttgcaacaccggtactatggttgttgaaagggatattatcaaactggggcgaggaggaaactgtcaatgaactaagtagggnggaaaataaaaacaggactgcattgctgaggtaattgttgccatcattttgaattcccatctctcccaatgtcaggtcttcaggatcaaaaaagcaaatgaacaaagagcaggagtatgttggacatccagcttgttcatttcaaatcagaaagcttacccgttgtggcttctcatattgattact

SEQ ID NO: 462919 - DNA, 532 bp, Homo Sapiens
aacttttatagtattttatcctttattttccaggacacaaaatagatgacgaaatttgctagtaccttgattaaatatcacccaaatatcaagaaatttgaatttgcttagaataacaataatatttaaaattggcctaatgaaaaataaaggtattggtgaacatctgtttaacataaaaaagacatttctaggacatatttgtatactatgtaatatttctacagaggaaattcatggataccaaaggacacttatgcatttgaatgaaaaaactgaatatgttgcctccctagataaaagattatcattaacactaattttaatatcaaagttcaagcctcaatacacttcttagagagaggaactctctacactgggtatttcagtcaaaaccccaggcagtatctctaattttactttctcttttagccttcattcatatcaataataagcttgtgttcttttcttgatctttgatctaatttagacaactgtgggagattactttatttggaaaaaaattttttta

SEQ ID NO: 462920 - DNA, 477 bp, Homo Sapiens
  misc_feature (403)..(403): n is a, c, g, or t
  misc_feature (409)..(409): n is a, c, g, or t
  misc_feature (414)..(414): n is a, c, g, or t
  misc_feature (422)..(422): n is a, c, g, or t
  misc_feature (431)..(431): n is a, c, g, or t
  misc_feature (453)..(453): n is a, c, g, or t
ctcaggattggcatttattatagtcacaaactttatataaatgcttgtattaatgtggtgtttacattatcctatttcacagatggaaacagaaaataccagcttttttaaaatagcaatatctattattataataaatattgaaataacaccataataatatcactaaggaagtaatctaattgtgttgattttgcagagggagaaaaacattacctctagagctgaggctattgtgctcatgcaaactccaatctgaaggtggtagaaactaggaagggacagggatttcttaggcatcaggagttcataaattattcatgggtatcttaattaattaaagggcatgttaacaaataggcgacaaggattgtggatattaggttattaaattcatggatantttatnacttnaaaacccnttattaggnttccaacctagggtcgggattnaggttttgtaggtggattagtggg

SEQ ID NO: 462921 - DNA, 467 bp, Homo Sapiens
ttttttttgggggggtgtttcgttttgtccaggcctgaagctcccccttctgctccctggcacccatctcctggggcctgtcccactgttcatgcttggaaaaggacggtgggtgcaggagggacaggcagggcacctctctaggccaggcaggacaggaagggaaaggaagaagaaggagtaaaataatctcataccgttaagaagcagctcagatcgaagtggggaaagagagggaaaaggaaagaggggaagaatgaaagaggagacagggagagttggggagggtcagggcagggtggtggcgcggccctttatggccaggactcggcgaggaaggcagggggtgagtccagggacgtaattccacaactttacccggcagtcactggaggctgtgaagatatgcttggcattggtgcagatggcattgatgggactgtcgtggcccttgatctcaccgatgg

SEQ ID NO: 462922 - DNA, 264 bp, Homo Sapiens
  misc_feature (225)..(225): n is a, c, g, or t
cccccaaagtggatgcattaaatttaagatgcctgttagatgtccaagtggagagtcagttttgtggggaagaggcgaatctggaagtcaaaggagatggtcaagttgaagacataaactttgagtttataaattgactaataaaacagacctgcgaggaccatcagccaaaatttttgtaaagctttcatataccggatggctataataattaccttactttcnataaacaacctctagtggaacttttcttatgctaaatcc

SEQ ID NO: 462923 - DNA, 483 bp, Homo Sapiens
  misc_feature (267)..(267): n is a, c, g, or t
  misc_feature (373)..(373): n is a, c, g, or t
  misc_feature (465)..(465): n is a, c, g, or t
ggtgttttctcaagatttatttctcattatcttccactctcctcaggagtcaaagtcagcatggtcccaggaagcccctagaggcaggggaagctgcatcaggacggggactaaaacagctccatcttaaagagaaactgacatcatctccgaaagccctgaggaacgtgctcttacacagacctgagtgttggggccgctcactttaggcaaggcacagcaggcagcctaaacatcgctgacacctccaccatctgggcctttggnttccacagagctgctaccccaacttgggggcacactttggggaggagaaccagaggggaaaaacctcttcaggtaggtaaacgtgggatttttcacaaaggccttnttggcgaggcgaggcaattgggtttcttcaggccctgggttggcacttttaggaatttcacccgcgggagttttttaaaacacccccttgtntgggggaccccaaccacc

SEQ ID NO: 462924 - DNA, 316 bp, Homo Sapiens
  misc_feature (228)..(262): n is a, c, g, or t
tattttttaaaagatgtacacatatcaaaaaagacgaaaggcagagctattcactcagcaaagctttctatctactgtatgccaagcaggtactagatacaagagcatctggtgatagatacaagaaatacaaaaaggaattcattccttcagtaaatatttactgagcacctgttctaggcactgaagactcggttgtgaattaaacacaaaaaatctctatgttcnnnnnnnnnnnnnnnnnnnnnnnnnnnnnnnnnnnaaagcggtgtcttaatcctcttgtccttcctcctaaatctcctggggcccttag

SEQ ID NO: 462925 - DNA, 484 bp, Homo Sapiens
  misc_feature (416)..(424): n is a, c, g, or t
  misc_feature (432)..(432): n is a, c, g, or t
  misc_feature (447)..(447): n is a, c, g, or t
  misc_feature (462)..(462): n is a, c, g, or t
  misc_feature (467)..(467): n is a, c, g, or t
ttttttttctaactgtgtggaattacagaaacatcgtgtgaatatttttatatttggatggattcatagaatttgttaccctttcaggatggttcttgcctagttatgtagatacaaaatatgatctgtgcttatttgtaagtgaagtaaggtacatcccagatagagtactagaactgaaactgcctttgcaaaaattataacagtgagaaaattatggcagtgggggagatctgatctagccaactcccctcttgccttgagccttcaaactgcttttaattattccttggctgcttaagccaagctagccttgggaggcatttaatttataggttaaatgataacagcctttccccaaaactcaaccacttttgtaaagctaatgaggaggaccaccggggtagggcagatannnnnnnnnctgatttncgctaaggtgttggncataagggtttgccngtccntttttcagggttccaag

SEQ ID NO: 462926 - DNA, 472 bp, Homo Sapiens
ttttttttccattttaataagagttggggatgctccatggccattctgtgtaggcggcaggaaaagacccgtctggctgcaggagagatatcatggaaacgtttgcagacaagaagctgcctacactttgccattgcttgagaattaactatatgaattaatatagttattattcagccacattgctgtgctccacctgggaccctctctgatcccttctgtcgcttcactgtaccagtgcctccagtggtcagcagatgccactcttggggaagtgtttgggtgattaagtcccctggggacaggcgcttagccaggagactgagggagtgggggattagggaaagcccagctcccttgcctcaggggcaatgttgagccgtcactgacatcccagagttcccctggggatcaggtagaagctactcccaggtgaaacaaaaaacagggggctctgtttagacgattgatt

SEQ ID NO: 462927 - DNA, 584 bp, Homo Sapiens
acttctgtctttaaaagtaatttattaaaagtcacaagttagcttagctcagtggtatacagaaggcatcatattattgcttttatacagcaaacactcaaaaatgtcccccctcttcccccagcattaactacctgtggtttccttttacctaattcgggatatggagaggttgtacaactgaatgtgttgaatgatttcatccaataaccgatccgtcatagtatcaaaatctgcaaatgtgtccatctgattcttttcagacattagggaagtccagttttcctccaggggagccccagttctatgaaagtctttaccagccggaggtctggcactgttcccatccgggggcatggggcacaggacaaccggggtgaattccatctttccaaattttcttcctcttcctctaaacatcctctcactgacttcctcatccaacgtgctggaatgggtagaaacaactccaaaggatcccaaaggctgatgggtgatgggaaacagggtctgtttggaagagaatccagccctggcaggggtctccttgggcacagatgagaaagggagacaggtggcagtgc

SEQ ID NO: 462928 - DNA, 542 bp, Homo Sapiens
  misc_feature (38)..(38): n is a, c, g, or t
  misc_feature (57)..(57): n is a, c, g, or t
  misc_feature (60)..(60): n is a, c, g, or t
  misc_feature (63)..(63): n is a, c, g, or t
tacactaatggaaattttcctcctcatgcccagccatntgaaccaaggacaggttcnttntcntaagaggacagaggttggattccagaaaaaaatcctggagtcatgccaagagcagagtagcaaagctcccttccatccattctcccatgtcacgcagactgtattccctaatgaaaaacttccccccactcacacctgtgggatggagtggagcaaagcagttgacgaggaattgaggcaggcgctcctaagatggagggaggcggagagcagggctgtggaaaagaattttccatctgacctgctactttccatagctaatttatacaatattcacaaatcttaatggactttgagtcatttctagaaaagttggacagaaagagccaaagagcagcatgcgtttctctcctataaagacactttcacttccagtttcggaagtccaaatactgaggcacacaccaacggtggacagccctgcaggagcttcctgaaactatctacaattccaagtggatcaccagcttcagaattac

SEQ ID NO: 462929 - DNA, 256 bp, Homo Sapiens
gggtatgctttaatgtatgtgaatttaatacacagcgcattattttctcttatttaaatttttaaatatgggcactgcatcgatcacggtttaaaattccaagagtctgaaagagtagcagggaaaaatctccttccacactgtacccctcagacacccacttcccttcttcaaaggcaatcagtgatactggctcttgtatccttcaagggatatttatgactttgcatgaaaaaaatatatgctaaagcttttt

SEQ ID NO: 462930 - DNA, 441 bp, Homo Sapiens
tttttttgtaacaaacccacttttattgatagtgtacacggagatccatggtggcggggctgtgctgggtgagagcgggccacacaccggtgcagccaaggtacctggtctgctcagaaggctcaggcagtgggtggggaaggggacagaggcagggttggagctgctgctttgagcacagacgcaggcaggggccaaggctggggtgcaggtgcaggtatgcagagctggggctggagcatgtgtacatctgtgtgtacatctgtgtgtacttgtatatacatgggcatggtgtacacaatatctacagggaccctcacagactgatctagggagagggttgaggacaagatgtcccaaagccctgaaggccccaggggccaagcatcaagagagggagcacatcgtgggtatgtactgaatgcccagcgctactttgct

SEQ ID NO: 462931 - DNA, 545 bp, Homo Sapiens
atttcataaagaagaagggtatcagtgtaaacttctaaatgcaggacaaaatgcatgatttgggatggagattggagtggacttgttcaaagagcagcagcaaatgagacattaaaggaatacataggaagccacttccaagtacttccatttttctttagttgtgattgtgagatggttccctactagttagagaaggaaaattttaaaatgctttgctaaacagatgatccttaaattggtcactgtataccgtgatgcagcctaatcaaaatggtattcctttgagtgagtgagccacagagactctcgccaaccccttgtgcagctttctattaacagtataaatactccattgttgtaaagcagtttatgggttaacaaaggcgctgttcacagacacgttatcttagttttgcaggttgcctttgtacatgttattctcatttcctagcatgccctctatccctgctttgcctgcttagcaagctcattcttatccttcaggacataacaccaactctgcaaagtcctcttgagaccct

SEQ ID NO: 462932 - DNA, 488 bp, Homo Sapiens
ctgagtgagaatgtctttattatccttataatctgctctacaggtaaaacattaacaaattttttcccttttatttttagttgacatgtaataattgtacaaatttatggaatacagagtggtatttcaacacatgtatacaatgtatactgatcaaaccagggctaattagcatttttaataggaaccatacttatctgtgggaaagggcagctatggcctaccatgcctgatgaagaaactggccggaagaagctaggtagtctgtaagcatgttactttatatcctaacagtaaggtgggatggagtgtagccaaacatccaatggaagccatcagtagcttgctatatacaatgcatgtaaaattctaccaagtgacacaggactcactgcaacatctgcatggactctggcttttgaacctctgtaggctgagagattgatggggaagctgaaattctgcagaggtgcccttaccgaaatcat

SEQ ID NO: 462933 - DNA, 716 bp, Homo Sapiens
  misc_feature (58)..(58): n is a, c, g, or t
  misc_feature (639)..(639): n is a, c, g, or t
tacacaggctttacacttatcagaatgttacatttaaaatctgacaaggacgccaagnatggtgactgtctgcctctaaaccacgaaagagtaagatttgtgcaaccctcctcctcttccacctccttcaggagaattaaatgaatcaagactttggaaagacggggaagagccgggacttggcagtacttgaaacaggaggaatacaccagcctaaatgtacagactttgtagccgagcccactcgatcggtctgtgccttcacgtgaccaccatctgtgcctccctcgctccatccaaatttgtgtaggctgctccttggagttatgcctaaaatatagctacaccagagccctggaaactgtagtcaagtaacaggcctcactgttttttttctttggattaaaagtgtatatctctctactgaggggtttccagctttacacttctataggttgttctgacagtgagaacacattatgtacatgttttctattcatgtccagggcatgagaatcttaatattcttatacttccctttttgcatgcagtatgtctggaatatgtttataaaattttagcaaggggtgagatcaagggacaaaggtagagtggttatttaaagacaatcagaaatgnaacttaaaagctgccctggcaaaaccaatcctttcctatcatgaagagtaccttcatattttcctagaagattggcc

SEQ ID NO: 462934 - DNA, 608 bp, Homo Sapiens
  misc_feature (12)..(12): n is a, c, g, or t
  misc_feature (46)..(46): n is a, c, g, or t
  misc_feature (52)..(52): n is a, c, g, or t
  misc_feature (87)..(87): n is a, c, g, or t
  misc_feature (117)..(117): n is a, c, g, or t
  misc_feature (147)..(147): n is a, c, g, or t
  misc_feature (170)..(170): n is a, c, g, or t
  misc_feature (593)..(593): n is a, c, g, or t
actggttcagtntgtatttaaccgggaaatggtgctcctggggccntcccgnaaccaactctaatagcgtggtaagccaacttaagnccgccccatactgcgatgttctcccaaacntgtgtttcccgttcaccgcctggttgtaanacattgaaagttgtccataaaanagggaacgatgcactcagcctttcgcaggaaagcggctgtaaggaggcctccgtcccaccagtgcaagcaggttccctgagcggtcatactggcccccccagtccgtcgtagccgtgggtcagctcatgtccaatgatggtgccgatgcccccgtagttgagagactgtgggaagtcagggtcgtacagggtgggctgcaggatgcccgcggggaacaccatctggttcttgttgggtagatagtaggcattgagcgcctgtggggggagcagccacgtggacttgtccacctcctgccgaatcttcttaactgagagctggatgctgaagcggatgctgttcaagatgttcttgaagtaggtcttctcatggacctcaaactcatactccttgtccacagcatcgggtttcagcaggaagtnccgggtagccgacca

SEQ ID NO: 462935 - DNA, 525 bp, Homo Sapiens
  misc_feature (128)..(129): n is a, c, g, or t
  misc_feature (422)..(422): n is a, c, g, or t
  misc_feature (433)..(433): n is a, c, g, or t
ttttttctaattcattgaatttttatttttccctacattctggagaactaggcaaatacaagcagagagcggttgtaattttgtgcaacagacactgaccggctttttattttatctttttatatttnngggagggggggaatgattgtactggtaaagtctctcaaacctccaaagaacagcttattccaatgctataataagttacaggcataaaatgatatactctcccaatttcttttatgaaacagcaaatctctcctgctaaaaccgaaacagagaacaataaaacatttgaccaacgtcattcatagacctagatgttcaacttaagtactcaatcaagtgtctatggaacaaaggattttggaaaaaaatgcttaggtatgggcgtttgtttcaactctggatataattctgtncatcctgtagnttttaaccagtttatttcctgtaaaatgatcatcattataaaagaaagttaattaaggcaaacaaaactttgcagtatgcaaattgaaagct

SEQ ID NO: 462936 - DNA, 492 bp, Homo Sapiens
  misc_feature (277)..(441): n is a, c, g, or t
aactgttctgaaggtacatcagcactgttctacagctttaaataagaatctcatctccccagaggcaagggtactcttgatgtatttgctcagggctgtatgtgctgctccgtgtaactcatttaaagttggttaaggttttttttatttcttgcacatagtagaaggagtggatgaagtgttttctgaactctttgcagcttctaacatagtgttctgtgtatagtgaaggaaaacaaaattaagggccagggaacattaagtaggcaactagaannnnnnnnnnnnnnnnnnnnnnnnnnnnnnnnnnnnnnnnnnnnnnnnnnnnnnnnnnnnnnnnnnnnnnnnnnnnnnnnnnnnnnnnnnnnnnnnnnnnnnnnnnnnnnnnnnnnnnnnnnnnnnnnnnnnnnnnnnnnnnnnnnnnnnnnnnnnnnnnnnnnntgtatttagacagctctgaactgcagtaacctttaggctctatttgaaagt

SEQ ID NO: 462937 - DNA, 487 bp, Homo Sapiens
acaaaagcaattatccatttttattttgtttacattgcactgaaaatttacatcatacttttacaaagtttcttttcataaaaatatacttctttacaaaagtgtatgcattaatataagaggagtagccagttgcagaagaaacattgtttaaacaagatcttaaatgtattagccttaacattaatgaatgaatcattgttattgcagtcatttgaataaacaagaataaataactgatggcataaaatttaaaactgcatcctgccagtagagtaccatgttgaggaaaattgtatgaatttcccaaaacaatgtatctcaaagtggtttacaagaaattcattaaatgttgtagagatagagccaagcagcgctcccaggtgcaagggtttctcttaggcactctgtctcatgatacaaaaagtcaagactgttcacagagttatccatatttgaaagggacaacaccaaagagttaacactg

SEQ ID NO: 462938 - DNA, 445 bp, Homo Sapiens
atgtagtaaacccactcattgtcaaaaattcttagagaaacaatacatttggtatgaaagttaacaatgatcacaatagtcacaaaattttaagctacagtcatcaccctctaagagcttggtggtggttgttttaaaatcataatttcagttcagaaattggaaagaactctgactaccggtactctattaatatttcaattagagagagacatattttcaactttgaaaaattgcagttttaaggggcatatgataattttcttttcaaaatacagatgttcttctaaagattattcaaatacggactgtcttctgaagtttcatctttcttttttttcctcatttatcacatagatcagtacaattaggctaacaccaatgataatgttccttcaaaccaaagctaaagaacctcaaggggctggtaggggaatccagaggg

SEQ ID NO: 462939 - DNA, 305 bp, Homo Sapiens
  misc_feature (215)..(235): n is a, c, g, or t
ttttttttcatggacaggattttattaaaattgtacatagatctcatatttaaattaaaaaatggactttttttctagtatcaaaatagttatttttaaaataccttgaaaaactttaatacaatttttaatatattaaatattcacctgaactctcagccatttatctcccatctctctttgctagaatcttgccttaccatcactatcattcnnnnnnnnnnnnnnnnnnnnngggcatctttaatgcttatcccaggaaaaggcattaaaaataaaatatttttctttaaggtccacaattt

SEQ ID NO: 462940 - DNA, 452 bp, Homo Sapiens
  misc_feature (208)..(208): n is a, c, g, or t
  misc_feature (440)..(440): n is a, c, g, or t
ttttttttcagaatggccttatgcaatatttcagaaactttaacagaataaagggtggaaaatgaaaatcaattatgagaactctgtcaaatgtttgctttccaaaaacttacaccacctcagacattgttttctcagcaaacttccaggtaaataaaattccgcaattattctacaacaatgtaccatcaaccagcctcacccaggnatatgcaaggcagggcagggacaaacacattattttatccttgtgggttcacgggtgcttttttgtttttaatggtaggaatttatagtcaggaaatacttttaagttttacactaatttagttctctaaactttctctaattttccacctggaatttgcgtaaattactatgtttcttcctctttgctagggccactaagtaggactgacaacgtaactctataggggcanttataggttaac

SEQ ID NO: 462941 - DNA, 468 bp, Homo Sapiens
  misc_feature (412)..(412): n is a, c, g, or t
ttttttttcttcttctgaatcacagctgtggcttgcactagacctctacctgtggctgtgttcccttctcacattttaattagcaaataaaaactccagaaagctctcaaaatgtttctgcctggattttacaaggaaaagttaaaagatgccaactggctcctgggaaaaaaccaaactagtaagaggcatctatcaacaaggcagagcaagttcatccggagagcttatgccaggccaagaaataccatctcggagccagctttgattttatttttgcagttaattttcaagattttcggtgccgcattcagcgagtgaggtttacaacatcctgccattggctgagagctgctgccagccagatggccccgcagaacgacactcgtatggcagagagagcggccgtcgnaagtgattccttcgctgcctcctggcaccggtaccgctggctgccaccaggaaacc

SEQ ID NO: 462942 - DNA, 445 bp, Homo Sapiens
  misc_feature (255)..(320): n is a, c, g, or t
  misc_feature (379)..(379): n is a, c, g, or t
agcaataaataaaacaggtagaggtgggatgggggaatgtgtatgtctaaaaaatcatattcataatcccccatcccatgcaaaagatccgctttgttcctgtccttcttaatgactttagtactttagtatgttctctatagcctacctttttaaaatgcctctgtaatccatcttctcattttcactagtttaggatccatattatttcttgcctagcctgttgtaacagcctttctactgcttacctttctnnnnnnnnnnnnnnnnnnnnnnnnnnnnnnnnnnnnnnnnnnnnnnnnnnnnnnnnnnnnnnnnnntgggggtcatgctattctccctgcctcagcctcctgaggagctggggactacagggcgnccgcaccaatgcccgggtaattttttgtatttttaggagagatgggggtttcactgtgttaggcag

SEQ ID NO: 462943 - DNA, 526 bp, Homo Sapiens
  misc_feature (142)..(183): n is a, c, g, or t
aatttagcaaaacataagcaaaattttaatatcaaagtgctaaacagtactgccttaaaagtcactgcaaatgaaccataaaataacggcatgggaagtgacatttattgtacaaatggttaataaaaagacacattataannnnnnnnnnnnnnnnnnnnnnnnnnnnnnnnnnnnnnnnnnttgcttatttaatttcctaattggtgtatcccaagtcactgtgaacaccccatttaattactctgtaactcagcttcccaggagctggtggtcttgcaataaatacaggcaaagctattacaatataacgtgcatacaaatgtttatacaaataaggacactatgcaacaaattatctcatagtaatatggcattaacagtagaaacatacaaaagggagtacgaacacggaatgttgaaacgcagcccactaatccttcctagtactcacactcatactattttttaaatcttttctagtattcacattcatactattttttaaaaagaagatttgctgctc

SEQ ID NO: 462944 - DNA, 258 bp, Homo Sapiens
acagagttgaaatcaaaagtctaatttattttactttaaatcatgtcattatgaaaacttttactaaaaatagcccattttttccaaaggccgttcactgataggattgttctggcttgccaaactctctattcctctgacatttaaacagtcaagtctctattctcataaacataagtatccatagatgggctttcctcttctaaggctacagtggaaaaccatgttccaggagaactatgagtcctggagtcattc

SEQ ID NO: 462945 - DNA, 452 bp, Homo Sapiens
  misc_feature (231)..(268): n is a, c, g, or t
cctcttcccccagatgtcttgacggggatcactgggggctctttgtgagtgagggtggccaaactaccgccggaggagatggggtctcagagcgagagctgcggagggggaggggaagaagaaggcctcacttttgctgctgcggggcccacacagccgctgctactttggggggtggggaaggggccaagctgcagacacacacagtcattcatttctgtccacaccccnnnnnnnnnnnnnnnnnnnnnnnnnnnnnnnnnnnnnngcacgtgtcggcgctcacacacacatgctagcccactgatgcacccagcccagggctggcagtctttgcagcgtggggccgtctcaccctggagcctggagaggatctatgcttgtttgtttttgtaatccatatcatagttgctttctttaattgttccttctgaataaacagtttatttaag

SEQ ID NO: 462946 - DNA, 523 bp, Homo Sapiens
aaacgtgccatagagattttaatggaaaaaaattagaaaaatgcattattgtacaacaccacattaaatgattttttttctgtaaagacattgtaaaatatatacagggctgcgtaccgcactcgttacaaaagaaagatgcaaacccttgtgtaagttacatattctacatgggctggatgtctacttggacttgtaaacattagttactagttttttctttaaaatattaggtaagctgtgacaataataaatacctctgatattcatttgatggttgtctcattctgttgaacttcagaacggcattctaaggccatttgtgaaggtgccgtctccacagaggaaggccagaggaaggatgaacaaaaggaaaacaaacagaagcagtaggctccttttgaatttggttctctatggatgagtttgaactgctgatttttgccaagtctgatacagcttcctaccaaaggcctgacaccttgaccacaatgggcctgttcaaatcccgctcaccaaggga

SEQ ID NO: 462947 - DNA, 519 bp, Homo Sapiens
ttttttttctgcctataaagtgaatgacttgtggtgcaatcttacaaagtctcaatctgtgtattctgcaataaaggcattatattatcactattgcatttgtgatacattctaccttaccctttatgtgacaattctatactgttttaactgtcaaattgtaagtaaaagtgtgaattcgtgaccaaaaattttccacaccagcaacttaagtaactacagcaatatgtttaggaaaactgcgatcccaaacaaaaaatctatactagggtgagacaggatgacattgactttaattccaataggactcactaccacatgacgtccattactagtgctcactttccggaacccaaggagctgtggaagaatggagtcctttcaatgaaaataaactagaggcaatacacaacacagttactttgaggggctttttcaatataaagaagattgcccggaatcctaactctcctatttcccaaaaatgacaaagccaaaaagtcacactcttcacacatc

SEQ ID NO: 462948 - DNA, 506 bp, Homo Sapiens
attaagatcatggtttattaggtttctgcaattttgaaagacaatatattatgtatcttgagtgtgtcaactgcatctcaaatgtgacatgtccaaattgaaaattatcttttttccaaccaggaaccatcagctttccattcatcataacctgttagaatgcaagtgatcttaatgaaacagtcctatttgtttgcctttgatttttaaattcttcagatgtttgcctaaatggcttgctcatagtctttgtccaccacctacagggctcatcatgtgttggtctgccggcgcatttccagctttatcttcactgctgtccacacgcatttggtgctttagatattcaacacctgaagttccttgaaatgccacctatcagttgatactctttgtggcttaatcttacttcctcttgcctctttcttgatgatccttgattcattgatcatttccaactttttatttttaaagtgctgaaatcatttttatcttaaaaacagcaa

SEQ ID NO: 462949 - DNA, 437 bp, Homo Sapiens
  misc_feature (392)..(392): n is a, c, g, or t
  misc_feature (426)..(426): n is a, c, g, or t
ttttttttcctaaggctctacttcaaagtgctggctattcaaccaactaatctgaataggtatttggatggtgaggtaaaagctattttaaggtctgttctcatctcactttaataaggtgaaaaaaattgccatatgtactaaaaatagttcactgttctgaaactcaatgcctgtttgccaaaacaatattaatgatgcatattctatgcattttttccccaaatatgggcatctgccgtgcacaaaattcaggaatgggaaaccacgagatatttgaaataacaccatcctcttacatgggttaaaaaagtcaaatggaatccagttacttttaataaaatgggaatgttacttaaaattaggtatctccaaacttttggtaactccanggtttttattggggcccaaagggggctgtggatnctgggttttaa

SEQ ID NO: 462950 - DNA, 309 bp, Homo Sapiens
  misc_feature (111)..(111): n is a, c, g, or t
  misc_feature (292)..(292): n is a, c, g, or t
aaattcataaacagtaacgtcatgggttgatacaaccagctataaactgggaaactacttgcattcctagcttttactccagcagtgataacagtttggcagtgaaatggnaaagggggaaaaatgaagatgatgacactgatggtctgggaaagcgaagtaaccccatttaactgtgggtgaaacatgaggacacaaaacacacacggaggacacagacacaagctgggcttttttgtcgacgctttcttctttcacttgaattcagcccttttcccactttgggaaggcnttttcaggatttttagg

SEQ ID NO: 462951 - DNA, 330 bp, Homo Sapiens
attaacaccctcataacccattaaatcaatatttattgagcatccatctgccagggcactgtactagatgctgacaaagacacccccaacaacaaataattacctatcctcatgggaaataaaagatttataatgaaggtattttccattaaatgggtgataggtgctaaaaagttaggcaggaaaagggggctaggggtgggtggtctgggtgaccattttttcaagcttgtcagtccaaaaaggcctcacagagacagtaacttttggggaaaagcctgaagaaagggaaatagaaagcaatgtggtgactgggggaagagccttcct

SEQ ID NO: 462952 - DNA, 477 bp, Homo Sapiens
gagatggagtctcactctgtcaccttagaaactattctaagcatgcctggtttctgtaacttaaatatggcataaaaacctgtttcctttgaattcacttgatagcagtagtcaaacactaataatgcttgctaatttcctctcactttcttaagaaagcccctatatttagcctctgcctccatgtcgcatgtggtggttaggtgacagcataagtacactagtggctttagcactaaactcgaggcctgggtcacttctcccctgaagaagaaaggtttaaaaattcctaaatcacaatgtagaactaagttacaccctacctcaggaactgcagatattaaaataccatctctttattaagtgttctctacaattaaggatatttgctaaggatcaagatgtacaattttttgggttctgttttgttttggtaaatattgcccacgtctttttagtttgcttcaaacatttact

SEQ ID NO: 462953 - DNA, 538 bp, Homo Sapiens
ttttttttacagctgtgagaactgcagactgagaacaataagtatttttaaaataacaaccttccgagtgaccaccgacgcatcaaatactggattgggcgtggtgttattataagaccaagagaatgtaaaacatcctgtaacatatcttagtagaagatctttgccaagggaaagaaatctgtcttctatctaagaggaatgtttggtaattgtttgggccttggataaactcaggccatacgtcttgggccaggcatttacattatggactaatcatagagccctgcagtgaatatagacattgtggagtaagagtaggttaccgagatggtcatggcagctttgacactcacagagacatgcagcctgtgtccggatggggaacatttcagggccaagaccctttctttaaaagggaaaaatgtggaacgctggtattcccctgaacggaccccatctaagtgggtcctgaactcccagcctgtgccatcagataagaatgtcaacatggcagagggcgaaggtaagaagggac

SEQ ID NO: 462954 - DNA, 364 bp, Homo Sapiens
  misc_feature (301)..(301): n is a, c, g, or t
ccatacttcaaaaatttttattgcataaattggtatatacttgcacatgcacacaaaattattactttgccaaatgaattgccagagtattcctttggatagacatctagcacataatgcaactcgtgtacaatttactctaggacatttatgcttatgacataatgtatccaagcacatgatgcttatgacaaatatagctgcatgatgacaatcgtggacagtcaatggctgttatctggggtaaaaggtcaaaaggcttatctggggtaaaagccaacaagctgatgttgaccatcanggcatcacagtctcatcacaggaactttcctactggaaacatttttacaagttgcttaacttt

SEQ ID NO: 462955 - DNA, 442 bp, Homo Sapiens
ttttttgtgataaaataattgcattatttattaatgacccaacgattttcttatacattatgctgtagagcaattccgcagccattatcttctttgctcctaagaacccagaaaggttatccttttatttatcagaaatcaccatgttaaaatgcaaatacttaggatcggtagcctcaacccttatcttctaaaacatctttagctatccatacaaagcaaagcattaataggaattggactgacgttggaggtggaaatactgatgcacgtgacagctttaaggacttgggcggctaattccccactccccactgctcctcagatcctccaaaaaaagctcaagtcctaactttgaccaggtttgacaaagaagggagaggaccaggcgttttgtaaagtgctgcttccaaacgccacccgtcaggacagattctaaacc

SEQ ID NO: 462956 - DNA, 449 bp, Homo Sapiens
  misc_feature (99)..(99): n is a, c, g, or t
  misc_feature (367)..(367): n is a, c, g, or t
  misc_feature (376)..(376): n is a, c, g, or t
  misc_feature (399)..(399): n is a, c, g, or t
  misc_feature (410)..(410): n is a, c, g, or t
  misc_feature (423)..(423): n is a, c, g, or t
  misc_feature (438)..(438): n is a, c, g, or t
tttttttaaatggaagcagtcatctttatctccaaatagaaggtttcaggttactaattgaaatggacccgttcaatcaatccatgttctactaataanggccttgcagagcgtgaacttctggaaaatttcaccagacataagcctcagaaaatcatctcttgccttagccatttgttagaaatataaacattcatttccatgggttactgcagttcttgagttcctgcttaaatctctaatgttaacctagtttataggaatctatgacttggaaataaggtcagattctgataattagttgtgatccatatttttgtatctgataattagcttatagccgcagtgataattgggccctacattnttgggaggnggcatattttaagaaagcaaagngctcttcatgngctctgatcttgncctctgctttattanggggttgttaa

SEQ ID NO: 462957 - DNA, 518 bp, Homo Sapiens
gacagcaagaatacacacattcatgtttgcttatatatgggtaaagaaactcaggaaagttacaggaggagctaataacagtggttaattacaatggtagaggagaggcttggcagataagggactcgtttgcagatatgactttcctttgtgtacatttctatatattattttacttcttctgaaaatgccacataatttgcaataaatgattcactccttagctccaaaagcaagtcctttatcaaaatgcaaatgttccagagggatgtagccagattctgtgggaccgccgtctttttcacccttaagaatccgtcgctatgatttctcttcctctgcttgggagacctttaggagagccagcctgcagctgcttcagagcattgactactaaacagctcatagttgctattgctggaaaatgcccggtggttatgccttgcctgaccgggggtagcccacagctgatgacaggcccccttggcctcaaggtggggacaattcggtggtgcctt

SEQ ID NO: 462958 - DNA, 415 bp, Homo Sapiens
  misc_feature (369)..(369): n is a, c, g, or t
  misc_feature (385)..(385): n is a, c, g, or t
  misc_feature (400)..(400): n is a, c, g, or t
ctatatattttaggttttatttacttgtttttccctaggttcttagattaaatgtttatataattgatttttagcctttatttttctaatacatatttttaaaaatatattataaatttctctctaagttgggttttaactgccttccacatgtgtcaatatgtagtatctcaaaatgaatcaaaaaaattcttatttgtacttgaattattttttggccaatgggttaattagaagtgtctatcttgttttccaaaaattttagcactttttaggttattatttttaaaattttcatgtttagtgttaactactagcctgaactctgctggttaaaggaaaatgtattctatatggatttccaattcnttggaccaattaaggnggttatcccgtatanggggccctccattgg

SEQ ID NO: 462959 - DNA, 516 bp, Homo Sapiens
  misc_feature (44)..(93): n is a, c, g, or t
ttcaacgttagagaagtgcagatgccatgagccttggcctgggnnnnnnnnnnnnnnnnnnnnnnnnnnnnnnnnnnnnnnnnnnnnnnnnnnatacctaagcacagctccgttcttctcctctcaccccctctgataaaagacatgtgcatctgcctggggtaggaaaagtttgtaactgctggaagatctgaattataaattgtgctttctctggcagagcaagttaatatgaattcttaaacccccgagtagcctgatatggtttggctgtgtccacattcaaatctcaacttgaattgtatctcctagaatttgcacatgttgtgggagggtcccagggggaggtaattgaatcatgggggctggtctttcccatgttattctcgtggtagtgaataaatctcatgagatctgatgggttttatcagatttccacttttgcttcctcctcatttctactcttgctgctgccatgtaagaagtgcctttcaccctccgccatgatcctcccca

SEQ ID NO: 462960 - DNA, 566 bp, Homo Sapiens
  misc_feature (421)..(421): n is a, c, g, or t
  misc_feature (453)..(453): n is a, c, g, or t
  misc_feature (486)..(486): n is a, c, g, or t
  misc_feature (491)..(491): n is a, c, g, or t
  misc_feature (504)..(504): n is a, c, g, or t
  misc_feature (512)..(512): n is a, c, g, or t
  misc_feature (532)..(532): n is a, c, g, or t
  misc_feature (542)..(542): n is a, c, g, or t
ttttttttgaaaaccatccaagaacagttactgcagcctacactatgtcatatttttcagtaggtgctaaaagaatctttggaaacaaaagccgatcctctaaaacaaattaaatgtttttttaatattatgcattttgtaaaagaatcattttatagccctagggattaaagtaatcactgatattttaatcattttaatgtctgttatgctaatagcttgctaatagctaaaatactccaaattatccaacaaggtgacaggggtaattgatgctcattcgcttgaatcacaaactctttctgggtacataaaaaaatcaaagggcttccaaccggggggataaccacataggtataacttactgttaagggttaggggcagtgggccatacatggaaatagggcacttaatggaattnggtaacttggctttttcaaccatttcccctanttttccggtggggaccggggtccccggttgggnagggnaaaagggcctttnggcccttnttccctttggcccgggcccntttttagggncggcttttgtaggggttccgttgt

SEQ ID NO: 462961 - DNA, 509 bp, Homo Sapiens
  misc_feature (468)..(468): n is a, c, g, or t
atcacactaagtatattttattgtgcattaattagatgaaagttagtaatatgcattgaccaaaacatttgattgacaagaccataaaggataactgagagttttctttaatataattgttgtacagcaaggattcctgctgtatagagtatatagaagatgacatactctaggaattagaacaatatatattcaatacaataacaaaactatatagtactttaagaactctttcacatatatgaacactcttacttaggaacttcagctgtttaaagtaaggcaatatgcaagcctataaaggtacacaccaaaaaaatctaacctacaaaacacccaaagcaaatgttagcatatctctattatcaagaatatcttctcaccatcgtttctttcaaaaatatgtgaaaaagttctttctttccttatgagtggcaatttttaaaagtcccctcttctgaaattagntatgttccaatccactatcactcttaagggaaaatggaacc

SEQ ID NO: 462962 - DNA, 544 bp, Homo Sapiens
tagaataaggatgatctgagtccctaaaaactaatgcaaatagaagcgttactaattcttccatatttcagaaaacttcattctgtgaagtgctccattcaagactaagttttgggtgccattaaaaataattctatgaaacatacccaatagcactaatcttgttaacaaactagttggttgtagtttggcttattggttattgtggtatgtatcagttcagaatcaagatcagaaactagttcctctcattcataaacatacttatattcttctgcatcagttcttatacttacggctcttccttaaagaaattaactcataaatacatattgtaaagacaccctcttatgccaatattaaggttgtaagaattattcattgcaatcacttggatccatataaagtaacatactattatatgtacatttacaaatagagtaaacatgaaacatagtgttttaacctttgttctgaagtgagaagatgagtgaaagtaattatgttcttccagcattttggctatgtcacttccaaatagctc

SEQ ID NO: 462963 - DNA, 550 bp, Homo Sapiens
  misc_feature (74)..(89): n is a, c, g, or t
  misc_feature (142)..(153): n is a, c, g, or t
  misc_feature (431)..(431): n is a, c, g, or t
  misc_feature (468)..(468): n is a, c, g, or t
agaaatcgatgtcaaagggcaagctaacagtctcatttagaatgcttctcccatttcaaaactggtgccttgannnnnnnnnnnnnnnnatggcaggaacaattcagaaacagcttaaatcattcagtcttcttcttcttcnnnnnnnnnnnnaacttgctgcattggtaacccttttcattcttgtgtaagaaattggaactgtagcacataatgatgctttggtatgaaataatggtaggaataaaaatgatttcttctgagaagcctgtgttaaagcacttggatactgataactggcttacagggaggctgatccaggtggtcttaaaactggctctcctgaacgccactcaagccccagtcccatctgctcctcctttgttaactcctgtcagttgatgcctctcctagggagttttctcccgctngcaggcacccccgggggaacacccgagactacaggtncagaaatgggattccattccagctgggggtgctaactcacaatattcatctttttggccatttcctcatctgtgggatggaa

SEQ ID NO: 462964 - DNA, 433 bp, Homo Sapiens
  misc_feature (211)..(211): n is a, c, g, or t
  misc_feature (243)..(243): n is a, c, g, or t
  misc_feature (270)..(270): n is a, c, g, or t
  misc_feature (307)..(307): n is a, c, g, or t
  misc_feature (377)..(377): n is a, c, g, or t
  misc_feature (409)..(409): n is a, c, g, or t
cccatttcaagtgtacaatttaatgacttttaatatgtttacagatttatgcaaccatctccacagcaaattttagaacatgttcatcacctcaaaaagaaatcctgtaccctttaactactaccctgtcttcccatcccccacgaccaagcaactactaatttactttctgactgtataggaattctctgttctgggaaacttgatgtgnaatgggaatgatatatgtgggccctttgtganctgggcttctttcacttaccatcatgnttttcaagggtccatccatgttataggcatggtattnggcattttattccttttatggccagttccactgtatggatatgccacattttgtttgttcatttatcagncgatggccatttgagttattcccatctttggntattatgaataatgccatttgtgt

SEQ ID NO: 462965 - DNA, 252 bp, Homo Sapiens
gaaggattgcaatatatcatttattgacatattagaaacatctaaaaggtgtcattacatggattttgatacatctttgagcacatcatcagcttgagactaggaaggaacactgtagagaatcagttcaagcagcacatgatacatctgaggcaccaacacacaaaaagaaagaaggtcagacacaacctacatttgcaaggtaccatttacttgatgaagttctaagagagttgacaatgggctttttaa

SEQ ID NO: 462966 - DNA, 496 bp, Homo Sapiens
  misc_feature (181)..(194): n is a, c, g, or t
ctgatttaataaaaaatacatttacttctaaagtatcttttaattttcaacttcaaagcagtcccactctatatctgagatgactctaacttctacattataaaatccatactctttctccattatcttctttggaagatcattctctcccagatcttcccggatttccttgtatatgggnnnnnnnnnnnnnnaatgtgtgccagttgtatgtttgcatgtacacacacatgcatgtatagaatagtgctgtcttaggccagggttgcttggagcagagcctgagatggggatttggacgcatagggatatactgaggagtgggctccgagggaaagggagtaagagaaaaagaagagggcaagaaaagagttgggcaagggttggtttcaactggagcatgaattgcaccacccagatagtttgaccttgagtcaagggagccagcctttgaaccctggtaggtgaattctgggctgccctgggaggtgggggg

SEQ ID NO: 462967 - DNA, 505 bp, Homo Sapiens
gtaaggaaaggaacagattaattttcatttgtattcattagacttctaacagttttagaaaaatagtgtggttattcagtatgtttcttatttaaatcgggttatcataactattacacttaaggaagtccataagattttctgcagaacatttttaaacaaacatttgtttctttttctaatttaatagtctctcagccctagttaggcaagtgggaaagtaggttcataaaacatcttcatattgcatctcaacattaatgcatgagtcagtcattgaaattgtgccccagtttgcccttaagtaatacataaagaaaagaatatcccctattttgataatgtttgggggggataagtattaggttaatccactactaacttgtccaaggcttatataacagaattatccagtgggctcaaaaactacttaataagtgaagtgacaaactaatccatgcatgctactgaaattataacaatgaataacgcatgcactctgccc

SEQ ID NO: 462968 - DNA, 569 bp, Homo Sapiens
ttagcgtggtcgcggccgaggtacagaagatatttcaaattgttttcagtgaaaacaagtccttccataatagtaacaactccacagatttcctctctaaatttttatgcctgcttttagcaaccataaaattgtcataaaattaataaatttaggaaagaataaagatttatatattcattctttacatataaaaacacacagctgagttcttagagttgattcctcaagttatgaaatacttttgtacttaatccatttcttgattaaagtgattgaaatggttttaatgttcttttgactgaagtctgaaactgggctcctgctttattgtctctgtgactgaaagttaggaaactgagggttatctttgacacaggaattgtgtggcaatattcttaaatactactgctctaaaagttggagaagtcttgcagttatcttagcattgtataaacagccttaagtatagcctaagaagagaattcctttttcttctttagtccttctgccattttttattttcagttatatgtgctgaaataattactggtaaaatttcagggttg

SEQ ID NO: 462969 - DNA, 549 bp, Homo Sapiens
  misc_feature (529)..(529): n is a, c, g, or t
  misc_feature (533)..(533): n is a, c, g, or t
tagaacttggagaataccttgtacccctgggccttaatgtccatctccaggcagtgcatgaggtcgctgttgtctaggaccgccttccagggcccaaacttgacaacagacttgaacatcttcttatcctgcagaaaacacaggacctctgaataataatgcatcctgctccctcaagtttccaccaggcacacaagcacgctggacttccgtgctgttatggcttctgcacgtgccaggcgcaccatgagctcccaggttctcgctgtagcccggcacttgcagcaaaaactgcttccgagacacctgctcaccaaagatctgtggcatgtcctccagcagcttgaccaaaggcttgatttcgtagaactgagcctcacggtacacttcagggatgtgctgtgtgggcacttgcccagtgcgcaggtagtccaggatgggtctgaaataggtgctggggcggtcgatgaagaaggggccctccgcgtccgtggaggccttggctaagctagagaacatctctgccagncttnagcccggaaacttcct

SEQ ID NO: 462970 - DNA, 579 bp, Homo Sapiens
  misc_feature (376)..(376): n is a, c, g, or t
ggattcacactggtgtctttttattggattttccgtgggcaacctgggtgcttcgagctccgctctggggcagtgggagctgcccttcctctcccagcgccttataacaactgggtcctctgctcctgggctcaggctgctgccttgagataaacccagttttcccactgccttcttcttcacttgtgccaggctgcccagccaggggcatggccggggtgtcctgggtagcaggcactagttcagagccccctggcagcagtacctgcctgttgtaggcccctgtcgactccacagtgtacacaacaccatgggctggcctacagcttggtgttgaggtggaagaagtggggcgctgcataggttgtgactggtngttgcgtgccagggagatgaggccgggcaaagtctgtggcggagggcattttcgaaggacgttgggggggaagtgcatcaggccagcggccatgggcgaggggccctgcggtggccaggaagtgggccgggaaggccgggatgaccagggggctgaaggggagtgcagcctggcccttcaaggggcccggggtgccagtgaag

SEQ ID NO: 462971 - DNA, 458 bp, Homo Sapiens
  misc_feature (75)..(75): n is a, c, g, or t
  misc_feature (92)..(92): n is a, c, g, or t
ccatggttaacaaaaacttgggggccaaggggtcctaggactccaacttgcctttggaaagatccttaaaatctnccccattccatttggtnagacagcagtgggccctttttccttccctcctgctctgcacgaccttcctagccccaagtgcctagtatcaccttttccctaaagacttttaagacaaactgtgaccatttatgtctacatgacacagtttcaggataacaaagtgtgaagacacacaaagacgtcaaacatttatcagagacctacgcgaaacgccaataaatgttacagggatcaagaatatggttactgacattgaatgtatcctgtggctttgaagaatccaaaggatgattctcgaataatgtatccttccaaattctccagaagttctaagtttagacatcataatgaaatgtcaccacgttcctctgccagaagttgtt

SEQ ID NO: 462972 - DNA, 403 bp, Homo Sapiens
  misc_feature (37)..(37): n is a, c, g, or t
cttgcccctcgcctgggggcctaacaaaggtggtgangcaaaatcaattcatccgcccaggtcctccctcaatccctccccagggtctggctcttcgtcgctgtaagcccaggaccaaagtcctgtagctcatagtctgccggtgtgagagggggcccacatccccgttggctcggggacgcacgttcccattaagcagggtgctggctgcactctccatctcgtcgatggtgaggtcacaggcatcagcgatttcgtgttttgttgctgacacaaattttgggtcccttgcatagcgtcccaagcttcggatatcaggactgcctccaccaaactgtccgcactcctctgcttgtcgctgtttttgttccggaagctgctggggacagtcaggtctgctggt

SEQ ID NO: 462973 - DNA, 350 bp, Homo Sapiens
  misc_feature (24)..(24): n is a, c, g, or t
cccaaaaacctttacatggtaaanaggccaatttccgggaactccttccactagcaatgacaataagagaggggcccatgtttaaaatgtttaaaactattttatgtcctagggtgaggatcttttcccaacattactaaatattcaacatagcttctcttcttttttgttttctcacctactacaattggactgttaaagcaacattgaacagttatcactattttgtcattaataattattggcagagattatctttgctgttaaaaatactaagagcattggctatgtagacatattttttacaactttgaaacctttgtacatttagaggaatgagagaagtttga

SEQ ID NO: 462974 - DNA, 467 bp, Homo Sapiens
  misc_feature (14)..(14): n is a, c, g, or t
actattgcaatganggtcaaaatcttccaaaaactctcgggaacacatttcaggatgggatcctgccccccatcgcctcttagtatcatcccgcttttggggacaaaaatggcaggaacatctcaggacaaccttccctcccaggatgcaggcctcacctctcctccctggattttctactctgccagacattcctgttccggtttaatcagggaaagtgggatttgacaagagccccttctgctggcccgtcagggagtcctaatctcagaagtgtggccgagctggtcgtctccacaagccaagcagatggccgctgtggggaacacaccgagtcctggccctctgcagctcgcagctcccatctattcctcagctcccctgttgatctgtttttcttctcattgagacagaattcttggagaatagatggcaatgacagagaacagggcccacgtgggatctgt

SEQ ID NO: 462975 - DNA, 461 bp, Homo Sapiens
  misc_feature (219)..(219): n is a, c, g, or t
  misc_feature (388)..(388): n is a, c, g, or t
  misc_feature (423)..(423): n is a, c, g, or t
  misc_feature (440)..(440): n is a, c, g, or t
tttggtctcagggaagtagcaggcgccggttgagagaactacggccctgtcggaaggtaacctccggtgcaaacgaccatcggcggcaggcgagcggtacgttggcgtccgggccttcctgggccgtctgaggaaacttgctgctcgaggccaggctgcctaggacctgtcccttttttctatactggctcccacatccgggttttttctccgggacgncccttcggatgcttgggccaatgggaatcgccatttagggtgctccgcccaccgggtcgcgtagagcatcctggaagtcgtagtaaatctctcgagagttctctccgcacgcgggctgggagaagcgggtcctacggcacgctttgtttttcgcgctttgccttccgtncctttccccctacttcccgcctttacctggatttnctttttcggagggaagntccttggagcagccgacgttt

SEQ ID NO: 462976 - DNA, 610 bp, Homo Sapiens
  misc_feature (122)..(130): n is a, c, g, or t
cccaatttcccagatgttggctccctatgtttcctgccccccggaaatccccagacccaaaaggaaatccccaacttcgaaacccttggccttaatcccattggaaaaaccacttggtggtnnnnnnnnnagggtccgtgtgtgaagctaaaatagaacatgaaggctgaagaaaatgcagggttaggggaagaggaaggagggcagagctgctctgtgggccccccaggaagtgtggctctgaagagggctgtggcccttatcagcttggggcctacaagcatcaaattgagatgtcatcttgagtcaaagaaagatgaccttgatggggcagttatgggtttcagtgggagaggggctcctcatttttcttctcttcacagttaggtagggattcattaactcccccattcactcacacattcacgcatccagtcatccactcagaggccaaccagtcacacattcactcactcacaaaaacacaggttggatgaccatcatgtccagcggcataggttggggataaccctgagttcctggtgcagaaaataagattctcagtttttgaccttggattgagaaggacctatgaaatcaagatagacct

SEQ ID NO: 462977 - DNA, 446 bp, Homo Sapiens
  misc_feature (26)..(26): n is a, c, g, or t
  misc_feature (32)..(32): n is a, c, g, or t
  misc_feature (37)..(37): n is a, c, g, or t
  misc_feature (54)..(54): n is a, c, g, or t
gtgtgtatacatacatacatcataanaatttnaagtnatagcaagatacattgnacttttttaccctggaaggtccttcctgaggtaatcaagtcccaagttgccacccattacagaaatttcctatctgtagcattccacaactggtggacatttaaatgttcccagcctaaaactgtcaccctttgtttaactatacattatgccagcagtaagagttaattatgggagtgcctcattccttgggctaaaatcttcacattcttctcttagtaattagagtttgtattaagtctaatattacttttttattattttaaataaaataaaatttcacagaattagtgatagttatattgatgtcaatatgttctaggttcagaagtcagtagaggattccaacacagaagataaatgaacatcatgttcaaagctgatactatcca

SEQ ID NO: 462978 - DNA, 388 bp, Homo Sapiens
  misc_feature (40)..(40): n is a, c, g, or t
  misc_feature (378)..(378): n is a, c, g, or t
agccaagctcgtacgtcctggtcagaggcccgaagcaggntctggagttgcccagtgatcgggaagtcttgcacccgtttgttcgaagacatgccctccaccggaactccctagagggtggacacacagaaagtaacacaagtttgccaagcggcatccaggcttctctcacctccattagctctttaccttttgaggaggatgagcgggaggtggcactcactaagttaaccaagtctgtatctgctccccacatcagtagcccagaggaggctgctgaagatgcggacaccaagcagcaagatgggaggttttgcttgaaccttcagatatggcacagcaaggagccaaggtttccccaggatctttgttttcaanttgttggtga

SEQ ID NO: 462979 - DNA, 204 bp, Homo Sapiens
tgagaatcaagaacaaagccagcgaaagaggaggggagtgaataacctttcatttcaagctgctttccccactagagacagtcatgatctgtacagcactatttgatgcaaatgcctctcagaaaagagccagtggataatagataaaaagattatctgtgacattatgaaaaatgaaagtttaaaaacggctacaagtcccat

SEQ ID NO: 462980 - DNA, 468 bp, Homo Sapiens
atttggaacattttacgtgaaaaaccaatcccctggtgctggcagtgaacacccgggtggcccacagagacgtgaagggatgacaggcggcggtggggaatgtaagtggctggtaactaatgggaaggttgcccagggaggtgatgcaaatgctggatgtgctctcggtcccactcatgcctcttgaatttgccagaaggtgtgaccgtctccagacagcgagggagtgaggataataatataatctcaagtgatagtcgtgacaggaaccccacgacgtgttctcccctgaatgagctgggatcagggcctcttagcgagtggagtgttggaatacaactgtacaaagaagagagggctgtaaacaggagcctccaaccgcccagcccaggctctgtggactctttctttctggtctccccattcacccaccgagtctccccaccatcgcccttcattgccctcact

SEQ ID NO: 462981 - DNA, 473 bp, Homo Sapiens
  misc_feature (450)..(450): n is a, c, g, or t
tgaaaggtttcttctacttttcctctatctcttcacctcctctactttaagtggagatgggaaaaattgtgtaggatgcagccccacgccagcagagcccagcaataactttagatctaccagtcaaatcttgtcggctattgctctgtgcctctgttacagaagcattaatgttaattgccttccccagggatacaaagaagtagaagtaccaaaggaaagggtagatatttaacagatgcctcagtgataaggaaagatgcctccttgtgtctcactgttttctaggcactgaaacatggatacactttgtatccacctgcagaataaagcaatccagacaggcgctctgtaacttaggacatcacttgattaaaattatagtctccaaatatagtgttttaggaaaagggcactggcacatttttaggagggcatgtggaatgtccnttcccacctttaacccttttaac

SEQ ID NO: 462982 - DNA, 484 bp, Homo Sapiens
  misc_feature (13)..(13): n is a, c, g, or t
  misc_feature (37)..(37): n is a, c, g, or t
  misc_feature (48)..(48): n is a, c, g, or t
  misc_feature (121)..(121): n is a, c, g, or t
gaacaacttttanggtccgaaagatcaagctggttanggtaaaaagancccaacttccttcccttggcccagcatcctaaaatgctgtttcctcccccatgtggtgccccccactgcctangggttgaacacttttgttgcaaaaacattccccactgattaattctttggagggaaactgtcctcttgaaggttttaggttccccagtcccaaaaccagcactaccaaaagctatacgtgtcccatcgttcctcaggcaacacctgcaaataactatcacgcatctggctgcttcaaggttcccagactctccagagtcttagaaagcattgcagcttcctcaccagagactgaactcacgcaggaccaaagtcacccttcatagctgggcttttgttgttctaagaaactcattaactataaggccaacttccatttggaatgtgctctgattgtactttactctctgtagaatgcgcttgc

SEQ ID NO: 462983 - DNA, 381 bp, Homo Sapiens
  misc_feature (25)..(25): n is a, c, g, or t
  misc_feature (32)..(32): n is a, c, g, or t
  misc_feature (37)..(37): n is a, c, g, or t
  misc_feature (70)..(70): n is a, c, g, or t
  misc_feature (77)..(77): n is a, c, g, or t
ggcacctgttcacttagctgaaagnaagccgnactcnccccaggtcaggacaggaagcagcgccgaagcnccgagcncttctcaccgcgaaacaagggcgcccgccgggtgtcggaagcggatgtatgtgaccgcctccttgaggtcggacgggtccccgaaaggctgcaccgggggctgaccagtgggcaaccgtggtggccgcggcgatggaagatgaccgggtagtagccgcgctccagggcgagcaagcaaaggccgagcacgttgcgggtgaggcgaccccacgcattggggatcaccagaagcaccgcaggaagcccccggcgctggtgatccggcggccccgaacagaaggtcctaccacccagtccagggcca

SEQ ID NO: 462984 - DNA, 399 bp, Homo Sapiens
ttttttttagcacaccacagccaccatacagacaggagtgcagcccctcctccctaggaacccccacccctactcttcactaggcagggcccatggctcatgaatgcagaacagtcaccccagccatggctgaggcatacccactgttagtgacacagagtttccctgagaagaggctcccaaaggcatacgacagccccttggccactgccacagtaacagtgctatccctcctgcccttgggactaggggaggacacaaagagcctaagggctacacttcaaacttaggagtacatcacaggccaccatatgggagagggaggaccaaccttttccttccctgtgaggcctttcaattgcctggttccccaacaaacaggaaccccaaggtttatgg

SEQ ID NO: 462985 - DNA, 403 bp, Homo Sapiens
  misc_feature (50)..(50): n is a, c, g, or t
  misc_feature (89)..(89): n is a, c, g, or t
  misc_feature (132)..(132): n is a, c, g, or t
caacaaaaagtggggtgatcagcgaactcatgaagataaatgtaggtaanaggtataaggatagaaaactgtttggcaggacccagttnaaagcagaacgtgaatgccacgggtgtcataaacagagagatngcatgccgtgtgcatgtgcatgcacatgtgtgtatgaagagacatgcaaaagaatgtccattgcagcactatccataacaactccagatggaactaacccaaatgtttacctatagtgaatatgattacgctatgctatattcacatgatggaatactttagagcaaaaacaatgaacaaagtacaactaccagcaacaatataagtggatctcgcctatataatgttcatcaaaagaagccagtatgtactgtatgattccaattacata

SEQ ID NO: 462986 - DNA, 432 bp, Homo Sapiens
ttgccatcaattgttcctcaaactgtccccccagctggcccccccatgttccttgctcctcattccccacccccaactcccctcatctgtgaattccactccacagtgaggacactggcccctaatcctaggacccaacccaaatactgacgggaggttaacaaaagtggcccttgatgcaagaagccctgtcatttacagaacaccttcctcaggaaatggtcccgaggggtcaccccagggccttcccaactctcagcacaatgagaaaggaatgctggtccagatacaagaccagaggcagactgtgggccttcagggagctcaattctacaaaggtgaggctatttatgtctcgaattttccctctatacttgtagagctagaaagggtgagagatctagcatctaaataggcatgcagacttttttg

SEQ ID NO: 462987 - DNA, 558 bp, Homo Sapiens
  misc_feature (459)..(459): n is a, c, g, or t
  misc_feature (475)..(475): n is a, c, g, or t
  misc_feature (536)..(536): n is a, c, g, or t
  misc_feature (542)..(542): n is a, c, g, or t
tggaggtgatttatttttatacataacacctaacctaacatgggtaagagagtatggaactagatatgagctgtataagaagcataattgtgaacaagtagattgattgccttcatatacaagtatgttttagtattccttatttccttattatcagatgtattttttcttttaagtttcaatgttgttataattctcaaccagaaatttaatactttctaaaatattttttaaatttagcttgtgcttttgaattacaggagaagggaatcataatttaataaaacgcttactagaaagaccattacagatcccaaacacttggggtttgggtgaccctgtctttcttatatgaccctacaataaaccatttgaagggcagcataggatggcagacagtaggaacattgtttcacttggcggcatgtttttgaaacctgctttatagtactgggtgantgccattgtggtaganctccactgctgttataatccgagagagtaacccagaggagctttttcctttaactgcatgnaccgtnccagatgttaattccg

SEQ ID NO: 462988 - DNA, 442 bp, Homo Sapiens
  misc_feature (17)..(17): n is a, c, g, or t
  misc_feature (125)..(125): n is a, c, g, or t
aaaatgtagcatctccntgaggaaccttaataagttaaaaatggagccataacgagatgtgcctgaataacaagaattaaactagtatgtggggtgatttcctgttccaaggggtaggatgacanctttgcatcttgcaacaaagtgtgtctgacatatagctttgcaagcctgggtctagtcacttacttggatttgtagaaccaataaagcgagtttcgcaactttgtgtgagtccacactctgaattgaacccattttatgtaggcctcccgtcttaacccgttggcatccatttgttgatataatctagcgttattgtattaagcttgatcttgttcttgcgtgcctgtcgtttcagtgattaaatgatgaatctgtgagtccttaactaactcattatcttggagtgttatatagtcgtattttttttctcccacac

SEQ ID NO: 462989 - DNA, 466 bp, Homo Sapiens
  misc_feature (12)..(12): n is a, c, g, or t
  misc_feature (34)..(34): n is a, c, g, or t
  misc_feature (62)..(62): n is a, c, g, or t
aagcctggtagnccccaaccaacaataaaagganggcactaattaaaccccaaaactgcaangccaataaaactcaaaataacattagtggcatgtaaaggattatattgttttgctgaaactaagttgcctgctttccaatttgaaatacggtgccgactgcaatggccccagattccccttgcattcatcatgccctgagctgcccacgtgcctacataaagacccccatttcccgaacatttttctcccttctaaaaacagcactctgtgatatcatttggcctatacttgacgcagatgcatttttttaattaagcctattttttctcattagaccatgacaattaatgaatttcaactcaggaccgaccaatgctccagaaaatccaaatgcactaaaaatgaatgaatagaggaataggtgcttgtggtattaagcatcatccagatgatctggaataag

SEQ ID NO: 462990 - DNA, 437 bp, Homo Sapiens
  misc_feature (14)..(14): n is a, c, g, or t
ccaaactttatcangtccacggacatgatttgaaaagtggaaaccttttgtataaaagtctggggaattcctcaccccatatcttaagtatttcctcctggctggcagccccttaatataatcagaaaagtaaaatataggttacggaatactccttaaaaattattttggacccactgagtttgtttcctagttgattcatcctaattagagacattacaaatcattttatatgattaaacttatgtgagtgttgttttcctggagattgggtctcattataagcattctaatttgggccccattgaattctctctttgtccagcccttctaatccaagctctttggaactcacccacaagttgtatgaatttggacagacctatattttgcttttcctctgacttattctgtatgcagtggatctgagtagcaga

SEQ ID NO: 462991 - DNA, 639 bp, Homo Sapiens
  misc_feature (585)..(585): n is a, c, g, or t
  misc_feature (605)..(606): n is a, c, g, or t
  misc_feature (618)..(618): n is a, c, g, or t
gcgcaaaggcacgccacgtctgctgggccgggccacaccgggcctgtctgggtgagcaggggctcacacaggggacaggactgtggtagacccgtcctgtgggaccccacctgcctcaaaatctggtgccccgagtgtttactgtgtggtctcctgggggcagcaccagggtgtgggtgaggatggccaggctccaccctagcgtggaaaggcccactgtgcccacagctggcctgaggcctcggggagaagaccagtcccacaggcgtctcctgggcctgcctccctgaccgcaccccccgcctcctcgcagctgaaatctgagggctgggtgtgtcgtgacctgtgttttcctgggaaggagaggagtagctccttccctggggtgaaactgccagatgtttatacacaaagttattagactgaagcaggagtgggcagactagcaggctttcacccaatacttaacagcatttctggcccacattcctttttctgaagtcattggggccagatgtgtctccgaattgagaaattttagatttgagaaagacaacacgatccatttatcgtacactttctaanttcccggcagagtgtggaanntctcgcctaccntcaggcacgtgaatatttctg

SEQ ID NO: 462992 - DNA, 589 bp, Homo Sapiens
  misc_feature (21)..(21): n is a, c, g, or t
  misc_feature (32)..(32): n is a, c, g, or t
  misc_feature (49)..(49): n is a, c, g, or t
  misc_feature (61)..(61): n is a, c, g, or t
  misc_feature (94)..(94): n is a, c, g, or t
  misc_feature (111)..(111): n is a, c, g, or t
  misc_feature (455)..(464): n is a, c, g, or t
gaaaacactgaaacaaaaacntgtgaaaaaantttaaacccttgttttncctgaccctgantttgtaatccatgtccttgccactgtaaacagnctccccaatgctgtgangggccaggcctgggggaaaaggaaccgcggccccctcctcaggattgggtgccccggccctgctttcctgccctcgtgcccccagagaggcctacgggttagaaaacaacctaaaggggcaggtgggagcagggatgggggatgtatttataaaaaggcatcccaacagttcatggcaaattatgtgatagaagtatcccattaccgggaaaagaggaagaaagtcacgcactctagtacaaagcataagaagtttcttggagtgagcagaaaggggagagggtggacctgaaggttttcatagattaaatccacaaagatcaagaacaaaaaaaatagcagcnnnnnnnnnnctgtacagacgtatagatgaatatctgaaccgtaaaaaagttataaaagtgacattaaagacgatgtgtatgcaaatgtttcatggtctaacatagaactgtaagacccatgaagaagtcctagg

SEQ ID NO: 462993 - DNA, 493 bp, Homo Sapiens
gcgaagccatggcttttgaaatttccaatgggagccatgagttactgtctcagggacagaagcagatttttattcagacttccgatgggcttatcttgtcccctccaggtacaatagtgtctcaggaggaggacattgtcacagtgactgatgcagaggggcgtgcctgcggatgggcccgctagaaggagttcctctagaagctgtggagtcggtcgtcaccgtggagccagagccctcacagtgaagtggagtcagatcctagattcgtctgattttatccagagaaggtctatggcaagcaatgtatatttttctaatgtgaatattgcacagatgaaccttttatttataaggaataatgtctttctgccctgctgtctacatttttctatggagcttgtcataataatagcagatattacctgatcaggaatccctgtggcgcgtctgacgctcatgagtttttcatgatggtgatgagtagcactgc

SEQ ID NO: 462994 - DNA, 409 bp, Homo Sapiens
  misc_feature (339)..(339): n is a, c, g, or t
  misc_feature (366)..(366): n is a, c, g, or t
tacagcttatgtaacttgtccaaggtcagtggtggagctaatattttagttgagattaccttcatcaagacatcatacttaaccacaacactggttaaaccatggatagcttatgattggcttcatagccttacactcagttacctatgctgtccctctgcactctgcctactcttttacttggttgtgtcccttatgcctccaaatatttatgctactcattgactataaatgatagttgaggcaggtttctttaccacaaaactctaacacttttaaatattaggtattgaaaacttcaaggaatctgttgtaggtgttcacagggattggtttggnctatatttttatccccccacctccccngctgtctttcaagggattcatcccttttctcatctcccttccc

SEQ ID NO: 462995 - DNA, 435 bp, Homo Sapiens
  misc_feature (21)..(21): n is a, c, g, or t
gaactatcacctgcctatcanaagaagctatggacagctgtgtaagtaaagacaatgtgggcccaaatccatcaagtccctctgggcccccaagtgctcccccctaatggatatgacaaacatatgccccccactgcccacacactggacgtttacctactgcagggctgtttgtataacaatcccaattaatcaaggtagatagtcatattttttgtaattgatggaaagctagaattgcataactctattgaatgactacatcttttgccatagtatgatagactttggaaagaaaaaggtagactattgcacacaaaaaaaatcctgtggcgatataaacaacatgcccatttccttggctttgagatgatgttaccattgccatgtagggccttctccctcctgcttggttaccttcttcaaaggttatct

SEQ ID NO: 462996 - DNA, 516 bp, Homo Sapiens
  misc_feature (11)..(11): n is a, c, g, or t
  misc_feature (26)..(26): n is a, c, g, or t
  misc_feature (47)..(47): n is a, c, g, or t
  misc_feature (411)..(411): n is a, c, g, or t
  misc_feature (486)..(486): n is a, c, g, or t
  misc_feature (497)..(497): n is a, c, g, or t
cccccaaaaantaataatttccaccnggaaacataacccgtcaaacnggtgtaatcaggaggccccattaagaaggtaaaccttgttacctaaacagaacaatcactgcaagttttcctgaaacagttaattgccaggtgaaggttgtaaacattgaattgcattgccagagagacttaggaggaattccttaaaactgtgttcacatttgtggctgggactactgcttgaaggatgtgttcaagggctgttaatccaccagcagcttgaaatgcaatctgatctgccacattctctttttccagtattctagtgatctctcctagggtccgatccaaagcagacactttattgtttgcccatgagccactgtcttgaacttgtacttgttttagaagatctttggctaantcgctgaagctttgctttataaggtgaatcagagccagaatttttggtttccattaaactctcatattccttagnccctgaagttncatccgggcttttatcttt

SEQ ID NO: 462997 - DNA, 459 bp, Homo Sapiens
  misc_feature (402)..(402): n is a, c, g, or t
  misc_feature (415)..(415): n is a, c, g, or t
  misc_feature (429)..(429): n is a, c, g, or t
  misc_feature (443)..(443): n is a, c, g, or t
cagaatagaaattacgattttaaatccggtagattataactttcattttgtaattggtacatatacttgcagactgctcttagctatggaagctgcttgggaaatagctgatcttccagttactcctgttttaatgcctcagtactatatttctttggggagaaaaaagttctaaaaagactgacccagttaatgaaccagagattttatattttggagggtaaagaaatgagttaagttttccagggtattaaggaacatggggagggtgggggaaaggcacttaatgcggttttgccgggaaatgggggttactgggttgggagagatagggttgcttgtttaggtaaacaggtgttcccctgttccagaaagggcttgccaaaaagggaccccttaaantccccagcttttnagggaaagaccccncttttttagggggnccaggccaaggggtac

SEQ ID NO: 462998 - DNA, 524 bp, Homo Sapiens
  misc_feature (29)..(29): n is a, c, g, or t
  misc_feature (109)..(109): n is a, c, g, or t
  misc_feature (354)..(374): n is a, c, g, or t
aaaggcgggtccggcctccaaaataaccnttgggagggaaaccccacacaaaccccataccccaacccaaggacttttggggcccaaataggtatgggggccccacatnaaccattaaatttagtaataccccttaaagttttccaagttagtgcaaatttaaaattccaataaatatattaaatacaattttactttatattacaaatgtaaattatttttccttttgacatgctggtagtattcatttttacaacgcaaactgactttacaatttctgagtcacagtatattttataactctaagcaaatgtatttcacaaagcaaacactatatgtttttgacatactctnnnnnnnnnnnnnnnnnnnnntttgattataaaatttgtataaacttagctacattaggggttcacagctaattgttgcagaaaacctaaaacacacctaaatcatgtaactttactagcagacaacttgtattttaaaacacaagtcagtttgatttctattaaacatga

SEQ ID NO: 462999 - DNA, 375 bp, Homo Sapiens
tttaaaattttataaaaacgaattaatgtatcccgccatacattccactttaccatattccaaaaaacgcctaaacttaagaaactgaaaagttgaaaaataagaggtaagtagtaccccactgagtgacgttctggcattcctattaaatattcctacattagaagattatagggaaaagggagctgaattctaagagaacaaatgtagagaaggcaaccctatggtcttgggaaaagacaataatggaaggaaaaatatattcaaaatgtattgtacaaattgttagacatgcatcacttacaataaacagaaggtaattatttgtggtagcataaagagagaagggaataggccaggcacattggctcacgt

SEQ ID NO: 463000 - DNA, 407 bp, Homo Sapiens
  misc_feature (370)..(370): n is a, c, g, or t
ttttttttaagtagacatgacagaattttaaatttataaatcgacttaatgtatcgcatacattcactttacatattcaaaaaacgctaaacttaagaaactgaaaagttgaaaaataagaggtagtagtacccactgagtgacgttctggcattctattaaatattctacattagaagattatagggaaaagggagctgaattctaagagaacaaatgtagagaaggcaaccctatggtcttgggaaaagacaataatgggaaggaaaaatatattcaaaatgtattgtacaaattgttaggacatggcatcacttacaattaaacagaagggtaattatttgtgggtagccttaaaggggggaggggnttgggccgggccccttgggcttcacgtctgttaatct

SEQ ID NO: 463001 - DNA, 417 bp, Homo Sapiens
  misc_feature (267)..(292): n is a, c, g, or t
ggacataacctgcctgggtgccacctaaagtagggactcacaaccctcccagtcactgggttcacccaattacacaccctatagtagtgtacatatcctttcattttaaatagcattattttccattgtcactatccccattaagaggtcatagaaacattagtaaaaagtgattgaataccactttgaacttagaacaaagctcagtgggatatttgaaatgtatgctaaagtaataagaaagagataattgatatgaagagatgnnnnnnnnnnnnnnnnnnnnnnnnnngccacattgtgaacacacatgtttgaattctaagagattgatactatccctattaattttaacttctaatagagactttcatatattcttatgctattctgcattcgtttctgaattttttacag

SEQ ID NO: 463002 - DNA, 422 bp, Homo Sapiens
cagcccagatgaacactgttttgaagtaaccccagtatagtatgtgaatattaaactaaatttggaggattcctagaattcctagattggctgccctatgacgaacagacctcttttggctccaattactccctcattttcaggtgactcagagaacttcaagtgaccagcacagtggtacagccccacttgtcgttaatggccagccataaaagaacccaagtttctcagctcataggccaggttcttcagtggttgtctagtttaaggctggtcattagcaatattatggacgacctaagttcctcgaacttatgcagtttatagctttttaagaatttaagaagtggagaaggggaagcatgagaaacttaaaggatgcaaattgagcatctcttaaaatataatggatttgtgtaggt

SEQ ID NO: 463003 - DNA, 507 bp, Homo Sapiens
  misc_feature (15)..(15): n is a, c, g, or t
  misc_feature (47)..(47): n is a, c, g, or t
  misc_feature (67)..(67): n is a, c, g, or t
  misc_feature (78)..(78): n is a, c, g, or t
  misc_feature (149)..(149): n is a, c, g, or t
taacccggggggcanccccttccccccaaaggaaagcctaaaacctnggttgcccctccccaagaangataaaatggncctatgaaaatcctggtgcctccaaaagtaagtgggtaaagaggagcccccaccctctgtgtccctcatgntcccctatatgtcccacaccggaattcagcaggggatctcttgttttaaagtatacaatattaacaggcacactcctgagacaaaacccacatttgataatttgagtgggtggaaaagcctagtccagggaacggggaatgacccctagcttaaaaagtgttttcccccacaacaaaacttaagaggctcagagttaaatctagaaacaatagtgctttttctgtttttctaactggagagtgagaccttagttaccaagactgcacttgctgcttttttttaaagtatgcagttatataaacataaataaatatggcctgcaaatatttttatgtttttctaaattggtgattgtga

SEQ ID NO: 463004 - DNA, 507 bp, Homo Sapiens
  misc_feature (453)..(453): n is a, c, g, or t
gacaattccaggtcacttcgatctgcctaatggactctttgagatttggccagtgaatttcatccagctacctccctatcaaggttataaaccatggtttgtgttttccgtttgggtagacgcactctcttgttgacaggccactacctcagcggtttcaaagctgttgttagaaaaggttatcctacatggggcaaaccctcagacttatatggtgactgaggaaatgcacctcactgggccatgaggaaagagcaaatttgccaaggattggccccatatttcaaccctttccttgtggcttatctcccaatcttccttattggcagaaagaacaaatggcattctcaaaacccaactggtgaaatttgaggaggcattacagctgccctgggacaaaggtacttggctctggtccttttgagtctaaggtatggcactttttgggaaacntaactcgttcacctttgaaattattactgggtgggccattacattagcccattt

SEQ ID NO: 463005 - DNA, 359 bp, Homo Sapiens
  misc_feature (322)..(322): n is a, c, g, or t
  misc_feature (338)..(338): n is a, c, g, or t
tcactctgaaacggattcgaggcagcagcaactgaaccttttgctgttctacctaaaggtgtgcagccagctggccatctccatgctgggagaggcaagacgggagttttttgcccagacctagccctcagccctgtccaagtggaggtgcttcccttagcaaatagcgaggagctggtgatagggatgtcaccagggccacttctccaagtgaagtgggattcctcttatccaggggccccttgctgaacttgcaggctgcagagccttcatcacctagcaccacatgttgcttgagagagcttcttatacacgttatggncagccacctgacattnggtcgggcatttcctgcaagt

SEQ ID NO: 463006 - DNA, 434 bp, Homo Sapiens
  misc_feature (414)..(414): n is a, c, g, or t
taaggatgttgatatacattgtattaaacaagtatacctcaatttaattaataattccagttttgacagacaactggattgtttccagtgtttgttacaaataacactattttgaacattctcacatatttattgatatgcatatgcaaaactcccctctggcatatatccagggtgtttcattcctggggtaatatgggtgtgtccatgtaggcaaataactaggataatatcaaattattttcccaaggttgacaggttttcattctcactgggtatgttgggagggatcactttattgttctgtatttaattaacttaatgttgcctggactaccaaaattatgtagggcctggatacatatttaaatgtgtctcacggggggttaaaatttacatccccccggatatctnggggataccggataggccct

SEQ ID NO: 463007 - DNA, 432 bp, Homo Sapiens
  misc_feature (33)..(33): n is a, c, g, or t
  misc_feature (341)..(341): n is a, c, g, or t
  misc_feature (397)..(397): n is a, c, g, or t
  misc_feature (408)..(408): n is a, c, g, or t
cactgtaactgaatttgcatttcagtaccattncaatagggcacagagttgagaattgagtgcaaagatcatgaggaaggtcagggtattaccataatggtctaggcagagaaagtatacatctttaatagggcaagacaatggagttagacaccttcattcattcaacaaatctttatgtgggggcatatggcatgcccctaggctgctggggatgcagagtgcctgtctgaggattcagccactgaatggttgctagatggtcacgagtatgaggcgctttaaaaatttaatctcatgtgggaattaccatggggggagattcccaagggacccacttncgctgggtgcgtcccgcggcccgtcgcgaggcgtcccgtcccttcccccgagggcngagcgccgggncagccaggggattcgccaccccgc

SEQ ID NO: 463008 - DNA, 484 bp, Homo Sapiens
  misc_feature (372)..(372): n is a, c, g, or t
  misc_feature (388)..(388): n is a, c, g, or t
  misc_feature (449)..(449): n is a, c, g, or t
  misc_feature (455)..(455): n is a, c, g, or t
  misc_feature (468)..(468): n is a, c, g, or t
aagattcaaaaatggattcatttttggacatgcagctaactgaagacctggattccttaatacagaatgcttttgagaaattgaactcttctcctgatgaccaagtatactcatttttgccttcacaagatgttaatagttttaatgactcaagtgagtttataaatcctgattcaagtaatatgactcccattttttctacacaaaatatgaatttgaacggtgaaaatttagaggaattctgggttctactttaagtttaaacccattaccttcacattcagttttggaacgagtccaagtgttttattaaagggataacacattgggctttggggaaggtaactaccccgggaggatttctctttctcnggtaggttcttttaantgtagggccaggtggactcccttcgcgggttgtaggccggtcttcattccaaaaaccgggngggacnttttgggttccgngtgccgttgggggctc

SEQ ID NO: 463009 - DNA, 530 bp, Homo Sapiens
  misc_feature (364)..(364): n is a, c, g, or t
  misc_feature (470)..(470): n is a, c, g, or t
  misc_feature (489)..(489): n is a, c, g, or t
  misc_feature (505)..(505): n is a, c, g, or t
aagattcaaaaatggattcatttttggacatgcagctaactgaagacctgggattccttaatacagaatgcttttgagaaattgaactcttctcctgatgaccaagtatactcatttttgccttcacaagatgttaatagttttaatgactcaagtgagtttataaatcctgattcaagtaatatgactcccattttttctacacaaaatatgaatttgaacggtgaaaatttagagaattctggttctactttaagtttaaacccattaccttcacattcagttttgaacgagtccaagtgttttataaaggataacacattgggctttgggaaagtaactacccgggaaggattctcttctncagtagttctttaaaatgtaggcaagtggactccatcggcaggttgtaggcagtcttcaatcaaaaacaggaaaggaacttttaggattctgagtgcgttgagggntcatttctccgaagctccngtaggtttgggtgccngtggaacctcgggttgttttaattt

SEQ ID NO: 463010 - DNA, 615 bp, Homo Sapiens
  misc_feature (106)..(106): n is a, c, g, or t
  misc_feature (387)..(403): n is a, c, g, or t
  misc_feature (426)..(426): n is a, c, g, or t
  misc_feature (455)..(455): n is a, c, g, or t
  misc_feature (501)..(501): n is a, c, g, or t
  misc_feature (527)..(527): n is a, c, g, or t
  misc_feature (548)..(548): n is a, c, g, or t
  misc_feature (575)..(575): n is a, c, g, or t
  misc_feature (601)..(601): n is a, c, g, or t
tttgttctgtagaagaaaattcttcttcatttttgtcaatataaagaattgcctttttaggaaacaaatatagttatgccttattttcttgagtataaaacttagnacatgtttactactccttctgggcaataccagggcattggaacaattttaattccactggtccctcatcagtttatttttgaaatttaatctaatagacttttaaacacataagacattattctatgttatgatcatggttcatttagatatgtctacatattcacatattctttgtgaaacgttttttcttgtatcttctgcccatttggggatccatcatcttgtacttcctctagaagttcctttcatgcggtctactggtgggaaactctttggagnnnnnnnnnnnnnnnnngtgcagaaatgtctttgtttgtnaatgtagtaatagatgagaatctacattncctccattctggaatgatattttcactgggatataaaattttgtgntggtggtattttccttagcacactgnagataaacttccaccaccctntagcatctattgctgtcttgagaggtncctgtagcctaatacaggtctttganggaattatatcccc

SEQ ID NO: 463011 - DNA, 466 bp, Homo Sapiens
  misc_feature (427)..(427): n is a, c, g, or t
  misc_feature (432)..(432): n is a, c, g, or t
  misc_feature (451)..(451): n is a, c, g, or t
gcatcggtgttcatccccacccccaccccatgagttcagggcgtatcagctctacacattgtaccggggcaaggatgggaaagtgatgcagatgcgtgttttggacaagctgatggttgagcgactttctgcagagaggacggagtgcctgaaccgcctgcaacagcactcagacacagagaagcatgagggggagaaacgacagatatccttggtggatgaattaaaaacctggtgcatgttaaagattcagaatctggagcagaagctttctggagattctagggcctgcagagcttaaatccacaccatcttacttgtgagtcctcttacaggtgtgggaccatttagtggtgactgcaggtcccagcagcagctttccgacagctcccctccagtggttagggcccaaagaggaagggccctnaattncattggttacccagaggantccagcaggagttgt

SEQ ID NO: 463012 - DNA, 493 bp, Homo Sapiens
  misc_feature (26)..(26): n is a, c, g, or t
  misc_feature (40)..(40): n is a, c, g, or t
  misc_feature (75)..(75): n is a, c, g, or t
  misc_feature (91)..(91): n is a, c, g, or t
aaaaccctggaacccctaccttcaanactgaaaccccaanaaaaacctggttgaccttaaaaaggttgttggggncccctaataaaagaanaaaccctgcaaatactgaaaacaaaatatttactgtaaattaaatgaattactcctttggtcctgtgtccccacggcccattttccttgactgaattttatgttgaggaaagaggaatacccagacatttcacaggtgttacccaaagtatgtaatacacatggctcctctctaagtgtgggggcttatggggatcaggtaataagcagagtcctggataatgtccagcttacagtgggtccaggaatacactgacccatccagtagtcattttcttagttcctgagtgcataattgggagtacatattgggcagctggagcaatctccacattggtaagaagctcagggtccttggtcttgagttatcatggtggggaaagccaatgggaagcctctgaag

SEQ ID NO: 463013 - DNA, 458 bp, Homo Sapiens
  misc_feature (373)..(373): n is a, c, g, or t
  misc_feature (413)..(413): n is a, c, g, or t
  misc_feature (420)..(420): n is a, c, g, or t
tctttttcaatgaatggcacataagtagagaccaagattgatgcctgtggatcctactgtgatagtctagtgttggggaaaacaggtaccagacatccataaaactgtgtggtaagtgttgtgctgggtgaagtatggagtgtcatggggacacagggaaaggccctaacctagacataagaggtccaagaaggcttcctgaaggaagtactcagaacaattaagaaactgaagcacatagaggagaagtcactgtcccaaagtcacatagcctgaaacgaggcagagctggtgcagagcaattgaaatgggcattggcacacgggctgtggtctttcgctcgaagcgtgtgctattttaggatgcttgcagnaagttcagtgtttaaggacaacattgaagggtgtttagtncccgttntattggagggattcattacaacttttggcttaccaccc

SEQ ID NO: 463014 - DNA, 414 bp, Homo Sapiens
  misc_feature (403)..(403): n is a, c, g, or t
ctttccccgcgcctgggctggcctctagaccaagacaggagcaagggggacagtgaccccaaacccggctccccaaaggtgaaggaatatgtctccaaaaaggccctaccagaagaagcccctgctcggaagctgctggacagaggtggagaggggctgctgagctcccagcaccagtggcagtttaacctgctgacccatgtggaatctcttcaggatgaagttacgcacaggatggactccattgagaaggagttggatgtgttggagagctggctggactacactggggaactggagccccctgagccgctggccagggctttccgcagctcaagcattgtattcaagcagctgctgatgggacctggggcaaggttgcagcagatcgcccttctgctgnttcaacattga

SEQ ID NO: 463015 - DNA, 392 bp, Homo Sapiens
  misc_feature (33)..(33): n is a, c, g, or t
  misc_feature (57)..(57): n is a, c, g, or t
  misc_feature (93)..(93): n is a, c, g, or t
actggcctccccaaaaagtcccataaactcccngaggttaagcagtgtgtttttgtncaatgctttggcatatagtagacactcaataaatanttattggatcaaagaaaaaatgaatgtattttacagttaaaaatgtctttcttttctctagggtagttactagttttacaaaaaagtatccaacataattggatgctttagtattaaccatgtatttttactcatgttaaatgcactttccaataaagtttcagtactttatttctccagttttatctccagtacactttaaaaaataatttttagtttgaaatgcccactaattttcagagaatcacttttactatcatacttgccagtcttttgcagtatgtgttatgagattaaac

SEQ ID NO: 463016 - DNA, 161 bp, Homo Sapiens
atagagacggaattgtagaattctgacggctcggatggcggccttcagggtggggatcatgtcttcgatggggaagtcattcccatagcccctgtcttccgccatggggtcacctgtcccggcatcttcagaactctgccagaaagcgtaggctttcatgc

SEQ ID NO: 463017 - DNA, 389 bp, Homo Sapiens
  misc_feature (68)..(68): n is a, c, g, or t
  misc_feature (72)..(72): n is a, c, g, or t
  misc_feature (356)..(356): n is a, c, g, or t
caggctgctcctgagctcaagtgatctgcctgccttggctcccaaagtgctggggttacaggcgtgcncttngtgcccagcctgaaatttatatatattaatatttggtaaacaaatgttaaattagctactctgtgtggatcctgtagtgtgggacgatggtgggaaattgaattaaatttatgcaggactcctgatggatgtcctaaacatactttacaataatttaagggatgctgggcatcgtacttcttgtctttcccctccctttgttccttttaagttcttaatgtttttaaaatgaaaagtgggtcaggaacctttttcctctttcaggcataacgactttcattgtngtttagggaatctccatgggtttaaaaccctaa

SEQ ID NO: 463018 - DNA, 561 bp, Homo Sapiens
  misc_feature (83)..(83): n is a, c, g, or t
  misc_feature (128)..(194): n is a, c, g, or t
  misc_feature (470)..(470): n is a, c, g, or t
  misc_feature (531)..(531): n is a, c, g, or t
  misc_feature (549)..(549): n is a, c, g, or t
gtagaaactgggtttcaccatgttgcccaggactggttctcaagactcctgagtctcaagtgcatccacctgcctcagacctncccaaagttctgagattacagggagtgagccacagtgcccaggcnnnnnnnnnnnnnnnnnnnnnnnnnnnnnnnnnnnnnnnnnnnnnnnnnnnnnnnnnnnnnnnnnnngacagtgggaatctagaacttctccagtagaacagcatctgagataaggaacttagtgttttttaaaaagtatttacaacccactgcccaccagcaaggagccctctgtgacataagaacagttgaagaatgaacatacccaccggaaagagacctcagggccctcctctgagctccttgacccctgaggcctagagagtagtgtggcttggcccagtttcacaggagtcagctgcacagttggggaccaagccgtaggattcctcagcctgattnggccacttgtgccaccatacaaaggtacccacttgggttttaaaatcagtgtttttacttnagcaaacggaaccctggntaccaccagttg

SEQ ID NO: 463019 - DNA, 423 bp, Homo Sapiens
  misc_feature (253)..(253): n is a, c, g, or t
  misc_feature (288)..(288): n is a, c, g, or t
  misc_feature (334)..(334): n is a, c, g, or t
  misc_feature (355)..(355): n is a, c, g, or t
  misc_feature (412)..(412): n is a, c, g, or t
catattaaatgttcttaccagagtttaaattttaaaaaatcaactagggctcaccctcaacacccccctccatttgtcaacctctacagcctgcatgccacaggaatcagcagcctgactgttgcacttgtccaaacacaactgactgcaaggctcccacagacacatgcccaggcactcctgccccttaggattctgtggtaagcagaccaccagcagacagaggcccccagggagacaggcccataggganttttctacttaggggaccgcaaagtcccaaagggnttacagggagttgaacgaggaagagtgcccgacagattgcaggttntggggggaggttttcagggcnttttattttctgggagtcaggaggttgaggatgggagccattgggccttcaggcagncggacgagttt

SEQ ID NO: 463020 - DNA, 795 bp, Homo Sapiens
  misc_feature (750)..(750): n is a, c, g, or t
tgtagaacataactttattcaagtttgctcttgttacttgatccatgaatatttaaaagatactttattttataaaaacttaatctgtaagtaatggattgatcataacagagggcttaacctggaatacatggataggcttagaggcccatgagcccctaaaattgtatgcaaagtctaacatgtatttaacatgttgcatgtgtatctttttggtgagagttcatagtttaccaaagaagtctatgacccaagaaaggttaaaaaattacttaactagaaacagtcacaaagttttttaaacatgaatttgtacaataaaataatatccaacagctccatctatgggtaaatcattatcacctagcagaactagtgacaaccaccagagatcagcgcatcttatgaatgcttgtgtttaaatcttcagtgtcactctagtgggaatttattaactatagtatcacagctttttccccccagatgtagatgcaaaaattaggagaccgttgatgaattctacttacagtacttcagcaccaaaaaaactgggcagttatgctgataaatgtatgtacagttcaacatttgtcagtcttaaaatgcttatttatagtgaaatctatataaaaccgttaaaaacttttctatttacatttttaaaaatgaaaagtatagtttcctttgccacaacttgtcaaaactcttaccctcccacccccttacccctttcactctacttgtgacagncaggtgatcacaagggcccaaaacatattgctttaaacaaactgt

SEQ ID NO: 463021 - DNA, 407 bp, Homo Sapiens
  misc_feature (323)..(323): n is a, c, g, or t
  misc_feature (374)..(374): n is a, c, g, or t
  misc_feature (394)..(394): n is a, c, g, or t
aaaaaaactttaaaatttaaaagataaatattaaggaaataatacaagtagtactaaagagactgaagtttgggaaacaacggctatagtctgagtcatattttttagacgtgatttcaaaagaaacaataaatgtggattagaaaggaaacatccattactgtattttcgatacttgtgatgttccacagacgagctcatcacagtcttcttctacatcaggtgatttccagagttaagattcaagcaaaaatataaaagtaaaagggaccaatttcacaccatcttgggcctttataaactcgtaggtaccctaaatgtgncaaataatcctgaaatttatccacagtcattttttttaaaacataaacttntccaattttctggcaggttnttctttggggctc

SEQ ID NO: 463022 - DNA, 415 bp, Homo Sapiens
  misc_feature (392)..(392): n is a, c, g, or t
  misc_feature (399)..(399): n is a, c, g, or t
ggatgtatgcttctttgcatttattttaaaaatgtgacatatattgtcatggaatgtgcaaaagaaatcaatttttaaaaatgaaaaaatatatttacacgtaattatttagcacagcttgttattcaacccccccatctccacccctgtgccctcaatttttgcaattttgccctacactgcacttcctgtcctgggggcctgaaacagtctgagtctatttgtttgaattgtgttgaggaaggaagtggggattgtggggagggtacagctgaacattgactgtacttctatatccatgatctcactgggcccattttctcccaacatcaggggaaaggattttgcaaggggtgtaccaattggggatggcaagtttttatccccccttnccattgntgggccaaaatcaagg

SEQ ID NO: 463023 - DNA, 388 bp, Homo Sapiens
  misc_feature (11)..(11): n is a, c, g, or t
  misc_feature (325)..(325): n is a, c, g, or t
  misc_feature (368)..(368): n is a, c, g, or t
ttttttttctnttatgttggaatagagagatgggaaaaagggaaggcagcttcaaaagaaaccaaaactaagtagcttaaactacacgctttgttgagaagcaaatctatttgaccaccttgctcatctttctcaataaatgaatcattctcgcctttctttacctacctctccatccttactataccttacccagggctcacattacctcaggttctgcttgaacttcaggtctgtatgttatggatttaccaggggaaatctagattaatataattgttccctcttgagtaaaaatgattttgactcaaacaaggatttaagntcgggaatatgtatgttcataaggaggcttttatgatcaaganattaacaagagattcacagg

SEQ ID NO: 463024 - DNA, 373 bp, Homo Sapiens
agatttctaatttattattaaattacataccaaagcttcttctatacagtcagaaaatgcacatttagatgataacaaaaattaagtacaaatacaataaaattggttccaagaagctattttaaaagcaaaaacttacaaagtgcatttggaaaacaataggttttaaaaatctgtattggcattttttcaagaggaaacatcttccatcacagggaagtatggttggaattgatttccctcctcccttaagagctaacagggtggggaatggatgcaaatacccttgatattaaagtgagctctcaggtatccttttaattttttttgcagagacagtgtctttgctaccattgccccgggggtgggtctc

SEQ ID NO: 463025 - DNA, 479 bp, Homo Sapiens
  misc_feature (62)..(70): n is a, c, g, or t
gttaaaaaatactgtttaattttctagtaatgtcctttaaaaaaagctgatacatttgagannnnnnnnnaatcttctcagatctgcctctgaaaccactgcaaagcagctatgcaacttaatttttcagtactcatatatgtattaatggaggaaaagccactctgaggaagcacgccaaggacatgtccccacgtgggcacaccccatcagcactgggtacccgggaatgtgaatgcaaccctgggcatgttcacagctaacattatgcccttgcattcttttttgctgtgagggacaatatgatcacacagcactgaaaacgggtaggacacaaagggcctgcctttttctttctcatttttgcctttccagcttgcacttctattcctactccagtgacccatttattccccagttacccataatgaaaaatagttctgtcatttactgagccttacattcaaatgcaaatgacg

SEQ ID NO: 463026 - DNA, 520 bp, Homo Sapiens
  misc_feature (294)..(294): n is a, c, g, or t
  misc_feature (424)..(424): n is a, c, g, or t
  misc_feature (501)..(501): n is a, c, g, or t
aagctgcttgggtttaattttttagcacttgaaaaaaaatgtacaagtaagtttgaacactcggtctttgcaaacctccattgaggtcaaagatatcattcataccgtacaaaattagtttataaatttttttggcaatttcatcttagtaacccgttttgtcctattgccattgtcccaaccattgaaaaagtttacaataatttacatagaaatattttcaaagtgcttaagaatagtgattgttctctgggatatttacagatggcctatacaatgtatgtacaggtgggnatacactataagcacaagtttcactgctgggaatatgggctttctagggaaagtgcatatttggccagaggtggcaatactgtctagaaattcaagggttacagatactcgggtaaccacatccaaagcnggagtagaatgtggaccagaatatttaccaaagtaatataaaaacgggtcaagtacacaagcttgatccacgccaanggatcctggatggtcctcc

SEQ ID NO: 463027 - DNA, 386 bp, Homo Sapiens
aaaaatacatgtcaaaattttcttggactcccctggcaagcaggtatacttcaagagcaccgggagcttttctttcaagagtccacatttccaggaaggctggtgagagcaaaccgaagggactttcagtaacctggcaaggcagaataaagtgaacaagctggaacgaatccccctgtgccctggcttcatcgggactacctgcaggctgatcagggtggccagccacaaacacctcgagggccttccatttcacttcacactggcaggcacttactcagccctgttaaacacacggttagtgccatatgcttgagctgagattcactaggaggggcagcgttgggtaactctttgggacttcacatttccagagggaaggcatt

SEQ ID NO: 463028 - DNA, 460 bp, Homo Sapiens
taacttaaaagatccttaatgcatttattttaaaccacaaaatcaaaatacaagcaatcttaaaatgaatcactataaaccatacattgtctcttcttttattatttaaatactgatatcattcttctcttcatgggacagttctgcacctagtttaaaccatcattactaatgccatgctgaatgcttgtctctgaaaaaatctagtaaaattggcagggatgtgataaccttaactacaaatgaaataacttcaaatttaaggggctgtcagaaaaatgggaatttcacaactaattatttccaaaaaagtctcctgctcaccatttgttggaggggtataaaaacctaggctggcatcacatgggggatccttggtatccttgtcttatatttgttgcgaagttgatgtctcttaatgggtcatgtcctctacaagttggtcctctggctctgctcc

SEQ ID NO: 463029 - DNA, 130 bp, Homo Sapiens
cattcaaaattttgtatattttgaaaacatttatagaaatactgaatatataacaaaatatcccctaaaatatttctgctcataagatttttccaactattatatgttctttatacttaagaatattgtc

SEQ ID NO: 463030 - DNA, 471 bp, Homo Sapiens
  misc_feature (447)..(447): n is a, c, g, or t
gcatttcacgtcactaatttggttacttcttaaaaataatattaaaggttccttaaaaaaataacttatctttaaagccctttctctcttgccctctttgatatttaaggtatacaggatggtgaggggtgtgccaggacagtaaggcagggggctacagtgggcagagtagctgggggagtcaggcggacaagggtttcagtcctgcttctacagggcaagctatttatcctctctgaaggtttctgtacctgagaaatgggcacttccatgcccacctctcaaggatactgtgaggagccttgcccagagcctgggtcatgggtaggagcatgtcagttcatcccgccctaaagaaacagactccaggggccttaggctggctcaagggggcagaggaaaagacaatggcaataagaccctctggagcttaaaccaaaccacttnatgccaggggagccagccaaccaa

SEQ ID NO: 463031 - DNA, 367 bp, Homo Sapiens
atggactaggagaaaagcgcaaaacaatgtttaattcctttcggagttagaatagttaaccattttttgcacatgacaggcattagctgtcatgttttatagatactagctcatttaatcattttcacaaggctgtttccttctcatccttcaggtcttaggaaaaagtgccagagctcagactcccttaaaaagtcacctgacccagttactctctcccacatcacctgggtttgtttccttgggggggctctaactcatctggtaatcttggcttctggtctcttctaggttccactaaggtttcccaaatgtaggaaaccgaatcttcttcccctagtgcctaggcatgtgacaggggactttt

SEQ ID NO: 463032 - DNA, 422 bp, Homo Sapiens
  misc_feature (383)..(383): n is a, c, g, or t
  misc_feature (412)..(412): n is a, c, g, or t
attaataggatttattagttcaaattctttattaggatatgctaacaatgagactattatgatgaacccccacattttaaaccataggtttttatacaagtagcagtatcaaatttattgtaatattttactttgcacaaatcaaggaaatcctgattgaatctaggtagttacaaatggttttttaataattcactttgtactgtccagatattctttaattaaaatatccaaaattagaagaccagtaggggcttttgtttcaaaagctaacaataccccaactactgcttgctttccttattataggacaagggcatgtgagggggacacctaggacggttttttaaaggccccaaaactgggggtattgtggacacggnatgttttttattcagtgctgaggtggggngtttatccca

SEQ ID NO: 463033 - DNA, 312 bp, Homo Sapiens
atagataaagcatttttttatttgccttggagcaatatattttgaattaagcccagcctcccatgtttcagtttaaggtagctaagatacatgctggtgaaaagtaaaaaactaaattatttgtctttctgcctaccacataactattttaaataattttcttaggtgcttagttatcatgggtcatgacatcataaagagtcccactttgtctttcctttaataataagcaacctctgtttatacgtatttgaaaaactgcctcatgtgatattgacagagctataggtattaaatacaagggtggaataa

SEQ ID NO: 463034 - DNA, 569 bp, Homo Sapiens
  misc_feature (278)..(278): n is a, c, g, or t
  misc_feature (420)..(420): n is a, c, g, or t
  misc_feature (507)..(507): n is a, c, g, or t
  misc_feature (533)..(533): n is a, c, g, or t
  misc_feature (546)..(546): n is a, c, g, or t
gtaattttagtatacagtttgatatttattttcctctgcaacatacctacttgtacctgtaacacccgatccaaactccagaggcatcttctccttagtaattctatagtgtctcactgaccaccattctctagttgttttattgatagattcatccaggctgggccaatgggacagcgggataagaaagagagagggagggtttagcatactggcaggagagggtctgaaggaatgaatcatggaatcccaggtaataggaagcctaaggaggagantaagacagcacagatcaggagaaagagagatagtggggatatgctggaacaggtacagtgaagataactcagtgagagagctgggaggaaggaggcagcagtcagagtttggagggactaaagtttcaaactttcaaaggtnggagcagttttcaggaggttggccaagcaagaggatgcatggttatccgatgttttccctggtccccttccagctctgtatacccgnttcagtctgttttcagccagagcaancacattcacctantctcaggttgggaggtaagggcc

SEQ ID NO: 463035 - DNA, 624 bp, Homo Sapiens
ttttttttaacatttgtgtatctatttactaagcattttttatgtgcaggagagagtacaaaccaacatgcaacatagtcttcattcttaaaaagtacatagtaaaggtatgaaaaacatttgtattcagagaattctaagacaaatggtcaaatattcaaatggcctggcactagtggtaattccagcagacaaacagcatgagaaaaggccgggagacagtaataaatacgtgcccattgcaatgagttacccaatcaagcccttttacctccttaagatggcagattagaagaccctcttccccaggagagtgggagcgtctgccttcgggctgtcagtaatattaaataagagtgcttgatttataaattttaaaaacataagaaggtttgacattctgcccagagcaacggagggcagcgtggtttaccagcgaaaggactgaacagagtgccaggagcccttagctctagacttactgaacagaaagaccttgggtgaacttttcattgaaacactgaaggctttaggttcatacctgtatacgaaggatagtcctggtgtggggcagcagaaatgccactgagctagaagctggaagacccaggtcctggctttgct

SEQ ID NO: 463036 - DNA, 451 bp, Homo Sapiens
  misc_feature (54)..(54): n is a, c, g, or t
  misc_feature (437)..(437): n is a, c, g, or t
ttttttttgaggcttagctgaaggtaagttaactgaatcacaggctgcagcagnaaatactatttaaaatgtcacatagaaaattcaatttacactttgctttgccttttagtatctggatggcagatgacaggggttatgtggccaaattggtctttcccacctggcagcagctctcttgacacccacatcccttgttcgtcttcaaaagttcctcactgcctcagcggactatctcagccttcatgaacaaagtgctatgctggctataagtagttaggaataaatgtgatttcaggcttcatcggggtcctatcctttcaccttccttgtagctgggtgtatggtcccacaggtggcaggccattaaactatggaggcccagaggtatatggactttccactggaaacttcaacatggccacacacagggtgtntgttgggggcacag

SEQ ID NO: 463037 - DNA, 423 bp, Homo Sapiens
  misc_feature (318)..(318): n is a, c, g, or t
  misc_feature (355)..(355): n is a, c, g, or t
  misc_feature (366)..(366): n is a, c, g, or t
  misc_feature (387)..(387): n is a, c, g, or t
  misc_feature (395)..(395): n is a, c, g, or t
  misc_feature (404)..(404): n is a, c, g, or t
ttttttttctgtctcccctggctatttccaaatagcctgccttcaagcccactaattatctcttccacctgatttattctgctgataagagactctgatgcattcttcagtatttcaattgcagttttcagctccagaatttctgcataattcttttttaattatttgaattcctttgttaaacttatctgatggcattctgaaatccttctctgtgttatcttgaatttcattgcgagtcctcaaaacagctattttgaattctctgaatgaaagatcacatatctctgtctctctagggattaattgctgctcccntatttagttcatttggtgaggtcatattttcccgggnttaattcttgnatggcttgtgggatgtttgtncagtgttnggggcattngaaggagttggggtattta

SEQ ID NO: 463038 - DNA, 235 bp, Homo Sapiens
  misc_feature (33)..(33): n is a, c, g, or t
  misc_feature (170)..(170): n is a, c, g, or t
ttttttttactaaaatacaaaaaagggagacanggtatatttacaaaaatccatggctggtacagtacataatttttaagacacactaaatgctacaatctttcaggtcctgagattattacaaacatcaactcaaagcttgtgttcaggtccagtttttaaaggagganaaaaaaatcccaaaatattaagtcacacacttatttgaaatacagtatatcccttcaagttagca

SEQ ID NO: 463039 - DNA, 389 bp, Homo Sapiens
  misc_feature (134)..(134): n is a, c, g, or t
  misc_feature (226)..(226): n is a, c, g, or t
  misc_feature (368)..(368): n is a, c, g, or t
gcaaggaaactgcatgggtacaaatgtccaattcatacttaacaaggtggggaaacgggtcattcttggcctgctccagaacaaggggcgagtctatgcactcctggggcagcaggcgcagggagggttaaatntgaggccagaaccaaatctcctgtttccaggggctgaagatttagaagagtctctttggttgatttttacaagagagaagaaggagttaccnagcaagttagaggaggcccttcaagggtagagggaaggaggatgaataataataatcacaatacttctagtccttttgggaaaatatgttctcatccttcaagttgacgtcaaatgcttcccactttttgaagcttccctgncttcccccactaacctggggg

SEQ ID NO: 463040 - DNA, 367 bp, Homo Sapiens
  misc_feature (295)..(295): n is a, c, g, or t
  misc_feature (308)..(308): n is a, c, g, or t
  misc_feature (352)..(352): n is a, c, g, or t
caccactccccggcctcactttcccttttagaatacatgctagattgtttactctgacctgaaatagtacccatttctttgtcaagatgaagacttcactaattgtaatgggaaagaagtcctctctttctgaatgcagtttagatcctacagcacaccatgtgggaagtctttaaatgtttatcaagttgttgaatgttaaaatgaggcctgagtgcagggggatgaccctgaggactctgtctcaggaaccaacttgtgggaatgttcagtttggttggggttttggatgatngggaaaaggggangcagggccccttgggggaatgttgtgttttttgacacattgttnccctttttaaaacgg

SEQ ID NO: 463041 - DNA, 198 bp, Homo Sapiens
cattttaaaatacctttattgatgtattattgcactctacatcaaaactccaacagggcttttcttctagttttttcacatatatgacccgaatgttgggcatttaaatgttagtggtgtatatgccagacattttaaaacaaatactttgcagcaaatggctaataattctaagtgttctgttatgggagatggttt

SEQ ID NO: 463042 - DNA, 418 bp, Homo Sapiens
  misc_feature (195)..(195): n is a, c, g, or t
  misc_feature (203)..(203): n is a, c, g, or t
  misc_feature (365)..(365): n is a, c, g, or t
  misc_feature (375)..(375): n is a, c, g, or t
gaaaaaaaaagatgatgatttttaattttacattttctctgtgggaataagtgttttttatatgttaaagttcaggcttagtttccaccatttctttttcatttagataggtttgtagttctattcatccttcataaattctcttcttgcacttctgtactacgtgattttaattttctctatcccattataggnagagaagncaacaccattaaacctgatttgaacaaacacttgaggttacatttttaaaatcttacttgtataatcggcaattttcaacacacattctaggaaaactaggggtggggatcatggtacaaacacaaaaaacaggctccctccctccaaaacaaacggaacanaattaaaggnaggaaaacccatggaatgcccgggtttattttttttccacccg

SEQ ID NO: 463043 - DNA, 543 bp, Homo Sapiens
  misc_feature (404)..(404): n is a, c, g, or t
  misc_feature (489)..(489): n is a, c, g, or t
  misc_feature (505)..(505): n is a, c, g, or t
  misc_feature (523)..(523): n is a, c, g, or t
tgctactatatcaagtttttattaagaagtaaagtgctcagtattacacattaataacattcttgattgtcgagaaagacttgcgtatgtaatgtctttttaataataccagtacacagggaaagataatagggaagagatgagggggggagttctccatgactaaagaagaaaaatatatgtaatttatgggtagaaaggaggaattctgcaaaattttgcaagtgaaatgaaaaacagtacaataaaaagtatcataaagagactttctagtgaccataattgatatatggcacatggtccgatacacatggataccacataatagctgcacttcaaattgaagtttgtttacatgtaacaacatgggtacatatacataaatatgtacagtccatatcccntggaatgccaactttagtatggtaggtaattaaagaactttgtggtagcatattccaggggaaagtaaagatagagatgaagccntgaggaaaaacctacngaaacccagtatggttcnctttccacctggaaaggtct

SEQ ID NO: 463044 - DNA, 391 bp, Homo Sapiens
acaattataaagttttatttttgaagaaaattatcatgtgactggcaaattcaagaaaaaaacattagagctgaaaaaaagttattttaatccatcaacctgttccaagaaaagctgctacacatcatcctggctaaatctgtggtaaccctgttttagagacttcttgaaggctactagggggcaaagaggcatggagattcagtctcatggcttttattatgcattccaaataaatagctgttttctgaatgcagttgcccaaatgcctaaaattttctgactggactgattctcactcctgatagatttctaaataccttataggaagtgtcttcagggaaaagacgccaaggcaaccctttggaaattcctcaaaggctggcacact

SEQ ID NO: 463045 - DNA, 476 bp, Homo Sapiens
  misc_feature (83)..(83): n is a, c, g, or t
  misc_feature (308)..(308): n is a, c, g, or t
agaaaacctgtgctagaaaggactagagaaaatgaatttcctcactcttgtatgtaacaattatacattgtgttaagattctnaaaagcttaacgaagttgacgccacatttggataaaccatccgaaatgatttaagactcatctagtttcattttaaaaagcaaaccccaagtcaaagggagggcaggccacacccgggggagagccgccagaccgggaggtcacacctggtcagcccctgcctccaaggagctccagctgctccaaccctggctggcccgagcaggtgacagggcagtggcccgnccccagtgggggctcactggcagcagctgtgggagccaagcctccgggagacctgagtgaacgagacaaaggtgaagttctcacagttttccagcttgaccttcttggctaagtttgggacaattccccgaagagagcgcagccccatcctctgctcctcataccaca

SEQ ID NO: 463046 - DNA, 414 bp, Homo Sapiens
  misc_feature (324)..(324): n is a, c, g, or t
catacctagaagttgcagattatcttgttagagttttcacaaatatatataaaagtatcatctgtatgtatcactactttcagtaattctagaccctgtcatttcatgtgttaataataaagcaaaatacttccttatcaaaaatttgttttcttaatatggggacaactctatttcaatgtcattgaaataatttataatccaatataatttatctctaggcatttaaaaacactattctgtgaagggggtatgtagggttctccagactgccaaagcgggtcatgggaggcaaaaacttctcaggaactcatacggttacanttgggcagtttgggttttaggcaactcccacccctctctctatccaaattaggttctccgacagtctccattgaggctccagctattaat

SEQ ID NO: 463047 - DNA, 170 bp, Homo Sapiens
gattattcctatttctaatttttattgggaaattttaggaaaaaggatttcagaacagcaagttgaccattattttgatgattaaatttcgtttctatagattccattctaaccactaacttgcactttgtttttaacacaaacagtattttatatcaacatgcaaagcc

SEQ ID NO: 463048 - DNA, 347 bp, Homo Sapiens
  misc_feature (303)..(303): n is a, c, g, or t
  misc_feature (324)..(324): n is a, c, g, or t
  misc_feature (331)..(331): n is a, c, g, or t
tggtgtgagccaccacatccaaccctgtaaataaaattttattggaacacagtgggcacccatttgtttacacgttgtcagtgggctgcttttccaccataatgggagaaccgagtaggctggcaacaaaggacaagagagtctgtgggctctcaaaggggcaatgcatttcctatttgggctcttagggaggaaaaagttttttcaattcctaatgtaggatggaaccacaattctttttaaccatttcattacttgtggggacattggggcattctttcttcagttctgggggtctgttcntgtggacaaggcgttgtcccntaacttnccccattcggcgttgg

SEQ ID NO: 463049 - DNA, 522 bp, Homo Sapiens
  misc_feature (163)..(306): n is a, c, g, or t
aattatactttaagtcctagggtacatgtgcacaaccgtgagggtttgatgcatttcaaagacactaagataggagtttgacctggtttagcccaaaataggagagtacagaagaacacagatgacgtacctcggtacgatacagggttctcagtacaatgcnnnnnnnnnnnnnnnnnnnnnnnnnnnnnnnnnnnnnnnnnnnnnnnnnnnnnnnnnnnnnnnnnnnnnnnnnnnnnnnnnnnnnnnnnnnnnnnnnnnnnnnnnnnnnnnnnnnnnnnnnnnnnnnnnnnnnnnnnnnnnnnnaacatgtattaaaaaattattagtgccataagagcttgctatttgtattatggcatctacacagtgatatattatctccattttatagagtaagaaactaaagcagaggcagtaagaaggagaaggaagggtcagattttagagctgctaacagacagaaagacttggtgactgaagatagaaggtgacagaaaggaaggatgaccccaagatttc

SEQ ID NO: 463050 - DNA, 421 bp, Homo Sapiens
ttttttttaggaaggcttttattccttgtaacagtagaaagaatcacacagtcttgcaaaatggacaagggagatttcctgagaataaaagggaaaggttaatcccattgaccatggcaatttgctgaacgatttggaaactgggtgatatggtagaaaagagcaggattgaaacaaataatggactacagttgggttctgattccactttaacttgctgtacagcctcatcccttgtttttctggagattctccttttctgcttcactgatttatatttacattaaaatcaaatgaggccatgtttctgaaatcacattgtccctacatgggtcatcacaatgagtctgtaatgtgacttgaaagacagccatgggatacagggtaggagggatatctaacctggggatttgcttttaaa

SEQ ID NO: 463051 - DNA, 333 bp, Homo Sapiens
  misc_feature (89)..(89): n is a, c, g, or t
  misc_feature (102)..(102): n is a, c, g, or t
  misc_feature (285)..(285): n is a, c, g, or t
  misc_feature (313)..(313): n is a, c, g, or t
  misc_feature (318)..(318): n is a, c, g, or t
gaaaatggggtcttgctatattgcccaggaaggtctcgagctccttggctcaagctatcctcctgcctctgcctcactaagagctgggnttacaggcctgangcatcacacccggtggaagtaatatttttgttgataatgtccaattctatgaagttattaaattcaagtcagaagagaatctgccctaaagtgggaattaaaatggctaaagttttaacctcaattattttgaaaccagaacattttccccactatagaccgattttcctaacctgtcttggnggtcatcagaacttttcagtactatttngcaangccaattttaggggc

SEQ ID NO: 463052 - DNA, 470 bp, Homo Sapiens
  misc_feature (107)..(107): n is a, c, g, or t
  misc_feature (227)..(227): n is a, c, g, or t
  misc_feature (375)..(375): n is a, c, g, or t
  misc_feature (381)..(381): n is a, c, g, or t
  misc_feature (396)..(396): n is a, c, g, or t
  misc_feature (412)..(412): n is a, c, g, or t
  misc_feature (436)..(436): n is a, c, g, or t
ttttttttaagaacttttaaaatccttccaacttttcagagttcaagaacttcaataattgtcaatttcttatatcaaaataccttttacagccataggaaccaggntaagtcataacaggcaaccagataagccataacagctaagtgggctgctcctacttacaaagtggacagatgccacatcactatctcagtttaaatttgcaactttccctctccctgggntgaagtacttatacctactgattatgagagaattgaaattgtcctttcattaatctgaatcactgttacatttgtgggggaattatttttgcccatgacaaattcacttgcactgggctccaattaattttgctctaattagctgagnatattnatgtttattctaagncatctccaaattatgnatgtcaaacagcatgtataaagcntggggaaattactctgcctgtcatgaacttgggc

SEQ ID NO: 463053 - DNA, 580 bp, Homo Sapiens
  misc_feature (123)..(123): n is a, c, g, or t
  misc_feature (504)..(504): n is a, c, g, or t
  misc_feature (536)..(536): n is a, c, g, or t
  misc_feature (557)..(557): n is a, c, g, or t
ttttttttccaccatcactcctccctttcaattcaattcattcattctggtgtgcagcccatttctgtctattttctaatgatatgaccagagccaccatgtaggcttgtgccctgcaaaggnatagataccccactgggggacaaacgggaccaaaatctactctgtgttctgctggccaagccgggtgacctggcctgggctggcgtcctcccagaagaagggttcatttttccagtttgcacacatgtgctatttgtggggttagctgaggccctgcttatgtcttcagttgggttcacaaaccagaaacagaacaaatgggccatcatttgattacaaatgtaatcaaactaggatttacaaccaagggctttgctgaggtgggcattatgggggttttatcctgttgcatgggcaaggccgctcatgcacggggctgtgcttcaggtgtccttttttcctcaggccatgccagcctggggggagcaggagggggagttnttgggagaggtggctcaattagagcttgggtnatttccctgaaggcacagttnggggttttcctcagcagggggtt

SEQ ID NO: 463054 - DNA, 440 bp, Homo Sapiens
  misc_feature (408)..(408): n is a, c, g, or t
catttgttattttcttttatttgtgaatatgtgtggggttgggagactgggtgctagacatgagctgaggtccaggctaggcacagggagctgacagctgcaggacatgctaattggtctgggaaggcctttggaatctagggaattggctttctgagctgaggcggggtccaggcaaggaggcaacaggctgcaggaatcacaaagggaccggggacctccatgtacccaatatctaggtctcatcagtcggagaaacattctcagctcttgggtgaccttgtcctccctcaacacggtacttcactgcatatgggacttcatttgacaattgccacaaaggctttgggcttcagaggcacttttaagggatattaacagtagggaaaggggaggcttggggggagnccagagagttcacccacacaaagccccacact

SEQ ID NO: 463055 - DNA, 347 bp, Homo Sapiens
  misc_feature (67)..(67): n is a, c, g, or t
  misc_feature (94)..(94): n is a, c, g, or t
  misc_feature (129)..(129): n is a, c, g, or t
aggccataccattattccacctccccattttaccaataaacacctacctaaccatcctacctcctgngcccaagcactctgctataatatgggncccataaagatgagtaagacaaggatttttgcccntccaaggacttgttatcactgtaaacattttgatgtatacaatatggctatattatattttgttttataaaatcaagtctttgtatatattatgatgtatgctttcttttcatttattataaatatttttcctgatcagcttttaatatctgtcaaataaaaattgaaattgaagatggtatataagatttcaggaaataaacttactcttgaatact

SEQ ID NO: 463056 - DNA, 410 bp, Homo Sapiens
  misc_feature (224)..(224): n is a, c, g, or t
  misc_feature (265)..(265): n is a, c, g, or t
tttttttgcttttcgggtctatttattacaagaactagcagagccctaatacagtcattgctaccgtggccataatacatgtattctataattgcgcctaattttattcaccggaggaacgtcctttaaagattctaaatttttcagaaatgcaacattcaaggttaaagtcgctgctagaccaaggctaaaccgtgggcgagggtagttgcttgcgccgcagnagtgtgggtgtgaacagctgggagctcagtggttcctgggngactcagggaccacctgtattccacatccggcttttccacccacggcacacggagtatgacctggggttttccccttttatacagttggaatgctaaggtagcctacaaccctagcccggggtcagcccactatggccttttggg

SEQ ID NO: 463057 - DNA, 465 bp, Homo Sapiens
ttttttttgaaacaaaatggaggactgtttatttcattgctcaatcaaaacattccatgaaagactgccttaagtaatttcaaaggcttcactgatacatatgggggtggggagggaagctccactaccccatgccacaaaactatttgatataactaatcgacatgcaaacacaatttgcaaaagcagagcattatcacaatatgacatttaaaaaattggttgagtaaacagatttcatatctttaaaacataaaataattacactgtattgagcctgggaaatcttggcaatatctacaaactttctcatttacagataggaacaaaggcccagagaagttaagccactcatccaagctcactgagcagagattctgcatttgctattttgggataagttgtctactttcaaatgggttttttaaaatgggtattacatactttttgtttgtacagaacagt

SEQ ID NO: 463058 - DNA, 476 bp, Homo Sapiens
  misc_feature (386)..(386): n is a, c, g, or t
  misc_feature (407)..(407): n is a, c, g, or t
  misc_feature (413)..(413): n is a, c, g, or t
  misc_feature (421)..(421): n is a, c, g, or t
  misc_feature (455)..(455): n is a, c, g, or t
ataatgcaatattatttattcataaaaatatccatccatacctattttaaagaaatacatctacatagtaaaatacagttttgtaaaacttttgagtttactaagtcagatctaattttttacttgtagcatcaataaaatttacttctgaaccaataacaactacaggcaagggtcaacaatttagctccctgaaattcagcatccctgaaattcaatgggaaaggattttctaataacatgatcacatttttaaacctatttaggggcaacagttgggaaatatgtgatgaaggaaactgaggtaaattatacagaaggtgctcttctatataatttactgagggggccagggcggagggtccgcttgagggccggggggttcngggcccagcctaaacaacacngcaggncccccttntcccccaaaatttaatggaatttggtaaattttnaattaggcccgtttgggggct

SEQ ID NO: 463059 - DNA, 383 bp, Homo Sapiens
  misc_feature (50)..(50): n is a, c, g, or t
  misc_feature (348)..(348): n is a, c, g, or t
  misc_feature (361)..(361): n is a, c, g, or t
ttttttttcacagtatataaatatcttcattgatgttctagatggttganggtagaaaacaaggtaaaacagcatttttatacatgatgatgacaaactgaattggttatgaatcagttactgtctaatctaatatactagaagggcagttctaaggccaattacttagaatcccatagtatagcactacaagagtaaggaagaatataatatgagaagaatgggccaaggaaataagagggaggaaaaaaatgaagggcatttgtaaaaattcaaaacatcttaaaaaacaaggaccaaccacaaggaaatgtttcccaatatattcagggtaaaattttccctcantcacataggggantctcttgggggggttttttgcc

SEQ ID NO: 463060 - DNA, 406 bp, Homo Sapiens
  misc_feature (395)..(395): n is a, c, g, or t
tttaaagaaacaaatatttccctttatttattacatctactcatgggacatacataataatcaaaattttcaatttacaggcctataaataatgctatttaactgaaaagcagccagcaaacagcaacatatacatgtatttgaaaagcttactcatggaaagtaatttccatagcaactcagttttgtagaatggaatgataaatcaagaactatcagcatttaaggaatcagaagagtactgaatttgccttactcctttgccagctgcacactggtagggctttgctccgataggtatcccgtatttgtgtaaagtgttaatcaatatctccctcatgtcattgttgtaggggatcaaaggtcaaacacatttcggaactacactggggggnggccttccgtc

SEQ ID NO: 463061 - DNA, 462 bp, Homo Sapiens
ttttttttcactgtttctcatagagctctattgtggcatataataataggtactctatataaattaaattaaaaataaagctccagcaggttgcacaggttggctgttaataaatatatctctgggtaattgtgccccaagaccagctcacgaccactctccctcatccagagaattatacaaaaataaatacaggctcggggggtaggcggaggacatgcccagttccactctaaaagttcccctcactcacaccatctacccgttccctcatctccactggtgtcaccacagggagccctgtgttgactggagagcttggggatgagaaggcctctctttcagttgagcattctcagaaggcaaaggacccagggtccccttcacttgcacagggccatgttattcccattctttaagggcttttgctggattccccacaaggcagaggtcttttggagg

SEQ ID NO: 463062 - DNA, 460 bp, Homo Sapiens
  misc_feature (223)..(223): n is a, c, g, or t
  misc_feature (260)..(260): n is a, c, g, or t
  misc_feature (289)..(289): n is a, c, g, or t
  misc_feature (294)..(294): n is a, c, g, or t
  misc_feature (308)..(308): n is a, c, g, or t
  misc_feature (392)..(392): n is a, c, g, or t
  misc_feature (412)..(412): n is a, c, g, or t
  misc_feature (418)..(418): n is a, c, g, or t
  misc_feature (436)..(436): n is a, c, g, or t
  misc_feature (445)..(445): n is a, c, g, or t
catgtttcaagatttattgagtgggtgagaggacaatggtccatagcacagaaaaagtcaacaggaacaaattcttggttttcagaagtcacaccagggggaggcgggaggacacggaggatggccactggatggcctggcctagatggaagaaaacctttcttcctgggccatggcactctttggcactggcagggcagagcagctgaagggtcttcaactntggatcccaagtccccagagccacagggcttttcctntgcccacccacgttgagggaaaagtcgantaatnttgtgctgagacantagggggcaagaaggtcccagccatgagttcacagggtgacattcacttcgtcactcttggtctgtgtttcaacccccaaacanttcatgagggaggccccttncggggntgctggggaccccgggtntttttcctnagaggttcagtgctt

SEQ ID NO: 463063 - DNA, 406 bp, Homo Sapiens
  misc_feature (126)..(126): n is a, c, g, or t
  misc_feature (214)..(214): n is a, c, g, or t
ggatagtaaatgttttactgaataaccaaaaatgttgattaatagtatgaacaacattgtaagatttctaactaacagaacatatttttaaagcattttacacatcaacactatacaaacaacagnacattgagtttccaacatccaaatgaatcacggccctaggaatggtgtgtgccacactctaggaatggtgggcaatctaggaacctgnaactgcattttgtaattagagtaagggctataaatgatgggtagttcctcaaaacaaccccaaagatgctttgtaggctcacatttccccaaaacaccacacatctaacatgtgtaaaagatctgaacactattgcaatattgataaaactaacgtactgaatagtagtgaaggctatgactacatcaacct

SEQ ID NO: 463064 - DNA, 351 bp, Homo Sapiens
  misc_feature (59)..(59): n is a, c, g, or t
  misc_feature (86)..(86): n is a, c, g, or t
aaaataattgccccgaaacccaatatccatggggctttccctctagtagttttatagancccggtccttatatttaagtctttganccatttgagttgatttttcaatggggtgcaatatagggattaaatgttattattgcttggtgtgatcatataataaatataacataataaaagcatggaaatattccagtaaagagctaaaggagaggggctcttgagaaatacgaatgggagatgatatccagaactgaagaagagaggctggtcttccacagaattgggaaccccctccactgtgaagccaggaagagagtcctataagctcccacttctcttttaatttcta

SEQ ID NO: 463065 - DNA, 414 bp, Homo Sapiens
  misc_feature (221)..(221): n is a, c, g, or t
ttttttttagtattaagagtttattggcagtatgaaacaaagtcaacattgctgcattaaaaattcatatatgagcagaacagctagtgtttgctgagggtagttattttaattttttttgtctcttgaagattgaaagctttcagaaatgtaaggacatacatggaaatgtccttataaggagcctcgaaaatgggacagattatatcattcctgaaggncatataccttttgttgaggagagaggattccagggtaggataggcatattcaaaaatcccttcttaggcaaaaggaggaggacaagtagttttaaaactctttggattactttcaggggttggcttacaaatttgttttttccctttttaaagttaaaatggactcacggtgtggggaaatacagtggggtag

SEQ ID NO: 463066 - DNA, 364 bp, Homo Sapiens
gtgtaatggttttattgccctttaccaaggggagaaaaatacacattacagaaatagcagcaactttaattacaagcaaaggttgattttattcccacacccccaatgacttgttttggtttcagcaaataatttattaataaatgcatctagtaaacctcaaatagttatactgaatatttaaattcattgggctaaaattatgggcttaaacagttggatatgtggaaccaaacaccacaataaaaatggggtttttaaaaattaagggtatataacaaataaattaccaaattttctggtaaacctggcccaaacttcttgccggggggggccttccctatctctatttggttggtaaaag

SEQ ID NO: 463067 - DNA, 413 bp, Homo Sapiens
  misc_feature (144)..(144): n is a, c, g, or t
  misc_feature (192)..(192): n is a, c, g, or t
  misc_feature (272)..(272): n is a, c, g, or t
gaaaaagtcatggattccaactgtactcaaatataatacaacttcttcaatgctgctttataaatctgactgaaaaccttatttaaggagtcaagatgctgaacaccctaacaaaagcaaaaacaaaattacggcctatgtggngtcactgttattaccactctttacaaaggcactaagtacacataggtntttgggcattgtctctgggaactacaaaactatgggcctatgtgggtgtcactgttattcactctttacaaaggcactangtacacacaggtgtttgggcattgtctctgggaactacaaaactacgggcctatgtgggtgtcactgttatttaccactctttacaaggcactaaggcacacacggtgtttgggcattgtcttctgggaactacaatttaa

SEQ ID NO: 463068 - DNA, 121 bp, Homo Sapiens
tttgtcatcttttgacttttgcttatgggcctcacttcgtacaactataacatgaaaaaggattgtcctaaagtaagggaatcagttaatggtaggatgaagaaactgtaaaaactcctag

SEQ ID NO: 463069 - DNA, 337 bp, Homo Sapiens
  misc_feature (126)..(126): n is a, c, g, or t
  misc_feature (260)..(260): n is a, c, g, or t
  misc_feature (268)..(268): n is a, c, g, or t
  misc_feature (279)..(279): n is a, c, g, or t
  misc_feature (297)..(297): n is a, c, g, or t
  misc_feature (302)..(302): n is a, c, g, or t
aaactttaattaagtctttatttaagatacttcaagagctggagttaacatttttctttcagattcgtatttccttaacatgaaaagtcaacaatgaaaacagaataagttactttattacaagancaaaacagacttgctaattttatgtctcctttcacccatatcacaaatgcaaagtatatattatcataagatggaaattaccaaactccaagatactctgcataaatgaaataaactcaacttgcaaaattagncaagtagnaacattcaagntatctacagttcattatnaaatngtgtaaagtacatgccatatctacagtgtggggga

SEQ ID NO: 463070 - DNA, 457 bp, Homo Sapiens
  misc_feature (445)..(445): n is a, c, g, or t
ttttgaaagctgaaaatttatttcactaatatacataagaagttcacaacaatgaacagacagaaaatagcagtatatacagaatttcactacttacagtacattacaatagagaaagcattttataaacagttcagtattggattaaaatcttttaaggatggctaattctattcagcaggaatctaacttctagacacccagcaaacccattcctatcagggtgagagagggcttttgctgttgctatagtgtactgtaaaaatatttgttccttataaatgaagtggaccacagcaacttctaaatgaacattatattcagtgtaagtctcatattattaaatttcagatttttgactttttagatcgcaattgtttttaaaaagcaatttaaatgtaacagtgtttactttgaccataggatggaggttttataattaaangtaaaacctttt

SEQ ID NO: 463071 - DNA, 470 bp, Homo Sapiens
  misc_feature (36)..(36): n is a, c, g, or t
  misc_feature (356)..(356): n is a, c, g, or t
tgattttatattatttcttaaatagggcgtctcctntgttgcccaggctggtcttgaactcctgggcaaagtgatcgtcctgccttggcctaccaaatgctgggatcccaggcgtgaccctgacgcccagctgactgaggcctgctctaacttcatgtgacggagcgagtttcctggcttggaaataactgaaaagattcattttctctttgtgtacaaagggattcaaaatattttcacatcttccttctgccagttaaacgtgccgtggctccaatacacaccaaaagccaagcgtaacttggctgcctcaggaaggctgggaggaagtgccagatggtatcagcgacaggttngggggaccgggcggggacgggccagctctgtccttcccaacacggcaccagggactcggcttcatgggggaggcccgggccagcgggaggcaagccacaagttccagggcaagt

SEQ ID NO: 463072 - DNA, 373 bp, Homo Sapiens
ttttttttagaaaacctgttttacaatttatttcctgttgttaatctttaaaaatgaggttctagctaagtgcagggtttcagtggtgaaattttgaccatgtgaacacataaataaatatttacagtctttggcaaaacacatgacgtttcatcaacctatacgataaatttgtttaggacaaacataaataatttgacaaaaaagtatgggtacattctaaatattcacatcatcgtcactcccacaccattgtacggttgaccccacagcacaggatccaggaaaccctggcacggctgttggacaggtcggctacatttcatggcggtatccccacgcttcgttgggtctcggggaatacagctccaca

SEQ ID NO: 463073 - DNA, 430 bp, Homo Sapiens
  misc_feature (358)..(358): n is a, c, g, or t
  misc_feature (376)..(376): n is a, c, g, or t
  misc_feature (406)..(406): n is a, c, g, or t
  misc_feature (413)..(413): n is a, c, g, or t
gcctttctgtttcttcagtttttgtagttctcatttcaaacatgaatttctagatttttatgaggctacattcgtatttcccttagagaaggatcaagggattcacaccttctgagatgccagaacacagcttgctttacttttgcttcatggaaatttgcctaacctatggctccttccagagtcctgccaggcgatccatgggttgggtctaggacctgtaacataagactgagtaggtgcgttagaaccagtgagaagcctttaaattctcatttccagtctcaaacagacacctgaatttttatttaggaatctctgagtgagtaggtttgttccgcgtacttacaaatatttngggttttagattgaaatngggggacatcaaaggattctgcttgtgttncggatcnttaaagaaataccaggg

SEQ ID NO: 463074 - DNA, 497 bp, Homo Sapiens
  misc_feature (456)..(456): n is a, c, g, or t
  misc_feature (485)..(485): n is a, c, g, or t
ggggtggcactaacagtagatgtcattggtgaggactgatggcaaagtctcattccctcacagccgcgctgccagctcgcctccccctcgctttgctgggagcctgccctggactccaaaaggacacgggttcacctcctttcccaggctggaggggtactgcccttccctgaggggccttctgactggggcaggaactcttttcgtgtgtccagctgggcctggaggcaagttcaaggtgtgtcacaccacacaccagggcaaggacctcatctccagggaacagggacaagtgagtggctaccagaaagtccccgggcagcctgggagttccccagagcctggctggtccttacagagcacttcttcccctggggccaccaggaccaaaggcaacctaaacactttgaaaggttaaaagcaagttgttgattgatggggttggggttggcactnggttgggagggttctggggcaccacaganccttcagtcctt

SEQ ID NO: 463075 - DNA, 588 bp, Homo Sapiens
  misc_feature (419)..(419): n is a, c, g, or t
  misc_feature (501)..(501): n is a, c, g, or t
  misc_feature (521)..(521): n is a, c, g, or t
  misc_feature (564)..(564): n is a, c, g, or t
atgatgctgtgagacaatctgagaagaattaaaatttaaattcatgtattcctacttttttctctgttctctaactgtaaaatattttcattacagatggaggaacaaatagatgttagataaatagatatataatagatcatccaaaattcttattcttatggttttatgtagtcagtatttacctctatttttctacatgtttatccttccaatttagttcattacttcctgcacctttgatgtcatatacataaacaggaaataacacatggtgggctgggatgtagagagagccacaggacttgtgaatgaaatccacagggcaagggatgtgggcgattccttttggcaatattgggaggggaatgcccaaaccctatgtttggctgtggggaaaagagtatgggtagtttccntcaaaacatccaaatgggtatttgccttatggtttcggcaccccacatccccaggacagccaaaggatttgaaggcgggtcnttggaaaaatttttggcacntcctggtttgccggcggctttttgggccttgcttaaactgggnggccttggacgtccccacacggtg

SEQ ID NO: 463076 - DNA, 430 bp, Homo Sapiens
  misc_feature (213)..(308): n is a, c, g, or t
  misc_feature (415)..(415): n is a, c, g, or t
ttttttttaacctttcagtgtcattgtgaggtttgccacatgccttgagaaataaagcccaatctgaatgctcaaacatgaaagtctggctggctcaggcaattggaagaagatacccatgcatggtaaccgctgaatgacaagttaggtttcctggagagaaagacctaactattcaccttatatacttaaataattgcctcctttttaagnnnnnnnnnnnnnnnnnnnnnnnnnnnnnnnnnnnnnnnnnnnnnnnnnnnnnnnnnnnnnnnnnnnnnnnnnnnnnnnnnnnnnnnnnnnnnnnnggagttaaggtagctaatcagctgaccttaaggtaattattcaaggtggggtctaatggcaatcacaggcgtcctttaaatgcgggaagaggggaaggcaggaggantcacttttcttaaaa

SEQ ID NO: 463077 - DNA, 434 bp, Homo Sapiens
aaatgtaaaactttctttcgtctgcatgtgctcagccatctaaattgagcaaatgatctggtgagcactgggttagaatcaggaatggtggaatacaatctgaacctctcagagcccagaacagagggttcctgacactgtgacactgtctcctggaactaagtatctcttgaatcatgacttggttttagatcagtcaagagagacccaggttttgccaggaatcgaatccctaaataacatgtttttttctcacttagctcatgaatttgcatagtagacagtagttctgaattagattttgaaaacctaatttcagggctcattttttcctgtgggccctaaatccattctattcaaattgtgtgatactggacatggcagtcatctgagggaactcagcgtaggatacttgaggcagctcctcggcctct

SEQ ID NO: 463078 - DNA, 656 bp, Homo Sapiens
  misc_feature (143)..(143): n is a, c, g, or t
  misc_feature (148)..(148): n is a, c, g, or t
  misc_feature (150)..(150): n is a, c, g, or t
  misc_feature (387)..(396): n is a, c, g, or t
  misc_feature (610)..(610): n is a, c, g, or t
tctaaagtcatttactaatagccagcacatccttcccaaactgtcaattgaaatcttaactgaaagttttactgaataataccaagctaattgctgttgggcacacctggatggctttcacctggtgttgaacctgctgaagngtggnantgctcaagattacgtgcaaggaatccctcccatctggtactaaaatttcagtgtgttctgagtgtcttttaaaccaaaatggaaatacagatacagggctgtagtattcagtaatgtgtctgctccttgttgggcagacaccagcggtttgcagggagagaccaagtaccatctttatctacacttgggctggcttgtggagaagggctgctttttttcagtcctacattccttcannnnnnnnnncattcttgaattcattgttttgtgggatctaagacccaggggtcatttgagaggtttgacagtatcttttctgaccagttgccacatgacttgcttgaccctgagcctgtgggaaatggcatagggacccagtctactatcccactgggcctgggtgtgtagagggggagagggtagcaaggtgcttcttctacggcccatggacttggggagncaggtcttgggcctccttcatggaggagtctagtggccatgttcct

SEQ ID NO: 463079 - DNA, 459 bp, Homo Sapiens
  misc_feature (27)..(27): n is a, c, g, or t
  misc_feature (40)..(40): n is a, c, g, or t
tggtatcccaagccaaccaggatcccnaccacaaagtccngcccacacagttgtgggtaaacctccatgtgagaagacctagacatttacgatgagcctcaattttgtaaaacagtaagtttaaagaatataatatgacacatttaatttttaagaggagcagcagcattcctgtgtcccattgtgatgcaccaaatatagttagattttgtcaacttcataaaaccttaataatttttaaaattgctttcatagagtttggattattataaaacaattaaatgtcagatttaaatttttgtattttaatttagcttttcaaatttattccattgaggtccttcaaatattaatagggagagtaccagtaagtagtacattaagtttcaaaatgatctatacttctaagagaagagattacgtttttaaatatgagagaattacatatatttccatcta

SEQ ID NO: 463080 - DNA, 426 bp, Homo Sapiens
  misc_feature (221)..(283): n is a, c, g, or t
  misc_feature (312)..(312): n is a, c, g, or t
ctatgccaagtgtttaagctttacttaaagtaaaattagagtatgaaacctatttgacaatatatgaatacaaatccataaaccctgaaacaaagcatatataaatgctcttaccaatgcaaaaacttccatctgttagatacataaagagcacttccttaaaagcgacatgtattttatactgaccgctgtagtcaattttaatcaaaaactacacaaannnnnnnnnnnnnnnnnnnnnnnnnnnnnnnnnnnnnnnnnnnnnnnnnnnnnnnnnnnnnnngtggcttaagggatcctcctggcctcagnctcccaaggtaggctggggactacaggtggcacaccactgtggccccggcttaaatattttaaatgtggattgggggtttcaacagttttttttaccccacaggtttttggatt

SEQ ID NO: 463081 - DNA, 369 bp, Homo Sapiens
  misc_feature (32)..(32): n is a, c, g, or t
ttaaaggtttatagttttgcctttcacaattntttttataaaatctcttagaattcacctctgtagtaagttaaaggagagatacaatttctgtgttatgtatgtgtgcatataccagttgtcccagaatatgcaaagaccaactttttcacttatcagtagtcataaattggattattatatgtgtatgggacatacaacacatatgtatgtgtcacatatgttgggaattcattattcaattatattggtcaatttgttccctgtgctatttccatgctgtagcagttttataataatttttgggatataacacaaaaatctatttgagactttattaatcctctccataatataactatttttcta

SEQ ID NO: 463082 - DNA, 448 bp, Homo Sapiens
  misc_feature (108)..(108): n is a, c, g, or t
  misc_feature (220)..(374): n is a, c, g, or t
  misc_feature (394)..(394): n is a, c, g, or t
  misc_feature (433)..(433): n is a, c, g, or t
caaacaaataagggctttattttctgtatgtcatgaagggaaaagagggaggcagtccaggtctaatatgctggccttcgaatgccatcagcttttcatcccaccatnttcagcatgtagattttttcctcatatgtgttgccttgtgattactagatggctgctcggcttctggcattgcatcagcattccagaaaggaagaagaggaaaggctaaagnnnnnnnnnnnnnnnnnnnnnnnnnnnnnnnnnnnnnnnnnnnnnnnnnnnnnnnnnnnnnnnnnnnnnnnnnnnnnnnnnnnnnnnnnnnnnnnnnnnnnnnnnnnnnnnnnnnnnnnnnnnnnnnnnnnnnnnnnnnnnnnnnnnnnnnnnnnacattttttaggggccaaancccccggagccaggattttttctgggcccaaagtttttngagaaaccccggggt

SEQ ID NO: 463083 - DNA, 485 bp, Homo Sapiens
  misc_feature (13)..(13): n is a, c, g, or t
tggcccgaaaccnaaaattcccatatgcccttgcacaagaagttgatgcccttgcccagaacagcctctgcatgcccatcagtaaacatgtacaagatggtccgtaatagacctataaattcaactttgaagcaactcacatttctatcacctgagaatggatttttaaaacctgtattatagtcaagcaatggaatactgtacccataaaaatgaatggattatagcctacactacttaatctcaggaacataatgttgacaaaaaagcgagtcacagaatgatatatgaaatagttatataaaactcaaaaacatccataaacaacatagttttggagtaagtagctgaaactataaagaaaagcaagagaattataaacataaatctcaggataattgttatgtctgaaggaaaaggggatagaaatgggaatagatgtctaggagtcttcaaagttagtagttaatattttcttttggctg

SEQ ID NO: 463084 - DNA, 284 bp, Homo Sapiens
  misc_feature (201)..(201): n is a, c, g, or t
gtttaagaaaaaccttgtaatgatcgaatacccactctgatgttttgccagcaaagggatatctaatatttcagaagcctctgagccagtctttgaaaaaatacaactatggcatctgcagcacaaatatttaaggacatcagaagcatgtcaaagctatttttaaagagagaaactgtataaggatgtttacttcatagnggtttatgttttatggcaggctggaatgtttatctccaaaagttaaattatcccttctccaaagttaaattatatatatatat

SEQ ID NO: 463085 - DNA, 410 bp, Homo Sapiens
ttttatagggaagactaagtaaatccagtttccaagaacctaaacgtgattgaggctccaagagtcagaccaacaaaagttttattctgtgttgtttactggtaagaatattattatcttgatactacctctcaagggtattgttacaaaatgccacttatggttaaagagatagatacaaagagttctatttgacagaagcttgaaactctggcatctatctgcccaacgatggggggctttcgttctgtaatttaatcctttgtaggatacattatttgtgtgtaattttatacggtgttcatatttttcctccattttgcattgtggtaaagtgtaccaaaatctcaaaggtattaaaatactggctttatattggcttggtaaatttaccggtggtggtaaatatt

SEQ ID NO: 463086 - DNA, 183 bp, Homo Sapiens
  misc_feature (144)..(144): n is a, c, g, or t
tgacccttggtgcctggggccctactttcaatactgtcagactgcattattgtcccaaacgttctcatttaataactgtaagcttaatttacaaggaaagacagtctctctggacaagatacatccattgcatggatatacagnaatcataatggaaaaactattaaagtatgtgttgagttt

SEQ ID NO: 463087 - DNA, 482 bp, Homo Sapiens
aaccctggaatttttttaaaacattaaaaagaagtgccttatgttgttgtgccaaattcagcaaaaggcccaaaacagcccaacagtactgaagcactaagtaaaccctacaagtaagcccacagattcctactaccttatgaagaaaggaggaggtgagagatacagctgacccaactttgctccccagtttgacaatgattattgggaagctaagcaattccttgcaagttaagaaaagacagcaccttaagtggaacctagtggaaaccactcagaagtgagggttgtgtgcaacagggatggctactgatcccctctaggtaactcctcttttgtgtgagaatccaagaacatagaaatcaagcagggaaacaccggcttcatggtcatttctctgaattatgaattgcaacttctgttattattgtttgcaaactactaaaaggtcacatgtgaatcaagtcattgaacagcatata

SEQ ID NO: 463088 - DNA, 503 bp, Homo Sapiens
  misc_feature (407)..(407): n is a, c, g, or t
  misc_feature (431)..(431): n is a, c, g, or t
  misc_feature (435)..(435): n is a, c, g, or t
  misc_feature (440)..(440): n is a, c, g, or t
  misc_feature (446)..(446): n is a, c, g, or t
  misc_feature (448)..(448): n is a, c, g, or t
  misc_feature (451)..(451): n is a, c, g, or t
  misc_feature (455)..(455): n is a, c, g, or t
  misc_feature (457)..(457): n is a, c, g, or t
atctccaaggattttcatattgccaagcagtcacataatataaactaaatgagttcccaaatgagttgtgtcaagtgtccatgttgttttttagagtcaagatatatttagtttaaatgtgaaaagaaatttcaagtagtctttctgtttcagtcaacagtctgtgaaatgccaaatactcactattgttacattggcttcttaggaaaactgcccctaggtactatggcttgtgttgattttcagtgaagccagccttgtttatcctgggtctacaaatgtttggacactataaagactaggacatgaaggaggctgacctcctgtcagcttaggagtgggcataaaattcaagccaattttgggcactcccttttggaatgggtggtttttggggtcctaattanccttctctctgtcttggggaagtnaggncggcnttgtgnanttnaggngnatttccgggacatttggagttttagggcctggattcccgtttttcc

SEQ ID NO: 463089 - DNA, 320 bp, Homo Sapiens
gtgtaagccactgtgcctggcctctaattttgattaatttttattcacaactgtttcttcaaacaataagaagtaagaaacatcctaatatcctaagccttcaccagatgggactgttgtcaccgtctatctgccagataaccccacaaaatctgagagcacgggtttccaggtaagatcagaatatgggaaaaggaatcaatggtcatgttttggttcactatcacatggttctaccagggacacaggaaatctgaggcctcaattactgtggatttcatcaaatgttttcccttcagggcattcatcccctaggggcg

SEQ ID NO: 463090 - DNA, 437 bp, Homo Sapiens
  misc_feature (188)..(188): n is a, c, g, or t
  misc_feature (271)..(271): n is a, c, g, or t
  misc_feature (353)..(353): n is a, c, g, or t
  misc_feature (366)..(366): n is a, c, g, or t
  misc_feature (372)..(372): n is a, c, g, or t
  misc_feature (408)..(408): n is a, c, g, or t
cattaagaaaatatctttatttattctgaaatgttccaataatcaatgtaaaaactgtggtagtggctctttcacaactttacaaattatagaaaaatgatttttcctcttctttacagaaatgtcactcccaaatcgtaccgggccctattatggctaaaacccagcaggaagaagggagcagagantacagcaagcagggctccggctctctgggtggccagaaggcttttcctacacattaaagcccaggctgagtctcaaagacctntgacccctctgaaggaggtctccatccacatggatctgtgggcacactggggcaggcctctgtcttgaaggccagtaggcancagtaagacctgnaaagcntgggcactcgtggtttggcaggccacagttcaaggncagctttgtggagaatgagaacaggaggc

SEQ ID NO: 463091 - DNA, 211 bp, Homo Sapiens
ttttttttatagagagagatctacttcagggctctttattttgttccattggtctatttgttcattcttgctcatcgaacattctggttcattctaacatacctgccttaatgactacagtacaacttgtcacattaacaaactcaaggagaaaaacatcatatcaatgagccaaaaaggcatctgactatatttagcagatatttctaat

SEQ ID NO: 463092 - DNA, 439 bp, Homo Sapiens
  misc_feature (66)..(66): n is a, c, g, or t
  misc_feature (99)..(99): n is a, c, g, or t
tagcacctgaatacagttacccacaagctccccttggcaaaaccaaatatccggttaatctgtgtncaaagactatcacccacagaactagcctgcatncatgatgcagcaaagacctgtgaatgttgttgctggtaccccatcagcgatgggcaataatgttatggacacctggcgctaagagtacatggaaataacctccctcttttgtttgtacctttattccttcattaagtacaatgactgctttagagattggctttccagtcttatctttaagaaatccatggactcccttgtgaacctccactgacatactaaggagaggtctcttattgtctgcccacaaggaagggagtcgtgcagcactaggaaagtaacagcagcttgtgtatactgtgatttccggacaatggccataggtgacactataatcctt

SEQ ID NO: 463093 - DNA, 442 bp, Homo Sapiens
  misc_feature (366)..(366): n is a, c, g, or t
tgtaatcttgttgataaaaatactgactccaaccattcaaaaatttcaccccatccctccttaagagattggatcaagtattactaaattgacctttaggtattacacaagaccagtgcttagcaaaaaataatgacaggcatccaaggaagggatgtatttgtagtgttattgccaggaaaggagagtactttggtttctgagcaccgaatattgagcaatatgtcagtcactaaaaggaagacagttctacagaaaaacaaatggtaacatttttcaatagcgtgtgtaggatagtatgcactatatacatcacgttaaagtaggactattcacacccagcccatgtggctaaaaaagctggantcagacagtgggatggaggacacacaacggccgttgaaggaacccggttacacttggggctttggacggtttggct

SEQ ID NO: 463094 - DNA, 478 bp, Homo Sapiens
tctttgatgtcagtgaagtggcaacatagccaaaaagttgggtaccttttaggaaatgatgttgtaagtctccttaatgtatcctgaggtaagtttcctactggcagcagattttgtaagaattacttttaagaatttcattctttttgtatggtcatggagctccaaccatttttaataggaaagtcttttgtaaattgttgtcgttttaatgtcatttctgtctttataacttgatcaagaatgattgggaggcaaacaggtttacaaatcaattctgtgacttttaaaaagttgacaatgttgtcaggttttaaccagtgtgggctaggtaaaaaggcagctcactcaatgttgggtgggctccctattcctttacggctccccctatccctaccccacaagcctttcggttattaaaatactacccatcttgttatagggttacgtggggtagtccagtactccccgggcctct

SEQ ID NO: 463095 - DNA, 373 bp, Homo Sapiens
  misc_feature (60)..(60): n is a, c, g, or t
  misc_feature (298)..(298): n is a, c, g, or t
ctgaccccatggcagcactttcaaaaagttgtttatttttttctctgaggatgttgggtngaacagcagagattaataggtttccacaagccacagtggccatttttcagatcatgggttcatatacatcgaaacatacatacacacacacacggcatatttatgtataatcttttttaaggcatacaaccaaaatctcatgttgaggagctgttcacccatcagtaaatttcaatatatatattcataaatcgtggcatcatttcaaggaatgctttgggagctgagtggggttttnaaggtcacccaaatccaattccctggatgtctctaggcccctttctttttcttcactgggggattctgggggtcc

SEQ ID NO: 463096 - DNA, 425 bp, Homo Sapiens
  misc_feature (297)..(297): n is a, c, g, or t
  misc_feature (331)..(331): n is a, c, g, or t
  misc_feature (337)..(337): n is a, c, g, or t
  misc_feature (379)..(379): n is a, c, g, or t
  misc_feature (400)..(400): n is a, c, g, or t
ttttttttcagaaagccatctaacatttatttaacatattttacgtgccattcattattctaggtgttttacattcatccacataaaacatcacggttgttcaatccacaaaacaaccctgaaaggaagtaaatcctccattttacagataggaaaataggcttagagagattaaacgttttattcaaggtcacagggctaaaagagtagcagaattctcagtcacttgattccgcttatcagacacagaagtaggacttcaggttaggaagaagggactaggaagttgaccagggngggaaatctacactctctcttcaaggcttagggncaaagnggaactgcctaaaccccactgggcttccatgtttggcatttngaggaagttgcagatttttanagtcttgggccttctcccttgttcc

SEQ ID NO: 463097 - DNA, 625 bp, Homo Sapiens
  misc_feature (228)..(269): n is a, c, g, or t
  misc_feature (491)..(491): n is a, c, g, or t
  misc_feature (507)..(507): n is a, c, g, or t
  misc_feature (536)..(536): n is a, c, g, or t
  misc_feature (563)..(563): n is a, c, g, or t
  misc_feature (592)..(592): n is a, c, g, or t
attttactattctaagtattccaaataagttgactcatacagtgtttattcttttatgtctggcttatttcacttagcgtaatgttttcaaggttcattcgtgttgtagcgtgtatccaaatttcatttatttttaaggctgaataatatcccattgtacgtacataacacattttctttatccattcatttgttgatggacatttaagttgcttccacctttggctnnnnnnnnnnnnnnnnnnnnnnnnnnnnnnnnnnnnnnnnnngtccctgctttcatttctttggggtatatacccggaagtagaaatgctggatcatatggtagttctgtgtttagctttttgagggaactgccatactgttttccacagcggcagtatatcctgtcaaattttaaggtgtcaagggtccagctccctttactaacctcctccaaggacattttttcaaattccccttctaggataggaggagactttctatcngggagggggtgtgggngatttacttgcagattgccttccctcagnctcttttaggagggtcttcttgatttnccacataggcttcggtcaggagggcaggngcccaatatatatttaggtgaatggatgaaagg

SEQ ID NO: 463098 - DNA, 426 bp, Homo Sapiens
aatgggaaatactttaaaaattgtaatcaaagacattagtacagaaactttcataatgtattttatttttacagtaaaattaatttatgtaaattgatagaattttactaatttcactcccaagttacattaaaaggcttacatatgtttgataatagcatatgtaaactagaactctggatgatatccattggtcataatacgtactatgtagcggtaatggtgacttttgtgattgcacaagtctagggatgccccaaatgacattgacttaggacatctggttattctaaggctgaaactgaagttgaatagaaggttttaggtcaaatactgagggtggaaaactgagggcagtcctgggcgggggggagtgagtgtgtgtgtatatatacacacataggacatcatgcttctaaaccttta

SEQ ID NO: 463099 - DNA, 369 bp, Homo Sapiens
  misc_feature (72)..(86): n is a, c, g, or t
  misc_feature (186)..(186): n is a, c, g, or t
  misc_feature (286)..(286): n is a, c, g, or t
  misc_feature (356)..(356): n is a, c, g, or t
gcttaaacgatcctcccatctcagccttcaagtggatgggaccacaggcacgcaccatcatgcccggctaannnnnnnnnnnnnnncctagagactttcaccaagttacccagggctggtctcaaacttctgggctcaagcattccgcctgggcttggcctttccaaaggctggggattacaggtntgagccaccacgtccagccttggggaatttcttaatgtgttcttttttaaatcaggttggtcctttttctgatgggttatttttgctcataagggcggtnagactttgtatggctaggcagaagttactgaattcttgtattctacaaataattaaattcgtataatttngtaggttgttttg

SEQ ID NO: 463100 - DNA, 463 bp, Homo Sapiens
tttttttaattgccatcccagtaggtgtgaagtaatctctccttgaggtttcgatttgcatttctctattgactaatgatgttaaggatcttttcatgtatttatttgccatttatatatcttctttggagaaatgtctaatgaaatccttcgctcattttaaaaattagattgtcttcctgttattgagttttaggcactctttacatactctggacattaaacttttatcagattatatgatttgcaatattttcttccattctatacggctatttttttcaccttggtaggcattcttgatggcataagagtttgtaattctggatggaagtccaatttatctggttttttccattaactcttaaccgtggtctcccaacttccctttttataaggatggcaggatatggggtgctcaggtataggaatggaaagactgagggccaattaacaggcacaa

SEQ ID NO: 463101 - DNA, 468 bp, Homo Sapiens
  misc_feature (371)..(371): n is a, c, g, or t
  misc_feature (397)..(397): n is a, c, g, or t
gaattccatgtcagcgttgggattctcagtatcctcacgagcatgacatgactcctgaaaatttcaagtgcaaggacctacgagaaaattactgccgaaatccagatgggtctgaatcaccctggtgttttaccactgatccaaacatccgagttggctactgctcccaaattccaaactgtgatatgtcacatggacaagattgttatcgtgggaatggcaaaaattatatgggcaacttatcccaaacaagatctggactaacatgttcaatgtggggacaagaacatgggaagacttacatcgtcatatcttctggggaaccagatgcaagtaagctggaatgaggaattactgccgaaatccagatngatggatgctcatgggaccctgggtngcttacacggggaaattcccacttcatttccttgggggatttatttgccctattttcttcgtttgttgaag

SEQ ID NO: 463102 - DNA, 450 bp, Homo Sapiens
  misc_feature (406)..(406): n is a, c, g, or t
  misc_feature (408)..(408): n is a, c, g, or t
atataaaataaagctttttcaggcccttagttcccctcatttaaaaactgatgccctgtgtatctttcttctgttaaagtctgtattcctaattgaaatttgacttatttttaaagttgtcagaatttatgtgtcccaaatcggtgacatttcctttgatactcctgcttttgcccaggaatgatttggcaacctccgagaatcttggtcaaattcttctgtgtgtcataaggatgagaaatcattactctttaagagtgatttgagcctgggcaacatggcaaaacctcatctctataaaaattagccctgggcttggtgactgtgctcccagctactccagaagctgaggtagagaggattgcttgagcccaggaggtcgaggctgctgtgactgtgaccatantnctgcactccagcctgggcaactgagcaagactcgtctcaaaa

SEQ ID NO: 463103 - DNA, 501 bp, Homo Sapiens
  misc_feature (33)..(33): n is a, c, g, or t
  misc_feature (59)..(59): n is a, c, g, or t
  misc_feature (72)..(72): n is a, c, g, or t
  misc_feature (77)..(77): n is a, c, g, or t
  misc_feature (89)..(89): n is a, c, g, or t
  misc_feature (97)..(97): n is a, c, g, or t
  misc_feature (131)..(131): n is a, c, g, or t
  misc_feature (177)..(198): n is a, c, g, or t
  misc_feature (204)..(204): n is a, c, g, or t
ccataaatcccggaacacctttaaaaaaataangtccaaatttccaattggaattaccngccctttaaaccngaggnaaggataccacnggcatccngttataaatggagggaacctaaggccctgaaaancctttattttatatagaaattgcccaaagttttagtccttgaagcnnnnnnnnnnnnnnnnnnnnnntgaagnccaaacagagaaaagagcaatacagttggccctccgtatctgtgagctctgtatccatggattgaaccgactgcaaatcgaaaatattttcaaaaaatggatgcttgtgactgtactgaatgtgtcaactgtttttcttgacattggtccctcaacaatacagtataacaactatttacatagcatttacattgtatgaggtattaataacatgtacattcatgtgtcacttaacgatgatgatatgttctgagaaatgcatcattaggtgatttcattctgtaaacatcatatatt

SEQ ID NO: 463104 - DNA, 212 bp, Homo Sapiens
  misc_feature (173)..(173): n is a, c, g, or t
  misc_feature (188)..(188): n is a, c, g, or t
  misc_feature (193)..(193): n is a, c, g, or t
gtttgagagaccactcctgggctcttattcttttctattgggttttcttttctttattaacccagtaatgtttcaaccttggtttgggcaacttcattggggaaagggaagaacccagccctctgaagcgcaggtgagtagaaggtcagtgccttcgatggtagacagggttntggtttcaagaatgntcttngggcattacgagagaaaat

SEQ ID NO: 463105 - DNA, 249 bp, Homo Sapiens
ttttttgccctcttaaagtctaattttaggatggatgaattcagatgtttaccagagtgtgtattttacataatgttcttgattaaaaagacttgtttgtaaattatccgttgtttttgcatatgcccagttgatgtgataaaattttcattgtcttgccatataaagccttggttatcaacaggtggaatgtagatattgtaaagctttttgtgaattaaaagtgcaaaataaagcaaccacatttaa

SEQ ID NO: 463106 - DNA, 433 bp, Homo Sapiens
  misc_feature (385)..(385): n is a, c, g, or t
  misc_feature (404)..(404): n is a, c, g, or t
acaatttcaacatgttttttatttgctcacttaacattccaaacaaaatgacattttacactattgcttttacttaagaagtcaactgccttatccaaagtagacaaaaatcccaattcctttaagtgtccaagtggtactttttcccccagagaaagctacttgaatactttaacagaaacataggaatcgtcctataatagtaaggtagtagttgggtctaacctgtactacatttaaaacttttctcattaaaaaatgaatacaggaaaaaaaccccaaacacctccagtcatcattcctctcagatttttaacaattccactaaccttcatttaaaaattggcttttgtggagtgggtgttttaaatatggaaaatggganagtaaggcctccccaacancctgtttcatagcgcagtcggggtagagc

SEQ ID NO: 463107 - DNA, 159 bp, Homo Sapiens
ctggcacccagccaccttcaaaacttaaatagtattacattatcttaaattacaaaagtagggcatcaaaaccaagtttccctggacttttaacctctattcttatggatgtctggattcttatttaggtttttgggttgttctggctgtttttcaatt

SEQ ID NO: 463108 - DNA, 422 bp, Homo Sapiens
  misc_feature (376)..(376): n is a, c, g, or t
attcctaacactaggaagtagattttgctcatcaaatgggaaatgaaatatttatagtaatgaagagtatgattgtaatcactgaagaaacagtttttccccttttcccacccactaccagccctattcccttcagagactcagtggaataggaagatcagagtgtttacagatagtatgccctaatacaatgagctttctccatcttattcatgggaaactccaagtagtgctatcaagtgttgggcttctccttcatcaaaggacatagttgagctttatgacagtggctgataaagtcaccaagttctacaaaatcggcagtgacaatattgatgccactctctcctgggcttctgcgtgcgggacccacttncatcatgggcaggaagagctctttctatgattgtttctctgaggcc

SEQ ID NO: 463109 - DNA, 457 bp, Homo Sapiens
ttttttttccagaatacgtgttttattgaaactgtgcttatgacttgcatactatttcaaaaatccaacccagaaacactagttaaatctttgtatccaataattataataacctacattggaaacaatcacttcggctgttcagtaatttgtccgaatgaaatgtaacgtctgatgcccctctatgtgaaataaagcacgcttatttcaaataaatgagctttgttcacagctcttctctgctccattttccctaaaggctgccactcttgggtccctttacatactgttggctatttttttcatgatagttattttaaggggaatgacaatgttcccctcaaatcccacatccgtctcatacaaacataaggatggacccaatgttaacgtaaagtgactgtgtaatgggtttttcaacccctaaatagtaggggacagctcagtccgaaaggtt

SEQ ID NO: 463110 - DNA, 470 bp, Homo Sapiens
  misc_feature (437)..(437): n is a, c, g, or t
attaaaaaaagaactaaaaagaacactttattgtgataataataatggcttcatttcacatcagaatttcaactagtaaaaattctatttacaggtgtcatctgctagaactagtcaatcttgttttatattgtgagtttttctttccccaattacttatacaaatcagatggtggagtacatgataagaagtttagatttgcttctaatttgggcacatgatgtaacaatttcctttctctatcatttattactttgggaagcttttgggtttctttgtttgggcatctaaattgtttaaaatcaccttgccttttaggttcatgggaggacaatggcatatctttttcataggtctacaccctaggaacaaccataaccccaattatttttggggcaccacgggaccagtttcgtggggaggccaatttttcccncagaccgggggtggggccttggggatagggttt

SEQ ID NO: 463111 - DNA, 156 bp, Homo Sapiens; identical to SEQ ID NO: 139756

SEQ ID NO: 463112 - DNA, 514 bp, Homo Sapiens
  misc_feature (31)..(31): n is a, c, g, or t
  misc_feature (43)..(43): n is a, c, g, or t
  misc_feature (65)..(65): n is a, c, g, or t
  misc_feature (78)..(78): n is a, c, g, or t
  misc_feature (85)..(85): n is a, c, g, or t
  misc_feature (126)..(126): n is a, c, g, or t
  misc_feature (356)..(367): n is a, c, g, or t
ctaacccctgggtaaagtccccaaaaggccncggggaccctcngacacctgttacctagggaaanggcctgaaggagntggaggntatctgttcctcaataaacagagaaaaacattacctaaagnaaaatgtaagatcaatttccagatctcccttatcccatagataaggaaatgccaagttattaagagaccctatgaaaaattgcctgttccagacataaagatgcatcctttttatttcagatctttacccacttaagtttagccctagtattttttaaggcccaatgaaacagttggtgaaaaagaataaatgcatttgtgatctccagtgtgttctctccattctagcnnnnnnnnnnnnttccaaaaacacttgttcatacagctacaagtttgaggcttttcataggaaataagatttgaggtctagactaattgattttatagcttcacaactgaattttgtaatgtagccacaggtccatacacagcagaagcttagattaat

SEQ ID NO: 463113 - DNA, 699 bp, Homo Sapiens
  misc_feature (155)..(155): n is a, c, g, or t
  misc_feature (488)..(488): n is a, c, g, or t
  misc_feature (614)..(614): n is a, c, g, or t
  misc_feature (654)..(654): n is a, c, g, or t
  misc_feature (689)..(689): n is a, c, g, or t
aaaatattcaagaagtgtaaaaaggggatcctggtgaacatggacgacaacattgtgaagcattactccaatgaggacaccttccagctgcagattgaagaagccggggggtcttacaagctcaccctgacggagatctaaaggcctgcgggcancagctccccaggagttcagtgcaggtgtttctagatcttacggtttggcaactgcaggtaaccccagtcagccatgtcgccagcacaggtctatgtcgagggaatgggttccttgcaggttggaggcggggttgcatctggcttggtggtagcatttaatctattgcattggtgtttttcagatgaaagagaaatccatataccattatgtttgaatttcctgatatatacaggatttaaagtgaaaactttattccaagagtttaacagagtctctggggaagcttttagggacatctgctacgttatttattcaaattttggggtctctgnccttgtgcctacagtgtcgtgggcctgctcgctagcagaagtcagaaaaggcgataggcttggctttaaggatttcgtgcccttgcctgaattcagtacaactccactgcctcacgttagcgggangcacctgaagagtacggggggagccctctctcccttaccntctcactctccaccagatgtttactaaacagggcntgttactgaa

SEQ ID NO: 463114 - DNA, 506 bp, Homo Sapiens
  misc_feature (469)..(469): n is a, c, g, or t
tcaaaagtgttcagaaacaaatatacagcctttaagtggaaatagagctatctggtactatttttaaaaaattctaaccatcaagaaacaaaagttcaggattttcttctcttatggaacttttatttgaaaggaaagtatagaaaagttggtctcactttccagtggacaaattcaccatatcgtcctgatctgtaccatatgaatgttaagaatatagattaagttatctttttccttgattaaggacaccagtcaattatatggatttcccaggactggtatatgtctgatagtcactggcatggctgtatctgttgttaaatgtggagagacttctgtattgggtagtccatagctgctaattggagccccaggtaatccctgactgacctggttcattccgctgtacccccttggattctgggcaacttaaaggggtttaacagctgggaggcttctggggatnccagctttgagctggtgggttaaggtacactggaacc

SEQ ID NO: 463115 - DNA, 511 bp, Homo Sapiens
  misc_feature (29)..(29): n is a, c, g, or t
  misc_feature (41)..(41): n is a, c, g, or t
  misc_feature (76)..(76): n is a, c, g, or t
  misc_feature (432)..(463): n is a, c, g, or t
ccaatatttttaaaagcctgaattttagnaatgggttatanaataatactgcctttaaaaataatagcagaaatangtttaattatgtaacagaagtacattagccttaagatagtcttgagataaatatcaattctgtgattttaaaaaatcctcttgttggtagtagtgttttgggcatgcattctttaaagcataaaagcaaaaataaactctataatctagtgtactgtgcattatttaataagcacatatattttatttccatttctaagcaactaacaaaatacattagaatccctaaagttatgttttggaaaaataaactaaggtgacctttttggcctctttttctacaacgtgagaaattaaaactactttgcacttctgcccaaacacaggaaacactgatatatttacttgggaactaannnnnnnnnnnnnnnnnnnnnnnnnnnnnnnngactgattatgaaaatatgcaataagtttactctaggtaatgagtgaa

SEQ ID NO: 463116 - DNA, 153 bp, Homo Sapiens
atcactatcctccttggccccatgggacaggggaaatctgcacatagaggtggtcaaaaatgccaaataccatggggcagatctacacatagaggtggtcaaaaatgccaaataccatggggcagatctacaatagcatgcaggagagcagcg

SEQ ID NO: 463117 - DNA, 590 bp, Homo Sapiens
  misc_feature (60)..(60): n is a, c, g, or t
  misc_feature (67)..(67): n is a, c, g, or t
  misc_feature (69)..(69): n is a, c, g, or t
  misc_feature (72)..(72): n is a, c, g, or t
  misc_feature (480)..(480): n is a, c, g, or t
  misc_feature (496)..(496): n is a, c, g, or t
  misc_feature (514)..(514): n is a, c, g, or t
  misc_feature (522)..(522): n is a, c, g, or t
  misc_feature (543)..(543): n is a, c, g, or t
  misc_feature (571)..(571): n is a, c, g, or t
tgaacactattaggtttgtatgtgtgtttaattggaagaattttatatagagtatctctnctgcttntnatntacctgggtaccacacaaccaaatacacattgagatttcaagaaatgatgatgaaagccagaaggccagaccacagctctgcagcctgtttcctacaaccagatataaaactctttctcgtcgccatgctgatagtcacactgaactagaactgtcccaacacattcttcctctctcataatggcttccatttaatacagggcaaagccctttaccttaggcaaattctttatctttcaaaagtgaccaaaatgaggcatttcaaccttggtctgcacctcaataggagatgctgatcttgagttgtaatgaggaaaagtggggcatatagggagattttagtgactggcagtcaggctgtctgggcatttcctttcttcagtttggcattcttaaaaggactacatnttgttcaggcttattntccacctggaattttggnggcctggnttttaaaaacattttcatttnattatattcccctttctttccttacctnccttttttgggttttgttc

SEQ ID NO: 463118 - DNA, 418 bp, Homo Sapiens
  misc_feature (342)..(342): n is a, c, g, or t
  misc_feature (361)..(361): n is a, c, g, or t
ttttttttagagaggagactgtctttatttttgacccttcattttctgcaacagtcaggagttgacatattttggattaaaaagaagaaaaaattaagcaatcatgcaaatcaattaccaatatattcacaaaagatccaaagtatatagaatatttgctttcttattcctaggattcatatagactaaaaaggatctgtatataaacagtaaatattctatcatcaatgcaccatttgcagaactgcagagtatcaaataactgggatagctagggagttaaggtgctgtgaagtattacaggctactgtttttctaactgctggaaagcaccaaggacantacaaagttttgtttaggnaacagtttttcccttggctaccttgtggaattcaaaggggaacttctttaaagggcc

SEQ ID NO: 463119 - DNA, 213 bp, Homo Sapiens
  misc_feature (91)..(91): n is a, c, g, or t
  misc_feature (178)..(178): n is a, c, g, or t
caccacacctgggcccctcattttctgttttttaaaaactcagggctgcagcacacaggaataggataggcaagtgcacaaggttgggagnacaaagaaaccagtttaaggaggacagtttttgggtaatcttgaattgatgggagggccaagtttaggaagggcagttacaacaganttttaagggttaattcctttgaagttcttttgccc

SEQ ID NO: 463120 - DNA, 527 bp, Homo Sapiens
  misc_feature (452)..(452): n is a, c, g, or t
  misc_feature (469)..(469): n is a, c, g, or t
  misc_feature (514)..(514): n is a, c, g, or t
agaaattaaagaccttgctatcaagaggcgccaaattttaagcaacaaaggtctttctgaagatgagaagaacacaaaattacaggaactagtgctgaagaatccatcaggttctgggcctccacttagcatagaggatttaggtttaaatttccagttttgcccttcctcaagaatatatggttttacagctgtggatctcaagccaagtggtgaagatgagatgataacaatggataatgcagaagaatatgtgggatttgatgtttgacttttgtatgcatacgggtattcagaaacaaatgggaagcctttaggagatggggtttaattaaagtttttccaatgggaggaaatttaagttccttgcagccctggaaggaagtcccaaatgattctttgtgggaaaccagttcaccatcctggggcagccagagggtatttttccattnacactggaaccttaggnggggtttttacacgtgacagcccggggtttcccgagggttttgtnaggggtttttttt

SEQ ID NO: 463121 - DNA, 432 bp, Homo Sapiens
  misc_feature (19)..(19): n is a, c, g, or t
  misc_feature (107)..(107): n is a, c, g, or t
aaactctggtgtcactatnctgtgtatagtgacctcttgactttcaacctgagcaccctgaatatgcactctgacctttgaaattgggggagcttccaaaggcaggnttaaggtccacaggctgctccccagggacccccagcacctgccttcaggatgcctgctccccagagccccggactttccttacaaagggctgtatcaatattggcctctggacactgcacttccctcacagtggggatgaacacatcatcctctgagctgggggcagcgaaggagaaccttggtaccattaatttggggaatttgacagttaggacagaatcttcccacagttgatccacattaaccacagaaatctgggatggcatatcagtacttgaagctttcaatttaagtggaccttcaggctgggaagaccatttctct

SEQ ID NO: 463122 - DNA, 518 bp, Homo Sapiens
  misc_feature (69)..(69): n is a, c, g, or t
  misc_feature (184)..(350): n is a, c, g, or t
ggcttttaacaaaacggcttctcttttgaaatcccaaaagttaaactaaatcttttcctaacctaatcnttcatttccctcaataaagcgaacactcaccagtttcccccattttcccaaccctaatggttttcttattcctacgtggccacagacaggaacaattcactagcacagtggttcnnnnnnnnnnnnnnnnnnnnnnnnnnnnnnnnnnnnnnnnnnnnnnnnnnnnnnnnnnnnnnnnnnnnnnnnnnnnnnnnnnnnnnnnnnnnnnnnnnnnnnnnnnnnnnnnnnnnnnnnnnnnnnnnnnnnnnnnnnnnnnnnnnnnnnnnnnnnnnnnnnnnnnntcactagtacacccccgacgtgttgtcctgatggatccttccaaaaaattgttcagatgccaaggcttgtgaatcgcacacatggtactcaatgcctgggcctcacatcgaaggcttctatattgagaagaaaagaaatatttgtcatgactcattgcctttttcaag

SEQ ID NO: 463123 - DNA, 495 bp, Homo Sapiens
  misc_feature (70)..(70): n is a, c, g, or t
  misc_feature (439)..(439): n is a, c, g, or t
  misc_feature (448)..(448): n is a, c, g, or t
ggccagacacggcattaaaaagctagatgcatccagtgaaaagcagtcagccgaccaccaggccgcgganagtttctgtgcgtttttcaggagcttggctgctgagcacgggctgtccgccgagcaggtttacaacgctgatgagaccggccttttctggcggtgctgccaaatcccactccggaaggcggggctgtgctggccccaagcagggcaaggaccggctgaccgtgctgatgtgtgccaacgccacgggctcccacaggctcaagcccttggccatcgggaagtgcagcggtcccagggctttcaaaggcatccagcacctgcccgtcgcctataaggcccaggggaattgcctgggtgggacaaggagattttttccgattggtttcatcatatctttgttgccctcggttgagagagcatttcagaaccntaggttttngccggaagacagcaaagccttttttttgttggacagttcccggggtt

SEQ ID NO: 463124 - DNA, 456 bp, Homo Sapiens
ggtcttatttctgtccctttccctggtttgttatcgtaacctgtagtgccaactctgcttccagaggggtagtgcaggatgaaatgctgaccctgatgttgcttctcattcataaataagtagaaagttgtttctccagtcttttgggaacacaggacttaaaagtcacatcatgtgtagatattacaagcagcattaccaagacatggcaaaaagagtttgtctgaattgtaatgttgcgtttgtgaacctattctgggattttcagaggtacaaggttagaatgctacaatgttaccactgtgccttccaatgtttatatcatcggaaacataacataatcaaagtggctgtgatttaacaaaatgattaaagtgttacctacctgtgtagccgaagtagtgtgcagtgaggcgtttctgaatacatggtcagatttttgggaaaaaaccaaaa

SEQ ID NO: 463125 - DNA, 483 bp, Homo Sapiens
  misc_feature (41)..(41): n is a, c, g, or t
  misc_feature (72)..(72): n is a, c, g, or t
ccccaacatcacacccaaaaggtttaatcaacatgcttcantttgcaatttccttttggggagcgtaaatangatcatttaaatacatctggctcttggctgtttgctggacatatattttgcccagatttttaaagtgtgtactaaaatttcctaaggtgaaaaaggagattccaagaactattaaaattagtacagagctgcccaagaaactccattctagggtattttattttttgaatattttcccaaaatgtataatactgctatttagcatttaattcaaaagtaggcagcacattgtatttctgtcccatttaacattaacatgttaagctcaacatgtttttttcacccaaatccaatgtgtattttatttccattaaatttctaatttggtgaaattctagttattttattatacatttataataatttataataattatataaatttacaccacttatacatcatgttattct

SEQ ID NO: 463126 - DNA, 428 bp, Homo Sapiens
  misc_feature (199)..(214): n is a, c, g, or t
ttttaaaattgaaagtgtgcgttctttattctcatattgatacatgcattttctgggggtggaggataagcagcactttccagctgcagttggcttgagaggatgaagcacatgcactttttccagttggtttattgcatttcatgtacggtcatgcagttctccgttcacatgtgacctgtgaacacctatttcgacnnnnnnnnnnnnnnnncacaatttccacagtaaaattttaaatgtttcatacataccactacaatataaaccataaaagatatatttggtaataaaaacttaatagcacttttaagttataaattaacttttaccctggaagctgagatcttcccaccatgtggtgtcttttgccaagaagaggcaacaacattataatgtggaatcaacactgtggctgccctttgctg

SEQ ID NO: 463127 - DNA, 372 bp, Homo Sapiens
  misc_feature (351)..(351): n is a, c, g, or t
ctttgagcctctcgcctccgtatctgggagtcagaggggaaagggctgagtttatggcctctgtacttctgtgactctctttgggcctgtgtggctgggaagcttgttctcacccagttccagcctaattcccaagaccaagatgaggataagaatctgtttccagagctgagagccctgttctctcctgtcactgcaatgacaattccagctctctggagccaggctggccatccctctgtgagcaggagcagccccctggggaaggcaggtgggctgcctgacgcagggagagggtagagggctgcaattgtctttctggggcctggtgtttgcagcccaggagctctncactggccttcgtaggaataa

SEQ ID NO: 463128 - DNA, 487 bp, Homo Sapiens
ttttttttatcaaggaacagtttattttaatacataaaatgtttccttacgagcagtaaaccttttcccagaaagtctatattcagaaagcatacaatttgaatgctgattattttaacatgaaaagtgattacaagaaaaacaaactgtgtttagcctcaggagaattgacagttaaacagtacagtcaattttaggtggatgtgtgtcttttcctatgtatagcaggaagggtttttaaacatacgtatttttctggaggggaatcttgagtaagttatctcacatctttctacattttgtccttggggagaaaggacacacagaggaggtcatggtgttccaacattcgcttgaattagagtgttagtgtcaaggtctattccactgtgtctctgtagcatctccagggtaagcaccttttcttcttcaaacagtggggtcagggtagttttatgactaatgggttgtgatggatgaagtttcc

SEQ ID NO: 463129 - DNA, 551 bp, Homo Sapiens
  misc_feature (29)..(29): n is a, c, g, or t
  misc_feature (32)..(32): n is a, c, g, or t
  misc_feature (34)..(34): n is a, c, g, or t
  misc_feature (59)..(59): n is a, c, g, or t
  misc_feature (61)..(61): n is a, c, g, or t
  misc_feature (67)..(67): n is a, c, g, or t
  misc_feature (69)..(69): n is a, c, g, or t
  misc_feature (318)..(318): n is a, c, g, or t
  misc_feature (459)..(459): n is a, c, g, or t
  misc_feature (476)..(476): n is a, c, g, or t
  misc_feature (492)..(492): n is a, c, g, or t
  misc_feature (500)..(500): n is a, c, g, or t
  misc_feature (513)..(513): n is a, c, g, or t
gtgtggggctggactctgaggcggccagntangngaacggttatcctgggcacaccagngntggtgnangtcctgagtcatgctccctgggtagggcatccagctcccagcctgggagtgctgagagccaaatccaccgtagagcaggggtgagagtcagggtcccacctcctctatctgccggcaatccagtggtgacctagggtaaaagcttgagagtcccatacacacggtcatcccacgacatacctcacaggccaggcagggacacacagcccccttccctccctcccaggtaccgtcatagctgctagtgtnactgaaggcagtgtccctggccccagctgaagcaccgtagccagccagcgggcttcacgcaccttggcctgttgctcctagggtcacttgtgccattcagccaaggggacgaccgtgcctgctggcccagctgagctccgnccagtgagcccaccccncattctcctgccactnactctcgntcttctgcttttnccagcaggaagggcccagcttcaccttacgagacctgc

SEQ ID NO: 463130 - DNA, 456 bp, Homo Sapiens
  misc_feature (364)..(364): n is a, c, g, or t
  misc_feature (429)..(429): n is a, c, g, or t
tttcctttaatgataaaatgaatgactttatgatgcttgactgctctgtaaggtgctatataaatgctaagtatttatttgtaaagtatataaacacaaacacacacagccaacatctgctggttttatgtagatgtagtgtgaaaaactgtaaaatttatattcaaattttgaaacatttcccaaattgttacaattacatacttggtcagagtaattcaagttcaataaatctttcagatttctagtattaaaaaaacttttcccccttttgctatagtgttaatttaaaataaatgaccaattacttctaataatgaaactttttttcaaaagcagaggaaaatagcttttggggtatttntaaaaaataatccacattgtatacatacataagtacacacatattacatctgttatcttttattntgttctggggtacaaacacatgttagg

SEQ ID NO: 463131 - DNA, 485 bp, Homo Sapiens
  misc_feature (424)..(424): n is a, c, g, or t
  misc_feature (437)..(437): n is a, c, g, or t
  misc_feature (442)..(442): n is a, c, g, or t
  misc_feature (465)..(465): n is a, c, g, or t
ttttttttaaacaaagttattggttaggcctaagagacccttggtatatcacctgaaatcttggtggaggttgatattgatttattactctaagtttggtatgcagactgttactggtctaagaatgagataaggagtttgtgccacaacgtaaaataaactaagacactaagcacattgcttagttctactgacatttttcaatgaagaaagcagtacatggatttatattctggttcaggttccttgtgccctagaagaccattaaaaacagtttgtggacaggttactttcagtagtactgctatagttgacaactgccatatccatgggctgttctattcaatcctttgcatagtcttcttacatttaaaggaaatttccattttatggaggtttcagcttcccaaaatagaagtcaaanacaattccccatnttccntaaaaccagattgcagggctgtngacccagcctcctccattca

SEQ ID NO: 463132 - DNA, 710 bp, Homo Sapiens
  misc_feature (166)..(166): n is a, c, g, or t
  misc_feature (594)..(594): n is a, c, g, or t
  misc_feature (603)..(603): n is a, c, g, or t
  misc_feature (649)..(649): n is a, c, g, or t
  misc_feature (658)..(658): n is a, c, g, or t
  misc_feature (676)..(676): n is a, c, g, or t
  misc_feature (698)..(698): n is a, c, g, or t
cacaatgtgacgatttacttgaaacaaggacatcttagtggcttaagcaatatgtttaagagattaagatagaaatggaagacagaagtacaagcacacgtgcacacctacaagtttttgtatatatacagggcaagcaagggagtggtcagagcaatggcgagantacaagaaacagcaaagatgcgcctacttaaaatgtcattcacataaatctttccaggattcttgtattggaatataatcttttattttaccactcaacgattaagccattcaactacacaacacagataaaacggaagttataacatataaaccagtacctgcccacactcatagcagtgaggggaataaaaatcaaggttgcactgtaattccatgactctaaaaatcaagtctatttgacattggtttgaagcaacagaacctttataggcaggattcccctttttaaaggaaaaacccaaggagaggatgatcaaggcacaaatggattcacttcatggcattttattggataggtctatattttaaatctggcaggtatggacatcttacatagggggaaaaaaggcttctttcctaaaaggntaacttttnaattaattcaaaccagcttttaatatggattggaccttttcagggntttgttttngcttttaaacaggttaantttaggcggtttgttaaggcantgttacaaaggg

SEQ ID NO: 463133 - DNA, 184 bp, Homo Sapiens
  misc_feature (134)..(134): n is a, c, g, or t
  misc_feature (143)..(143): n is a, c, g, or t
  misc_feature (162)..(162): n is a, c, g, or t
acaatatctttatttagctcaggtagttgttcttacacatttttggatacctgggttagaattttccctattacattaaatcaatggttcttaagctcttatgcaagcatgcaagctcaatgcaggctagaatngaaggattnttgtgtacaaacattaaanatagacatttttttacaagagt

SEQ ID NO: 463134 - DNA, 482 bp, Homo Sapiens
  misc_feature (427)..(427): n is a, c, g, or t
  misc_feature (458)..(458): n is a, c, g, or t
  misc_feature (464)..(464): n is a, c, g, or t
ttttttttaactgtataaagataaaacaagggtgcaaggaaagaaaagaggaacgcaaaaatgcaagcagaggtagaaagagtgtaacgttccttaaagataatatgccaacccacttggctcttcgtattttctctggcacttgaaaatacatcctgtatccccactgcacttatcctacgtccattaggtcctacagatcaatatcccattccctgggatgggcttatcctagctattgggcactgtccctcagaggaacttgtgggcatgaggaagaaaaggttattttactttatactctgaaaggcaaattcagtcaggacaaacacaggccttccaattttaggaaatctacatttaggaactgggaaggcttgaagggagtaatgtaggcaacttaattctttttaatttcccctaaggngcacatttatttttacttttcccccaggggncaaatntttaaggggaagggtaat

SEQ ID NO: 463135 - DNA, 343 bp, Homo Sapiens
  misc_feature (128)..(128): n is a, c, g, or t
  misc_feature (161)..(161): n is a, c, g, or t
  misc_feature (299)..(299): n is a, c, g, or t
aacgaaactagacaagagggaatgactgtatttaatctaacaacactaccacagaaacctaagaaattcatcaataaaggttgtccaactaaaagaaacttgcataatcctgtctttgcatacctgantactttaaagaggcctgggacattgaaactcangggaagcagatacatttgttaccagctggggaactttagtatcacgggaaactttgaaaagagggcatctcttaaagggctggacagtttttcccaccatttaaaatgtcagttctaggcaaagggactgtatttatntccaaatttttctaggcatctgggaaatttacattggaacataa

SEQ ID NO: 463136 - DNA, 372 bp, Homo Sapiens
  misc_feature (335)..(335): n is a, c, g, or t
ttttttttacacatcattaaatatttaatcaccttttgaagtcctaagcctttatcataattcatccatctagacagttcattctatactatagattccaaggcccccttaagagggggagtaaaaagaaaattgggagagaaaaccctctgagaggcagggttaaattatctcaaagatgactttctattgatgctgtagtgaacttgcttcaccccgaaacccaccaatccacagtagggtcaaccgattaagtccactgctttttagtctccaaggaatcagttttacaaaagatgccacatctgttcctttgggattcatgtagggggtgnaaaaatgggatgttgcattagctcttggggtattgta

SEQ ID NO: 463137 - DNA, 338 bp, Homo Sapiens
  misc_feature (236)..(236): n is a, c, g, or t
  misc_feature (272)..(272): n is a, c, g, or t
ctaaaataaaaacttttaataatttcctctttagcatttaagaaatgttattctccaaaatgtccatgaacatacttactaagacatctttcttaataaagagacatttaatttcataagctcatgtgtattcttcattttataggtcaaagaaattgtctgttccagcctcagtggtgtcgaggataatgggaagaggaggatgcaacatcactgcaatacaggatgttactggngcccatattgatgtgggataaacaaaaagataagantggcgagagattgatcacaataaggtaattgtgcaaaatgtatactgctagttctgagtaggaatt

SEQ ID NO: 463138 - DNA, 459 bp, Homo Sapiens
agctgctggatacaattttcatggcaataggaactgaaggtacttcaaataatgtgagcttaaacatgttacttcattgaaacaaccaaaactacttgatgtttacatctaaaatcctggttaaaataaattttagatttggaaagggaattggcaaaactaacattctttgtagcaaaatgtcccttagtaatagtcaagttgacctcatttcagtagttcataaaggaaaatccaaagccctcagcagtgaattacctgggccacatagctgattttggtcactgtgaatgcagaccaatcacctagtactggaagctcacagtggtagacatcactatcacagtactttacggtcatgggatttctcgtgaactatttcagggaacaattcacaaagatgacattctttcactgtatttgcatttggtaaccaccaggcaagtaagggtctttgcc

SEQ ID NO: 463139 - DNA, 475 bp, Homo Sapiens
agctgctggatacaattttcatggcaataggaactgaagtacttcaaataatgtgagcttaaacatgttacttcattgaaacaaccaaaactacttgatgtttacatctaaaatcctggttaaaataaattttagatttggaaagggaattggcaaaactaacattctttgtagcaaaatgtcccttagtaatagtcaagttgacctcatttcagtagttcataaaggaaaatccaaagccctcagcagtgaattacctgggccacataggctgattttgggtcactgtgaatgcaggaccaatcacctaggtactgggaaggctcacagtgggtaggacattcactattcacagtactttacgggtcatgggattttcttcgtggaacttattttcagggaacaattcacaaaggatggacatttctttccactgttattttgccattttgttaacccaccaaggcaagttaag

SEQ ID NO: 463140 - DNA, 760 bp, Homo Sapiens
aagtttaaattcattttaagtttgctatattaaatttaaaaattaaaaaaatatcaacttactataaacaatttaaaatatgtataatacaacttcatggtcaaaacatttgaatagtctatgaaaacaggaaatacgttcatctgacatttctgtttagattccattcatgatttttcaatctgtctcttccaaaagaaaccataaagcagttgtcatattttatggcaactaattttgtttagggatttcctcatcacaaaaatactttatttcctattacaggggagttaaagaagaagaaaaaagaaatgagaaacaaagtggctttctccccacttgtcactattctcttcttcaaacattctggtacataagctggtctggagtcttttgaaccatttacaaattgtattttcaaaaattgaagaaaaaatatttagagtctaaaagtgttattttatacactgactatacaatatacattgaatgtttacacatacaaatacatcttaaagataaggttctccaaaggtttttcgacattccatcacccctgtacttggtggtctatcacagttgtgtgtactcttgacttgactaggtgtgagacgatcgtatgccatcttgtactctttatcaaaagcatctatatcaatgttttctcttcccagtgccacaagtgagagaaatagtatttctctgtataaactcctctgtcttttaaaatgtggacacttattcagtgtctctaaaatct

SEQ ID NO: 463141 - DNA, 203 bp, Homo Sapiens
gaggtagatactatttattatttctcattttacaggtgagaaatttgaggcttggagatgaaaaataactggcttaaagatacataggtaggaagtggcagtacaagactttgaaccatgtctgaccacaatgcaatacagtttgtcttctgttctaaagcattcttattaatgtcaacccattcttaaatccttcattacac

SEQ ID NO: 463142 - DNA, 434 bp, Homo Sapiens
  misc_feature (229)..(266): n is a, c, g, or t
  misc_feature (408)..(408): n is a, c, g, or t
gagacagggtcttgtctctgccacccagacctggtagtgcagtggtgcaatcgtggcttactgcagtcccaacctcctgggctcaagcaatcctcccatctcaaccttcccagtagctgggactacaggtgtgttacccaatcatgttaattttttcttttgtagagatgaagtttcacaatatagaccagggctgattttgaactcctgggcctcaagtgtgcatctnnnnnnnnnnnnnnnnnnnnnnnnnnnnnnnnnnnnnncccactgcaactgggtcaattgaggcattttctaaggcagttcacactggggatggggaagtaagggcaatttcagtaaaaatatagggattccagatctttgcttttatggaggtcaaaatttagggtaattaggaaaaancagttaaaatggaccgtaaactgagg

SEQ ID NO: 463143 - DNA, 318 bp, Homo Sapiens
  misc_feature (238)..(265): n is a, c, g, or t
cctagtcatgccaataaaactttatttacaaaaaaaggcagtgggctggacttggttcaggagccagctgtagtttgccaaccccaggcctaaagaaagctggagaggaatagcttacacccagaaaagaacctctcagtgagggaaacagactaagaatagtatcacactacagccttctaccaacagatgatactttactttaaaatacaaaacaaaattaggctcagccagttannnnnnnnnnnnnnnnnnnnnnnnnnnnaaaaaaaggaaaagctttgaggaaaatgtgttaattatcaggtaagggcaggg

SEQ ID NO: 463144 - DNA, 405 bp, Homo Sapiens
  misc_feature (286)..(286): n is a, c, g, or t
  misc_feature (328)..(328): n is a, c, g, or t
  misc_feature (346)..(346): n is a, c, g, or t
  misc_feature (380)..(380): n is a, c, g, or t
aactggcaaaggcatatttttatttaaataaatcaatctcacaactgtaattcgaacttgaaattagcaaagtttctttcacttcttacacataaaaaccttaaattttaactgtaataaagtgtgaatcctttaataacctgggtttttaaaagggtgccacccaatgggggtaatggaaaagggggatgttaatgtactaggcttccttggaaaatattttaaacatttttcatacaatactagggaaaacttccccttcttccacgtttaggcttaataggancaaatcacatggaaagtttcatagtgggttcttttatttatnaaaataatcacatttcanggtcttaccaggggagtaggcaaagttcttccanttccttttcctttcctttggaagga

SEQ ID NO: 463145 - DNA, 432 bp, Homo Sapiens
  misc_feature (372)..(372): n is a, c, g, or t
  misc_feature (397)..(397): n is a, c, g, or t
  misc_feature (413)..(413): n is a, c, g, or t
ttttttttgaggtaatttctgctagatagagataaagcatacataaatcagagaactcagatgaccacaatcatcctaccaaagtaccttgaaagaaaggatcagtcgagccagtttgattgctgtcctttatggcccatgcccacagaacggctttgtgggtctctgatccaatgtcttcacaagctttaatatatggcagggcaacacctcctggatcagggtacattttgttgctgggacggaacgcatgggccattttacactcatgggtttcggcattctcaaaaggctaacatacgaggggaggaatttctttgaggcatgctcattccggggacaggattttttcaaccccgtctttgttaattntaggcttaaaaaatcaggggttatnaatttcattggtggancttgtttttaacagtaggg

SEQ ID NO: 463146 - DNA, 307 bp, Homo Sapiens
  misc_feature (219)..(219): n is a, c, g, or t
  misc_feature (253)..(253): n is a, c, g, or t
tttgaattaattgatgaggtttatttgattgtctttcttataaaatacattaaaaatactgcttttaactgtaggcacacaattaaaacaaatgtaaacctatgtttaatttaaaatatattaaaatgatttaataaaggtcttttattattttacacatcaaatttcatgcaatcagtactccactgaaggagaaaaggattatggaaaaaacaatgnaaaggcacagggtaggaaattaaacaacacaaanggactaattctggattttttttctgtgtccttaataccctgtggctggtctttg

SEQ ID NO: 463147 - DNA, 561 bp, Homo Sapiens
  misc_feature (283)..(283): n is a, c, g, or t
  misc_feature (456)..(456): n is a, c, g, or t
  misc_feature (467)..(467): n is a, c, g, or t
  misc_feature (512)..(512): n is a, c, g, or t
  misc_feature (545)..(545): n is a, c, g, or t
ttttttttggctttgaacactcaatttaatttaaaacaggcacaagtgcaaacaattcacaaaaatttctagggaagatgcttttgttttgaaaactctgacccttaaaaaaaagtccttgcaatttctttgcccccaggtaggtcactagggagcagaagaatctaaaaatattatctagatagaaagggtccagacacctgaagttctttcctgggaattccatctcacagcagccctgaaagtggggcagggccgaggaggacaaggagacagcagtctntggaggcagctggggcagatggtttgcacacatggatgcctgtgaccttgacatgatggaaacccggagtgggttcgccttctctcccagatagggttctgaagagaacaatgggtccctgatgacctgggttattgagataaacttgaaaaggtaacacagtttgccattcnttaacattccngtttttgggccttcacgatgcacagtacaggggaagttcagaagnctcctgagttcccggggtttttagatttagctnggccattcattggcag

SEQ ID NO: 463148 - DNA, 323 bp, Homo Sapiens
  misc_feature (183)..(273): n is a, c, g, or t
  misc_feature (276)..(276): n is a, c, g, or t
aatagatttaattttttagagcagctttatgtttacagaaacattgaaaagaaagtacagagttctcacatatctctctctccaacacgatttcccctattaacatcttgcattagtgttgtacactagttacagttgatgatattaacataataataataaagcaaaaattaagtaggcatnnnnnnnnnnnnnnnnnnnnnnnnnnnnnnnnnnnnnnnnnnnnnnnnnnnnnnnnnnnnnnnnnnnnnnnnnnnnnnnnnnnnnnnnnnnccngaggtttacattggccttcattcttcctggttggtatattcctatgg

SEQ ID NO: 463149 - DNA, 429 bp, Homo Sapiens
  misc_feature (370)..(370): n is a, c, g, or t
  misc_feature (400)..(400): n is a, c, g, or t
  misc_feature (414)..(414): n is a, c, g, or t
aattttaaatgagtttaattgaacaatgcatgattccccaatcaggcagcccccagaatcacagcagatttagagaaactccagggatgccccctggtcagaacaaatttatagacaaagaaagggaagtgccatacagaaatcggcagtgaggtacagaaacagctggattggttacaggctggtgtttgtcttatttgaacacagtttgaacacttaggcagtctctgagtggttgaagtatgggctgctgggattggccaagactcaactattgtaattgttacaggtgtatactcctaaattaggttttcaaccttgtctgcctattaagctaggttacagtttcgtccacaggggcttcgaattntggaaggtacggggtcctttccccgggccntattgagtttggcnttaacagcaaactgg

SEQ ID NO: 463150 - DNA, 410 bp, Homo Sapiens
  misc_feature (366)..(366): n is a, c, g, or t
  misc_feature (386)..(386): n is a, c, g, or t
atcacacagaatgtttcagcttttattttaaactgagctcctctacaatggactacagagtttctgcgtttgtcaagagaaaacataagcatacacattacataactgcactaaattaagtaaaagcaaatagacatttttaactattcaaagtggtaaaaccaaaccatagagtttacacaggaaactgcaagatttcaacacagtgttaaaacctttgcaatacaatgatgtgaataaattctacttttgcctgggcttatgtgtgtatttattcaaccgattacccaaggacataaaagggaaggcctgaggatatacagtctacatgctcgtatggaaggggcaacggacctagggaattantgtttacaacagtttatccngtgttccggaaggcccgggggggg

SEQ ID NO: 463151 - DNA, 161 bp, Homo Sapiens
  misc_feature (140)..(140): n is a, c, g, or t
tgggccaccgcgccaggccgggaaacagcttcttaagggattctacttattttgtttccacgggaaactttcaagagaagaagacaaactatagtcccaatgctgtagttgatttcctgggcataacagattcatcattncctctttagagtcccctcatc

SEQ ID NO: 463152 - DNA, 395 bp, Homo Sapiens
gttaactgactctcttggaaacttgaagatgtgtctgaaggatttggttgtcaatgttacttatttctaagttcccatctgggttctcaaaaaactctttcctcctcttcctaagtgaacacctctgaaagttgtaatggatttggcagtaggcaagctgcctatgtttataactctgaggcacacagggtgatgtcacctatggataaacaggcacttgggcacctctaggccatctctgtctaactgtgaggcttcaagtccactggggtgcttggggaagggagaggctgattaaataccccatccgggaagggagtctaggattgacaggacaagagttcaggcctacttgcttggcatggcttactttggcaattggaggacctgtggac

SEQ ID NO: 463153 - DNA, 410 bp, Homo Sapiens
  misc_feature (165)..(165): n is a, c, g, or t
  misc_feature (367)..(367): n is a, c, g, or t
cattgaggaaaaagacagtttattccaaaacattctttaatagtcctaaactgattttgtctatcagagcaaaaggaacaaaggtaaaaatccacctgaaaaaagatctttgtatcatggaaattatgaagctggatttcttaggacattaaagaaattcacagnacccacatagtttaaaaatttaatttttaaggattaaattttcacaacacattatgactgtaaatgagttacctggaataccaattattacctctagttatttttaggcaggggagctgggacttcactttacttaatgctagcttattaaatttaactttggtaaaattatagtggggaaatgtgtcccggggtaggctgncctctggccccaaaggcaaatggtccatctcccctaggtggcc

SEQ ID NO: 463154 - DNA, 324 bp, Homo Sapiens
  misc_feature (207)..(207): n is a, c, g, or t
tttcttttaaatttatgcattggaatttaaggctctttccaatattaatcatatcaaaacttacattcatatttaaaatggcaactattttgaaagcatgattttactagaaagtcatatatttgtggggagagagattctagatacatgattcttacctatcatcagcctgctcccacagccgtatctagcagtgactcacagagnaaaccaaggcaggggaggtggtcaatgcttcctttaaaatcacaaagagatgagtaatatttctagcagttaaatcaggggcaggacacaaatagggaaacttatgggaattaaaca

SEQ ID NO: 463155 - DNA, 458 bp, Homo Sapiens
  misc_feature (53)..(53): n is a, c, g, or t
  misc_feature (56)..(56): n is a, c, g, or t
  misc_feature (184)..(184): n is a, c, g, or t
  misc_feature (418)..(418): n is a, c, g, or t
acacacagggtaactttttggaagagtactttgtaacaataaagtgctgtgcnagnaaaggagaaatgccattatgaggatgtgtgtgccgacctgggaccagcagggtgaaagagtctatcattcatgatgagagctgccatttgcgctaagcacacaccatgtgccaggcactatgccaagnaaattgttgaatcttcacaataactctgtgaggaaaagggctgtcattgggacagatgagggacactgatgctcccgggggtccacatcacatgaagaggaggtgacagggctgggccttggtccgaagctccagccttccaagccaaggcctgtgagagggaaccgctgagacctgatgttaggcctgtttttctcatgtgcccgggagaaggggactaacaccattcttttngccaaagtttggtgagggttggccaagagctctttggaaa

SEQ ID NO: 463156 - DNA, 424 bp, Homo Sapiens
  misc_feature (342)..(342): n is a, c, g, or t
  misc_feature (361)..(361): n is a, c, g, or t
  misc_feature (370)..(370): n is a, c, g, or t
  misc_feature (380)..(380): n is a, c, g, or t
  misc_feature (401)..(401): n is a, c, g, or t
aaaaaaagaaaagctttgagaaaatgtgttaaatatcagtaaagggcaggaacacacatggctagctttacaatagcaatctaaacatacacaaaggcaaacattgagtaaaatgctagggaaagacggcactttgggggcctactgcagttttccttattgcacataaaggttgtggataacgccaagtctttaatttttcacagttatactttaatgtcattttatataacgtttatttatataacatactataatgttaattttataaaaccaccagtttgctactgttgaatgggaaataggaaggacaaaattctccccaattacactatgtaagcncccctataaaaagttcccnagaaggtcncatcattccntggttaaattcgtcccaatcnattttaaaagttggcctttcagc

SEQ ID NO: 463157 - DNA, 404 bp, Homo Sapiens
ccagaaaacaatgttatgtaaattttaatatataaatggcatccttttataaccacttgatattttacaacatgtgactatttggtaaatacttcaaaatagcttatgctgcggtcttgtaaggcagtttctgaagctcttgagattttacaacagttttcttcatactagtgtgtttctatgtggttaacaacctacgacatttagtctaacagcagcactgtgtatttcaatgtgggtaacacactctgctgcctaacggctcttgggattcggttataaggttacatggatgcctcaaattgtttcaaggaaaatgttaggcttgcaaaatatatttttttctttccaaaattcaaggacacacttaacagtgtggggttttacaatacagtttattaggc

SEQ ID NO: 463158 - DNA, 441 bp, Homo Sapiens
  misc_feature (381)..(381): n is a, c, g, or t
  misc_feature (423)..(423): n is a, c, g, or t
aaatttactacaaaaagcaatttattagacaaacacaccaatagattgagtctaaggatttggttggaaagccactgggccttttaaagcagcagaagtccaaagtcacacgcttcaagcattactctgcaatgatctgtggaaaccagaagggtcaggaattacagcaccgtgctgggccacgtaacagatcagcctcccacctctctccctattccctctcttctactgaagtccatgattctggtacctgaggaagactgggaatgaaatgtttcccatttattacaggaattcaggcttctttgttacagagggaattgtcacatttggaattgtctgtttaatatggggatattggcttttgaggaaaccaacaantggttatttaaagggagtgtttaccgaagtgtaagggtgatnttatctagtaggagtaac

SEQ ID NO: 463159 - DNA, 484 bp, Homo Sapiens
  misc_feature (45)..(53): n is a, c, g, or t
  misc_feature (212)..(212): n is a, c, g, or t
  misc_feature (449)..(449): n is a, c, g, or t
  misc_feature (462)..(462): n is a, c, g, or t
  misc_feature (470)..(470): n is a, c, g, or t
actgtccagcagttttaaccaccaatacccatttattttaatggnnnnnnnnntctctgcattctatatgttccaaaaggatttaccattgaaacaaatacaatatatggaactctatctgtataatttcactacaacaaagacaacatatgacttctacttcctacagaaggctaactgaaagcacaagtgcaaacatagattgcataagnaaagcgtgtgtgtgtgcatgtgcggttaaaacctttagtaagcaactgcattaaaatatggctaaggacactcaccttaccctagttcgtgggcgaggctctaataaaaagccacaagctgttcactagttttatttggataggaaaaatttgggtgtgaggctttggatggatttcattttatggggttttattcaacaaggaagggtaattcttagggaacaggcactaactttncccgctttttacnggctcacngggttaccaattca

SEQ ID NO: 463160 - DNA, 413 bp, Homo Sapiens
  misc_feature (369)..(369): n is a, c, g, or t
catttacaagtttttattcattgcaaacagaattcaaatgtcaataaatggcaatttgagaacactgagacattttaaaagacaacctgatcaggatcaggtaatatttcagtaacataatcaataaattacaataacatccaactgaatagaaacaaacaaaaacagaaaataatttcaaatgggctaaaagcaagtatatacattctattttttctaacttttggaccacagtctaaagtttccttttcatctttctctagggaactttcaaaatgcttatttattaacaaacaaaaaaaccccctttggactattttaggaaactaaggcgggctggcattaaaataggtgtttaaaggtaaggantcgggttccaaatcacatttccctatttcctgggggtaaattgt

SEQ ID NO: 463161 - DNA, 392 bp, Homo Sapiens
  misc_feature (354)..(354): n is a, c, g, or t
ctttggtccagagaagtttaatgatgactgaagctttgaccacattgaggaaactcaaggtttctaaaatagattctttgataactagttaggcctgagtgtccaaagaacttttgatattactgctatattagtagagtttatttgcggtatgaattctttgatgtctaataagagctgaacttactcgggaaaggccttccacactcatcacattcataggggtttttcacctgtgtgggattctctggatggctggaataagacctgtggcgcccactggaaggtctttcccacattctttacatttataggggttttactcccgtgtgtactcctatggatgtcccatgnggatgtgaggcccctgaattgaaggggttttttccccc

SEQ ID NO: 463162 - DNA, 172 bp, Homo Sapiens
agaatttcagtttcaatttatttttatatcaccatttaaaatgttctattttgtatttgttttctaatatgaagaataatgtaacagtttgtatatatgatttataaatcaatgtgcatatgttgagaatatgtgctttacacatctttttaaatgggcagggtgcaagatt

SEQ ID NO: 463163 - DNA, 388 bp, Homo Sapiens
  misc_feature (316)..(316): n is a, c, g, or t
  misc_feature (324)..(324): n is a, c, g, or t
  misc_feature (363)..(363): n is a, c, g, or t
  misc_feature (371)..(371): n is a, c, g, or t
atgagccaccacgcccagccaatctaatttatttttaatttttaacatacagtcactcaccaacaatttattttcttctgatgtggttcctactttgatgacactagggagctactttacagatgtagttgtaagttcaggttaaaaaaaggaaacctagggaaatgtaaagtatttacacaaaacccaacaggattcaaatagggaggccggggcaaatttaattattttaggacttcacaatttggggcaaccattattgggggtgtgggttttcttcaaccatcttttaccccggaaacctttgtggggaggncagttttnttattttaaatttttcagggggttcccttgtttggtccngtttttcnttaggggttttgagggg

SEQ ID NO: 463164 - DNA, 374 bp, Homo Sapiens
  misc_feature (174)..(174): n is a, c, g, or t
  misc_feature (269)..(269): n is a, c, g, or t
  misc_feature (311)..(311): n is a, c, g, or t
gtagtttttgcactatataatagtacaaatattgtattttatattattttctcttaaaacatacaaatatgatacaatacaatttattttaataaaatgccaaccaatatagtacaacaaaatgaattcaatacattaagatgcaatacattacaacattaaaatcccacatangaacagcagtacccccaaggcccccaatgggtacagtatatctctaatgaggtagtcagatcagtcctgctgatgtgtatacattctagttaggnggggtactgggattgggtaggctaaagcttcccgggtaaaangtaaaaaccaactcctaatgtctttcccaccctcccaggtcattcctttcccctcttgttggg

SEQ ID NO: 463165 - DNA, 465 bp, Homo Sapiens
  misc_feature (413)..(413): n is a, c, g, or t
  misc_feature (427)..(427): n is a, c, g, or t
ttttttttaagatttaaaaagcaaagagttacaaaactgtttgtaattaacttgaaatagaaaagatagcactttttttaaatcccattatatagtacaccgtataaattacagagtattcaaatgcacaaatgcatctgtgtaacatttatcaaatgtaatctgcgtgtctttatgtgcacacacgagtgtgtttctcaagagtctaattgtccgccttgataacgctgggcctctggctgttcacgtatggcagtgctccagggtctggcacgctgctgttgcagtatcgcatgttgttggggatatggcagtctgtgtaattaatgcccccatttggggtgttaaatggggctgcagtctggaaatctcctttaagggagtttgatcgtttattttaagggagacgatcnggaaaactggtttnctgttcatctccggggtggagtttgtccctcttgggtt

SEQ ID NO: 463166 - DNA, 413 bp, Homo Sapiens
ttttttttatggtttgatacaatgggttctgacaactttattaatgaatgcacatcaaatctgaaagaaccatgtgaaagtttttatccttgggttctatctgtctactgcaccttataaaaatttggcattcccaaaagccattctggttacatttaaaataatcagcatggcaaatctatactgctttagctcttccaagttactttttttcccagtcaagatacatcctagggaaggatattgacaataatgggaaataattgattataattatatgtaaggaagacatttttgggcattcagtgccttctactaattttctttgtttcactctcccatgggctttccctcaaggggcaaggaaattctttggacaggagtcagggaagtggaaaaccaaaaagccgttt

SEQ ID NO: 463167 - DNA, 433 bp, Homo Sapiens
  misc_feature (125)..(125): n is a, c, g, or t
  misc_feature (258)..(258): n is a, c, g, or t
  misc_feature (308)..(308): n is a, c, g, or t
  misc_feature (373)..(373): n is a, c, g, or t
  misc_feature (380)..(380): n is a, c, g, or t
ccctttcttcatgcatttattaagatgaaatttacataacgaaccatcttaaagtgaacagttcagtggcatcgagtgcatttgcaatgttgtagaaccacgactttagttccaaaacatttccncccgctgcaagataaaactccgtacccattaaacagtttcttcctatgccttcaccctgaagcccccggcaggctataaatatacattttatttttatagggtttacctcttctgggatatttcatatagggngggaatcataaaatgtgtggaccttttatgtctggggttctttacactgnggcataaatgcttccggggggttcatttcacatggcggcatatggtggaggtgctggtatttccncttttcnggggctgaggtaggtaggtccctttgtttggggtgggggcttaccatttggtt

SEQ ID NO: 463168 - DNA, 435 bp, Homo Sapiens
  misc_feature (91)..(91): n is a, c, g, or t
  misc_feature (364)..(364): n is a, c, g, or t
aaagaggatctgaaatatcagaaacagagaccggagacaaggcacggagagggggtccccttgaagcataagattaaagggctctgctggnacaaagtggaaatggccacatttgggcacagagatgtacagactgggcctccgaaagttgcataaacctttcccacaaggaattcacattcagctgatagtggacgttttcctcacttactcttattaggtaataggattagggtctcactgtttaataattgttttattaaaactaaaggaaagtttggggaaccaaatgggctccaaaagccatttgttcctccaagcgactacaggggcaagtagtgaggaatcatgcccatctctctgnaaataaacaatccaattcagggggcttctttctacagcccaaatgttgggctagatggaacagaagtgact

SEQ ID NO: 463169 - DNA, 527 bp, Homo Sapiens
ttgggtgaacatatttaattgatgctatgcaaccaaatccagaactgggaaaatttacatgacagataacctactgctttcaagaagcaaataaagatcataaaaagagggacacacatacataaaaattgctgtatcacaaatttaaaaataaaagataaatgagaatattgaagtcatgctagggtgttacaaagacgttgataaacatgattgtaggcacagtgatcacatacataatcattaaaagctacggttattgatcacacctgttacttatgtaaggcactaaggattgttgctgaggacaaaactaatccctgacttcaaagaactgataattgacttgtgaaacagatgattatataaataggagaaggagtcagtggtcatagaaatcactgtagacctcaaatcaatcttgaaacgtgtggctctgcaactgaatgtctgtgagcctcaatttcctctagtaactggcaaccacatttaacatatgtggttgcaaagagggctgaatgaaatca

SEQ ID NO: 463170 - DNA, 132 bp, Homo Sapiens
tgttcaaaaattttttattaataattcattttcatagctcagaaaaggatataatcagtagaacaactaaaaacaaaacctcacctctacagagatagccagtgtgtagactttattacataggcacatatt

SEQ ID NO: 463171 - DNA, 451 bp, Homo Sapiens
  misc_feature (157)..(157): n is a, c, g, or t
  misc_feature (180)..(180): n is a, c, g, or t
  misc_feature (247)..(256): n is a, c, g, or t
  misc_feature (429)..(429): n is a, c, g, or t
  misc_feature (440)..(440): n is a, c, g, or t
aaaccagcagtttgctcttacagacttctttgttgatgattattgtgatgtgacagcagaggaaaaacacagtctgagaggttctccctaagcaagaaataaaacttgaattttatttagcagaaaagttgataattatatttctgctctatttagncagactctgttccaaaattatgnactggaattaggatgtgtcccaaagtgtatttctactttctcatttctactgacaggaatgttggannnnnnnnnnccttaacaggctattaacacctaggggtaatggaccattatttccggcaacctggtcttatgggcctaaagtgtgggcctatggcaattttaaaattctaggcccaattttattataaatgcggggtttggaaattttccttacaaggtgggagctggggccggggcttgggnggctcccggcncgttatttccc

SEQ ID NO: 463172 - DNA, 382 bp, Homo Sapiens
  misc_feature (301)..(301): n is a, c, g, or t
  misc_feature (306)..(306): n is a, c, g, or t
  misc_feature (372)..(372): n is a, c, g, or t
tttggccatgatcagaatggaaaaagcccaagaaatgcttaggttattcaacaaacttacataattcataagtttatgtcaatcgtacagtggttttcaagcaggaaatggtttctctggcaaaaccccttctaacaacatcaactcccattccctctctactcagtgccttctttgagtgctgtcattttaggagctagccctttacagaaacctgactttcaaaacattttagagtcatatttctttccttaaacattttataacacatttaaatggaaacacaacacttttcaaaagnattgnaattaaaaatgtaaaggtttatatatgggatattaaggaaatgaggaggatgttaaagggaaatgncttaccacag

SEQ ID NO: 463173 - DNA, 480 bp, Homo Sapiens
ctcagttatttaatattttattatctatctcttttacataactacttgcaaaaaaaactaatatgacaaagccaatgtattatatggttataaacagaaacatatctgtaaacattagtattataagcagtgtaatattaaaggtggttatctatttgaaaactcagaaggcagtgacttctacaattaaatttcaaaaaatcaaaacataaaacattattagcttcagttactataaataaagcatccgaatcttaattttagagctaatggtaacttttaaataattcctaaatttcatgtaatctgttaagatatattttgttaacatttagaaaagacaagagaataagagaatcaaaaccaacgaattaaaggagctttataatttagcaaaactttcaacttacatgtctctcaaacattactgggcaaacacaatgactgcttatgagaaaatctgcatatggtcattcctac

SEQ ID NO: 463174 - DNA, 489 bp, Homo Sapiens
  misc_feature (410)..(410): n is a, c, g, or t
  misc_feature (421)..(421): n is a, c, g, or t
gcccaaatgaccaatttattagaggctttgcagagatcaggacactctcaaagcttttctgatatgtcctgaggactctgggcctgagtctactttttaaagccattctggaagagaaaaaaattcagatgcttcataatactaaactttttggaggctcgtgtattctgtggagccccatttgggttcccagggtgcctcctggccctgggggactctctgtcttagggaagggtgggccccagtacagcagtgaccttgcagctgaagatccctctgtgaagcagtgtgatctccgatggctgtcctcccctgcacggagggatcacccactttggggagggcagagtaggaattcagggttcccttcagggcttcaggttaggggggccaagtgctttgcgctttgnggaagtctgtngggggaccagggggcatttttgggccagaagggttcaaggcccagtttttgccaccgcagatgggagc

SEQ ID NO: 463175 - DNA, 439 bp, Homo Sapiens
  misc_feature (373)..(373): n is a, c, g, or t
  misc_feature (382)..(382): n is a, c, g, or t
ctattttgggtagaaatattcctgggaagctagatagaaatgcattttcatttcccaataattcttaggcacaagttagaaaactgctgaccttcactaaaatatgtcagcacttcatgttataaaaaatgaaattcagaaccgcagcatgtgtatatacgtatatctaaatatacacacatatcgggtggcagtacacaatggattattcaatgtatattggaaaactgaggctttttgtaactaacctgaaattctgcagtgaaagttcattgctcaaggaacaattggcaagtgtctttcttttgggctctaactatgggtaaaacgtttggcacatcagacttttaccctttacacatttcctaggtgnccgacaccnggggccggtcttacacgggggatccgagggagggacgcggcctggggatgctttcgc

SEQ ID NO: 463176 - DNA, 358 bp, Homo Sapiens
  misc_feature (167)..(167): n is a, c, g, or t
  misc_feature (314)..(314): n is a, c, g, or t
  misc_feature (338)..(338): n is a, c, g, or t
cgcagctggaactacagataacatgccaccacgcccagctaatttatacattttttttgtagagatgggttcttgccatgttgaccaggccggtcttaaactcctgggactcaagcagtctaccagctttggccttcagaagtgattggattacagggcgtgacacncacacctgggtcagaatgatttttaagactctggaagtttccaaaatgtatatggatgacatataggggagcatacttgctttcttgctctttttaaaaaacttattcattcatatttgggaggccaaggaaattcagttttataantgtggatttacggtggaaaagggnattttttctattacattaaa

SEQ ID NO: 463177 - DNA, 470 bp, Homo Sapiens
  misc_feature (380)..(380): n is a, c, g, or t
  misc_feature (407)..(407): n is a, c, g, or t
  misc_feature (440)..(440): n is a, c, g, or t
  misc_feature (453)..(453): n is a, c, g, or t
ttttttttaataattacttccagtttaatttatagactatataatttgtcatgaaacaaacagttttcattttgacataatttctgacaactcagtgacataaatatatccatgtgagctcctattttgtttgacatgctcacttacctcacatcagttctgccgatagatttggtaagtggtgcttttagtttccttaatgcacccctcaggatttcatgcaaatgaaattattatgacaaatttttctatagccatttctaacacagggaactcataaagaaatcaaatgtctgcacttcactgtgaaaacactaaactcttcaggccataatgagggctccacacattatcagaaaccccagggcataccaaaaggncagggtccccggggacagtctttgggngggggagggtcataatgttggatttgggccatnctgaatttcttgntcttgaacttggccgct

SEQ ID NO: 463178 - DNA, 466 bp, Homo Sapiens
  misc_feature (396)..(396): n is a, c, g, or t
ttaatcttttctgctgtgtttttattctcaaaacatattttcacatgcctcattcaaaattaaagttcttaagttttttagacatagaattcagtatatcataaatatgaaagagacagaattacagcttaattttacaatgatattaagattgaaattattcattaaaaaagtatatcagcttacagtgacttctgctgtagctgtagcttttgttcaatgatgtccgagaaacgagggaactttttttgaaatagccacacgggatatcatcactcaggattaaagcagcttctgggactttgttttggaaatgtaaaagtgatggaaaatcccaactcacaagggtatgtggttgcaaatgggcctaagggtttctggggctgtctttggccngggttgggaattgccgtggattggggccccccggaatccccagcttcattgtctccattcccttggggtt

SEQ ID NO: 463179 - DNA, 425 bp, Homo Sapiens
  misc_feature (94)..(94): n is a, c, g, or t
  misc_feature (164)..(164): n is a, c, g, or t
  misc_feature (213)..(213): n is a, c, g, or t
  misc_feature (284)..(284): n is a, c, g, or t
  misc_feature (320)..(320): n is a, c, g, or t
  misc_feature (330)..(330): n is a, c, g, or t
  misc_feature (347)..(347): n is a, c, g, or t
  misc_feature (356)..(356): n is a, c, g, or t
  misc_feature (365)..(365): n is a, c, g, or t
  misc_feature (383)..(383): n is a, c, g, or t
  misc_feature (390)..(390): n is a, c, g, or t
gtgttccaatatagctttatttatgaacactggaatttgaatttttataacttttctatgtcacaaaatattattcttcttttgactttttttntcaatcatttcaaaatgtaaaaaccattcttagcttacaaaccattcaaaaacaagggggcaggccagtntttggccagactgtaggtttactgtcctctggtctatactgcagattgnaatatactcctacttaattctttttcaaaaacatttgctcagtgactcactcaaccagtccttgaaaaganccccttcaaagcatgaataccttcagtttcaagttnggtccagggncatttgaggcagctgtnttaacacgngtaataggntggggccaacagttcttntctcagngggtggcccccaaagcaggaagtgcgggggaattt

SEQ ID NO: 463180 - DNA, 455 bp, Homo Sapiens
ctaggtctcatcatagctcatatataacactcaaaacatcattaaaccatctaatctaatattcgaccatatcatttctttctttacacgacttgtgagataagtaagatatcagttaaaattttcatttcagcatctgtttttctcatatcccctttgtgcttcttaaagatggttaaaataggacagacagacttgggaactttgttcaactgtcttaggaaaagaccattgcaggggcacagtctttcaaccccactgggccatgtaagactaggcctgggagcctgggaacacatccttcccaaggggatactgaacctctttcagactcattgagggttcttcaaagtgtggggtcagtggtccccaagggatggcccgcagctttcagtatttcacattccttgaaaacatcaggcaactgttttcccagacctgacactggcaggtgt

SEQ ID NO: 463181 - DNA, 450 bp, Homo Sapiens
  misc_feature (427)..(427): n is a, c, g, or t
aacaggtgggaacaagttttcttagaaactgttatgaaggaggagccctccacccccacccccacatcttttactatctgacatgttatcagatcagaggccttcagcctcagcaacatctggggattagagggaccccacacagctggggcctcagaccaagctgatccatgcctgtggggtggaggggaaatcctcctgggaaaaatatgtgcaaggccctacaggccagggaaaggctgaccaaggcaaggtgagtcatggtgttctaagctgaatcttttgcccatctcacagaagcaggcaggaagcaccaccattgatcagctttatatgggcacccactgtatacaacagacagacaaagacaggacagacagaggcacacaccactttttaaggttcaacattgtttcaccaattaggngcaccttggtttaaggacttttg

SEQ ID NO: 463182 - DNA, 602 bp, Homo Sapiens
  misc_feature (75)..(102): n is a, c, g, or t
  misc_feature (301)..(320): n is a, c, g, or t
  misc_feature (586)..(586): n is a, c, g, or t
gcaaactcgacataaaacatccaaaccgtccattttgttcaatacaatataacagagctgtttggcattaccaannnnnnnnnnnnnnnnnnnnnnnnnnnngtacatgtgctgaaaaagaagccagtgcagccttttctaagaagtccatccaagtttactgtacaacattcagaatttacattgataatacaaggcacaaaaagtgtggtatgaagccaaggctatgcttcattcaacctctctcctctggcttgctcagtccttcagcttcatgtcaaattaagtgttcagccctgcnnnnnnnnnnnnnnnnnnnngggctttgaacacatcaaataaaagttgagagtgggtatggggtttgaggatgtgaatcacttgaaaggaacacccccacggcaccttcccaaaataaacaggacaaaaatgaaatctgtttttaaaatcttcatggcggaaatgggaggtacggcaagtacttcatatttttttgagtttggggtcagaaggaatggggccagtttttccttttaaatgcttagggtgggaaatgtttctagggtttgaggacttcccgggggtnttatgtacccatcagg

SEQ ID NO: 463183 - DNA, 259 bp, Homo Sapiens
aacaagtgagtaatgtgttgctctaccacatgctgatggctataatgtcaccagggcaatagggatattttcaggtcctggggatcaccatcatatatttgatctgttgttgactgaaaagttgttatggcagtgcatggattgtatacattttaaaaaatcattgtaggtcagcctatttaaggacaaattcagcagactctactaaaattccctaaatggaggactgtggaatgggcttgctaaggagtcccagggg

SEQ ID NO: 463184 - DNA, 474 bp, Homo Sapiens
acagaaaagactatatattttttgaagcaccatttcacatctaccaacaagaaaaataacaaattcatattctcattataattctgttatgaaggataataatgaaatatacaatgccatatttaaaatataaatgctatcagtaaatgaaaatactgacagagcttaaatctctgttcagaaatatttttaaagtaaggctcaaataaacgtgtaggattacaaacactatttcctgatcaatcctaatatttaaatgaatgcaaaagaatttatttcaagaccaaataaatagaatgaagagagaatactaaattaaactcagctgatgaaacatccattgttaactgcacccatgcaaaactccacaatacaactaactgcttttacccttatgacccgatgcaaaatgcaagcacaaaacggagaatatgtatgtacttaactttttagctttctatatttacggctaaa

SEQ ID NO: 463185 - DNA, 425 bp, Homo Sapiens
ttttttttattgatatcaggtggtttattgatattgaaactccacgcccctttcaccacagaccacctgttggccataaggctatggtgccagcgatctctcccactaacagagctggccaggtcccagggcctagcaaacctcccagagtggtctctaggtatggaggaccccagaaaggggaaggggctgtgattgaagggatgctactctctgattaaccgacagtatgaccgtcacattagggtcagctacactgcagggctggggtttgtggatatctgtgctggggtctgggctccgtggagagatgtgtaggggtaatgagaaattgatcagcaatgagaggtggactctgagccacctccctgaccctgaattcatttcaagcgaggagcagagggagctcttgacttgggggacgg

SEQ ID NO: 463186 - DNA, 239 bp, Homo Sapiens
  misc_feature (170)..(170): n is a, c, g, or t
  misc_feature (184)..(184): n is a, c, g, or t
  misc_feature (205)..(205): n is a, c, g, or t
  misc_feature (212)..(212): n is a, c, g, or t
ataagccaccatgcctgggccattaaaactatctttaaaggacccagaggaactacaacaacttaatgatcaggggtcaaactgaagggggacattggaacctaggaaagggtaattaggccagggaagctgctttttgccctgatagggttttgcttcatggtggggantgtgtgtttcaccntttgataggccttgaaaggtnagggagnctacagttcaagagttgaggtttttcc

SEQ ID NO: 463187 - DNA, 507 bp, Homo Sapiens
  misc_feature (454)..(454): n is a, c, g, or t
  misc_feature (460)..(460): n is a, c, g, or t
  misc_feature (469)..(469): n is a, c, g, or t
  misc_feature (494)..(494): n is a, c, g, or t
ttttttttacaaggtggaaaattatgtatttatttacacaaatatgcacagaacacttgtatctttcaaaagtcacacttaagacatagtaaaagcatgttgtatgaaccatgtattcttaaggattgagcaaactgcaggctgcttgctgccttttaggtttgctagtccctgatctacttggaaacaggatgttgcttgccccaacactagtttaattataaggggcagcctgtgaggaaagtttcaataggacatttttctcacctatattgcacgtttttctggaggcccttgtggcaagtgtgtgtgccatgtgtagttctatttacatataaacggctacttttaaaagtttatccaaaatcatggggtttttacaaaggttttttaatggctcttctggcattatttggcggcattgcaaatctggcaaagtaggtaaaactttaangcaccnttagggttngcaccagttattacaggatgggggnttgtggaaaggtt

SEQ ID NO: 463188 - DNA, 458 bp, Homo Sapiens
  misc_feature (289)..(289): n is a, c, g, or t
  misc_feature (363)..(363): n is a, c, g, or t
  misc_feature (382)..(382): n is a, c, g, or t
  misc_feature (420)..(420): n is a, c, g, or t
  misc_feature (445)..(445): n is a, c, g, or t
attgcagaagtctgttgtctttaattaaaaaatgtagggatattagttatttcgactgcagaatcaagtgagtcccaaagttcccagcatctcctcatggtctttgttaggggtccaggctgactggggttcattggtgtccactgggggcagctcccgtgccttcagcagtcctgagtctccttctactgagtgtgggagtctgcgtaccctccgggctagtgggatggccaggggtggcgtagatgctgggctcagctgggaggttccctttcctggggatggaggnaggctcagttgccttccgtctgaggggtcaagctgtgcagctggggcgttagggtcacatcctgggggggcttnagatgcagcagcccgagtntccattttccaccccatcttcaggctgtgtgttccttncacgggcagcatagaggtttttttncccggggcgtccg

SEQ ID NO: 463189 - DNA, 239 bp, Homo Sapiens
  misc_feature (89)..(89): n is a, c, g, or t
ttttttcagggcttgaaaggactttattgtggctgtggtgaagcaggccctggtcttggcagatgataccagaagggcactgagtcagncgtgcaacttgaatttgatcccataaagtcaggcatcaggaagccattcagaatttttcaccctgtcagatgctcagatttgctagagaactctggtagtggcaagaaccagagctgttactcagaattggggacagagggcattgtccc

SEQ ID NO: 463190 - DNA, 199 bp, Homo Sapiens
ttttttttgcagtgactatggcagcattttaataagataacatactcatttaacacagcctttattttctgtttcaaaacagaatttccaggaaacaaaacaaaatacttacaatggttgggtacaaatgaaataaaaatcacagtttcaaagaaccaaaataagacagttgctgaaaggcaggatcacttggtttacc

SEQ ID NO: 463191 - DNA, 428 bp, Homo Sapiens
  misc_feature (377)..(377): n is a, c, g, or t
aagttcatcggctatcattagtgtattttatgtgtggcccaggacatttcttcttccaatgtggcccagggaagccagaagattggacacccctgttctagaggttgcatttaaatatcataaataaatgacaggtgcatgtctttcaggctgaaggaagagggtatgaggccaatacattctccaaaggttttttaaagagggagttctgcaaattaggaaggaacaggcgaggaacaggaatattgggaaaaggaaattgtgggcctatgtggacagggtagctttgggattatattctctggggtcttgggttttcccccatcttatttaaaaacaggggggatttcaacttggatgttttttcttaatttaanctttcctgatcctccattggggtacctttttccaaaaaaattggatagggg

SEQ ID NO: 463192 - DNA, 413 bp, Homo Sapiens
  misc_feature (196)..(196): n is a, c, g, or t
  misc_feature (393)..(393): n is a, c, g, or t
ttttttcctttaaaaaggtgctttattgactttaaatttataaaaggttaacatgtcttgatctagttgaaattatgatttatatcaacatgataattatgtgtacagtttatattccactcatactgtacaccagtaaaagcaaatattcaaagggttctctaagtttcaaggattaaaaaccataatgccttgnactggaatatcatggattacaaaacagggtattaagaactgtggagggtatatggctcacaacatatcccttctcccattctcactttattccaaaatctcatttatttcactggacaatttgtttatactttcaaaaatccttttataatttttatggggtataactcaaatggactgctgggggtctttaaaaanttaacgggtttaaaagggcc

SEQ ID NO: 463193 - DNA, 852 bp, Homo Sapiens
  misc_feature (404)..(404): n is a, c, g, or t
  misc_feature (409)..(409): n is a, c, g, or t
ctaaataagaaaatacgaaatgcacagctggctcagtataattttattttggtggttggagaaaaggaaaagatagataatgctgtaaacgtgcgaacaagagacaacaaaattcatggagagattttagtaacttctgccattgataaactgaagaatctcaggaagacacggacactcaatgctgaggaggccttttgaagtccttccctgatatttgcttctgtgtaactttgttttgacccttaaaaatgtattttcttaacatgttagtacttctacgactttggagccactgatgggtccactcatggcctcagctgagaaaggagacgatgaacgtgtagcttgacatgcacgaagttttaatttactcatgtccacggggggacgttttgagggcnccgtngggaaattttcccagcaatcaatgccttgagaaacttaaatggggaaatattattcatcgagaaagtgaaacaaaacactaggaaatgattatgaaatgttagtgattttcaaaagatgggcttcaaataaaagtctgcagagttttttttaaataggagggaaaatcttattttctaatatgtctcaggtatttttatgacttctactaaaattcacactgaaactttatcttctaaactggaatcattacttaattttaactaaccaacaaccacaaaagcagcagctactactaaatattggattactgacaaaggaattcagttttgtggaatctggtgtttgcactataggttaagagttgccatttaaatgtttcttattcataattaggttttgttccgctttagaaaaaaataaattcccaaatgaattgcaaaa

SEQ ID NO: 463194 - DNA, 449 bp, Homo Sapiens
  misc_feature (240)..(328): n is a, c, g, or t
  misc_feature (340)..(340): n is a, c, g, or t
  misc_feature (411)..(411): n is a, c, g, or t
  misc_feature (417)..(417): n is a, c, g, or t
  misc_feature (429)..(429): n is a, c, g, or t
aatgttagggaagttatcaaataagatacttaaaataaacaactcacagctttttctcgccctcctatctttgcaccactcttctccttgatcatttaccgtgtagctttagtgccatgggcagactctgggatagtagtagaaatggtaatagccactagcagcagcagtagtaagaagaatgacaggaatgacaagtaacatttatttattttttgagacacagtttcactctgtcannnnnnnnnnnnnnnnnnnnnnnnnnnnnnnnnnnnnnnnnnnnnnnnnnnnnnnnnnnnnnnnnnnnnnnnnnnnnnnnnnnnnnnnngtaggctggggnttacagggcgtgcgccacccatggcccgggctaattttttgtattattagtaggagacggggtttttgccngttggngagggttttttngggactcccgacatcaagga

SEQ ID NO: 463195 - DNA, 549 bp, Homo Sapiens
  misc_feature (30)..(30): n is a, c, g, or t
  misc_feature (345)..(345): n is a, c, g, or t
cagcctgtctgtagataggggatgaccttncagagggcatggccgaacagccaggactcagtgatgtccaccagcaggctggccggcaggcagatagcagtcaccagaacgtcagccagggacaggttgacaatgaagtagttggtgactgtcctcatgtggtggttcccgccacacggcccaggcaagaccagcgtgtttcccacccagggcccacgacgaacacagccacataggctgcgatgaggacccactcatactgttttgggtacagataatcgcgccacagatagcggagaaactcatcttcatagtctggaggcacaggggacggctctctgctgnccaggggggacccccatctgggcccctggggtggctgagggctccatgagctcaggagccgctgcagcagaggggcatcctaggctctacagagggagaggagggagcttgggccagccctcagcccactcccttcagggttcctggaggcttgcacccaggtcttttcgggtctcagcctcaaacttccttacaggaccacga

SEQ ID NO: 463196 - DNA, 491 bp, Homo Sapiens
gttttgaaagaaagtttattggccctagtaaagttttgaggagctggcaagttctgattggtgtgtgacagtggtgggtaaaaccagttttgcagtcacagtaggttgttttaatagctgttagataaaactggttttaggttacaacaggtagttttagcaactaggtttgtagagaattatattttgaagcaatgctgtgtgccctgagtgcctttttcccctgggcctgtctaccctgttttagttgcatatgacaagaatgaccccatttgtttgatcaacttgtacagatcaaagaaagtttaattttcttttggggtaaagccagttaggcaaacacatacggtgtgtgatctcctcctcaccttcacttctttaaagccccacccccctttgttttgacagatttcagttcagactgagtcctagtctcttttccctattgtaatagtcttgaataaaatagccattgcccatataacattgtt

SEQ ID NO: 463197 - DNA, 467 bp, Homo Sapiens
  misc_feature (399)..(399): n is a, c, g, or t
  misc_feature (421)..(421): n is a, c, g, or t
  misc_feature (444)..(444): n is a, c, g, or t
  misc_feature (451)..(451): n is a, c, g, or t
ccgatcacagaaaatattttattgcttatttagaaacagcatgatattaagatagcatattttgcattagtctactttaaatgaaggacaaaaagcaaaaataattgaaaacaggctgtgcttgatagcttcatgagaaagaatcatggtggagctgaaaaccttagaagttggttacacatgatgggaaaagaggccctcactaactgactacaccattcccattgcttttgcttgtaaatacatctgggcacccagtaaaactttattaaaatcaagttgttggaatccaatgtttagggtgatggacaactttcccttgttaaataaagggtcatttcctattaattttggactttagtattgattgattgattgattgagacaggggtcttgggnctgttgcccagactgcagtgcntccacgggcttcacttacaggcnttgaccngcccggggtccagtgg

SEQ ID NO: 463198 - DNA, 452 bp, Homo Sapiens
  misc_feature (405)..(405): n is a, c, g, or t
ttttttttatatatacagcatttaatgtgtactattgggcgaagtatcttatctcttttacagaagagaaaactaaggttgagagaagataagtcacagagtgaattcatggtgatgccaaggcttgaagatgaaattccaggctctatactcttaaaccacggaacctctttccactgttactactgctgttgttttgttgctgttgctaagtaaacattgtgtcagatctaatctcttccttactgtatcctgggtatccagtagttcctaggacaattctgctggaagttgggggtgggaccagggagccgggagggaaggaacaggggtaggaacttgttccttaaggggcagatacgagtaaccccataaccctgtttaccccaagggcagggacacttngggggctatttttttgacataaatccaaatgtttaaaaattgcccag

SEQ ID NO: 463199 - DNA, 361 bp, Homo Sapiens
tttttctttgtatacttatctgttatttctcttttttccatagcaggttgtatcatttgtataatagctgaaagaaataaagacataaaaatgcaacagaagccagaaaaaaagctttaaaatggcagatattagctcaaattataaagctataaatattgtaacaactgaaattgggaaatagacaattcagtgggaagagaataggaaagtcaaagacccataaggatgtgggatatataaataacttactttttctcttgggagtggggaaggctttcctaaaaaataatacaggaactattatggcaggggcccccaaaaatactattatatttcaggatggataggacccttggac

SEQ ID NO: 463200 - DNA, 454 bp, Homo Sapiens
  misc_feature (317)..(317): n is a, c, g, or t
  misc_feature (394)..(394): n is a, c, g, or t
  misc_feature (402)..(402): n is a, c, g, or t
  misc_feature (409)..(409): n is a, c, g, or t
  misc_feature (414)..(414): n is a, c, g, or t
  misc_feature (430)..(430): n is a, c, g, or t
aaattacaaacttttacttatttgcaaatgtatgaatagagatctgatttaaagatgttttacaaaacagtccagatatggcatctgtctagaactgttgacctctaaaaccattatattaaaataagtgactacagcatccttctctggggagaataacgtatttcagtcaagagaatctttatcaagggctgtagtttagagaagcacgagaggcaagcactgaggaaaggaaagtctacattattatacgggattaggcatacttcctaaaatgccccatggacatacatttcaaaggatattctcattaaaantttcaaggataatcaggttgtatttgctataattcaccacacccaccatggcggtttcggtgagtgcggggaggctnccaaactngtagtgnccggnccttttagggggcttntttcccaaggagtggggccatggg

SEQ ID NO: 463201 - DNA, 368 bp, Homo Sapiens
  misc_feature (155)..(155): n is a, c, g, or t
  misc_feature (269)..(269): n is a, c, g, or t
  misc_feature (335)..(335): n is a, c, g, or t
aaattgccaggttttattaagataattggcaaaatttcaacatacaccttacctgaatgaacacttttaataaaatatgaaggatcactcatgactacaactgaactcaaaagtgagatgtagagcagatttgtaaattgataaatttatttggntaagtaaattattcacttcattcgacttcactccataggaggaattctttgacagaggaaatgttatggaacaaggaggaacaaggcctgtctctcaccaaggaggcacctagnggtagggggtttacaatggtggtatctgggggtttatcctaatttcatcaaggttttattttcccnttttccaaaaaccactgctggtggtcggtctgg

SEQ ID NO: 463202 - DNA, 141 bp, Homo Sapiens; identical to SEQ ID NO: 409199

SEQ ID NO: 463203 - DNA, 386 bp, Homo Sapiens
ttttttttaagtaaaaaattgtatctgccttctataaaagtaaaatgtgttcattttaggaaatttgaaaaataacaacaagtgtaaagaaaataaaatgacccatgatcttagaccaaaggttctcaacttcaggcacgattcatgttttcaagttgagcacttctttggctgtggtgtcccatgccttgcgaggatactcagacgtcatccctgggtgtcacctactagttgccagtaggcaccccctccccagggcgtgacaatccaaacgttcttccaggacattggtcaaaagttcccaatttggataggccatggaccttcaggacggcggacaggaggccaccgttacgttttttccagtttttcctttctaggtcctt

SEQ ID NO: 463204 - DNA, 521 bp, Homo Sapiens
  misc_feature (295)..(295): n is a, c, g, or t
  misc_feature (400)..(400): n is a, c, g, or t
  misc_feature (414)..(414): n is a, c, g, or t
  misc_feature (438)..(438): n is a, c, g, or t
  misc_feature (448)..(448): n is a, c, g, or t
  misc_feature (477)..(477): n is a, c, g, or t
  misc_feature (486)..(486): n is a, c, g, or t
  misc_feature (494)..(494): n is a, c, g, or t
  misc_feature (503)..(503): n is a, c, g, or t
aaagtgaaagagaagcaggcatttttattcacatgggcataaaatttttttctttcctaagcaatttcacaaaacatatcttaaagttatttttctatgtatttctattagagttcaagaaaaaataacatttttctcctgaaagctacagtgatgtcaataaaatgagcactgatgtcataatgttttaacacattgtcatgcagtgttttcatatttataactggggatataaaatgctcagtaagtgggctagtgtaaaaatattagggcactaatcaattacatgtaggancccaaattgatcccatcacattgggagggggtttaatttgagggaaaatcagctttctgacttgggttaaaacaaggtctacaatggtaatgaggacaaatgggnggtggttttagggnaattaaatgttttaatccaagggntttttacctnttttttacccggcttcctttggggcccanccttccacncgtttgtngggtccccnccgttttttagggggggg

SEQ ID NO: 463205 - DNA, 501 bp, Homo Sapiens
  misc_feature (214)..(214): n is a, c, g, or t
  misc_feature (451)..(451): n is a, c, g, or t
  misc_feature (456)..(456): n is a, c, g, or t
  misc_feature (476)..(476): n is a, c, g, or t
  misc_feature (481)..(481): n is a, c, g, or t
ttacaaccatttgagaaaactattgtttatttagaaaaaaggttacactggtagaattcggcagataaaaaaattctcttttaaaaatgtcactgtgaaacttttccagatgaaagttcagcaatacaaagctcctacagctgtagaattaaaacaattatgttttgatccccccgccgccaaggatttgtctaacataattacaaggaaaaantgggcaagggacaagtgatcgctggtacctttttcttttttaaacacgtttaatgttgtacatgtactatataaaatgattcctaaggcatttcataagacaatgctcccactgcttttagtgactaatattaagaacaagccaaataataaattaaaacagttttaaaatgaggtaaaatccaaaggggttcaacaattggtttattttcagtttccaacaataaaaagggaagcntttcngaatgggaataaaaactggnacccnggccatatttagttaatccc

SEQ ID NO: 463206 - DNA, 399 bp, Homo Sapiens
  misc_feature (365)..(365): n is a, c, g, or t
  misc_feature (372)..(372): n is a, c, g, or t
ctttgctaagataccaaaggcagagcaaacacagaaagcaagggactggcacagtcaccaaacacagtagtgcagtcaaaatcctaaagcttactacagtcggaaagttttcaataacatttcagtcctttctctaggatcatagaaacagttgcattaagtttatcaactcgatttaagtaaggcagtgaggaactatactaggaaaaacaaggaaaggcagcttgctctatgccaggatgggtccaagttgcacagcgacctcatttacactggaaacctcggttaggatgacacccttttgacaggcatatggcaaaccgggattccttattaggcctgaggatttcttttctgggtctttncgggatngcactaaggatttttattttacattgg

SEQ ID NO: 463207 - DNA, 420 bp, Homo Sapiens
  misc_feature (331)..(331): n is a, c, g, or t
  misc_feature (376)..(376): n is a, c, g, or t
ttttttttacgttaaaattaatctctttactgatataattaaattttaaatcctgagaagaaaagagagaggggagaatggtgccgggtgtctagcacccccagccactggcccagcacatgccatggcatctgtgcatccagacacggggcgtggcatgcacaccccaccagggagacccaggccagtgttcccaaagcctgctcacggcaccttctactgcaggacagcagaggggccaacagccagcctgcaggagggaggacttctggcccagatgcaagagcagctgtaacctgggcaacaaccagcaggtgactattcagggagnaaaggacctgggttcacccacatgggggttgcaggcacagttttnccttgctttttttgggaagggccttcaggtttcaggccccacca

SEQ ID NO: 463208 - DNA, 354 bp, Homo Sapiens
gaaacttttaagaaatccttttttattgtcaacaattgttagtttatcacaccactgatccaagttcattgctataatacatattgacaacaaacttttattctcatttcactgatgttattattgggtctaggaatacctacattccatagtttagttaatattctatttaaaagcttgaaaatgaactagtaacttctttagtgtatgtcagttttctgaccgtagtttaactttaattactttttcattaattcacaaaaaatgaaaggcttacatcattcacagttatggatactggatggtcagttatatactactccatatggtacattatctttaatccattatatt

SEQ ID NO: 463209 - DNA, 459 bp, Homo Sapiens
  misc_feature (301)..(301): n is a, c, g, or t
  misc_feature (393)..(393): n is a, c, g, or t
  misc_feature (409)..(409): n is a, c, g, or t
  misc_feature (415)..(415): n is a, c, g, or t
  misc_feature (421)..(421): n is a, c, g, or t
  misc_feature (433)..(433): n is a, c, g, or t
actagattcaattaatttaataaaatagaatatacatagaaattctgcacaaacgtattgctttctcccaacagcttctggtgtcgggaacctcagctgcaccgggcctctccttctgcctggagccagagttgccggggctgctgcttttaactctctttggaagttctgcttgcagttacccagagccactgaggcagggaggagcgcctccgcctccttgggtgtctatatgggaacttttgtcaggaatatagcccgggaggaggagctaggacttggcacccagtggagaaaggtnagtgggaaagtggggcaggactcaggggtccaggtctcctgggtcagaggataaacccgagagactcagcacatttttctttggggagggcnaggcagccatgctgtncagggnggccanacaaaggggatncctttgagtcgctggacggagccttc

SEQ ID NO: 463210 - DNA, 478 bp, Homo Sapiens
  misc_feature (463)..(463): n is a, c, g, or t
ttttttttaagagacaagatcttactatgttgcccaggtgggacttgagctcctgggcttaagcaatcctcctgtctcagcctcctgagtagctgggactacaggcggatactactgcagctggctcctccaagtacttctgtcttggggcctgattcctcattcccaggtgcacagtgctctctactgctaccagcaaccatttctatggcaagggaaaggcctcagatccagggacaggataggcagcagccagtgtacctagaatttgtggctgccaccaccttttctcttaggactgggcttgtctctcccactggtgggctgcagaagaggaacagagtgaatatcataaaggaatgctcaatttcagaactgtatcacctcattttaacaaactcccaaagggctggccaagagttcatcattattagatcgatgggttaaataccacctaaggaantcttgtaaaagcagc

SEQ ID NO: 463211 - DNA, 530 bp, Homo Sapiens
  misc_feature (112)..(132): n is a, c, g, or t
  misc_feature (417)..(417): n is a, c, g, or t
  misc_feature (441)..(441): n is a, c, g, or t
  misc_feature (449)..(449): n is a, c, g, or t
  misc_feature (461)..(461): n is a, c, g, or t
  misc_feature (490)..(490): n is a, c, g, or t
gtgtccacatttacacatttatttgggtttagagagacaacacagataaaatacttggatcatacacaagtttatatttggtaggaagaacaggttgccacatgtttgtatnnnnnnnnnnnnnnnnnnnnnctgtctttagtaatcggagtaatgttgggggaatgttgatgtcattcagaaacaccaatttgggaacggtagtttggcacacctaactaataaatacacagtgtttgcatttagcatttgagaacagaagagcacgtgcaaaatgatacccagtttgaggttcctcatcctgctactatatttacacctgtgccttctttgtccatattctgaagggtaggcaactactccagtgaccagcagagccaacacctacgattttgggcagctgggtgacactcctanttagtaacgtctgtttttagaggncaagtggntttcacctggcntttgttgaagtcgcacatttttcaagggnaggttcccgtaggggggtttggtgaggggcttttccctag

SEQ ID NO: 463212 - DNA, 483 bp, Homo Sapiens
  misc_feature (433)..(433): n is a, c, g, or t
  misc_feature (458)..(458): n is a, c, g, or t
ttttttttgctgaaatatgcattttaattacttccaagagggtttatttctaatgaaaaaaattaaacaataaataattttagacttaccccatgcaagaaatgacaaattcactgaagcaaacatgtttaggctacactgtatgcaatctacaaattgcctgctcagtctcagtttcttgcatatatttctcatacatctaaatgttaatttccacacttctgtctctctggaatccctgggcaaatgggcaatgggctaggtgactttggcattcacctatcaggaaaaacatggaatccgggacacacttccggggaggcgtggggacgtgggtagggaatttactgggataatagggaactggatatgttatttttggaggagtgctaaaatttctcccagtggaatgttaactttggcccatattttnatattaacttattgggtttgggttngatatttaaaattatcaaattttcc

SEQ ID NO: 463213 - DNA, 419 bp, Homo Sapiens
  misc_feature (268)..(268): n is a, c, g, or t
  misc_feature (379)..(379): n is a, c, g, or t
  misc_feature (386)..(386): n is a, c, g, or t
  misc_feature (403)..(403): n is a, c, g, or t
acaatagtgttgaggattttttattgtgttttccacatagataaaaaaataaggctttttgatgaaaagaatccattacaaagtcaaaaatccattacaattataattgaatcagtaacaaaatttagctttaaatgagtcaagtattctgcatttgaaatttaatatcacaaacattcaagattagtgaattttgggtaaggaaaaaaatactaggaaggaaagggaaaaggacaccttttcaacaggataggtaatttattaaaantttttttaaaaggtgctttgggggaaaacacacggtatcattacttaaggaaaagtcatttaagggaaggacttaagtggcttcaagtggggtgtattacagactaaaaantgttttnaaaatttggcccaggantttaagtgttaaaata

SEQ ID NO: 463214 - DNA, 427 bp, Homo Sapiens
  misc_feature (343)..(343): n is a, c, g, or t
ctcagtgaaaatatacacattctataataaaaaagagcatttatcttaaatataaataaaatactctacaaattattaattactagtattatcttaacccagtaaaggctctattgctcttactttctgtgttgaataaagtattatagtcactacttagaaactccatgttttatctatgactgatactgcttcattcagctactgaggcaaacagggcacagtgtcctgttccccatttaggatcagtgggtctccaacctttctgacaccggggaccagttttatgggaagggcaatttttccacgggatggggaggggtaggggggatagttttagggnaggacaaggcacattacatttattatggcactttatttgtattattattacattgtattatataatgaaataatcccatagctc

SEQ ID NO: 463215 - DNA, 462 bp, Homo Sapiens
aggaattatccatattttgagaaatagattaatgaaaactgtacagataacaacagaagaataacactttctgagctctgattttgtggcaaacattttttaagggattatcgtggattaaatcaatgaacctctctcctccaggatttaggggctattaacacagccatttcagttaatttgcctgggaggtctccgacggctcttaaaccctccattttataaggaaaaatgtagttacaaaccgttattttcctaaagtccacatgtatcatcattcatctggttctaacaatactcattttaaatttgcttaactcgcaaatttagttttccttttcaaaaacagtgtacaaattattttgttctccaattttaggcaatcaatttaagggggatctttggattaatgtttagaccaacccggtttaaacaaactaaaattcctttaaataattatcc

SEQ ID NO: 463216 - DNA, 279 bp, Homo Sapiens
  misc_feature (195)..(195): n is a, c, g, or t
  misc_feature (245)..(245): n is a, c, g, or t
ggcgtaacacccgttgcccggcctcataacacaattttttcatgggacagctgcacgttgggccccacgttatcaagttcaaattgtcctcaggatgggctgggcaggggggtaagggaaaatggcacttttttcatctatcttcaggaataaggggaataggtaaaaggtggggggaaggactttaagcttggngcaggattttcacccactgagcttacaattaccgggatggggagggcttncaggatttcaggggattggggttggccatttggg

SEQ ID NO: 463217 - DNA, 609 bp, Homo Sapiens
  misc_feature (534)..(534): n is a, c, g, or t
  misc_feature (549)..(549): n is a, c, g, or t
  misc_feature (564)..(564): n is a, c, g, or t
ttttttttactgaagaggacaagatgggaaggacatttttattttccctaatcttcaggcaacctcaccaagctggaggtcacatgtagctgagtgtgaaaccaagaaaaatacgaagcttcaaaagtactgtgcgttgtatttcttcattctctggcaggctgggagtccaaggtcagtctaggcaggagggctgcttggcctaagcagtcacacaattttcaccgtcttgagcatatctgacaagacatacgtgtcatcccaacccctcccaggcttcctcagggtccgctccaaagcctgggctgtttctaggagctctggtgtggcaagtttttgctcagggtgcagctgacagaacaggatctcattcacttcaccctcaattcgccggacatataggagggggaacactgccttgagcccagccagcactgagtcttttagccccaagtctcgggacacaaagttgagaataaaaacacccttcaggagtcaagatgctttaacctctgtagaaaagattgctccacnaatgctggggcgganaatcattcccatgtnggtcctactgtcaaatcaaacatttgacatcgtgcaaggcgtgtt

SEQ ID NO: 463218 - DNA, 426 bp, Homo Sapiens
  misc_feature (360)..(360): n is a, c, g, or t
  misc_feature (366)..(366): n is a, c, g, or t
  misc_feature (371)..(371): n is a, c, g, or t
  misc_feature (389)..(389): n is a, c, g, or t
  misc_feature (408)..(408): n is a, c, g, or t
ttttttttctggttgatgtattatttattatgtaacagttctgagaaaaaatccaattcaaaacatattactgaggattctgtattagtatattttagaaatcgtataatccaaagctgattttctaatatattttcttatataacacttaaggaatttttcactcccattatttggctctaggaaaatcttatggggaaacatttgttacactaggaaaacaaaatttaaggtacagttgttagggcacgggtttaaaggggatggatacacacaaactattaattaattaccaaatcaggtacttcttttggaatacacctttgggatggtaaactttttaaaatcggtgttttgggntaaatnttaanacctacttcagggacttntttttaacctctccccttnctttcctatgctcttccg

SEQ ID NO: 463219 - DNA, 374 bp, Homo Sapiens
  misc_feature (243)..(243): n is a, c, g, or t
  misc_feature (249)..(249): n is a, c, g, or t
  misc_feature (263)..(263): n is a, c, g, or t
  misc_feature (265)..(312): n is a, c, g, or t
  misc_feature (326)..(326): n is a, c, g, or t
  misc_feature (353)..(353): n is a, c, g, or t
  misc_feature (364)..(364): n is a, c, g, or t
agggagattttcaaagcaacattgcctctatcataggtagtcttcaatgtaatactggcaccaacaagagaaccgagctaaattaaaactaccctcaaaatgtcatcacagctgatgtgcacagcagggaaggacgatgtcacaaaatgcacagatctgttcctattgcacattccacctttcccacgtactgctggtcagcccagattaaccaaaatcctttttagatgtctgtcttaaagngagctntaatatggcaaacntnnnnnnnnnnnnnnnnnnnnnnnnnnnnnnnnnnnnnnnnnnnnnnnnccttcaaaccgggnttttttaaaagagttttgtgggtcagngtacaccctcnttggtccatt

SEQ ID NO: 463220 - DNA, 430 bp, Homo Sapiens
  misc_feature (268)..(268): n is a, c, g, or t
  misc_feature (292)..(292): n is a, c, g, or t
  misc_feature (353)..(353): n is a, c, g, or t
  misc_feature (373)..(373): n is a, c, g, or t
aagttccaaatgaggcattttgttgaaattcagtgttgagcataaacagtgaactcaaatgcacagaggaggcgtcatggaagggtgacaaaacactccagagcaataacagctaccctattttctgttccctgggagtagggagaaaagacatcaaaatcaaattataaatttaaaaaagtattaaaattatcttatgggaaatatattaagaagtttgttagggcaaatgggaaaacgttttgtggaaacaagaaataagaaagantggccatcacttaaagcaacagantgtatctctcccactagctctcccctccctacccacagctttatttcacatttgttctatnaacattttcaggcacagttncaggaccttccgcttgagccagtgtgaggtcagggtttttgagggaaggcgagtccc

SEQ ID NO: 463221 - DNA, 464 bp, Homo Sapiens
  misc_feature (219)..(219): n is a, c, g, or t
  misc_feature (274)..(274): n is a, c, g, or t
  misc_feature (326)..(326): n is a, c, g, or t
  misc_feature (331)..(331): n is a, c, g, or t
  misc_feature (424)..(424): n is a, c, g, or t
ccataaagaaggacacatttatttacattctcaatggactaaaagaggctttaaacttccacaattaaaattgtatgcttccaaaaatatcatatgatcaatgcacttaacttaaagcttcaggtattaataacttcatttagacttcttaaaaaaccaacacaaacatactttctagagtgcaaaatgcttcttattaaatacttcagggacacaaanggcaatttgtttttaaacagggggcatccttttctgaagggatcatcaccacaanggacatccattgccgggcaatgggacggtggaacaggaactgccaggctcgnattanggatggcaacgttaggggcttctggccttcagtttctttgccttttcccgaatggaccccagtttatttggttacaaactccttagttgggtnccggggaccaggcacaaatatggcattcacaaaggagttt

SEQ ID NO: 463222 - DNA, 512 bp, Homo Sapiens
  misc_feature (331)..(331): n is a, c, g, or t
  misc_feature (360)..(360): n is a, c, g, or t
  misc_feature (482)..(482): n is a, c, g, or t
atttcatggatctgtttattccatttattagtaacagtgcattttttcacacaatattctattttacttaaacttaatgcatatgtagtaagaaagatttactatcccaactagcctctcagtatttagatgaggatagaacagatacggtgtaacacgcctctcccactgcttcctgtgtgtacccaagaaggcagaaagcagctcacccaagcctaacctggccctgtctttttcaggcttctcaggatgcccacagcacatactggggaactgggatgcagggagaagccagggtctgtcttcaggagggtcacagccagcagggcancagttagggtcgtgccctgataagggggntacacaaggggaactccaggcagtggggggatgggggacactttggtgcactcaggcagtgggcaagggggcattacttggattcaggatggaggaacactgggtgccaggacagagggggnccttggcaaccatctgcaatgcatggggca

SEQ ID NO: 463223 - DNA, 361 bp, Homo Sapiens
  misc_feature (190)..(190): n is a, c, g, or t
  misc_feature (265)..(265): n is a, c, g, or t
  misc_feature (295)..(295): n is a, c, g, or t
  misc_feature (309)..(309): n is a, c, g, or t
  misc_feature (331)..(331): n is a, c, g, or t
aaactctcataactttgcaagctagcagtaaaatattgccttcaatattttactaattagcaccgtataccttttaaagctaactggaacattgattcattataaatgattgtaaaataaaatgatcatttcaaatgccaaattaatctcaaataacaagtgaactattattaattttatctcttttttnggctctacgcacaaagatgtatttcaaagatggacttaattatattagtatcagttttgtcaatctagcaaatcnaagtatcacagttttaaagcaatatttaancccccgaaattacnaggagggcgtaccagaaagttnaggggatcccgctaccaaaaaccaaagggt

SEQ ID NO: 463224 - DNA, 414 bp, Homo Sapiens
cactttttgccgaacgaaatttttacctcacgttcatctcaccaaagtctcttcagaggagcctggtttacagggtgatgaagctgatgatgatacagtagtgtacacactgctaacgtgaatcagactggaaagcaagtcagtacttcagggtagccccgcaggaaaagagcgatactaagccttcttagtgtttcgtttgttagtagtgatgaagagaaaactgcttggaagcttccatgggtcactagttagggacagagcagcacaggtgatcagacagggctgagcaaacacctgactgaccaacagaaccagtctcctcaggcagcttacattgcagtcaatacagagggttatgggaatttattgatttctgcttggaaataaacaaggttaaggcaaattagggag

SEQ ID NO: 463225 - DNA, 456 bp, Homo Sapiens
  misc_feature (114)..(143): n is a, c, g, or t
tttttttgatttgttcaagtttcttataaaatctagatattggtcttttgtgaaatgtacattttgcaaatattttctctcatcccataggtcatctgtttactctgccgttannnnnnnnnnnnnnnnnnnnnnnnnnnnnnctgtgcaggaagctcttttgtttaattaggtaccaattgtcaattttgtttttgttgcattcacttttgagggacttaggacataaattctttgccaaggctaatgaccagattttcttccaggggtttttataggtttgagggttttggcatttaaggtctctaggtccatcttgtggttaatttttggtatatgaaataactcaggcttttaaaacagtcaaaaggatttaggacacttcaccaatggaaggacttgccagatgggaaactaatccatgtgaatagggcaacatccattattccattaggg

SEQ ID NO: 463226 - DNA, 454 bp, Homo Sapiens
  misc_feature (375)..(375): n is a, c, g, or t
  misc_feature (419)..(419): n is a, c, g, or t
ttttttttagattagtgaaattttatttatagccataattcatctcgaccaatgatttcacaagtatttgaaagtgtaatgggtaaaagatgcagacagaattcaagagatacaaataagcacacataaaaatatgtcattttctctctagtcccctcccccataaaaatgttgtcatgtgttaaagaaatgtcagttaaagcaaccttgaggatacttcctttatatctattaaattgggcaaacatgtttaggaaatgttctttcttgactcggggcagtgggttaggacaagtgttcacttcataactattcggacaaaactgtgtgttgtatggcactcttctggtacctgttaacaggaaaatactaggnaaaaattccactggcttttgcggggtaggtcttctacggggacntgttctaggggatttggcacaaggaggttcccgta

SEQ ID NO: 463227 - DNA, 154 bp, Homo Sapiens
  misc_feature (79)..(94): n is a, c, g, or t
ctactgttgacccaggctggttcatcagtttctgtgtctgtggggaaaaaatatgagtcaatctaaagtatagaaggannnnnnnnnnnnnnnnacccaagacagagtcttgctctgttgcccaggctggacagtaagagtgaaactccgtctg

SEQ ID NO: 463228 - DNA, 427 bp, Homo Sapiens
tgaaaaaccattgcctttttattgtctccttttaacatcaaatgttttataacacacttgatccttttgtttctaccccctattcattacagtcaaattaacaggcaatataataggtctaacagaatgcttgcatttcattagggaaaaatgaacgtctctctcctgaaacaggttgtcggtaccttgaatgacataatattgggtgtatagactaggttcagtcagagggattttttccacatcttgaatgaaaatgttaaacatgtgatgcacagagtattaacctgtttcaaaaaagtatagataaataatttattaaaaaatatatataccttgtatatttaagccatatttgagaacaggctaggataggattatttaaaaaaagatatttactagagtttagaaattaccacctactgat

SEQ ID NO: 463229 - DNA, 475 bp, Homo Sapiens
  misc_feature (314)..(314): n is a, c, g, or t
  misc_feature (416)..(416): n is a, c, g, or t
  misc_feature (444)..(444): n is a, c, g, or t
  misc_feature (453)..(453): n is a, c, g, or t
  misc_feature (461)..(461): n is a, c, g, or t
aataaaaaataaagaaactttcatttatttgctgcagacctgaggatgtgatttaatcactcaacagacactaataagtgcacagtgaggagcacgcactggactcagcgtgcgttgaggaaggcgctaccgctgtcctcaggatccacgggtgcaggagcggggaaaaacctgggtcggtgctgagaggagactggaggcacggggacgtgttacttgagactggagggagtgggctgagcccagagctcactgggcccctccccatcctcagacagaggagtgaaggcaacgtttctctggggtggtttctnggctccctgggtgcttcatgggtcagggactttttcagctgggaccaaacattttcttgggaaaggctcttttgaatgccagcctagcagagtggggcattnggggattcagaaccttgggagggttttnaattcagtngactcatngagggcatcccagg

SEQ ID NO: 463230 - DNA, 371 bp, Homo Sapiens
  misc_feature (60)..(74): n is a, c, g, or t
  misc_feature (78)..(80): n is a, c, g, or t
atgttttaaataaattttattgtctatattaaggtatacaacacaatgttaaatgaaacnnnnnnnnnnnnnnngcannnctatagtggaacaatgaacatacccatcatctcacatagttactgattattcccccattggcaagagcaggtataatctactcatttagcaaaaagtcctggaacacaatatacaatatgtattaactatagtcctcatgttgtacatttgatctttgatcttttcacttgttcatcctggcatatttactactttggcatcctttggacctacatctcatttcctccaccttatcctggaccttaggtaattactgtttttattctctatctctatatatggggagcctt

SEQ ID NO: 463231 - DNA, 462 bp, Homo Sapiens
  misc_feature (371)..(371): n is a, c, g, or t
  misc_feature (396)..(396): n is a, c, g, or t
  misc_feature (410)..(410): n is a, c, g, or t
ggatctggccctctagctgtgatattacgggttctctagagagagatttattagctgatacagcactgtttcaaatttacataattcaaatacccatcagataggcctaacctgccctggctttctaaggccaagcattccactgcctgggctgtgcagtcacacctgagccatctgcctgtgaacacaggcacagcaagagcaagagatggaaactgagtcatgaagagctggctctttctgagacgatggaagcaaagatcattcaactcggagctcctgtatcttcactgcctgggatggttcaggtgagcccggtggggtcggggagggtatgccatggtattgggatcttaccacctcaccatggnctgctttaccttgaggttttcgatncagtggggaggggntccacctgggctgttgaggcctggtgactttgcagtttggctctgcagggta

SEQ ID NO: 463232 - DNA, 528 bp, Homo Sapiens
  misc_feature (301)..(301): n is a, c, g, or t
  misc_feature (378)..(378): n is a, c, g, or t
  misc_feature (408)..(408): n is a, c, g, or t
  misc_feature (423)..(423): n is a, c, g, or t
  misc_feature (436)..(436): n is a, c, g, or t
  misc_feature (450)..(450): n is a, c, g, or t
  misc_feature (472)..(472): n is a, c, g, or t
  misc_feature (493)..(493): n is a, c, g, or t
  misc_feature (514)..(514): n is a, c, g, or t
ttttttttgacaagaagatacatttatttcactgcccaattattttcttaaaaaagcttaatgtttgataaaataaaacaaacttttagtaccatagaaacctttcaacatgtacaatgacatattattactatgtacaacttcaaaaacaaatgcttccagctgcaagtaaactgatgttgaacatcctgcctatatttcagctgtacgaaatttcctgggatggccaatggtctccttgggcttgggaaaaaattatataaataaggaccttcaatgagttggggaatcataaaaatgnctattctggaaattcaggtcatctgggatcttgggggaagtttgcaatagctcttaggaggtttccaacaggcaaanttaaaaccctgtggggatattttaaacttncgttgttcccaggangtcttgttggggnttcacgttggggtntttccaaaattaaaggcttttncccttcgtggggccaacaaantggggttccggggttcaattnccttttttcacctt

SEQ ID NO: 463233 - DNA, 423 bp, Homo Sapiens
  misc_feature (325)..(325): n is a, c, g, or t
  misc_feature (342)..(342): n is a, c, g, or t
  misc_feature (362)..(362): n is a, c, g, or t
  misc_feature (381)..(381): n is a, c, g, or t
  misc_feature (391)..(391): n is a, c, g, or t
  misc_feature (401)..(401): n is a, c, g, or t
  misc_feature (407)..(407): n is a, c, g, or t
acaaatatttgaatttttatttaatttacagcaaagaaccaggtgcaatcaacactttcatataggacaaacataaagtatttcttgagctaacagttagccttcacttttaaaagtaaaaccagaacttttattcatctttctttctgcttcagaaattaacagctgctcattaaatattcattgatgcttgttgtaattgtactgtatttcactaaataaatgtttataacacatttaaccacaaaataggatatcacctctaaggtttaacttatattcatactaaaatgtaggtattaatttttcaaaggttttttatggngggggcctggagagggnagggttaaattatggtgggnggggccatatccttccccntaaacttggnggccataccngggganttactcttggaggggt

SEQ ID NO: 463234 - DNA, 384 bp, Homo Sapiens
tttaaatgatccgtgttgaaggcatcactgctaaatgcagtgggtctgacgtcagctgccgggcctgggctgggaggcatttgctattctgtttaaggcaggcctggattgtccttattttggaaccagcttggtggggggtttgctttgctactgcttctgagccctgagcttcaaaggctgaaattaatggtgaacaaaattgtgcggctctggccatcccatgcggggcaagcccattgagggttatcattaagtaaagaaataaagagggggaaaaaagcctgcctgttccaaaaacctcatcagataatgacctcagtgattgggttttcattaccaaacagcatccagagattatcaacccatagaagaagggagggg

SEQ ID NO: 463235 - DNA, 384 bp, Homo Sapiens
  misc_feature (204)..(204): n is a, c, g, or t
ttttttttaaaagggacatatttattatgaagacacaaaaaccatcacatacaaagtacaatactataacatcctgaaatacatatacacacatactgtacacaaatttatattatcaatataaaaatacatcattaacatttctaaggatgacaaatactaaaccaataaatattgcaattctaaaacatctacttacattangtgctgggtgaatagggatgacggttaaaaggaaagagggacaaagcgggaccaggaaaaccaaccacctggggcttccagttacaggacttgaggttgggtttgggggggagggtatcccaattcattttccccaaacactggaaaggtgcctggtgttcttcaacttttcaaaaacgg

SEQ ID NO: 463236 - DNA, 457 bp, Homo Sapiens
  misc_feature (422)..(422): n is a, c, g, or t
caaaagtaattatttttttatttcaactctataaagtatacaacaggcactcagcaattacagctgcaggaaaaatacagagcaaatcaaagcaggtaaatttatgaaaaagtttttaatctacatcaaaagagtgcaagtggtcaatgaccatttgatgacagtttgttgcattctgactaacaaaggaactctttcatgtaggaacaaattgtaagggggacaatcaaataaccataggctgtaaggattacaaaaggaactggaccagttgttaaaaacatcatacattggaaattaaatttggataggatggatggctttaaaggaaatggtccctttacttccggaaggcccccaacctctggggtccttggccagggtccccggaggctctggtctggttggattccgggggggcngagagggagggggcttaacccaccacacttttcca

SEQ ID NO: 463237 - DNA, 491 bp, Homo Sapiens
  misc_feature (407)..(407): n is a, c, g, or t
  misc_feature (431)..(431): n is a, c, g, or t
  misc_feature (463)..(463): n is a, c, g, or t
aagcacatgggaggagtgactttattcacaataggtaaaataaacataattaatttttaaaaggagaacaaatgaaattaagatagataattgcaataatcaataatattgttggtttaattcataaattaaagttcaagcctgatgccataactcataggtcttatatttatttttcccttatcctgttaaaagatgtgtgaggcagcccgagatataatttttgcctattcttttctcatccatgagggcatgaaatatcagccctaccgaggtaatgtgggagcaaatctattccagttaaaacttacagtgatttaagggacagacaggatgtatatttcacaatatttgtggcacaatacacccggggggcaattttcaaatggggcaaatcctgcagtgtnctttttcaaataggggtgagtgtncaggttcctttttaaggggtaggtggaccaantattccccaaactccttaattatttccc

SEQ ID NO: 463238 - DNA, 484 bp, Homo Sapiens
  misc_feature (316)..(316): n is a, c, g, or t
  misc_feature (379)..(379): n is a, c, g, or t
  misc_feature (429)..(429): n is a, c, g, or t
  misc_feature (434)..(434): n is a, c, g, or t
  misc_feature (447)..(447): n is a, c, g, or t
  misc_feature (459)..(459): n is a, c, g, or t
  misc_feature (468)..(468): n is a, c, g, or t
ttttttttgaggattctcactttcatttattttcaaggcatatacaaaagtctgacatggtgcaatgatctcatcaagagataacagaacacacaggagagggttgggtttcctccccggcccaaccccctcaggaaggcacagaaaagtgaggcttgggttcgggggccacctgctttgggaactaatctgctgctcaggaaggccagggccccttctggaagagggatctcttcctcacatccagaatctagggatctgggggaaggtaaacttgagggccaccagtaaggcatgtgcttccaggggccaaggnttgagtctgtggcttgcattccatgttcattcaggccaccccaaggaaaaaccagtttacttncaccttaggcttcatggggtgggccggcattccttcccttgcattgggtngcatnggggggggcagtnctttttcccctngcagggttnttcattttggccaccc

SEQ ID NO: 463239 - DNA, 343 bp, Homo Sapiens
  misc_feature (91)..(91): n is a, c, g, or t
  misc_feature (115)..(115): n is a, c, g, or t
  misc_feature (253)..(253): n is a, c, g, or t
  misc_feature (301)..(301): n is a, c, g, or t
  misc_feature (321)..(321): n is a, c, g, or t
taaaaaagaaaaggtgaaagcaatacatttgaaatctcctttacattcgaaatttgatatcagtattgaaaacaggatgcttcattggganggatggggttttaatatgaaaagntagtcaactaaggactccatgtatttgggcatgagccatttcccagggtgacttgggggcttctacattgtataaactcgatgtgcaagcatgaaagttcgccctctgggtgaaagctgggtcagatgggagagggancggtggggatttgccaatcgtccagtggggatggtttttccctgctgnttttgtttcccgtgtaggtnttggggtggttttaaatcgcct

SEQ ID NO: 463240 - DNA, 409 bp, Homo Sapiens
  misc_feature (212)..(212): n is a, c, g, or t
agattttagtacactctcctgaccttattctagggtcaagtgggcccttaacaggaggtcttgatttttcaaaaacatgattcggaacattactcctcttcattgtcatctgcttgcttcacccaaagttcttggtggctcttgctaagccagaacatgaaccatccattgtgtctcctccagccttctctccatagccgtgggaggcctgntctggaaacatgtgagtcattcgtgctgtcccttagggcagttcaaactctacggttcgtgggaacgagtgtccctctgtggctgatgggggcctctgctgcttgggtttccttgtggctcctttgcccggttgaaggtcttccaacctccctcttcctccgtgaaatgggcacccactttagactgggttgagtgt

SEQ ID NO: 463241 - DNA, 378 bp, Homo Sapiens
  misc_feature (338)..(338): n is a, c, g, or t
  misc_feature (367)..(367): n is a, c, g, or t
ttattacaatttttattgtgataaaaacacataaaatttaccctttcacatactttgtgtgtaccgaagagtattgttaactataggcatatttttatacaacaaatctcaaaaagcttttccatcttgcgtggctgacactcaatacccattgaacaactcattttctcctccaccagcttgtgggcaaataccgcagtactttgttcttctgagtttgacgttggataccccatataagtgggaaatggggtgtatttgtcctttcgggaactgggtttatttcacttaggcataacgtccatgttgtaggcatagggcaggaattttgtttttangggctaaatggatattggcattgtatggnatataatggca

SEQ ID NO: 463242 - DNA, 326 bp, Homo Sapiens
atcatgtgtttttaatatctacaataaagatacgacatgcaataaactggatctgtagaaactactaccaacaatgtaaagttatttatcagtccactctttctacactgaatagaaagtacaagaggctcaccattttataggtgatgaaagattttcaaacataatttcccaatgacgacagagcaagtagttacgccagttactaggactagttgctctagttactatttggtgagaacggtgaggtttccttttaatccatatgtttgccattgatttcacatgctctatcaaacaggcatcttccctcatatataaatata

SEQ ID NO: 463243 - DNA, 476 bp, Homo Sapiens
  misc_feature (308)..(308): n is a, c, g, or t
  misc_feature (447)..(447): n is a, c, g, or t
  misc_feature (457)..(457): n is a, c, g, or t
ttttttttgtaagtatttaaatacaattatttttttctctcaatggtatagcatattcctatgcttgagaagtatagggtctactgaaaaaccattgtaaatggacgttacaggtatgctgtatttttgaaggtattttgttgtattaagtttgatgaagctaaaattagggaactctgaacagatttgcagggaaaaaatgttttaaaggctttaaaacattaggggaggcagtctagggtgataacgaacaggggttaagtattaaatacacggaagttacatttttgttcatgtttcattgtccnggaaagcaggcagggaaactatttcagttgtgatccaagccgggaaaaaaggaaacacccacagttgcccgtgtttttgctttttagcttaaaagcctagtgaaggtgcttgagggagtctttgctacccgggggtttntagaccggcngtctgaggggctttccgcc

SEQ ID NO: 463244 - DNA, 525 bp, Homo Sapiens
  misc_feature (49)..(49): n is a, c, g, or t
  misc_feature (393)..(393): n is a, c, g, or t
  misc_feature (459)..(459): n is a, c, g, or t
aagttttcaccacactcatttaatttggaaactgaggcagagaccaggngtccaaggtcactcaagttatcaagggtggtgctagggctggaaactgagctctgtgactctgggtgccagggttttgtcagcatttccttgagactgatcttgggtggcagacacagaatcaatcatgagagtattttgtagtcaaacagcgagcagatatgcatcagcaatccctgtcttgatccatcccttttctttatacgatgatccagggaggaactgtctgtcttccatcgtgtctgttttcagacggattttgaccttgcagctaagtctttctctcactgctgactctgctcactctccttcaacttgatttcatttggggcccattgggttccngcttggggaaaggcccatctggggagtggctcaggtacattcccctgttcaaagcagggggaaagnagctggcacttgcaaaatgagggaaacttccaagagggttttgggccagaagtcaatttgcaattt

SEQ ID NO: 463245 - DNA, 315 bp, Homo Sapiens
tttagactgtctgatttttatgtgaaatcccattttaagagtaaaatataagtaacatagtaggctctagtctataaacaaagacttctatttatagtttgtttgccccctgagccccatctcatctgctggtggcatgcacatgctctttattaccagtgcgaatatagctgggaaactaatgccactcaccatacaggatggttaacatggacacgggcatgacaaggaaacccaggcaggcatatcagctatggcaagtgacatcaggaaatagttgggtggcattctgcagcttttttcttctagggggca

SEQ ID NO: 463246 - DNA, 808 bp, Homo Sapiens
  misc_feature (762)..(762): n is a, c, g, or t
  misc_feature (774)..(774): n is a, c, g, or t
acacggtctacctgtatggcaaccaactggacgaattccccatgaaccttcccaagaatgtcagagttctccatttgcaggaaaacaatattcagaccatttcacgggctgctcttgcccagctcttgaagcttgaagagctgcacctggatgacaactccatatccacagtgggggtggaagacggggccttccgggaggctattagctcaaaattgttgtttttgtctaagaatcacctgagcagtgtgcctgttgggcttcctgtggacttgcaagagctgagagtggatgaaaatcgaattgctgtcatatccgacatggccttccagaatctcacgagcttggagcgtcttattgtggacgggaacctcctgaccaacaagggtatcgccgagggaccttcagccatctcaccaagctcaaggaattttcaattgtacgtaattcgctcccaccctcctcccgatctcccaggtacgcatctgatcaggctctatttgcaggacaaccagataaaccacattcctttgacagccttctcaaatctgcgtaagtgggaacggctgggatatatccaacaaccaactgcggatgctggacttcaaggggtttttgataatcttttccaacctggaaggcaggcttcactgcttcgggaattaacccttgggttttgtggactggcagtatttaaatgggggtcacaggattgggttcaaatatattccctttcatcttttcaacgtgtcggggttttcngtggccagggtnctggaacagttccggggggtgggccttcgggttt

SEQ ID NO: 463247 - DNA, 386 bp, Homo Sapiens
tgcagcgagtcacagaataacaaatgtatctcatgtgtgaaccctgaagacaaatgtaagttctcatgccgctatattttattgctgtgtaattttctttccggtttgaaatcatgcttggccaacatgtaatcatttcaatgagaatttccagggaggaaagttgtctgctaatctttacttaagacttttttgttttccttttattagctaagcaacattataggagctgaaattcctgacagcagcttgtggcaattcagcctaaggaatgggctgaggaactgtaacccaaagtacatccaattactatggggattaacactgggatgtatttttaattgactttcttaatgtaggatgtgtacatcccccactgtttctgg

SEQ ID NO: 463248 - DNA, 407 bp, Homo Sapiens
  misc_feature (395)..(395): n is a, c, g, or t
attaatatacaacagttgtacatattttggggggatatgtgatattttgatacctgcatacaatgtgtaatgatcaaatcagagtaattgagatattatcaccccaaacatttatcttttctttgtgttggggacattacagttctttgcttctagctactttgaagtgtacaataaatttttgttaactgtaatttccctagtattctatcaaatctagggacacattccttttatctgactgtactttcataccccttgaccaacatctcttcacccccacaaatcactatgtttgttatttggctgtgagggataagggatgggctgggacttgtccttaaaagttgggctaggtagggccgagggggggcaggatccacagggtcaagagntcgaggaccctt

SEQ ID NO: 463249 - DNA, 513 bp, Homo Sapiens
  misc_feature (454)..(454): n is a, c, g, or t
  misc_feature (468)..(468): n is a, c, g, or t
  misc_feature (500)..(500): n is a, c, g, or t
ttttttttcacatgtattcattcaataaactttttttaagtgcccagtatgcgtcaatcattgtcctaatatttggggatatcagtgaaaaaccagacaaacccccaccctcatggaatgaagaactccttacacacaatctcaaacacaaggacttccactcttcatcaatattccaataattcagtcatgcacctttcagagtgtatgggatccccataacaccctcatgacaatggggcaggacaggtattcctagtgcccttttccaaatggggcagaccaaggaatgactacatgtagggaatgggaacctcaggaatgaatgatattgtaggtctcggaagggaggacacaggcagagggtggaaatggccccagattcttcacttcctggggggcctcagttccagtttcattttcacaggattgggggaaattttgttgtggcacnttttctggttttcnggccattgaggaaggtttaagttttccagttntggtttcaaaagg

SEQ ID NO: 463250 - DNA, 438 bp, Homo Sapiens
  misc_feature (155)..(155): n is a, c, g, or t
  misc_feature (168)..(168): n is a, c, g, or t
ttatagcaagtgtgaaatagttaccattttttcctgatctgtcatcttcatagcacaacaaaacgaaatgatggaaatgctcttgagctcacaacatttgtttttcttttaaagtaaatgcaagtaccaaagctcactactgcggtttgcctgtngcctggacaatgnagcggagccactgttgttgggcacccccttccctccccgggtttgcaaatagaggctaccgggtgctgtattcagcaacacctgttttactatttgttattaaactatcatctccaccttccttttgattagcaatttgtactaagaaacgaaacaatgttatttggtggtgtataattctacttttctagtagattactgtgtggaattctgtgaaaaatatttgagaaaaggcctgtattgcataaataaattcctttgtatgttgtg

SEQ ID NO: 463251 - DNA, 465 bp, Homo Sapiens
  misc_feature (158)..(158): n is a, c, g, or t
  misc_feature (160)..(160): n is a, c, g, or t
  misc_feature (421)..(421): n is a, c, g, or t
ccaatttggaggtcaaaaagagaccaaagtctctgtacatctcacatgactttacttgcattaactttgccttcctaaattacagtctataattaagaagtgctagtctcctggccagctcttatggttatttttgaagctccttgggtgcttgcctntnccagagggctgttactttgccccctctctggaagctcatttgcttccacaggaagccttaagccaaagcacattggcttattcaatctggtgtctggatcttaaaacctggcttctcagtttatgatgctcaccagtaaaacactcatggctcttcttgccatgaagcgaaccagggcttgcttagcttagctttcatgtgtgggccttcgtgaaatcaaaataaggaaggaaggtaggaacttagtcccacccttaagtnaagaaggaactgggttagtcatgaagtgaaggccacatgacttt

SEQ ID NO: 463252 - DNA, 409 bp, Homo Sapiens
  misc_feature (350)..(350): n is a, c, g, or t
  misc_feature (392)..(392): n is a, c, g, or t
agtgaatatcagagtttacttgtgggttgtgcaagacaggagacctttggagacccctctgttatttccttgagccccagaaactacccatgcctacaccccaaaagcagcagcagcatgagaacgattaacacacattgaggacctattgtgtgggggtccccggaatgcctcacatgaagtcatgtgtcttgtcagagcccttgggagacagggccacttcgtgtccccatattacagatgaggaaactgagggcacaaagcagctaagcccttcagccatgggtccacagccagggaacctgggggtccagcttttccaggccgtgcccctgggccctggggcttgncttccaaggtttgggcacacattgggttttggaaatgttttnaacagcccgagggggtt

SEQ ID NO: 463253 - DNA, 347 bp, Homo Sapiens
  misc_feature (249)..(249): n is a, c, g, or t
  misc_feature (308)..(308): n is a, c, g, or t
gctcagtaaacattagctgtgttatttattatagagtatacaggatacaaaatataatagcaattatatattaaatatttgcaataagcaaggccctgagttaagtattctaagtacattatctcttttaattttcacagcaattctataaggcaagttctgggataacccatttgacaggtgagaaaactgaggacccagagaggttaagtcatgtctccaaggtcccaaagctatctgactccaagnccctgagggtcccaggccaaggttcacaaacttcatttcccaaaacccagatttaggantcacttgttggaacatctgtttgacactttccggggggg

SEQ ID NO: 463254 - DNA, 446 bp, Homo Sapiens
cccttttttggacaatgtggtagtttatgtaccaagagtgtctttgtttttggagaattgtacactggagtgtttaggactgatggaacatgtctgccaacttggtcctcaaatggttaaagaaaaagcccatatgataatggtggtacaccaccatgcacgcatgcatgcctgcagaaatgtgaagtgttacccaattgaacaatctggatgaagtgaacatgggagttctttgtactattcctccaactttttggtaagtttataacaagttactttttaaaatctactgagcttaaggccagggggaagtcttatttttcactttgaactcttctgtaaattgtgttttgaatttctacaatgagtatgtattactttcttaatacaaaattaaagtgtccgatttttaaaatcacaaaagtaatataataaaggaaacttga

SEQ ID NO: 463255 - DNA, 485 bp, Homo Sapiens
  misc_feature (310)..(310): n is a, c, g, or t
  misc_feature (379)..(379): n is a, c, g, or t
  misc_feature (411)..(411): n is a, c, g, or t
  misc_feature (421)..(421): n is a, c, g, or t
  misc_feature (427)..(427): n is a, c, g, or t
  misc_feature (443)..(443): n is a, c, g, or t
  misc_feature (450)..(450): n is a, c, g, or t
ttttttccccttaatgccacctgtttcaaataaaatccaaggtcggtttgccccgtgtatacatgctgaccactgggggttcaggtatcttgttttgcccaggttttagacctgtgaccttcaaacctgctcaaaccaggacagctggtcaccctccctgggtggacgtttggtgccccacctcctgatagcaattgtcagagcttagggatgtccagccctgtggcccacccctccctttcctagtgtggggaatagaggtttaccttttcacggccattttcatcgtcttagggacctaggtctctgntttacgtgcagggggctgccttacactgtgtaccctggggtgcgggctgttgaatgccacgaggcttgnaacacccgggcctgtggtcatgattaacgtgnttgcagccgncattgncttaaccaacaacagncaagatntcagttgaacctggtttaggaaagttttggtttct

SEQ ID NO: 463256 - DNA, 455 bp, Homo Sapiens
  misc_feature (120)..(120): n is a, c, g, or t
  misc_feature (444)..(444): n is a, c, g, or t
aaggcatatatctgcgtatgtgtggtacttagtcacatctttgtcaacaaactgttcgtttttaagttacaaatttgaatttaatgttgtcatcatcgtcatgtgtttccccaaaggaangccagtcattgaccatttaaaaagtctcctgctaagtatggaaatcagacagtaagagaaagccaaaaagcaatgcagagaaaggtgtccaagctgtcttcagccttccccagctaaagagcagaggagggcctgggctacttgggttccccatcggcctccagcattgcctccctcctcccactgcgactctgggatctccagggtgctgcccaaggagttgccttgattacagagaggggagcctccaatttcggccaatttggagtcctttctgtttttgaaggcatggggccagacccggcattgcgttcgggagacccngttgggcctgg

SEQ ID NO: 463257 - DNA, 466 bp, Homo Sapiens
  misc_feature (18)..(18): n is a, c, g, or t
  misc_feature (35)..(35): n is a, c, g, or t
  misc_feature (169)..(169): n is a, c, g, or t
acgggacacttcctttcnatgaaacctcatctaanaataaacatggagacacattacttagaaagaccatcttcttgaagtttcccttaagcaaaaacccctgttgtacaatagagtaacctggtagattcacaagctcgagattccatccgggatctgatatccacancaaggaattccttcctcccaggtccattttcacagcccaattcatcacatactctgttggctaaactaactgctgagattcttcggggttgggtacagacaatgttacatttacttgcttcccactcatttagaagcaaatcttccaatagaaaatgtggtacctgagtacttttaccactccctgtttcacctgccacaaccactacccgatgccttttaagagtttcaacaattgagtcccgatgtttaaatacaggtagctgttgtctttcctttagaagtttctgatacttag

SEQ ID NO: 463258 - DNA, 498 bp, Homo Sapiens
taatttaaaaaaaccatggagttgttttatttagtataaataaatacattaaagaaacaatttaaatcatatatcaaaaggaagaagaaacaaggaaaaatgtcatggtaattttacatcctattctataatataaaactacattttaaagttatctgatatgggaaaaaagtatcaaacctctcccctcctgagtctttgggggaaataaacagcacaccatagtgatttgatgggctgcaagtcctctgggtcaccacttacatgtgcccgggttgctcttagcccacctctaggaggctacgggctaagggttcagatctcctctactttccaaaacttggggtctttaggccctactgaatctgaatgtcatgctctgtcacttcacaaaacctatggccctgaccctcttccaaaaatgttgcttctcacctgtctggcaaactcttagcatcgtggttatgagtgtggatgctgtcactgagtgcctgggtt

SEQ ID NO: 463259 - DNA, 476 bp, Homo Sapiens
ttttttccccttttgtccctttccccaagccaccaattggatggatgaatgtttgacggggaagaggaagggtaggaggatgcatggatgagtggatgagtggatcgatggatgtattgataaatagatagaaccagtcatctgaagcaacttaagaattgtagccttgactccttgagactgtagatttcgatccaggaaacatttatttagcacctgccagatgccagaaatttataccatttaaaactcagtaagtcttttaaatatcaggaaggagagaagcgacatcatgatacatcctatgggtattaaaaagccaatagaatattatgaataattttatgctaataaatttaacaacttcaacatcataaacaaattccttggaaaagtaaaaagtaccaaatttcattcaagaagaaatagataccagcctgagcaacatggcaaaatcccatctctacaaaacatca

SEQ ID NO: 463260 - DNA, 511 bp, Homo Sapiens
  misc_feature (23)..(23): n is a, c, g, or t
  misc_feature (36)..(36): n is a, c, g, or t
  misc_feature (270)..(270): n is a, c, g, or t
ttccaatttaggagctcgcaagnccctttcctaagnccatgccaatgttttaaatttgctggagactagcccacaggaacaatagtggctgtgtgtagacacgaatggccatggcacacactcatggttttcacaacttcatatgaatacacagactgggctgctggcggactgagggtagctgaagatggcacattctccttcccacagaagaatgatttcttgttttcaaacgcctgctgggtggcacttacggctttcacactaganacagctcagctggctctttgtgtttgtatactttaggtagaaggtacattcagaaagtgaccctagagagactgccccaaagagtgaaggcctctggggagctctgagcaggtcactctggatcttagccaactcaccacagatgcctggtggcgcctctggagcaaggcacccctcaataccaaccttcccgagggaggaacagcataacatatctcacccacagacccatgtgatggga

SEQ ID NO: 463261 - DNA, 665 bp, Homo Sapiens
  misc_feature (215)..(215): n is a, c, g, or t
aaaatcctagacctgaacacccagtttcccttaacagaggtcagcaatcccctaatcacgaattcctgagatcccaaaaaatttcctaaaaacctagtttttcccataagtttgtgacaaaaattgacctaaactatgtaaggcaggtagcttactgccttacatagttaatcccagttactatgaatgtactaatgtttgattatggggtgttncccaggccccattgagggtgttatgtaatctacattatatatattctctctggaaaagggggaaaattctgaattctaaaaccctaagggtttcagatgaaggattatagtatacttataaacaaagaaataaaagcaatggaaggctcatgctgtatactatttgtatactattgccatctgctgatgtcgatatagaactacaaatatgtaatccaaatgggaagatttcatctcacagggttaagagcagcacactcataacttggaaaatagttgagattttattttcaaaagtaattattataaaaaaatccttagtggatgaagtttaaaaaaacctctacaatgtttgcaagaatttgtgtgctccatccatcctacataacatagaagttggattactcatcttgattcaatgtacttgaacaccttttagatttatcttta

SEQ ID NO: 463262 - DNA, 441 bp, Homo Sapiens
aaccaccaaagaagagtggtcccaagactttaaagatgaagggttgggcatcagcaccgataaagcatatacaggcagcatgctgagggaagcgtaacccccagggtttagagtgaaaacagccagtctgaagtatccattactcaagtcccaaggtgacctctctctcctcagatttccttcttggccctgtgccctgcactttcttcactgtgttcaagtgtcatagctatcaggccactatcatggatatcatgtatccttcctggtgctcacacacctgtcaccttgtaaaacacggacattagtgtgaacacaggacagcttcgctctttctcttcctgcctttcctcttttcagagaagttgatccattaagtaattatgtttggtctatttttaattacagatggggaccacttcaggggcaaaggtctgactc

SEQ ID NO: 463263 - DNA, 466 bp, Homo Sapiens
  misc_feature (39)..(39): n is a, c, g, or t
  misc_feature (58)..(58): n is a, c, g, or t
  misc_feature (115)..(115): n is a, c, g, or t
ctacagcgggtaggctaactcatgaaaaaggccaaagcnaatcaacttttcacatggntttgacctcttggaagttttgtgattaaagtcccagtttgctctggttaaatttaanaagacataaatgggaaatttctcagaaaaaaactaaagaggagcacactagagggtaatttgttagataaaataaaaaacaaatgtccctaataaactgatccctggcaagccacagcttcaaacacatgacaaggtaagtttacttagtcaattatgtacaagctgaaattacacaagttacggtctatgaactttttttcttcatgttgtgattataaacgttttataattactagtatattaaataaaagaccaatacttttataagaatactggctttctgaaagagcgttgtttttgtaccttctcaccacctcccctgtctggtctacagcaccctttcactccc

SEQ ID NO: 463264 - DNA, 175 bp, Homo Sapiens
  misc_feature (144)..(144): n is a, c, g, or t
catggcccggctggccctgtaatttcttaaagggatcagaagccctgctctggaagttagggcagtcacctctgtgaccttcaacaacatctcttacatttttgctttcttttatctgtaaaacctaggtttattcagatcttnttccgggcgacgttgttgacaattaaatgaa

SEQ ID NO: 463265 - DNA, 435 bp, Homo Sapiens
  misc_feature (69)..(77): n is a, c, g, or t
cttttcgggcagcatggaaatcattgaggtctcctgagaagaaagacacttgtgacttctatagacaannnnnnnnncttgttcacaaaaaaattccctgtaaatctgaaatatatatatgtacatacatatatatttttggaaaatggagctatggtgtaaaagcaacaggtggatcaacccagttgttactctcttaacatctgcatttgagagatcagctaatacttctctcaacaaaaatggaagggcagatgctagaatcccccctagacggaggaaaaccattttattcagtgaattacacatcctcttgttcttaaaaaaggcaagtgtctttgggtgttgggagggacaaaatcccctaccatttttcacggttgtggctactaagggggttctccaaatattaggtctttggtcccggaccctttc

SEQ ID NO: 463266 - DNA, 335 bp, Homo Sapiens
  misc_feature (102)..(219): n is a, c, g, or t
  misc_feature (287)..(287): n is a, c, g, or t
  misc_feature (295)..(295): n is a, c, g, or t
tgggcataattgattctcctgagcttaaatgattctcccacctcagtcccccaagtataagagctgggactacaggcatccggccatcatacctgggctaannnnnnnnnnnnnnnnnnnnnnnnnnnnnnnnnnnnnnnnnnnnnnnnnnnnnnnnnnnnnnnnnnnnnnnnnnnnnnnnnnnnnnnnnnnnnnnnnnnnnnnnnnnnnnnnnnnnnngtgtgagctaactgcacctgggcaactttgccacaaatgaccagataaattctttgttgtagggggtnttttgtgnatcacgggtttttgggcagcatccccgggctttatttttt

SEQ ID NO: 463267 - DNA, 512 bp, Homo Sapiens
  misc_feature (17)..(17): n is a, c, g, or t
  misc_feature (36)..(36): n is a, c, g, or t
  misc_feature (41)..(41): n is a, c, g, or t
aaaggtaaacctccccnaacaggtcccttcaacccngcgcnaccctgaggtcctctggctgcccaaacggggcgggaaccgccctgagtttctaaataggaaggaatgaggtcaaaaatatgtaaccctgggcagtgaacaggcgtttttgcaagcaaggagaaaacctccgaagatgccttcccagccttaggataccacaaacccactgtccacagggcgggttttgcacagaagtaccagtgtctcacacctcaagctgtgccgattctcctcacccggggaaaatgcttacttaaatgcttctttacaactgctcttgtcaagggtaccataaaactctgtgttcagaatctggaagctgatggcttcccatggcctaagtgggtgttggtgacatccccggcgtgcggcgtgctggagcccctgaacccctgctgcggccacgtcctcctgtcactttgggctcctctggctaaaagaggaaccctgcctctcctctcccgggctcc

SEQ ID NO: 463268 - DNA, 411 bp, Homo Sapiens
  misc_feature (382)..(382): n is a, c, g, or t
  misc_feature (389)..(389): n is a, c, g, or t
ctacaatgtgaccaacaagtcccacatctttactttcacccacaatttctctggcccccttcgccctttctttgaaccttgccttcatgatggaggaaaaaacacagcacctctagtcatttgttcagaactacacaaatcagaggaatcaattgtccccaggccagaagggaaaggccatgctaatggagatgtgtccctcaaggtgaactcttctttgactacccccgaaggccccagagctgaaggatataatcctgtccttgccccctgaccttgggcccagcccttcagggagctcaagggttcttctttttagggatatgccacattacctgctcccatcaccatccagcccagcaccctgggactttcagtcggnctgggcncaaccccatggattatgggaac

SEQ ID NO: 463269 - DNA, 490 bp, Homo Sapiens
  misc_feature (410)..(410): n is a, c, g, or t
cactctgggcctagccgtccccccagctggtaagagcagtggcctgactccgcactgggcagaggggaaggtgggggagccctgaagccaggtttgacccagtgggcttggctggttctccggccggcagccactctcccaggtccctgtgtgcacatgatcccagagtccaaggaaaagagggggccctggggacccaagcccacttcctcacctgtgacaggaaaactgcctatcccccaggggtaggaggtactcgagaaaggccctgtgcttggcttggctgtgctgtgctgagaccgccagtgacttctgtaagcctccagccaggggcccagacccgggtccccaccggcagagttttgcctttttttcgggctgacccgggctttgtagttttttgttcagcntgttgggagggaagggcacaacagggtttccttgctttggctttgggaagtttgtttagaaattttaagggggtaaggtt

SEQ ID NO: 463270 - DNA, 493 bp, Homo Sapiens
  misc_feature (477)..(477): n is a, c, g, or t
tatacatttgcagagtctcctgcttagaagggccatgcactctgcttaatgcttttctgctactatctttataaaattctttacaaagttttaaacaaggggccttgcttttcatttttctctgggccctgcaaattacatagctggtcctggatgtgatttaaggtcataaaggtagaaagtggcaaaggccagtgcctttctgatactactcttctctgtttccgaattatgcatgaagagctttaaggtttaacctatttttcccactccctgaaaatactatttgtatggattatgtagctgattggtatctttcatcatggggattaatttcaggaccccttattttacagatgggggtaagtgggagctcaggaaaggttaaatactatggatccagtaggagggtgacaggtttttcaacattgttattctggatttccagactccacacacacaacaaacgtgctggantccttggttataacac

SEQ ID NO: 463271 - DNA, 480 bp, Homo Sapiens
  misc_feature (464)..(464): n is a, c, g, or t
agtactacaagcatcattctctcaaggaagggttcagaaccttagatacaactctgcagtttccatacaaggagccagaacattcagctggacagaggggtaatagagcaggcaacagcttgttaagtccaaaagtgctgggcattgccatcgctcggtatgacttctgtgcaagagatatgagagagttgtccttgttgaaaggagatgtggtgaagatttacacaaagatgagtgcaaatggctggtggagaggagaagtaaatggcagggtgggctggtttccatccacatatgtgggaaggaggatgaataaattcaaatcccgtgttgcaccctgcaccaaaaattttcagaggaaggggataattaggaagcctgcacagcttcgtggatttaacttgaagtgtttttaaaaagctggcttttctgggctgtttcaacatcctccctccttaggcccntcctaagtttttatgg

SEQ ID NO: 463272 - DNA, 401 bp, Homo Sapiens
  misc_feature (348)..(348): n is a, c, g, or t
  misc_feature (354)..(354): n is a, c, g, or t
  misc_feature (359)..(359): n is a, c, g, or t
  misc_feature (382)..(382): n is a, c, g, or t
gagtgtaaattcaattttagcagattaggttttattttaactgcatcgggaaaaccacatagataaaactatcttattgtttatcctttacaattttttaaagcaaaacaaacacaacagcattttatttatttaattgtagtgcatccgtattttcacatattggattttaaaaaatctctgcttacaagaggaaacgaaagcccaaacaaggattgtagtatgtaagcgagtacaaaatgagatagagtagaaggcaaactgattacctaagtcccaagaagtcaggaaacaaagtgtaactcagatccaagcagggttaaccaggaaaggctggcatttcggtgngtaccnggctngctttcttcagcaactgcgctgntacaacattcctgggggca

SEQ ID NO: 463273 - DNA, 462 bp, Homo Sapiens
  misc_feature (16)..(16): n is a, c, g, or t
  misc_feature (67)..(67): n is a, c, g, or t
  misc_feature (225)..(225): n is a, c, g, or t
ttttccctccccaccnacctcccccgcaacacacacaaagatgacccgggaacatgatttttttaantcccccacattttccttggagcacaaacaactttgttgaaggattttggaaaggaaagccacaactgggtccctttaattcatttctgggacagaaagagggtcagtggacttttgtgggcctcccagcttcctcctcagagtctccccctctgcagncccatccctgggagtgtattaactggagggaagatgggtccttgcagtacatttgttttgcccagccatcactcttttttgtgaggagcctaaatacattcttcctggggtccagagtccccattcaaggcagtcaagttaagacactaacttggccctttcctgatggaaatatttcctccatagcagaagttgtgttctgacaagactgagagagttacatgttgggaaaaaaaa

SEQ ID NO: 463274 - DNA, 443 bp, Homo Sapiens
  misc_feature (392)..(392): n is a, c, g, or t
ggtttaaacaaagaagtttattttctcacagttctggaggttagaagtctgagatgaggatatcaccagcatggttaggttctggtgaggactctctggcttacagctggctgctttctcaccatgtcttcacatggcccaaagagacagaacaagctctctggtgtcttttcttgtaaggacaataatcccatcacgaagtccccaacctcttcacctcattcaaacacacttaccttccaaaagggcccatctcccaataccaccacgttgggaggttagggcttcaacatacgagttttaaggtgggcacagtcagtctatttaactttcctgttccatatattagttatgtatttagggcattatgtatttacctaatacataggctnaatctgtatttaggtcaggggtttttccaggaggaaacaaacacattacac

SEQ ID NO: 463275 - DNA, 749 bp, Homo Sapiens
  misc_feature (17)..(17): n is a, c, g, or t
  misc_feature (23)..(23): n is a, c, g, or t
  misc_feature (44)..(44): n is a, c, g, or t
ccttgggaaacgggaangccaanaaaacctctgaaagaaaggangaattactgggcgctgtaacccgggaatcaggacccaaaacggtccgttttcccaacaggtgtatgtgctgaggaacaccgtaatactcctcaacgtgccctggatcacttagctggagcagtcaagttcaagactcaccttgtggcacagacctcacaagacaggcaagtgccctcaaatccttgtgaaacagccactggttgagtggtgacttaggagctctgcagtaactgtcctagtctctctgatccactctccaagctcttctgcacatcacccttcagtcgacacataaccccactgcctggagagccccaggacttcaaggcctatttctaacccggcagacacttcacagaggcctgcttctgccgcactgcctaagaatgattcctaagaatacaaactggaatgtctatctgtgacttgggacccctggtatccttgaccctcagagagatgaagggctctgggctctgcagtccacctccacgaactctggaaaaacaaaatgggagccctggctatactgggacttggaatttgggggcccagacaaccttctagtcaggacggcacagataatgatgtgcaagtgtaaaaaactcaaaactggctttctcttcaatacagacatatctttaaaaaggtcttcgtctcagatccattcagagggctgaatggacatgtgttgtcgaattctg

SEQ ID NO: 463276 - DNA, 509 bp, Homo Sapiens
  misc_feature (36)..(36): n is a, c, g, or t
  misc_feature (93)..(93): n is a, c, g, or t
  misc_feature (486)..(486): n is a, c, g, or t
ccatcaataatggcggtgcagaaaagctttaatcancatttttacagatgggagaaactgcaggcaagacacaagtgaaatagtttgtccaanggtcacacaaaggccagtattcatgcaacttgggatttaaaccccaggtaacatgactccaaagtttaatgctgttcacacacacacacctcagggctcttaaagggtatggagtgtttcttatctattaagcccatagtggatgctcaagaaatggttaataggtatgactgaggaaataatatgatgtcagtgacatcataacatcattatgacatcagcccaaccttctatcataacaaagtaatagtctcttattgctctcttaaaactatcttcatttaaaaagatggccttctttttcctagttctgtattgtgaaggcactttaaatccagaaacgtaaagcattatcatgtgtatgcccatgctttttaaatgacaaagcacagntatttcgatgaatcctctcataa

SEQ ID NO: 463277 - DNA, 359 bp, Homo Sapiens
  misc_feature (16)..(16): n is a, c, g, or t
  misc_feature (63)..(63): n is a, c, g, or t
  misc_feature (97)..(97): n is a, c, g, or t
gggtcccctaatcccntatgaactgatggccctcatgaaaaaaaggaaaatttggaacacaancccatgccatgccagggagaacaccaaatgaagnactagagttacgccagccagaaggccaaggaacaaccagaagataggagggaagccctggaacagatcctttccccagtccctttagaggcagcatgtttctgcccaacacttcattttgaacttctggcctccagaactgtgaaacaataaatttctgttgttccaagccacccagtttttgtggtacttttaaacgactacccttggaaaccagtacaaggtggaacggggagacgatgaagaacatgacattgtgacca

SEQ ID NO: 463278 - DNA, 610 bp, Homo Sapiens
  misc_feature (165)..(165): n is a, c, g, or t
  misc_feature (182)..(182): n is a, c, g, or t
  misc_feature (563)..(563): n is a, c, g, or t
  misc_feature (596)..(596): n is a, c, g, or t
tagtcactcttagctatcaacaaactcttggtttcatttatttttctctattgcttttctgttctctattttgtctctgctctaatctttattattattataatctccattctgctggctttgggttgattgctcttctttttctagttctttcagatgtaaatnttgggttgacttgagancttaatttgtttaatatgtgtatttacagttacaaatttccctcctaccactgctttgactgtacctgtttttttgtatattacatttaagttttcatttaccacaagatattttctaatttcccttgtgagttccccattaatctgctggttgagagcgttgtttaattttcacataattgtgtacttttcagttttttgtctgttactgatttctagtttcatcccactgtgggccagaaaagatattttatttcctcagtcttttgaaatttgttgacttgtttagtcatctaacatactgtctatcctagaggaaagggtcccatttggcacttgaggaaaaacgtgtgtaactggctggttgtggtctgttagggncccagcgggtatggatgctggttccaaggttcnggtcttggcggacc

SEQ ID NO: 463279 - DNA, 484 bp, Homo Sapiens
  misc_feature (426)..(426): n is a, c, g, or t
  misc_feature (436)..(436): n is a, c, g, or t
  misc_feature (465)..(465): n is a, c, g, or t
taaaactcattttctattttcatcatatgcttctcagattctcactagtttgatagcacacgcatatacatcttttactgaaataatactttctaacgtaatgagcacttacattaatagcctaagcaccacccaacacacatccattcctctcagaagctccccagtccctgagcctagaggtcggcctccctcagctccaagtaattcctcctcaaggcaccagtgtggagggcatcgcagaacgcatccgccccagggactgggagctcacactggcagccctccatggggagctcccccttcagatcttgacccttttctggattctctgggcccatccgccccagggattgggaggttcacactggcaggccttccgtggggggaggttccccttcaggttttggacctttttctggattnttttgggccnttgttttttttccaccggcaattcaaacntggaaagagcgttttttgg

SEQ ID NO: 463280 - DNA, 467 bp, Homo Sapiens
  misc_feature (452)..(452): n is a, c, g, or t
ttttatgttccaggatgagattgaagattttttaagaaaacacatacaagatgcccctgaggagtttatttcggaacttgctgagtacttaataaaacctcttaataaaacttatctcgaggtggtacgttcagtattcatgtcttcaacaacttctgcttctgggacgggcagaaaacgcacaatcaaggacttgcaagaagaagtttcaaacctgtacaataacattaggttatttgaaaaagggatgaagttttttgcagatgacacacaggctgctcttaccaaacacttgctgaagtcagtgtgtactgatatcactaacctcattttcaacttcttaggcttcggatttaatgatgggcagtaggacgatcctggcagccatttacaagtggaattaaggaaaggaaatttttaagtaaattatccggaggaaaccaagtagctcnttaccaaactcctta

SEQ ID NO: 463281 - DNA, 486 bp, Homo Sapiens
ctctttcctgattccttttattgaggtaaattttttcagtcttcaaagtggaaatacctgggaaaacaagacacttttatgtgtcagtacaaatgaatactacactgaactgggaatgtattatcacctgttagtacagatcccaatattctttttcactgttgtagtaatgttaatcacatacaccaaaatacttcaggctcttaatattcgaataggcacaagattttcaacagggcagaagaagaaagcaagaaagaaaaagacaatttctctaaccacacaacatgagggctacagacatgtcacaaagcagtggtgggagaaatgtagtctttggtgtaagaacttcagtttctgtaataattgccctccggcgagctgtgaaacgacaccgtgaacgacgagaaagacaaaagagagtcttcaggatgtctttattgattatttctacatttcttctctgctggacaccaatttctgttt

SEQ ID NO: 463282 - DNA, 369 bp, Homo Sapiens
  misc_feature (193)..(208): n is a, c, g, or t
tgcgcccggcggtccacaccagactctgccctgattaccggccgcctctggtcatgtgcataatcgtcacaggctcattttaaataggcttcacgtctccctccctcctcccacagataaaataaccctttccagcccacaatctgaaaagtgcccttcatgatagaactattctaagcagcttttatacttnnnnnnnnnnnnnnnntcaaaatgacaacacactatacaaacataagacgcacaaaataaaaagctacgaggaacatcctgtcattagcatgtgacgctgacccaccgcagcccgcactgttttgcgaacagttcgcaaggactgcggccaaggttcgtcttcagttcctggacaga

SEQ ID NO: 463283 - DNA, 200 bp, Homo Sapiens
cgtcatagatttgatttattaaaccaaaattatacatattaaaattatatcacaaatatatatgcttccagacaaagaaaagtttgttagtcctgattttctaatcgtagccactcaaggaacagtcctttcatagtaccccaagtatttcaattagacttataaaagtataagtcaatctatggtcagtgtctttggtt

SEQ ID NO: 463284 - DNA, 472 bp, Homo Sapiens
  misc_feature (428)..(428): n is a, c, g, or t
  misc_feature (445)..(445): n is a, c, g, or t
aaccaatgcatactatttcattttacaaatataaattaatgtacctatcaatcctctattgatggtcatttgtttaccattttttgctgttgtaaatcttcagtgaggatctttatacagatattcttgtacatttatgagaatgcctgttgaatacattcccacaagagaaattattggatgaaatagtacatgcaatttttagttttcaaaatgccagactttctgaagagttgtgacaactaccaccagcaaggtctgaggcattctttttcacattcttactgacatccagttttgtcaaacttactttttgccaatcagatggggtaacaggtgttacctcattttaatttggcatttctttggataatgaggaggaagggaaaccgtctcttcttgtccatttatatttgtttttgtgaatncggcctagtcgggttcnttgtaccatatgtatattggcatttac

SEQ ID NO: 463285 - DNA, 484 bp, Homo Sapiens
  misc_feature (447)..(447): n is a, c, g, or t
  misc_feature (468)..(468): n is a, c, g, or t
ttatttgtggctgatttactgcctttgtcatcctcttcaatcaagtattaaagaaacagtggaggcatatgaggcagcattaggggtggctatgagatgtgatatagtacagaagatatggatggattatcttgtctttgcaaataatagagctgctggatccagaaacaaagttcaagaattcagattttttactgatttagtgaatagatgtttggttacagtccctgcccgataccccattccttttagcagtgctgattactggtccaactatggaatttcataatagggttattttcttttatttgagctgtgttccaaagacccaggcattcccaaaaccttgggaacggttttgttcagttatggccagctaattctgggacttggcattggaggttacttcaacatggatggggaaggaaaggcaatgtttcaggtttnggaaacttccaggcccaaggntgttttacatattatt

SEQ ID NO: 463286 - DNA, 542 bp, Homo Sapiens
  misc_feature (444)..(444): n is a, c, g, or t
  misc_feature (475)..(485): n is a, c, g, or t
ttttttttaagtttcagggctaaataaagttaagacctgaaagatgtttcagagagagaaatccaagcaattattccaagcatctaaagtaaaagaggttgtttctaggagctgcacgttagggctaacagaatgaaggaattgtagtgaaagaaaatctccatacttgacattactgggcacaactaggcctactgtcctacaattgggatacaggtccaaaaattaaaagtcactctttctttaaggaaaatcaaacgggcactgaggcttgtaatgtatattttattttgcacaagcttgcatatatactggcacatacattcagtttaagggggagatgggaagggcacacaagggcaattggactactgtatcctttaagtgtacaaagcaaaaggtaaaagtttggagagtatacaaaagcttaaaacacacaaagtnaaacccctttcccacccttcccacaacaacnnnnnnnnnnnctgttttaaaatttgtgctgccaactaattttttacttttctttaaatcatgctctc

SEQ ID NO: 463287 - DNA, 602 bp, Homo Sapiens
  misc_feature (101)..(101): n is a, c, g, or t
  misc_feature (160)..(160): n is a, c, g, or t
  misc_feature (229)..(229): n is a, c, g, or t
  misc_feature (281)..(314): n is a, c, g, or t
aaacggaacctctactcaaaaaccagtacattttaagggagcttttgaaaacaatgcctcttggaaatttgcaaacacagagttggaccagaaggaacatntgactattcacaccaatgaatacgctataatatacatggcaaagagatttttgcactgncttcacatatacactgcttctttcaggggagtctgtaaaccactctttctttcataaatttatgattgnccccggaggacatcctattttttaaagtcccaaatcattagctttatgacannnnnnnnnnnnnnnnnnnnnnnnnnnnnnnnnntaatgcacatgtgccgcatgggaagggggggtgttacttactaaatgtacttcatgtacatagaaaaagaaatttcataaatttacagaaactgcattacccttgcccttgacatctgataaaagagattgttaacttttaaaaggagagagcaggattttcaagaatgctttcaactgtctatacagtcactgtagtgttcctagtaaattcaacagatgtcgtgagaatgtagttatttattaaaatctcatgtcttacataatgacagccatgaggttaaatatt

SEQ ID NO: 463288 - DNA, 448 bp, Homo Sapiens
tgtccgcctagggggaaagaaccctagggcatgtgtggtatccttgggccatatccataacagagtctcaaataggtctcccactgcagggcacagctggggagagttagcaagatctgaaaacatgaaaccaataaagagaaagaacaacccacctggttcttatcaaagttatttcttctttaagtgagtgctaagtccagtttctgcatatataagttcttcggaaagaactcagaactaagtgccagaagccaatgctggttatgttactaactgtatggctggtccacctcatattgccaataagacatcaaatactcttaaaaccttgcgtatgtttttggcttcattcagatgtgcaacgaaaatccctgtagccacataagctgggctgatacatagtcaacaccagtacaagtggaccagaagctagacactaaactat

SEQ ID NO: 463289 - DNA, 436 bp, Homo Sapiens
  misc_feature (363)..(363): n is a, c, g, or t
aaatttcacagaggactatgcatggtagtgagtcagttgtgtatatgtgtgtgtgaaatgtgtttctttaccgatataaaagtttgaaagtcactgctttagagagtttctgttggaacaagcttccaagcaacccatatgtctgtactagaggaaaatctaggaatatcactgtaaggaaacatagggtcgtgtatgggaagatatggactcaaagagtttgtagagcaaggaaatcacagctgcttagcatggggagagtttgccagggataaatgatgatgatatgttgacagtgattatgttaatcatgctaattatggataaaaatggaaacttttttcaactcatgcattttcaccnttttgacatttctggaagtagggagttttttaaggtttagtggccaagtccatagtttttacttcatattttc

SEQ ID NO: 463290 - DNA, 404 bp, Homo Sapiens
  misc_feature (324)..(324): n is a, c, g, or t
ggatgtaaacatttgttttaatttatattaataaaaggaaatgctctacttaaacaataattcatctgggtcttcttgtataatacaaaattcttccatgggagtctgatgatttgggggccagcaactcttctcacatgtgtaaactagaattgttccaaattccacagaaagacctaaattagcactcttgagcatgctggaccagtgctggcataagctgaaactcaaatatcctttggcctccacactggctgcaggctgggagctcggtgacttctgatgtagggcaggtcaaaaagagtgggctctccactccagggnatacctcaaaatctggctcctgacaagcaggcaattcgctttcatggaatttgttaaaacgttctggattctccactttt

SEQ ID NO: 463291 - DNA, 495 bp, Homo Sapiens
  misc_feature (477)..(477): n is a, c, g, or t
gatgttgaataccactgaatattttatttttatattttattacacagaaatacagcaattattacaaaacgagtattaggaatggcaaaggctttaggacagactattagcggaaaacatttggaacttaaggagtgttttacatttggaacttactttaaggagtgtcgttcagacactagctatatcttaacctcagtttttagaagtaagcaagctctcattttttgctattcatatttgaagtgattaaactcataaatttgaaatttactttttagagaccaaagattaaaattaggtgggatgtcagcttttaaaatatactaagatttcctacaactaccaatagcttatttccctgggaaacagattacattgtagtacttaacccagaactcatgcagttcatccaaaatggatgggaaacttttttccctcggatttacctaactttccttggactttggattccancattcaggattcttcttt

SEQ ID NO: 463292 - DNA, 392 bp, Homo Sapiens
  misc_feature (140)..(140): n is a, c, g, or t
  misc_feature (316)..(316): n is a, c, g, or t
aaggtatatttattcatttatttaattatgtattttagagttgggggtcttgctatgttgctcaggctggtctgcaaactcctgggttcaagccatcctcccacctcagcctcccaaagtgctaggattacaggcgtgantattggcgcccggccttttaaacgtttattaatagttttgatatccgcgaagtgattgatatttgttcctttttaacttggaggctggggattaacacacgtgttcttcattatttgcccacaaagcgttgttgatacgcaggaggggagtggcacttccgcaatttattcttccnacctgtgccaatgggatccagcacaggtgttggacagtaacccgcggttgatctggatctagttccagtttagtcc

SEQ ID NO: 463293 - DNA, 535 bp, Homo Sapiens
tggtgattgagttttatgcctctacaaaataggttgtgaattaacttcaacatctgttgaaatgcatcaacttgggaaatgtccaccgtccgttaatacagggctcaaataagaataataccgttgggataccacaacatttacatttgataccccctgtgatcttagaggaagctactatacctaaaacaattatgccttcctttaaccatgaacatagtatcatttttgcctgcattctctataaatgtacccattgtgcaaagatatcccacagtggggatcgattccttgacttaatgagtcatgtattaaaattaaatattttccattttcaaatgttcttgacaaatcggggaacccctgggacccactaggtttaaaataaggttaaattatgggcttaaacattaatgttttggcaatatggtaaaatgtttttggaagggttattgggggtattccccttttcatccctttgcgagttttagtaggatggggtcttttcagggatttaattgggtcccactgattt

SEQ ID NO: 463294 - DNA, 483 bp, Homo Sapiens
  misc_feature (404)..(404): n is a, c, g, or t
  misc_feature (419)..(419): n is a, c, g, or t
  misc_feature (424)..(424): n is a, c, g, or t
  misc_feature (461)..(461): n is a, c, g, or t
  misc_feature (471)..(471): n is a, c, g, or t
aaaagttttcatggtttaaacatttattgtaagtcctagatgaaacatactgaaaagattatttttgctttaatcctaatatgctaagaaaagttcattggcacaaatatccagaggtattttacagtttcatttacctttggtggcaaagagtattttgctaaccgtatggatacagtcacatagtttccaatgcacagctttatgctaaagagaattcaaatgtgtctcttttttttgctaaaaaagggatgtaaaaagtccaatatgaaacagaacgagtgcaacacgaaatacaaaatatgcctatcatgtagggcttttgaacagttaataggctctacgtgttatctattaaacattttttactaggtaacatcactattgtattaaatttttaaaancaaaattggacattnaaaantaggctttggatccttacaaaatgggccactttaggncttccccaanccaaatcggggt

SEQ ID NO: 463295 - DNA, 225 bp, Homo Sapiens
  misc_feature (143)..(143): n is a, c, g, or t
  misc_feature (206)..(206): n is a, c, g, or t
acagcattcaccagggaagtgactaggaacacagagcttcaagctttgtgaggcacaaggtactggggccatgataccaaatggcctcctgggaagccccagcagggagtcccagggtgggtgtttcagcagcaaaatgagtncgtgggccctggggaaggggacctggaaggcttacacaggccctggatggatccagttttctngaggggggacccctctggg

SEQ ID NO: 463296 - DNA, 534 bp, Homo Sapiens
  misc_feature (68)..(68): n is a, c, g, or t
aaaacctagggcaaaaaactttggacctttgaaatttttcccaatcccttccaatttcaacaaaagangaaacctccccccaaaatgtcccttactcccccaacttcctccttttgaaaagtttaggaatttccctgggggaaactccctcccacagcccacatccttttccctgaaaaccaggtcccatggtgaacggcaggcactgagtatgtgttgcctcctgtcactccttggaggttcactatgtcagcctctgcatagtggggcaccccctcagggccactgggctggactggcttcacaacaccgctgcagcctgactcctcctcccctggagcaaattctgggagttttcgtatcagcctggatggctcctggtagtcagggcgaaggggaaagatgcgatcgtaagtcgagttggacccttgttcactaggtgatgaggagcggttattgttgaacatgctagaatcacttggcagggaaaggctgactgtcatttcatcatccagcatcctccgagaagccttc

SEQ ID NO: 463297 - DNA, 518 bp, Homo Sapiens
  misc_feature (11)..(11): n is a, c, g, or t
  misc_feature (31)..(31): n is a, c, g, or t
  misc_feature (46)..(46): n is a, c, g, or t
  misc_feature (75)..(75): n is a, c, g, or t
  misc_feature (270)..(270): n is a, c, g, or t
caaacctaaancctcgtgttttaaatgtccnaaatttttggggttnaataacatttgtggcccttcttgcaactnaagaaaacaaaatgggagcccctggcaacaaaaccctgggctgctagggaaacaccagaggatgcctcctgccccaacaccaccccacgcttgggcagtcagggagacagaaggcagcacaaactcccagcatggggccaccgtaacatggagcctttccccgcttttgggcctcctgtcctctgggagtggccnctgccctgggccgcaactcttctagctcccagagtctgtgtcctcttgcctccctgggcaccattctcctggcaaggtctctcccaacaggctcaaaagccatcctgcccgagactggggcagctgggagaccaccgggtggctgcagggtggtctggactgtaaagctgatggtccaaggaggagggagaagcccatcaggacgtagatgtgaccagaggagaaatgctggtggaggacaccggccc

SEQ ID NO: 463298 - DNA, 344 bp, Homo Sapiens
  misc_feature (41)..(41): n is a, c, g, or t
  misc_feature (43)..(43): n is a, c, g, or t
atctttctcatttaagaacttatgaatatgctgaagatttngntttgtgatacctttgtatgtatgagacacattccaaagagctctaactatgataggtcctgattactaaagaagcttctttactggcctcaatttctagctttcatgttggaaaattttctgcagtccttctgtgaaaattagagcaaagtgctcctgttttttagagaaactaaatcttgctgttgaacaattattgtgttcttttcatggaacataagtaggatgttacatttccagggtgggaagggtaatcctaaatcatttcccaatctattctaattaccttaaatctaaagggg

SEQ ID NO: 463299 - DNA, 592 bp, Homo Sapiens
  misc_feature (26)..(26): n is a, c, g, or t
  misc_feature (34)..(34): n is a, c, g, or t
  misc_feature (44)..(44): n is a, c, g, or t
  misc_feature (231)..(231): n is a, c, g, or t
gccatgttgccttttaaaaccccaanggacatanggcctaccanttccacgtaaataaaagtttcctttttgtttgtgaaggttgtaatatgaagagccttccattaatcaagttgcccactataattaaaaattatttctgattatagtttgctgacatctaataatatagttgtttcacaacggcagaatatatacctacaggaaaagggtggccccagatgcctgcangggacccaatgggtaaccatctcaagtatgtttttccttccaactagcctattcccctgctaggctctctcttctctaaagagattgcaacatggtatcactctgatatgaaaatccctaattcttacgaagcaaagtattgacaaagtctagagcgcagtttagagtttgattgcttctacagccctttctagattattccatgaagactctcaggataaggtcttggacacatagttaagactgaaccctcatttccacccttccatacaattcttctccctaagctgacctcagtatctctgcactctctcaggctgacctgacaaatcagcacctgagtttttcagaccaaaagctt

SEQ ID NO: 463300 - DNA, 471 bp, Homo Sapiens
tcacaatacacttcttgaaatccctttctctctcattcgtaaatccttggattagagtttgagactcccctggtcattagagaaagacaaaaagagctttttcttaccctattctttgcctttattaaccccaaataacaaaataatctgttatgcaaaaagattgcaggtataaaaacattaccttcctttccacctacctaaaacttccctcagcctttgtcagttctaatttaaaagctgtcctgggagctgttggagaaatggggaagatcatctagatattccagtttctccttccacttcaccctatagtaccggataggcatccaataggcccaggggcctggaccattacagcccatggatatttaccctttctgtaggaaaacagttcattaagggccattgatggaatgtggggggggagagggaacacaatttaacagctctgggaaactctgggtggac

SEQ ID NO: 463301 - DNA, 364 bp, Homo Sapiens
ttttttttgacttggctatcaatatatttattattagcatgacatattatgaaaaattattttccaaagacttagccagtaacactacaaaaatagaaagcccgttaattcctgtgaatttatctgtgtgtgtccatgtccagtaattatttcactgtctgtctgaagtactaacaatactaaatccaatgctcggcgccacggcttcaatctttgggtgtaacaacgtcataaactctcgggaatctgctccagtttatttgaaatgtctgaattaaaaattctactatttaggtttactatattcattcagggtgttaggatgaggggagagccagagtctgtgggcctttttgcaggatga

SEQ ID NO: 463302 - DNA, 525 bp, Homo Sapiens
caacgtgcagcatctctgggcaaagaacttccagctcaatagtgcgcacatcacggtgcgtgaggttcctcagggctccctgcaaaagcacatcacccaaccacactgaactgagctgaatggtttcgaatccactgtttaaaggggacccaggtcacaggtgcagtccccaaggattctcattgaggtctatctggacaatggcattcaagtgttcccaggacaccagccacgggaagatagaggaagtagttcttcctcaggttgagccgggccagggatgtgccagcaaaggcgtctgttggcagagtcctcagtaagttattattgaggaatagcagcttcaagttgggcatgaggctgaaggctgcaggctggatttcccggatgacattgaactcaaagtacaagtagtgcaaactctgtaggcctcggaacatgcctggtgtcagcttctctatatcgttgccattaaggaagaggctctttaagttgggcaagttgataaaggccccatcttggacc

SEQ ID NO: 463303 - DNA, 544 bp, Homo Sapiens
gcaagactgatgtcattgagggatatccaagaatccaaaatctcttgaccaataaatgtgagcttgttggaatccaggttgaggcgctgcagattcgggacacactggaaaacactgggtccactgaaagcttcgatctcattgcctgataaatcaagcctttgtaaggagctccaggtccaggacatggtctgtccctatgaacactgaattttattcccactgcaagtaaaggttctgaaggctgaccaaccttggaaaaagggcccaggttgagcttggaaaattgattgtgctcccaggtgaagttctttgagtctgatcatgccagcaaagacattcctggctaaacttcggatccggttatatcccaggtccaaaagttccaggttgcggcagtcttggaatattcgcacagggatggttctcagggagttagaccgtaaatgtaaactcagcagcttccgcaagccccgaaactgttcagatcccagagaatgcagctgattataggacagatccaagttccgtaaatttgccgcgt

SEQ ID NO: 463304 - DNA, 547 bp, Homo Sapiens
agtaaccagatgaccatcagtttcaaacacagctgagtatctgattttcttgttattgatgtcttccattgtgaaattggaaacttctgagagctcttccacctcagatcctgagattcttaagagagtaccatatgagggcagataatttaactgaatccagatctctgggtcgggggaagaatcatccacgtaagcaaaggtgtgacctagtgattatggctgtgcttttactggcaacagtaatgctcagagaggagccagcagccagtcgaggccctcggtcttctgacagggacacctctactctcacctccagcattgtcactgtgaggccatctgtgactgagatctccatgctgtcttcccgggtagaggaaccatcatgtatatactgtagagcatttttctcaacatcctcataggtgaaagtgtcacctgttgccatcggccttcggaactcagctgtatgcttaagaagcacaccatgctgtggaggtctccgaagctcaaagaagagttctttgggcgctgtctcagcatctcc

SEQ ID NO: 463305 - DNA, 521 bp, Homo Sapiens
  misc_feature (13)..(13): n is a, c, g, or t
  misc_feature (24)..(24): n is a, c, g, or t
  misc_feature (41)..(41): n is a, c, g, or t
  misc_feature (51)..(51): n is a, c, g, or t
aagttaaacctcnccgtggttggncaataacgaaggccctnaaccctgganccccctttaaatgtgtcctcaatttgtagatatcccaagatgaaaaactcaaaaaaatctgctagtgtagtcccttcccacttgtctgggtcttcccatgagcttcctgtaggtgctgtcaatggcagctctgagctctttgagagtcacgtgacaggttcccaggtgtgtcccttactgggtcccgcactgggagtttcacacagagttcctcgatgagctgtaaccttttctcacagagatgatgaggacctttgtcactgaagaaaaccctgtgctctttaattatcttttcactgccttcctggggcatcagcttggtctctcgatccagctcagttctgcattcttctgcagaggctaagaacctattcttctccacatcaatcttcagatgaagcaaatgataaggggcttctccttgaagatccttccattgtttgtggagctttcgaacagcttcctgcagc

SEQ ID NO: 463306 - DNA, 522 bp, Homo Sapiens
  misc_feature (114)..(114): n is a, c, g, or t
ctgagggctctccacgccctggcccagggctccctagatagtgaggagccctcttgggaggtggcacagagctgatgttgtgggaattccaggtgggccttggttccgaaatgngacaggatcaagacagagacggtcctatccccatgaaagcagacaggccccagcaagcacccctccccgcctcggtggggctcccaggtctgagaaggaggcatccagcactggcagctgctccagcacaggcgttcgcacctccagcaccgtccggccttgctgtgtctggcagccatctctgaattctttgacataggggctagtctccgggctcagctcatcctcattggccccacggagtctcaggggaccgtcacgggctgctccagagcaggggtaggagacgtcctggtgggctgagacgctgagcagccgcaggaaggtgagctggacgacacccactggggagccctctgagtccacgtaagagaactgcgtgacgtcatccctaggcgtcacacaggc

SEQ ID NO: 463307 - DNA, 261 bp, Homo Sapiens
ctttccactgctcagctataaggtctgatcaaaatacatgatcttctttgagacctaattccctcatattatgggagctgaaaagatttcagctctaaacaggtatccataaacatttaggcaggaatacgtgagactcgcaagtcccaaatagacttcctacgattctaagcctagtgaagttggtaaaaccagtcctgggcagaggttggaacttcttgaagggctgctccactctctccaatgctgggtgtctataga

SEQ ID NO: 463308 - DNA, 458 bp, Homo Sapiens
  misc_feature (22)..(22): n is a, c, g, or t
  misc_feature (29)..(29): n is a, c, g, or t
  misc_feature (241)..(241): n is a, c, g, or t
aattgaatgtaacatccctggnaagaccntgcaacgtttctgaattccaaccccagaccccaattggcaaacccttgccctctgaaagcggtccacaatttcccgtggttacagcaggcccctttccccgtgaagctgagaagcaccctggcagactctgcgggatatgggtgggcaccgcagcgtgtgggagaggcgctgcatggggcgggctggagtgcaagccagccagaagaactgntgccaaggccatggtggaaggacccgggggcagggcctgtgacgatggcatccttggagacccctgctttggcagaggagtcagcgctgaaggagagcacatggacaggaatagggacaggggttataattcccaaggagttcgagctcatggccccagacagctttgggctgctggatttgtagggtgaagccattaaagaggagccggccagcag

SEQ ID NO: 463309 - DNA, 1083 bp, Homo Sapiens
  misc_feature (501)..(501): n is a, c, g, or t
agtagcacattaaaacacatttattttccttttcagctatctcaaaagtactgtgacttgaattagtcaaatattaaaaacgagtttttttataatgaatgctaatgaaatactattactgacattatatataatgcatggctgaaaatagataatatatatgaaaatacagaacataaatatattgaataaataagaccttgacattttacgaccaagaatataatgccaatattattaaaagggataatataatcaatataaccacaagcagagaaatcacatttgatattatttcaatgcttaaatatacattttttaaagttgcttggtacctagtcattccttgacaattggcaaaaagccatgaataaggaagaggaatccacaaagaactggggatctccatcttcagaatgagtctcagagaggagtgcagatttcacagcaatagctacttgtttcacaattcacttgtgcgaattagttaaaatcttttanacacttttgccttaatttcttcaaagagaaaatgggaaatgaatttaataatgtaatgcatttatctgcagcttgaaatttaaatatgttaaaatatttagatctgaaatgcaagtacaagaaatactacccactttctatcttgtatgcattttcgttagttattaggctattgtgcttcaagccattgacagtttttaaaatataatttatcaccataatacactttagaaaacttgtccttcagcacctacctaaaaaccccactacactcctgagattccagattaagatattcagtcactaatggcagcagggagaccaaattagttgataaaatattcacgtcccctttccaaaaatgcaactcgaggaatttaacaatactttgcaaaagccctttacccagtaattcaattttttcaagtaaattctaaggaaatatgaaaaagcaaacaagatataaaaaagcaaaatctataatgatgtttattacagcattattactgttagtagaataatttaatgtcatgaattaagacgagataaaaacacaatgtaatgtcacctcaatagatggca

SEQ ID NO: 463310 - DNA, 456 bp, Homo Sapiens
  misc_feature (230)..(230): n is a, c, g, or t
  misc_feature (246)..(246): n is a, c, g, or t
  misc_feature (298)..(298): n is a, c, g, or t
  misc_feature (379)..(379): n is a, c, g, or t
  misc_feature (394)..(394): n is a, c, g, or t
  misc_feature (428)..(428): n is a, c, g, or t
  misc_feature (442)..(442): n is a, c, g, or t
gaactctaggagcttttatttcagcaggaagattatattgtgtgcacacaacatcaaacatcataaggcaggcaacaatttaatggtgtcttttggtagaaatcaaccattgttgaaggttagagaagaggaagagcaagggcataaatcaggcaaaattgcatgaaaaaaatgtcttgaactgaacctggaatgtattaataaaacccagaggaaaagcgaacaatganttaagtcaaataacantaacatcatcaaaagatgagtaaagattaacaagtcagtttttaggacaaantccagggtttcgtcagtaaaaacagatatatggggtcacagggtagctccagcatttccaaacttggggtaacctaggagnagttctttatccaantacagggaaagtttaaaaaccagagcttcaaggnccaggggaattttnttttaaggggtttt

SEQ ID NO: 463311 - DNA, 383 bp, Homo Sapiens
  misc_feature (218)..(218): n is a, c, g, or t
  misc_feature (287)..(287): n is a, c, g, or t
  misc_feature (336)..(336): n is a, c, g, or t
ttttttttagaatttcagttttattaaaataagcacaatgtataaaagcaccgtggtgttgtataaacgtctgcctgacaaatgcaaatctattttctttatgtaactcaatagttccacttatctgaatggctgtaccttcatgcacacgggcagcaggcactgcattgctcaaacagggaagtgaggcttcaccctagtgtggcttcaccttaggncacagagcactatctaactgcccagatctgtgccacccacacaagacctgggggacacagcaggcaganaccgatgactgtctctaagttcatcacaggtaacagcttaaaatcaggntaataggggaactgctggatttaaaacccaagtgcatgggacattcc

SEQ ID NO: 463312 - DNA, 106 bp, Homo Sapiens
tttttaaaaaaggaaagggtgtatgttatccctttacaaggtttcattgaaaacacaattctgtttacaaaatgttggcattaacctacatctttattcagttatt

SEQ ID NO: 463313 - DNA, 304 bp, Homo Sapiens
  misc_feature (272)..(272): n is a, c, g, or t
  misc_feature (277)..(277): n is a, c, g, or t
  misc_feature (284)..(284): n is a, c, g, or t
aaatgagttaggtattatcattacatcaatttacagataagaaaatcaaggcacagaagttaaacaatcttgtgcaaggtcacaaagctaatgagtggcagaggcaggctttgaactcaggcagcctatctcaaggccaaaagcccactctcctgaccattacactctgcttgccaccaagtcatgggcacaccaccatttattcaccatgtatttcccttactttcaggttcaggttttccctttcatggcacatggaatttaatgtggantttcnttgttcntttcaggtatggtactctgt

SEQ ID NO: 463314 - DNA, 412 bp, Homo Sapiens
  misc_feature (44)..(44): n is a, c, g, or t
  misc_feature (47)..(47): n is a, c, g, or t
  misc_feature (187)..(187): n is a, c, g, or t
  misc_feature (252)..(252): n is a, c, g, or t
  misc_feature (319)..(319): n is a, c, g, or t
atggatgaaccacagtttattaatttattcattatgtttatccnggnttcaatgttttctctcctactacacatacaacatcacaataaatcttacatacattccaatgcacagatgtttttattatagtaaaattcccaaactgagaccactggccatgaaaaatgaacattttaaatgcctgagnatctttccaaaaaggattgggtaaggaaagcatccatttccccacaccatcatcaggaactgggntgttatcagtcattttagtttttgctagggctgattaatgggaaatgcctccttgggttactaatgnggtttgatccaccttttgttagccttgctgggccatttacatttcttcttctggtaaactgtccaggtccatcccttatctccattttctatt

SEQ ID NO: 463315 - DNA, 504 bp, Homo Sapiens
  misc_feature (418)..(418): n is a, c, g, or t
  misc_feature (446)..(446): n is a, c, g, or t
  misc_feature (451)..(451): n is a, c, g, or t
  misc_feature (456)..(456): n is a, c, g, or t
  misc_feature (466)..(466): n is a, c, g, or t
  misc_feature (482)..(482): n is a, c, g, or t
ggttctatggaatttataacaaagagtgttatatattttatcgttattataaattgcatgttccacatctttcataacagcaaaatgtataataaacttacgtacttatggataatcacgctttttcccctcagagagcccacagttaaacacgttccagcacaccattaatccaccgaggctctgtgtctgtggaacacaactcacaccccacatcaaggcagcaaacactttaatcggttctaattccaaagtaactgctgaaagaaggcattcggagagttcatgaagacccgggttcccatcttgatcctggctactcacgaggctaactgccactaggacaagtcactccgcctttctctatacctcacttcccacatgtggcaaaaatgagggggctttggaacattacggnacattcccgttcctttccggttttcaangttcnggggnttttggcacntgtgaggaagggggangtttccgaggttgccggggttt

SEQ ID NO: 463316 - DNA, 350 bp, Homo Sapiens
  misc_feature (278)..(278): n is a, c, g, or t
  misc_feature (333)..(333): n is a, c, g, or t
cataattttaatgatacttcagaaggacacattaaaaacatctcaggaattgctaagggaagcaagacattagtagacgtaaatttttccacagtcaaatccatcacagtccgctaatagttgatcagtgaggagggacccatttcagtgtcatgtcttttaacatatgaacagttctacagtcccttaaagagtaaaacaccatggcaagggggatgagggcaggtggaaaaatttacaatattaaaacttcaacagggaaggtaatctccgggggntgtttctttcttcccaatatggtttcttcaaggttttggataagggactgttccntatttttaggttttttt

SEQ ID NO: 463317 - DNA, 542 bp, Homo Sapiens
  misc_feature (449)..(449): n is a, c, g, or t
  misc_feature (471)..(471): n is a, c, g, or t
  misc_feature (487)..(487): n is a, c, g, or t
  misc_feature (494)..(494): n is a, c, g, or t
cttttacaacagtgagtggaaaggactgaccttctaaattaacagcagcctaaatggaaagcctactttcttatgttgcttaattcacatctggggacctgatttaaacatgtcttgcgctgttgttgccatggttgctttgcccatcccatccctcatcctgtcacttttctctctgacttctttctctgcccacatgtctccctccctgctgctcccgtctcctgtcttcttctggccatttgagatgttccagcagaagatgacccttccccttgtgcgctgggaaacgggccacgggcgggcagtgccaggaacggcacgggtgtgcaaaggcccggctggggatgggtcccaaggcacgggcattcaccaactttggacaactttgcctttcggccatgctcacgggtgtttccagtgcattcaccatgggaaggggtgggaanggacgttgttgttattggggtnacgtaggcatggagtnggggcanttcagaagggttgggggggaacagcgggcctggaaaccttttccttga

SEQ ID NO: 463318 - DNA, 443 bp, Homo Sapiens
  misc_feature (429)..(429): n is a, c, g, or t
caactagactctgtgtgtgtattcaggaaaaatgaaaataaatttttagaaattgggagtggaatgggcagattagggggaacaaagtcattttggtcatggaacatccatttgcttaaccaaggagacttgcttctatctgaggaatttcccacttagtagaaagaaacactcttccctgggaatgtttgtttctgtctctctcaatgctactctctttcatattctcatttgctcaccctttcacttagagccaccgttttctcatcccattctatgaacttatttccaaattctgctaactattcctgagttttgaagtatttgttttgtaccctctctgcttccggttttttgtttggggttggcttttttggagataggggtcttgtggatgttggcccacaatgggtctcgaggccccggggntaaagtgatccctc

SEQ ID NO: 463319 - DNA, 488 bp, Homo Sapiens
  misc_feature (31)..(31): n is a, c, g, or t
  misc_feature (106)..(106): n is a, c, g, or t
aaatcccggtactaccctttacaaaaacccngaacatggaacaaagggtaacccactgtgaagttaatgaggcccaaatcactcctactctgttgggagaagcccnggcaaaatcctacccaacaacataacaaacttaccctttaaacccagtcacagagcaaagtaaaaaaaggagcttccatatattttattacctacaatttaaaggaaacttaaatgttttgattaacatttaactttttttgctcttatctttttaagaaactgagtagagccaaagctgttaagtacacacctattttcctttgcagaaacatccagattatctatcccttttcaattacaagagcacattacactaaaattttactgtactaccaagcccagcttctgccaaaatgaggatatttttgctcaactcaaggttatttcaactcaggacttgtttcaattatcaatgattgtctacgtgacctgggaaatta

SEQ ID NO: 463320 - DNA, 420 bp, Homo Sapiens
  misc_feature (126)..(126): n is a, c, g, or t
  misc_feature (290)..(290): n is a, c, g, or t
aaaaacccagggctatgctgtggtcttcaaaatccctctttatgttccaaaatgaaaacttatcatttaaatttgacatataggaaaggactagagccttttcaggattttggagtttgattaganttctggggaacacagaaccttttgctgtactgtgatttacctattcaggtttatttaataaatacagtagaggttaacagatgatagtgcaagttcaatagaagtagggtgatttaaaaacattctgggattacaatgaaaactcacttatgtggggagtttgnggctcacatttacagcctccaccagcagaaatcatgcaaataagaaccactgcagagttctttgtccacagacaccatctcccttcaggatggtcctgcttttcccccaagcacctgtgcaggcatctct

SEQ ID NO: 463321 - DNA, 373 bp, Homo Sapiens
  misc_feature (236)..(236): n is a, c, g, or t
  misc_feature (346)..(346): n is a, c, g, or t
ttttttttcattaattctacaaatatttattgaacacctactatatgctagtcactgccctaggcactaaggatattacagtagaaaagatctgtagcttacagagagcttacattctaatggcatgtaaactttatgtgttagttctgtggatacaaaaatgaaaattcagccccaatggctttacaagtatgaatatcactttcctcatttgtaaaatgagtttaaaataattntcacaggttgggcaccgtggctggcgcctgtgactcccagcactttgtgaagatgaggttggaggttctcttgagtcccagggagtttgagactagcctggggcaacatnaaggagaccctgtcgttacaaaaaatt

SEQ ID NO: 463322 - DNA, 460 bp, Homo Sapiens
  misc_feature (383)..(383): n is a, c, g, or t
  misc_feature (391)..(391): n is a, c, g, or t
  misc_feature (417)..(417): n is a, c, g, or t
  misc_feature (434)..(434): n is a, c, g, or t
  misc_feature (441)..(441): n is a, c, g, or t
aatgctttcatactgtttatttttttccaataaaaaaataaatctcatacattagaagtggtacacaaaaaacggggataaaatttatcagattcttgatagcaccatttacacattcttaaagtaaacattaatatgcactttcttagaaagcgatataaatatataatacaggacttgactaacctctgttaaccatctgaatgcgatgggaataatctatctctactgtgcaggtagggcttgtgcatgggtgggtgtgggcaatatcattttaaaagtttgttacagatgtgatggggaagctgggaagggagttcggaattaaggcaggaaaaaagaggcttaggatcctatttgttaaggccaatggaggtccgaantggggccntttacagggtttagggaatttatccnttggttttcccaatccnttccatngggggaaatggacttcccc

SEQ ID NO: 463323 - DNA, 403 bp, Homo Sapiens
  misc_feature (287)..(287): n is a, c, g, or t
  misc_feature (381)..(381): n is a, c, g, or t
ggcagtcttctcagagccagggtgtcaggaggagttcaatgagttcaatgtcagaagcaggatggtgcaacgaagaagggttcagtgtgaggggatccaggctggaaagtggaaactaaggcattcgtcctgcagagctattcttcatccacgtctgttacaaactgtgaatggtgttcgggtgacttgctgtgcgttttgcttaggtggagttttaccgcatgtttgctcacaaatgtccgacagcacaacttacacttgaatttagagtctgtgtcctcttcggncagctattgtttctgggagacctctgaggccgacgatacccggggagattctcttgctccaccttgctttgctggtccactgacaagcggggtnatgtcctttcatttgggaaacc

SEQ ID NO: 463324 - DNA, 480 bp, Homo Sapiens
  misc_feature (382)..(382): n is a, c, g, or t
  misc_feature (430)..(430): n is a, c, g, or t
cataaaggaaagagttttaattgacacacagtccagcatggctgaggatgcctcaggaaacttacaatcatggcataaggggaagcaaacacgtcctcttatacatggcggcaacaaagagaagtgcccagccacggggggaagagccccttataaagccatcagatctcgtgagacttactcactatcacgtgcaacatgagggttaactgcccctgttgcattcaattacctcccactgggtccctctgcacaacatgtgggggattacatgagctatatttcaaggatgaggatttgggtgggaggaacagccaaatcatgttcaacatgttacttatctttctggggtgatacctcctggcaattatgtggattaatnggcagggagggttgaaagtccacatacttatttttaaatttctctttncttggccccacaggaggggtttgcttaggttctttgcctaactgtttttt

SEQ ID NO: 463325 - DNA, 453 bp, Homo Sapiens
  misc_feature (184)..(184): n is a, c, g, or t
ccagtgtaaaaatacgtgggcttattgcatctaccccacggatggtttatctttttctttccatcagacttgccgcaagtgtatgtggctgttattttgttaatttccaaggctcttacattcactgatccttctaggcatacagggagaatttctaccaacatataaacaacccaaatggtgnaacctgggagaaccctcttccctctctaaacacagacagacgtgtgggctgctccctgggcacttgagaggagaaatctttccttcaacctaaataccactcaggatcagtgggctcctctgattttcctgctcacggagcagcacatgtgccaagctcacgggctcttgtgctgggttgccgggaatttaattacatgtgaaagtatcaggtagggcacatgggacacgttaccatgtgtggcacacacatgttacacacacactttt

SEQ ID NO: 463326 - DNA, 444 bp, Homo Sapiens
gaattccatctcagtttttaattttatatgaagaaacacatctaaaaactatccagtgagagaaatataatttgctctacagaaaaattagtactagaagatattctatagtacaaatcctcttatgaccatgttaagcaactgtccaaaatatttttatactagaattatatcacattaaattgaacagagagaagtaaaacattattagaatcactttatcccttcaagaactggcaagcatgtggggttagggagatgggttgagaaggaggatgataactatgtatgcattacaagatgaatatgcatattatgaagaaaactccccaggtgactggatatacctacttatcctaacatttgctggggaattttgtttgaactaagtggatgtgctgattatagctaagaaataattttgtcacacagatccaatcagct

SEQ ID NO: 463327 - DNA, 333 bp, Homo Sapiens
  misc_feature (290)..(290): n is a, c, g, or t
  misc_feature (306)..(306): n is a, c, g, or t
acgcaccactacacctggctaatgacaaagtgttaacgattagaaaaaatacaaaaattgagttcaaggtggtttgctgaggggtactgcttactttggtctaatgagggcaatggtaggaagaagagggacagcttcacgacaaaagctcaattttcggccaaatcatgtaggattccaatatacagaagagagaaagtaaggagcatgcttggatctgtggcatgagcatgaggttacagccaaggcaacttgattttgagggaaaaacttttccccaccttaattgnttaggtttgggcttgntacttcagggtttccaggggggcacag

SEQ ID NO: 463328 - DNA, 312 bp, Homo Sapiens
ttttttttagagcagcaacataaaactttattagaaagaaatactatatctggaccaaaaaactgcaacatggtttggaaatctaatgactaagaaggtaaaactggcaactatgtgcaactactgctcgtagatttgggtttgtttcccccccaacatctttaaaataagcagcccccacaaagggataatccattgaataaggagacaatgtaggccaaagaagggatttgtgggaaaaccatatgaatttaaatcaacataaaaaggaacacacaaagggccatgggaaacttgaggaagggtgaaagg

SEQ ID NO: 463329 - DNA, 529 bp, Homo Sapiens
  misc_feature (50)..(50): n is a, c, g, or t
tttgtaagggaaatggccttttcaaaggcctcaaaaaccctaacgggccnagttgagagaaaaaatgtttgaaaaagaatcaaatgttccaacctccccgggcactccaaagaagaagataaatgaaaaatgggtctccccaggtgggccacagtgtttgggtgtgtgtgtgtggtgggggatgggaactggagactactcattgagaactgcactgggctggatatttggttatttgtgaagacttcagaaaacaaactaagctaggctgatataaaccacagggcagtcaagcttgcttctcaactcagagtaacccagtctcccctccatcaaggccaatgactctgacaaaggaaacatgggtaaggagacctgaaggtgagaaaccaagaaacataacacctgcccctgccacccctaccaccaccaaagctccaagaaacaatgtgggagccacatgcaggcagtttctgcagcactggagggattgctctagcttgtactttatgctttagattaaatctac

SEQ ID NO: 463330 - DNA, 507 bp, Homo Sapiens
  misc_feature (439)..(439): n is a, c, g, or t
  misc_feature (448)..(448): n is a, c, g, or t
  misc_feature (457)..(457): n is a, c, g, or t
  misc_feature (476)..(476): n is a, c, g, or t
tgaactaaatggtaaattttattactttaagaaagaagggaggaatggatattgagacagcaactagttctgtctgccacagtacatcagtcagtgtccagcaattatgttcaaatctatgtcacacagaatctacatattgaagaccatgtgttctgttcacaatgcaattaaactgaaaagataactaaaatattcataggatctacagttgtgacacatataagaatgaaatactcactgataaaaacaatcatagctataacatttataaggtttgtcccagtataacaggcatccagagttgggccagaaggctgtttccgggtgaccataacaggggcttctctccaatatatgttctaaagtgagaaggggggcatgagggggcaacaaacatttccctgagtcctttccttcctggggtttctgggccttntgggttcgntgtgccttntaaggttagttcttgtgcnaaaggttttttcacactgaaacctttttaag

SEQ ID NO: 463331 - DNA, 501 bp, Homo Sapiens
  misc_feature (12)..(12): n is a, c, g, or t
  misc_feature (49)..(49): n is a, c, g, or t
  misc_feature (114)..(114): n is a, c, g, or t
  misc_feature (172)..(172): n is a, c, g, or t
  misc_feature (183)..(183): n is a, c, g, or t
gtacctaaatancctgaaaaataaccctactgtcctttttaattccccnggaaaaaggaaaacatctgttccctcctaagcctaaatttggtcctggtaaatccttaatttttnaaaggagtgcccaagcatgtaattcccatagaacatggaatccataatacatgggctncataatagtcnttttctagagagtagcctacaggtggtcctcccaaaataacagcaccctacacttagttcacattaatcacttccattttgggaatcttagctgtcatccatatctaaatggatctggaagggtcttttcactgctaagactaaagctatctgggctcacatcccaagtggagcacaactcactgaagaaacacacaaatggcggttaccaggttggcatttgatatggctcaattcagaaaattaaccttagtaaattaaactgcttctatgggatctactttggaacgattctttagttagccaaggggttgctcc

SEQ ID NO: 463332 - DNA, 455 bp, Homo Sapiens
  misc_feature (331)..(331): n is a, c, g, or t
tgacgggtagaagatcatactgaaatgtgaactcagactaggctgatcaggctgaagcaaagattcctgctcttctccttctgggctaagttcccaggttccttggctttgcctcaagcatttcagaagcctcttcgggaattccaaaggggcttgtggatcggaagcccaaccccatgaaaaagacccaggtttgaattcaacagtgacctcgtcccaggtttggggcctggaggatgcattaagctccctcagctgcatctctgaacctatcactgaccttgtacacaggaacagggatttaggtcaaagcaggcctcatctctgtccnagaaccaggacccaaatatggcctcttcttcagactccggcttggcctcttctctgccacagcccccaaactggacttttcctcagcccagtacgcggatccccaatggccccctcctcagttc

SEQ ID NO: 463333 - DNA, 1000 bp, Homo Sapiens
  misc_feature (16)..(16): n is a, c, g, or t
  misc_feature (512)..(512): n is a, c, g, or t
  misc_feature (733)..(733): n is a, c, g, or t
  misc_feature (770)..(770): n is a, c, g, or t
  misc_feature (772)..(772): n is a, c, g, or t
  misc_feature (781)..(781): n is a, c, g, or t
  misc_feature (916)..(916): n is a, c, g, or t
  misc_feature (987)..(987): n is a, c, g, or t
tgagcgatgacacggncctggacatcaggaccagtggggacctatacttgcagacaggtctgagcgtggatcgcccttgtgccagagccgtaaaggtggactgtccctacccgctgtcccagatcacagcccggaacaatgtggtgtgggcgctgacagagcagagggccctcctgtaccgggagggcgtgggcagcttctgtccggaaggcgagcagtggaagtgtgacattgtcagcgaaaggcaagctttagaacccgtctgcataacgctcggggatcagcagactctctgggccctggacatccatgggaacctgtggttcagaactggcattatttccaagaagccccaaggagatgacgaccattggtggcaagtgagcatcacggactatgtggtgtttgaccagtgcagcttatttcagacgataatccatgccactcactcggtggccacagcagcccaagcccccgtagaaaaggtggcagataagctgcgcatggcgttntggtcccagcagcttcagtgccagccaagccttctcggggtcaataacagcggtgtctggatctcctcgggcaagaatgaattccacgtcgctaagggaagtctcataggcacctactggaatcatgtggttccccgtggacagcttctgctacaaaatgggcctttgtgttggcttctgcagctcccacgaaggaaggaagcttcctgtggctgtgcagnagcagcaaggacctgtgcagcgtcagccacaggagcnancagtcgcgnccctccacggtgcagctgcctcccgaagccgagatgcgcgcctatgccgcctgccagggatgcgctgtgggcttgggacagccttcggccaggtgttcatcaggacgctctccaagagcttgccccacggattgncactgggaccagggtgggacctctcccagctagggagctgttaaatttgacaagctttggcatgtgggaantcagcacatttgg

SEQ ID NO: 463334 - DNA, 507 bp, Homo Sapiens
  misc_feature (400)..(400): n is a, c, g, or t
  misc_feature (438)..(438): n is a, c, g, or t
  misc_feature (459)..(459): n is a, c, g, or t
  misc_feature (466)..(466): n is a, c, g, or t
  misc_feature (473)..(473): n is a, c, g, or t
  misc_feature (482)..(482): n is a, c, g, or t
ctgagatctcctggtaagagtctttattaaattgtaaatgcctgagagggtggtcctaggccttacatttaaaatggcagcttttttcatctttcaggggcattaagcacttgaccagaagtgccctttaatgagaggaaagtacttaatggcatttttctcacacggatcttgtctagtccaggttgatgttaatggaacttgaaggggcagacacaggagaaacaagatggaaacagaagctccaggtttcaataccaggttgcgccttccctctcagaaaggatcctttgtggaacggggagctgttgctaggcccagtgcctcgactctgaggtgtccctgaaaacaaattgccctttctctggctgttcacactttccagtggtcaggggccctnccgacttcgaaggcccagcttcaagttgaaacagatgnttgcatggggtatttgaagcnttgcctncaacccnttgggtgtncagtacagtttctttttccccaggg

SEQ ID NO: 463335 - DNA, 539 bp, Homo Sapiens
  misc_feature (27)..(27): n is a, c, g, or t
tccaacggatctttgcaacccttggtncaagagacgcccttgtgaagccactccactagagccttcagtctgacatacagatatggggagtcttggcagagcagctgctccggcacaggcaaagacccaggaactccaaacttcccagcaaaagtaactgcaactccagcaaagcaggatgttagacccccgtacatacccttaggaaaaaaggctgaatcaagaggaccaagtagagacagtctgcaggtctcactttcataacacctcacaggataagacccactggcttggaattccagccagccaccagtagcagttttgagcctacctgggatggaactcccaggggaagggacaggctgccatctttgctgttttgggtgactcagctgtttttgcagggttttggagagtacaaaccaaccagagggcagagagggtttcccagcattagcattgactttttttaccaaaattgttgttagattgcttgtttaagcaggtttccaattcctttcttattcacagaggcaggg

SEQ ID NO: 463336 - DNA, 472 bp, Homo Sapiens
  misc_feature (429)..(429): n is a, c, g, or t
  misc_feature (459)..(459): n is a, c, g, or t
tccatgatcgactttattacctcaatggcatagagtgtgcagcaagtgccatggagatgagtgccattgcagcccacaacgctgcactccttgcctatcaccgctggaacgggcacacagacatgattgatcaggatggcttatatgagaaacttaaaactgaactatgaagtgacacactcctttttcccctcctagttccaaatgactatcagtggcaaaaaagaacaaaatctgagcagagatgattttgaaccagatattttgccattatcattgtttaataaaagtaatccctgctggtcataggaaaacacacggttctaattaagtgtgaaggtatagctattgcacttatgccatctccaaaatttctttaagtattcttttcactatccattagggagtttttcttaaaacttgtctggntattaggattcaccgggagttagggaggtnggtgggttgccgt

SEQ ID NO: 463337 - DNA, 556 bp, Homo Sapiens
ccaggggcagcacggccaggatccaccaggaccaggcagggccgctgggattactctgaggctcaggttctctgtctggcattaccccaaaatgacttaaaatttgttctttcatgcgatcctggagagacgcgaaccaggaaacagactgttgatgcacagaatcgtggagagcggcaagttcttcatactctggaccctccaccttttcatcttcaagatattcaatgtccgctgtgttatagccatctctgtggcggtggcttagcactcggaaccgactgatgccaatcgcgtctacaacagaacttccatcaggaaacgttctcacgtccttaatctccagcatgcatccatactctgaaagccccgcgtgctcagcagataaacacatgccaaaccgcttggtgccagtttccatgcatcttcttatcataagccgatagcggggctcaaaaacgtggagtggacatgggaccgtggggaaggccatggcacacacaaagatggggacgtctctggtcagatttgacagttccctcgtgccaagctggcg

SEQ ID NO: 463338 - DNA, 519 bp, Homo Sapiens
  misc_feature (494)..(494): n is a, c, g, or t
aatgaacaggagaatcccctagaaagcccacccagaagttccacagaaaaatacccctcttggcagttggtgttttggcaaacagaccctcaacattttgcacccacaaaaacacctccctccccctaaggaaatgatttctgaatactccctgtgcacacactccccattagcctgcaaacgttttaaagttggaccctggcgaggtctcaagcaggaaatgtaaaaaaggagcaaataagcactcaatgcagcaatagctcagtgtctttgttctgcagactgttttcacacttcctcaggcgaatggatttttaaaactgccagttgctaacaggaatcccacctcttcagcctgataagataaatcttgacaggctaagaaatctttatttcactcagaagttatttgttcccatctcatgttcacagattaagaataaaaattgatttgacttcaaaggaaggtgttttataattcagattgccttcanctcaccccacctatgtacgattact

SEQ ID NO: 463339 - DNA, 462 bp, Homo Sapiens
  misc_feature (377)..(377): n is a, c, g, or t
  misc_feature (411)..(411): n is a, c, g, or t
  misc_feature (419)..(419): n is a, c, g, or t
  misc_feature (432)..(432): n is a, c, g, or t
  misc_feature (439)..(439): n is a, c, g, or t
  misc_feature (452)..(452): n is a, c, g, or t
agccaccccaaatattttctttttctacctgttttatatctcgtgatgttcagtcaccaaagggattgttcacaagattgtcttttctgaaggaagacatttaatgtaatatattaatttaaagatgaatctcttcaaaatggttaggaataagtatgactcccacacgataggtaatggctccttcaaatgagttaggccggctaggggggaaatgatttctcagccatcgctaggttcatggtcgagtcccttaggaacaaatgacaggttaaccagaggaaaagtgtggcaagtttacggtaaggattaagttttacccggacacagggagccttcaggaaaggaaaaacttcaaggggaaacagggaaatccngtgttcaattttggatggctgtcttgatggaggnaggcgggncatttttgggggnggccccntttgggttggaanggggttttga

SEQ ID NO: 463340 - DNA, 453 bp, Homo Sapiens
  misc_feature (367)..(367): n is a, c, g, or t
  misc_feature (418)..(418): n is a, c, g, or t
  misc_feature (426)..(426): n is a, c, g, or t
  misc_feature (433)..(433): n is a, c, g, or t
catatattataaggtttttggaaacatttacatttggtctcacatattcacagaagcaatctgactaaaatctgagatttgtaagtataagtagcaaaattttaacccaggggactttaaaatgttttctttgcaccgatttgtattcattcagtaaatgtattacatgacttctgtagggttccgatgtctaatagctgaggtaacaaagaaaataagtcacagtccttggaatttacattctagtaaatgtaggttgctaaattgtattagactatgggtgtagtcagtgtcacatgcatggcaaggaaaagtggaatacggggaccattggggtcaccataaaggggattgatagactgtaccnggggtttgggggggtgggaggagcttaattgaaagcttgacactttgagtnaagtttcnaaagggntgagtagggtttttttcccc

SEQ ID NO: 463341 - DNA, 601 bp, Homo Sapiens
  misc_feature (38)..(38): n is a, c, g, or t
aaggagggaaggttcccttcccccacttaccttggggnaccctagcaaaaaatcaaatagcccacaatttggtttttaataaggcaacagtttgaatagcagatgctaggaaattaaagaacacattgctactggccctttctagtggcaaatttcaccacatttatctaagccaaagggaaaggctgccttgcgtgcacacgtgtgctgggaagacacaagaaagaagttgatccatggcttcagcgtaactgatggcaacctataggctcagcggtgtcccagggtagtttaaggaaggctggccaacaggtaggaggttcgtaggagagttactgactctccacggccagcaggttttggccagaggataccatgccctccttctctgcgaactcccaggatgggtcctcatgcgtgacaccgtctggaacacattaagggtgccaagctcctccagctgtgccaggcagatgtccagtgagcagaaggtacctgtcctgccaatgcctgcactgcaatggaccacaatgggtggcttcagcactgccctttggagcgtgctcccatgttgctcacagccagactctgctggtttctg

SEQ ID NO: 463342 - DNA, 535 bp, Homo Sapiens
catatgtctctttgcctccagggtgtgggtgccccttgtgtgcctagacaggctgtggcctaatctggagcagaggccctggaatgtgtgttgggggctcattgaatgcccccagcccagggtgtgaggggcagggtctcccagccactccgcacccaccagggctgaggcagtgatagatgatggtgggctggaacctgtctggtcagggaagacccatttcaggccatgaggtcaacactgtgaccaacaggccagaccctgggcacccttggtggccgctgcagcttggctgactggagcacgtgacccagcgtgactgcagaggccccgcctccagtacctcagtttctccatggtgaggaccttcttggtgaggggttccgtggtgggctccccctacctccggtgttgtgtagggtgctgagcagatggatgccatgctgcatgatgggcaagggtggcccactagcactgtggcaagggccctgggctggggcttcaattggcaggccaccctcgtgccaagctggcg

SEQ ID NO: 463343 - DNA, 318 bp, Homo Sapiens
  misc_feature (256)..(256): n is a, c, g, or t
  misc_feature (303)..(303): n is a, c, g, or t
ttcaaaaaaacacaaactgtccatgatcacagcatggccctaaatttctagctgcaggtgtaatttctactttctgggactctcaacctaaaggaggcaggatcatacctcctcaagggcctgggcagggaggggaggccaccgtccctccctgtccccctagggcggtctccttccacttccttcaggccaaccttttgccaaagaggcctctctgtagagttgaccagcttcacagggcacaccacctcccttngagggtttccctccttctgggggtgttaacatggacttgtccagggnaagtacctttttcca

SEQ ID NO: 463344 - DNA, 421 bp, Homo Sapiens
  misc_feature (65)..(65): n is a, c, g, or t
  misc_feature (354)..(354): n is a, c, g, or t
  misc_feature (359)..(359): n is a, c, g, or t
  misc_feature (390)..(390): n is a, c, g, or t
  misc_feature (406)..(406): n is a, c, g, or t
ttttatgcactgaaatacaactatttatacaacagacactcttccctccccccatggaggttctnttcaagcggggagacagtcatttgttaaacgaaacataaaatctcagtgacaattagagctctgggggagaatgaaggagcaggaagaggcagaggaagaggagccagggctgccaggtgcagtagcccaggttgcgcactgctcaactttgctgtgggattcacatcacagtcatcagagtcacactggggcagtttcccagtagatggccgcactttgtctcagggaagggcccattgccgttttgtccaaggccatctcatgggcttcaaagccatgggaggggangggtnctgccagggtgacacagatttggggccctcntttcctcccttcagangatgcccagctggga

SEQ ID NO: 463345 - DNA, 487 bp, Homo Sapiens
  misc_feature (383)..(383): n is a, c, g, or t
  misc_feature (423)..(423): n is a, c, g, or t
  misc_feature (466)..(466): n is a, c, g, or t
aaagtgaaaaaataaaaccagggagaggggaaattgtgtataatgtgaataaacgtagtctgtagactttattgaagtactgctgttttgtaagcctcttactgaccagaaccacttattattccaaatgcacatagatttatgatctgaaatgctcaccatgttttttaccctggagaactagagggtgagcgagttccagctcagtgtttgacaagatagcttacatcattttatccccacgtcaatgcagtgaggcaagtgaggtttattatcttcctgttatgaatgtgggctgtagagactgagagattaagagggttgtccttggccagccctaagtttggagaaaacatgtaatttcattctgtcactacttgagncccatcgctctctggccatcacccatgtattaaatgttgncaggcccaggaggcatcccgttcgggccatggcatgtgccatncgtgtgggcccctgatggttc

SEQ ID NO: 463346 - DNA, 498 bp, Homo Sapiens
tttcttccatttctaagactgttatttacaataggaaaattcctgtttggctttttgtcttcctttttaaatgctttttgtatgtaatatttttattgatgaatacatctctgaacgttccagaagtcttaaggttccaaagggatttagcagtgaggcagcaatgctgagtaggtaggataattatttcattcagtttttggagctcagttaagccaatacatttaaagttttgcatgaggaacactgactttattaagcattttcagatgtggtggttgtatttttgccccaaggaagtgtttggataaccacacaaaagcatgatgaaaaggcttcttgtagtcccataaatttcttgtgaactaatgttgtggaatttttgtatacagtcacctggcatagttcctacagggctaatgtggggtaaaactgttggattttccccattttaaccctaggggtttccgttggcttataggcggttccattgctacg

SEQ ID NO: 463347 - DNA, 450 bp, Homo Sapiens
  misc_feature (344)..(398): n is a, c, g, or t
tttttttaaatttaaaggagtttaattgagcaataaacagttcaagaattgggcagccttcccagccagagtaggctcggacactccagcgcagtcacacggtggaaggtttgcggacagaaaatggaagtgaggtacagaaacagctgggcttggctacagcttggcatttgccttatctgaacgtggtttgaacagttggctacatttgattggccaaaactcagtgattggcacaagtgtagtctgtttacacctccacttgtcacgatatacagacaaacctttagggccaaacttaaatatataaggaggcagctttaggctaaactttatttcaatannnnnnnnnnnnnnnnnnnnnnnnnnnnnnnnnnnnnnnnnnnnnnnnnnnnnnnagttagagattcagcccaagcaacatagtgagaccttgtctctgtggaaatt

SEQ ID NO: 463348 - DNA, 694 bp, Homo Sapiens
  misc_feature (265)..(302): n is a, c, g, or t
  misc_feature (584)..(584): n is a, c, g, or t
  misc_feature (637)..(637): n is a, c, g, or t
  misc_feature (668)..(668): n is a, c, g, or t
atcctgtccgaatctgggaaattttgctctggagtattttcaagaaagcgcattgtgttttaatgaagtatttttcagggttccaatgttattttttataaatgcagcattttaatggcagattcaatatgaaggacatgtcttcctgggctctatatttgattttggaaggcagcatactctaggagaaaaaaagcatagggctgaggctctgaagacacagcttccagccctggctttgtctccgagggggagtcatgttccnnnnnnnnnnnnnnnnnnnnnnnnnnnnnnnnnnnnnnggctttgactagatgagctctgaagtttcatccagctcttacactgtagggctttcattccctgccagcacctgctctccccgttcctccccacctccacttgaggctggcacacattcccacaatggcctgccccacagcgatgtcctcagatgttctgggacagccaccgcactcctcactagagcctgggggtgggcctgatgggctcggccacccaggggatgccctcgtacctgaagtttaagggcctaaccattcaataggtcaccaactgtgtgnccatgggaaggccctcttgttaaaggacacacctgaaaccatccttaagtgantgtgggaattttgggggtattcttgagtttngggagttttccattttggattacggt

SEQ ID NO: 463349 - DNA, 552 bp, Homo Sapiens
  misc_feature (45)..(45): n is a, c, g, or t
  misc_feature (367)..(367): n is a, c, g, or t
  misc_feature (519)..(519): n is a, c, g, or t
ctaacaaaaaaagatctccgtgtccatttaaaaatggtggatagntcccatcgaacaagtttacaatatggaattatgtgcttaaagaggttgaattatgacagaaaagaactagaaagaagacgggaagcaagccaacatgaaataaaagacgtgttggtgtggagcaatgaccgagttattcgctggatacaagcaattggacttcgagaatatgcaaataatatacttgagagcggtgtgcatggctcacttatagccctggatgaaaactttgactacagcagcttagctttattattacagattccaacacagaacacccagggcaaggcagattcttgaaagaggatacaataacctcttngccctggggaactgaaaggcgactgggatgaaagtgatgacaaggaacttcagacgtgggatcaacctgggagaagggcagtttcctcctcgtgaagtacatgggaattcagcctgatgcctggggtcctcaggaaacattaccagcttggntttagggtttaaccacaacctctggggcagtcc

SEQ ID NO: 463350 - DNA, 537 bp, Homo Sapiens
  misc_feature (471)..(471): n is a, c, g, or t
  misc_feature (485)..(485): n is a, c, g, or t
aagtgcagctttgttacatggatatattgcgtggtggtgaagtctgggattttagtgtaccatcccccaagcaatgtacattgtacccataagtcatctctcaatcccccatcccccatccttccacgcctccagtgtctgtcattccaccttctatgtccatgtctgcacattatttcactcccacctacaggtgaggacattcggcgtttgactttctgtgcctaagtcatttcacttaagataatggcctccaggtccatccatgttgttgcaaatgacaggatttcattcgttttgaggacctagcagcattccgtgtataaatggcaccacattttctttatccagccatctgtttatgggacactcaagtcgatccctgcaagaactaaggcatgaaaggtgggagaaaggaagactaggcattttttgggatgcctactgtgtgacaggtgctttcacttggcntcctcatttaaccntttcaggcaatccactcagtaaatacctggggcccgatggcgggtttcatga

SEQ ID NO: 463351 - DNA, 339 bp, Homo Sapiens
  misc_feature (40)..(40): n is a, c, g, or t
  misc_feature (53)..(53): n is a, c, g, or t
  misc_feature (71)..(71): n is a, c, g, or t
  misc_feature (76)..(76): n is a, c, g, or t
tgaactctgatggccgccactggtacactccaaccctagntgaacagaacaangaccctgtctcccaaaantgaantggcaaacagaacaagaaacgagcacttcctgcaagctatctcaacaaaactagtttggcacccaaaactaagttaaaagtgaccctggtgtccgccctcactgagctgctcccagcagaggcacaggcattctgcatactggcgctgctgtgcactgacagccataagccaagtcagcctttcccccaggagtgccatggctaggcaagatgcatctccctcgcctccagtataattttaaaagttatggttgtaaaatgac

SEQ ID NO: 463352 - DNA, 423 bp, Homo Sapiens
  misc_feature (395)..(395): n is a, c, g, or t
cagtataagacattgcttatttctacaatgctgacctcttttgcctagcatggctgaattagctaaacatcatatcctaaggaaaatagtgatattcagaatctacatcacttgaatgaagagctatattcaaccatttcatgaacaattatttagtgattcccaactttgggttaagctccatttggggacatgcacagggttcacagacatgtcaattttcttcctgagaaaattgagaaaagagagaaaatatgactaaagaataatgctttaattgtgaaggcaatcgcacatacattaaacaattaggataacaaactattacaggggtaaagtgctggaactatccacttcggaccacaggggcttcattaggagtaggatttctaccntttatttctggattaatggttattttac

SEQ ID NO: 463353 - DNA, 401 bp, Homo Sapiens
ccagcaccccactctgtgacaatggatccacaaaccccctctttttaaaaaaaatacaagtgggaaaaagctggacccttttgtccagctggccttccagacaagtcaacccacaattatttggtgtaaaatatcccagtgttgccgaactctggctgggcagctgtgtggatgaaaatacagaaaagtgccgcatccggctgacagccatcgctctgcaggggcagatgaaggctgggagtacctgtaagctaaggcccttcccctgagttgtgctgcaaatactgggcagagtttgatgtaaaagcagtcaaacggcaggtcatcttgatctttgccttctaactataataaatatgagaagaattttaagtaaaaacaggatgttttgctaaaaattc

SEQ ID NO: 463354 - DNA, 427 bp, Homo Sapiens
tccatatatgccatatgaaagggtaatccaaaccacaagcccaattgaaaatttgtttagcctatgttaatatccagacaaaagagatttttaaggcagaaattattacttgaaaggaagatgtatcccatcatcccatataaaagaatcaactattgaggaagttgtcaaacttgtgtatgtatattcactcacacacagttaacacacatttacaatttttatagaactaaaaggagcaatagccgcgtcttcaatcataaagactttaatatacctttttcaataactgatagcaaaaaggatacaaaatatcaataataatagaaaaatttaaagcagtaggattaaatactttgatataaaaactgcacccaaaaatagcaaaacacacaatttattataatgtatttggaacgtgtttcaa

SEQ ID NO: 463355 - DNA, 522 bp, Homo Sapiens
  misc_feature (41)..(41): n is a, c, g, or t
  misc_feature (81)..(81): n is a, c, g, or t
  misc_feature (206)..(206): n is a, c, g, or t
aaacttggaaaacagttgttcttcaatgtgcggatcttgtntcttgctagcagcatgtgcagcaaaccctgaggccacccngcagcacataaactaattttctttcttgaacaatctaagtatttctcatggagatatgtgtacacgtcacacgggaaggcctggtgcgtagcgtttgaaccgggttggagcctctcgggcctccnacccgcccggccatgattcactcggcttctcacactgccctgggcttgctttgcgcagctcagccgctttgcaaaagcagagcaagattacaatggtaaccacacgcatcctgacatccagctggccccaattacttcgtgttacagacggaacaatgaaagtattcctttgaaatccaagtctgggtaatcttaactaatgcagttctggaacaatgagacccagctggggtacgtggagtccctaggctgaacttggggaatggatgccacaagctcatctatctggacctctctggctgcacccaggtttgtc

SEQ ID NO: 463356 - DNA, 332 bp, Homo Sapiens
  misc_feature (49)..(49): n is a, c, g, or t
  misc_feature (158)..(158): n is a, c, g, or t
  misc_feature (190)..(190): n is a, c, g, or t
  misc_feature (195)..(195): n is a, c, g, or t
  misc_feature (223)..(223): n is a, c, g, or t
  misc_feature (230)..(230): n is a, c, g, or t
  misc_feature (250)..(250): n is a, c, g, or t
  misc_feature (270)..(270): n is a, c, g, or t
  misc_feature (290)..(290): n is a, c, g, or t
  misc_feature (297)..(297): n is a, c, g, or t
ttttctatattaaactgctacacagaaattcctcaattcatctactggnatctaagtctccagtctatactttcccaggggaaaattcacacattttcccatcataaaaagtttaaaagccagtcttgaattgctgaccccagccctcccccatgcgntcgtagcaaccacagggcacagaggaagattntgcgntgcacacggggaaagagcacagcaactntggggantacaagccggaacgcagtgntgccaatcccgggcaggaantcaggccaatgccaatggantgggggncttttaggaccagccccaggggacagggacattca

SEQ ID NO: 463357 - DNA, 448 bp, Homo Sapiens
  misc_feature (25)..(25): n is a, c, g, or t
  misc_feature (91)..(91): n is a, c, g, or t
  misc_feature (120)..(120): n is a, c, g, or t
  misc_feature (219)..(219): n is a, c, g, or t
attcctcagtgtgccctaacttatnggagccacatccagtttccttgggtaatggaaaacattaccctagagttgccagtggcacattacncccagtacagagcacattcccaaaggagnacattggacccagttaattcccccatacaagtccaaggtaacagaacaaaagggaatccctgatgccccttttacccattgctggttgagctcaggcanctgtccatggacacccttaattttaaaaggttttaatcattcttcctataaaatacatttaaaatggaaaaatacttaatatcactaaatatcagaacaatgtaacatttacaaatgacatattgaaagcaaaggctgttttatttagccaagatgattaccattaggagttactttatgtattgttgaaagcaaattttaaacatgatgttttagaagtgaaaaaaaa

SEQ ID NO: 463358 - DNA, 422 bp, Homo Sapiens
  misc_feature (293)..(293): n is a, c, g, or t
  misc_feature (379)..(379): n is a, c, g, or t
  misc_feature (393)..(393): n is a, c, g, or t
  misc_feature (403)..(403): n is a, c, g, or t
gctgtttttatttaaaattttattgaaaccctctttcacccgtttaccacttcctaagtaaaaatgcatgtaaactctgagcctgatggtattagcttcaaactattccttaaatacctgaaaatgtgacttttgaaacttgggaaagtgacgttaggacaaggatccattttacatgcctgcttctttgttcattcatgagcagagctaggactaaggaaacctttcaatgagagggagagcatgtatgcaggagtataactctctattctgaattctaccctcggctgggncccatggaaaggtaaggaacactttaggatagggtggggaagggaggtttgggaaaacttgtgataaaggggggtaaatttttccnaaatttcttaggtnaaacctaacnggtttacccacagggtccg

SEQ ID NO: 463359 - DNA, 498 bp, Homo Sapiens
  misc_feature (387)..(387): n is a, c, g, or t
  misc_feature (396)..(396): n is a, c, g, or t
  misc_feature (418)..(418): n is a, c, g, or t
  misc_feature (458)..(458): n is a, c, g, or t
  misc_feature (467)..(467): n is a, c, g, or t
  misc_feature (483)..(483): n is a, c, g, or t
ctgccatctccattcctctctcttttcttgcaatctgggtagaagttctttaatatgaacatttcaaccagcttcattctaccgtgtccactatcagcacattcaaactgatccagccaaggctgtcatcttaggccagggattttttaggaatctattatgctgtgatgcggctggcacccctttgactcactgtatcaccccagggttcttttcatttcagaagcccaagagggcggaaaaagaagtaggtgagcaattaaaccctctgagtcaggagcgtctccccttgcgttaagcaatggttgtaggaacatcgtgtttaggcaagctcctaggcagatgagccacgtggctggcttgagcacacacggcctgcttgctggntgtggaggntcagggcaccatcattcatgtntttttccctctctggggaggcgatttgttaagggggccanttaattaanttgttaaattcacagnggagtttaaagggtg

SEQ ID NO: 463360 - DNA, 503 bp, Homo Sapiens
  misc_feature (416)..(416): n is a, c, g, or t
  misc_feature (438)..(438): n is a, c, g, or t
  misc_feature (450)..(450): n is a, c, g, or t
  misc_feature (468)..(468): n is a, c, g, or t
  misc_feature (485)..(485): n is a, c, g, or t
tctcatgctagcaaattttgaaataggattctaatcactgatttcaaatattaagcaaaatgtaaagcactttaatttatagctatggttataaacaggttttagatgtttcaaatgacttgtccactgaatgtcacttgaccttgataagaggccgcctgcacacagagcccagttaattctccgcacctcggttgtgtgcttccgaatgggctcactcccgtggtggtgtttgagagccaacaacactacctcagagacgggtctttgggaaactttgggtctcactgttgcctgggctgggagcactttggtttatagctgggaatactgagttcagttcagaagggcaggaaagacagtcacaccgacgtgtcctggaaggtgttagggctctccacttagggcgcacaagnttgatgggctgccagccagcanggcccccggtgnacgagacactttccaggnctttttggtggggacgnctttcagtgcccattccc

SEQ ID NO: 463361 - DNA, 485 bp, Homo Sapiens
  misc_feature (406)..(406): n is a, c, g, or t
  misc_feature (457)..(457): n is a, c, g, or t
actcagcctgaccgcttgtctttagaaggcctgattggaagagtgcactctattgactttcctctaacaatgaaattgtgaaaggtacatggggcggctgtgagacgtgcagctatcgggtctcaccggcacatcccttttctcgtaaagcaatgaagcactttctaaggtgttggtactagtgctggaggctgctggtgcattagatgctgcccgtcacatcggtgggctgagaaaccttccttaaagacctgtgatgttttgtaaaccctgactgttctggtggttgcaaagttagtgtctgtttagtgttccccatctcaccagaagtgtttcctttttctcattcatagaggtcctgttaataaagagggatccgaacaagctcagaaaggaaaatggaatnttcaaggggctggaggccctggtttctgggagagcgttatgtttgccattntcgcagagaggtcactttggggccaaaa

SEQ ID NO: 463362 - DNA, 518 bp, Homo Sapiens
  misc_feature (425)..(425): n is a, c, g, or t
  misc_feature (455)..(455): n is a, c, g, or t
  misc_feature (485)..(485): n is a, c, g, or t
  misc_feature (497)..(497): n is a, c, g, or t
  misc_feature (508)..(508): n is a, c, g, or t
aaaaaagtcctaggagaaagcgacgtggctcattagtgttgcctcttcagtgctcaagccgcctggtggattcctatgacacagggggcctggaaagaaagggaaagtggatttaaaatatatatatacgtaacccaagccccataacccctaactggacaaatgaggtctgtttctttgggcctgaggctgatgcatataaagtcttattttgggactttacaaacttgtcctaactatcttgtggatagtgggctgtgacaatctggaatagagaacgttcacacttcgctcctttaaagaaggcgaccccagatctgcaagggagtaggattctgctatctttgggccttcacagccgttcctgtttgattacaaaggcccgtgggaaggaaaacaggaacacaccctccttcagtttcccntcttaaatgtgttttctttctggctttcanttacaccagtttttggggggcaaaggacantgatggaaacancacccttaccntgaaaggatt

SEQ ID NO: 463363 - DNA, 546 bp, Homo Sapiens
  misc_feature (70)..(80): n is a, c, g, or t
  misc_feature (464)..(498): n is a, c, g, or t
  misc_feature (509)..(509): n is a, c, g, or t
  misc_feature (518)..(518): n is a, c, g, or t
gaaggggaaggctcagggtctcacctcacattgtccctacaaggacaggccccaactgataaccgttgcnnnnnnnnnnngtgaacatagtttgatttgatcacaggtcaaaaacgccttatattttcgaaagactcctggcccctcttccctcttcctggtttcctagccgttccccttctgccccagtctgagccagtgaggggtagctttttaaaaccattattctagatggaggaggcactgatgcttgtaactctggaaagaggcctacaccccagggctaggaattttatttttccttttcttcaccaggtgtctgcatgtgtgtgtgggtgtgaatgtgtatacatgcccatcagcatttagtcacatgtctgaatttctgtgtccagacgagccccatcaaactagttggggaaggggccccagtgaccaagtgtattaaggcatcccttgaaggnnnnnnnnnnnnnnnnnnnnnnnnnnnnnnnnnnnttcttccaganccctttttnccatggatggacccatttccaggtttta

SEQ ID NO: 463364 - DNA, 230 bp, Homo Sapiens
acaggttcaccaacggaatccgtgaaacagacacacggcgtctgccctgcccccaggaggtaaaaaagacttcggccagtcagcaggagatttcaaaccatttctcagacacgaaggccacaggaataagatgccgatcagaagaggagggtcggtttccattaaatgtggatttgtactcccccgtcgtcgagtgcagcgtctcatcggtgtacgtcggcacagatgcc

SEQ ID NO: 463365 - DNA, 431 bp, Homo Sapiens
  misc_feature (350)..(350): n is a, c, g, or t
ttttatccttcggggatgacagttatatgtgtatatacaacccaggatgacaaaatcatgggtccggtttttgttgccagggctgctgtctcttttcttgcggtcttcatttctcacgagggtgctgggaacttgatcagtcccctggccttttggcactgtggcagagtacacaagtcatacctttatggacagttagctcacaaaacaactgcataatctgggatcactcttggtaaatcaggtgggtggtgcagccaggagatcccctttcctggtcacaacaggagcacaaagaaaccattatctccatgactagctccagaagctgggcccagggagtcgtgatngaggagtggaggtgtatttggcctgtagaattcaacggccttttgaggaaccataacaatggcaccttattatgggcttgg

SEQ ID NO: 463366 - DNA, 486 bp, Homo Sapiens
  misc_feature (344)..(344): n is a, c, g, or t
  misc_feature (392)..(392): n is a, c, g, or t
  misc_feature (399)..(399): n is a, c, g, or t
  misc_feature (410)..(410): n is a, c, g, or t
  misc_feature (434)..(434): n is a, c, g, or t
  misc_feature (440)..(440): n is a, c, g, or t
  misc_feature (448)..(448): n is a, c, g, or t
  misc_feature (461)..(461): n is a, c, g, or t
tgagatttaatcaattagaactctttagggagaaaataaataatagaagaaaatatatgcctcatatttcatatgtaattatctgttgatataatttttcaatgtattttgtatttgtgggagcataatgacctgtacattcaatatttttactggtaattcaatttttaaatatgtttttacaatgcttgaacacataaaccttagaaaactggaaaatacgtgtccacagaaagagttattagctactaccttatgtaaagatgcataggaaaatgaaattgttgggaaacatgtgcacaaagtgttttatattatatacattgtatttatggaaggaatanataaaatattaaggattgttttcccggctagccaggggaggaattccntgggggnctatccagggngtttatgggggcctttttaggccnggttcnaaaggttnttccccgggtacntttggccaaaggtccgaccgtggac

SEQ ID NO: 463367 - DNA, 428 bp, Homo Sapiens
  misc_feature (272)..(284): n is a, c, g, or t
  misc_feature (340)..(386): n is a, c, g, or t
ggtcatttattttacggaaggtttttcaatttggacttgtctgatttgatctgattagctttttgattgtagtcaggttatgtttagtcagaatgttacaaaagtgatgttttcctctcagattatcacatctggagatacataatgcccacttgcccctcattagtgattttaacttcggtcaagatatagtctggttcttctactctatagttactatttttccttgtaacaaggcagtctgcttaggaggtaccttagtgttttatggnnnnnnnnnnnnnccttagtgaaaactaagtgtagtaataatataccttatatttgtatagtgctttcnnnnnnnnnnnnnnnnnnnnnnnnnnnnnnnnnnnnnnnnnnnnnnnattgttgagagtttaagggcttgtgtaggaggaggtttttgg

SEQ ID NO: 463368 - DNA, 381 bp, Homo Sapiens
  misc_feature (240)..(240): n is a, c, g, or t
ttttttttatattttgcaacatttccttatgatagcaacaactaaatatgatggatggtgacacggaaaatacttaatataaagtttgtaaaaagtagcaaacaaaattgagtatatactataagtgatagaggatgtatatgaaaaaggctataaaaagctccaaaattgactgtattagtgatagaattaaggaattttttctatttttgtaaactttctgaggatttcactttatgnaattacaacaaattacatttttacacacatcaatctccaaagattacatactacatgacttcacggcaacattctcaaaatgacaaaactagtggttgggggtcacgggggcattgtaactacaaagggggcggcactaag

SEQ ID NO: 463369 - DNA, 592 bp, Homo Sapiens
  misc_feature (103)..(103): n is a, c, g, or t
  misc_feature (271)..(388): n is a, c, g, or t
  misc_feature (434)..(434): n is a, c, g, or t
  misc_feature (502)..(502): n is a, c, g, or t
  misc_feature (555)..(555): n is a, c, g, or t
  misc_feature (576)..(576): n is a, c, g, or t
agaaaaaccctgtagacattagtcactcctcattctgtctcaaaccctctccctgaccctcagccctaggtagcaactacctagtgcgatcaatcccatatgncatagattaccatattgtggacatttcctataagcggaattgcacaataggggagctgttatgactgacataacacgtagtcacaatattttcaagattcgtccacattgtagggcttacccacagggggaaaaccattttattgggggcttttagtaacaccggtgnnnnnnnnnnnnnnnnnnnnnnnnnnnnnnnnnnnnnnnnnnnnnnnnnnnnnnnnnnnnnnnnnnnnnnnnnnnnnnnnnnnnnnnnnnnnnnnnnnnnnnnnnnnnnnnnnnnnnntctctttcctatgccttaggtgcatcccacattctgcgtttttttngggaaatctcgacaggtgcaggaaaattgtgttattgtaacaatttaccgttatctctctttcacggntttcatcagttgtgaacatctattggttatccaagtactaagatattttaatngggaaacctgttttccttctncagctgttttggagaa

SEQ ID NO: 463370 - DNA, 238 bp, Homo Sapiens
gaagcccgggaggcccaggggtggagggcccctgttttagggacctcaacactgactacaaagcaatagtcattaacataatctggcaagagtgcagggatacacagactacaggaacagaaaagacagcccataaaatcaccccacctgtggggaaggggatagatcagcaaggcgacaattgaccacagtgcaggaaatggactccttcatgaatgatttaagacactggacttcc

SEQ ID NO: 463371 - DNA, 507 bp, Homo Sapiens
  misc_feature (320)..(320): n is a, c, g, or t
  misc_feature (387)..(387): n is a, c, g, or t
  misc_feature (446)..(446): n is a, c, g, or t
  misc_feature (481)..(481): n is a, c, g, or t
ttagtttaaaacttgaagatgtggctttaggatgcctagctacatcaaacacggaatacctttccaaattgagactggaagccccctcacctaaggctatagtcactagaaccgcactacgcaatctgagtatgcaaaagggattcaatgacaaattttgctatggtgacattactattcacttcaaatatttgaaagaaggagaatcagaccaccatgtagttactaacgtagaaaaagaaaaagaaccccatttggttgaagaagtttctgttctccctaaagaggagcaatttgttggacagatgggtttaacaganaacaaacacagttttcagggatacttcagttccagaacccaacatgggtgtggactactgtaagganaaaagtttgggacttaaaggcagcttccccagtgttatgtttttgtggcttatgtttgnccttaaaaatgttcaggaaaagtgtcttggctggngactttgtttgtggggccactgatag

SEQ ID NO: 463372 - DNA, 488 bp, Homo Sapiens
  misc_feature (401)..(401): n is a, c, g, or t
  misc_feature (428)..(428): n is a, c, g, or t
  misc_feature (447)..(447): n is a, c, g, or t
aaacaccatattatttaggaggatagggactgtctgttcagcactgtgtcctcagcagtgcctggtcctgtatgcaggacccaggtttcatgctttctaatttcacctgagaacttctcactaagccccctccctggctgtccaccctcaggtgaaagttaagattttcttcttctgaatgttcataacactgaatctaaacctcagatctgcaaatgcatattttctactttgtagtgtttgtgtagtaattccattaatagggtgtcaatgtctgggaagatagggcagggtcaatgtctgattcaatctgggtgtcctcctggtatcccttatatcatcagggcactgcgtttatctggagtgtttgggatgggaaacccacatatttcctcatttcntactatggaggatattggaaccagggnttggcccaactattaaaantgtatggtccgatgtaaggtaggacaggggagtaccctccc

SEQ ID NO: 463373 - DNA, 491 bp, Homo Sapiens
  misc_feature (460)..(460): n is a, c, g, or t
aggatttttgaaactttacattctttacggttaagcaagatgtacagctcagtcaaagacactaaattcttcttagaaaaatagtgctaaggagtatagcagatgacctatatgtgtgttggctgggagaatatcatcttaaagtgagagtgatgttgtggagacagttgaaatgtcaatgctagagcctctgtggtgtgaatgggcacgttaggttgttgcattagaaagtgactgtttctgacagaaatttgtagctttgtgcaaactcacccaccatctacctcaataaaatatagagaaaagaaaaatagagcagtttgagttctatgaggtatgcaggcccagagagacataagtatgttcctttagtcttgcttcctgtgtgccacacttgccccttccacaaccatagctggggggcaattgttttaaagtcctttttgtttcccgactaggncgccctgcacattatccttcattttcccggg

SEQ ID NO: 463374 - DNA, 470 bp, Homo Sapiens
gtgagcccatgtgccatgaactgtaggatgaataaagctggaatggtttgggccccgggaattatggagccttgaaaccctatgtttagatgttttaaatttgatttgaggaccaactggtagctttgggaaggcacagcctacagaagggaacaataactaaaccttgcttgaaaaagaaaactcatgttgtgatgtaaagtatactagaaagtgcagaggagatatcataatagaagagctatgtctactgtagttagcctaagaaaagccgtggccatggaatgaatttaaaggaaattctgataaaggaaatgtctaagtgtaatttgctctcatgtttgctatattgttcatgtttgtggtaatgtattttcttctgaacttattttccagccgacctcttttgagacacttaaaagctcagtttcttttcttttatccatgactttttgggaatgggttctttg

SEQ ID NO: 463375 - DNA, 501 bp, Homo Sapiens
  misc_feature (488)..(488): n is a, c, g, or t
tgcttttacagtatataaaacacttaaaatacagttgcttatttcatttcctcagtaatcctagagagtatttcctgcatcttattgatgaggaattgaagctgggatagcttctctcctgactcttgaagtccgaaaacaagtggacggagctgtagcactaagcctcagcctgctcgtcttcaacctgctcctggctgcagagtcttgattgactctgcctgtctccagtgtgctttcattcccttcagtgggtaacttgtcagacctcgtcttgtttttgagactttggtttctgtcttgccttcttcctaactttgggtattcttagttccaaatcctgaataactcctgtaaatggggcctcccagtagggggggttcctgtatttatattcacagatgtacgtattttaaatagttaacatctggaattcagtattacatcttaaagttgccagggaagttcaattcttcagtgtccgcccnggtcgtcactgag

SEQ ID NO: 463376 - DNA, 496 bp, Homo Sapiens
  misc_feature (16)..(16): n is a, c, g, or t
  misc_feature (24)..(24): n is a, c, g, or t
  misc_feature (39)..(39): n is a, c, g, or t
  misc_feature (56)..(56): n is a, c, g, or t
  misc_feature (68)..(68): n is a, c, g, or t
  misc_feature (73)..(73): n is a, c, g, or t
  misc_feature (82)..(82): n is a, c, g, or t
  misc_feature (103)..(103): n is a, c, g, or t
cttggcctttgggaantccctggngtccctgctggttcnccttaagggttcccagnccttgcctttgncgggncccccggtnccctcagcaacctgtctgccngttgaaaccgccggcgacgccgtaggaagctgccgtgctcaaacatgtcgtggcaagtcagggtccaccgtccagtagctgcccttgcctggcttgcggtcatcgcggggcaccttgacaaagcactcgttaagtgacagattgtggcggatgctgttctgccagccgggccggttgtggcggtagaaggcgaatcggcccatgatgtagcggtagattccactgagggtggcccgctgccccggtgagctctggatggccatagcaataagggcgatgtagctgtagggaggcttggttggctcagttgtggggcgccaggcccgggcagaggctgctgctgcatgctggccgggctgccaggctgctgggacctgctgggtcaggctcagc

SEQ ID NO: 463377 - DNA, 413 bp, Homo Sapiens
  misc_feature (92)..(92): n is a, c, g, or t
  misc_feature (101)..(101): n is a, c, g, or t
  misc_feature (123)..(123): n is a, c, g, or t
gaaacaattttggtgtggcacttccctagtctgtgaccctgtccctgaaagggctggaacacaggcctccgtagacaaacatatttcatttntcttgtccntcaacttttaacgtccacctcntctttatcaaaaattccctgtaattctgaaggtaattccccctttttggatggagttccaaaaactgcctgactggcacccatcggaataacttcctgaaatcgtcgttgacggtgaatccgtttttcccataattttatatttacatctacctgtttcttctgttcagcgggagacacacatttggaactaaccttctgagcttcctcaaaaaggctatcaacaaaatattcacaatttgattgttgattattaccaagaggttgattatcagatcctgtttcacaaac

SEQ ID NO: 463378 - DNA, 566 bp, Homo Sapiens
  misc_feature (204)..(204): n is a, c, g, or t
  misc_feature (332)..(332): n is a, c, g, or t
  misc_feature (390)..(390): n is a, c, g, or t
  misc_feature (443)..(443): n is a, c, g, or t
  misc_feature (458)..(458): n is a, c, g, or t
  misc_feature (540)..(540): n is a, c, g, or t
  misc_feature (545)..(545): n is a, c, g, or t
tgctatttcatgggtctccttttgtgaatgcaattatccacaaaggctttgatgaaaggcatgcgtacataggtggtatgtttggagctggcatttattttgctgaaaactcttccaaaagcaatcaatatgtatatggaattggaggaggtactgggtgtccagttcacaaagacagatcttgttacatttgccacaggcagnctgctcttttgccgggtaaccttgggaaagtctttcctgcagttcagtgcaatgaaaatggcacattctcctccaggtcatcactcagtcactggtaggcccagtgtaaatggcctagcattagctgnaatatgttatttacagaggagaacaggtaatgtagttttatttgttcatcttcaaaantgctaggggaggcatactttaactttttattaatctcttgaattgacaagacntttgccttaacgggnttttttaaaattttatttgggggtattttcagtttgggaagttacaaatagtaaagagattttcttattacccttacccggnttccnaatgttatattttgttccctt

SEQ ID NO: 463379 - DNA, 511 bp, Homo Sapiens
  misc_feature (23)..(23): n is a, c, g, or t
acccaaacagaaaaggttgctgnctcaaaaggctggtaatattgtgaataccactaaatgaagaaaattaatcaacatgttgctggtggaaaggggtgaagtgctggtcaatgggctaagagactggctctgagggtttggatcaccagatggatgctgggcttgaggaataccctctcccaggcaagctgatcaatcacttcagggaccaccccaggacttctaatttatctcctcagggacctcctgggcctgcagatcaatctcctcagggaactcttgggatggtttatcaatctcagggatgccctgagataacagattgatcgcagaagtctcctgggccagcctgccaacctccacagagaactcctggtatggctggatgacctcctcagggatctcttcagctgggctgccaacttctacaagggtttcctggaccaagctaccaacccctacatggaacttatggaccagcttgccaacctccacagagaccccctgcatg

SEQ ID NO: 463380 - DNA, 441 bp, Homo Sapiens
  misc_feature (425)..(425): n is a, c, g, or t
ttttttttactttcaaaggtgcagacattaatttattaaacactagtcttttctattttaattttcaataacaaacatttttgccttttacaatctcttcacatttgccatttatcacagatctttacgtggtttaaaagcacatcacaaacattcgggagatcatgcatcttcattaactctgaccaggtgtttgctattgcctaccccactcttctcaatgatgtctttgaaagagacagtcctacattgggtattaaaaaggtcaatctttctaaataatcagagcaaaatctctttaggccctttaaggttatctgggtttgcaaacagaaggaataccacaaatccatttccacttcacagggggttctgaggtatggcatggcaaatgcaccacacacaaaggaatggctgttagggantcgagtgttcaaccgg

SEQ ID NO: 463381 - DNA, 487 bp, Homo Sapiens
  misc_feature (445)..(445): n is a, c, g, or t
  misc_feature (467)..(467): n is a, c, g, or t
ctcttttgtgtcttttgatgaacgctccagggcacccaggctggtctctctgccatgccaacctcaccggatcctctcctggactgagtgagagtgacctgctgttgggtgtccaccttggagtagggtgttgtggccatgggacctcccaattcttctttctttggatgtgaacctaactctgccctctaatgatatccctgaactctgaggggaccttgggcatcactgaacctcctctagtcaagaaacaagaaaaaggaggtgctgcttcctccattcagcagatcatgcacaaatttactcctaggacagaggctttcccactttgagggcaaaggatctttggtccttctgggttcaggttgaacatttaatgttcttctctagtggatgcctactttggcgggaatacactagtggcaagtcattttgggtgcttaantattgcagaaaccaacaccaanggggaggagctgttcagcct

SEQ ID NO: 463382 - DNA, 473 bp, Homo Sapiens
  misc_feature (49)..(49): n is a, c, g, or t
  misc_feature (359)..(359): n is a, c, g, or t
  misc_feature (418)..(418): n is a, c, g, or t
catataataatctcaaaacgatacaagctatataacattgagccccatntccctcccaatacccaatagctgctgccatatcagtagctgtcatttgtgagaaatacatgacagaaaccatggcgaaggcttagaaattaaaagcagttcttaaatatgaaaaaagcttctgagaggttgattgcattggtttggcagatatccttagggacaaaacatgcccaaatgaacctagcagacagatttgatgttgagtcacacaggtaaattgcatgagacctaaaaatgagtagttcaactatttctaagtttaaatgaattaagactaatccatttagattgatgaggttaacctggancttgagcatttcagcagagtaacttcaagagatcagacataattgggtcttcttattgnactcactttagtgtttttggattttgttaagattttactttttaatcttgccaag

SEQ ID NO: 463383 - DNA, 452 bp, Homo Sapiens
gaacactgtcgtccaagtaggtgcccttgcctttctccgaagggaaatgtcgcacttttactcctcaactaacactcaactgaacacatccatattgttccctaggctgtggctcttccctgttgtctgggacactggagttgtggggaggctgccagcaacagatgtgtcaggacaggttgacctccggctgaacctcgcagaaccggagccagcagagggacctgccaagatcttccttggaagagactagtcttggagagctgcttcctggttcgattctgagcgacagtttgtagttgtcgtcttccacaaacttctggagctcttcaatgtagcgtacggacttcaggtacttctgcacatggggcagggtggtgaggtgatcatagctgcaggaaacttgtaaatcagcaattattcgaagaatattgttcatctgattggatctt

SEQ ID NO: 463384 - DNA, 506 bp, Homo Sapiens
  misc_feature (14)..(14): n is a, c, g, or t
  misc_feature (435)..(435): n is a, c, g, or t
  misc_feature (466)..(466): n is a, c, g, or t
  misc_feature (475)..(475): n is a, c, g, or t
  misc_feature (482)..(482): n is a, c, g, or t
tgggatggatagangcattttatttctctggaaatactccctgcctggcaagctcagagggctcaccccctggagatgcaaattctgcctaacccctcccacagtcttttgagcagagatcctctcctctgtcccttagcagtgcagggcccaatctcacccagttctcccttcactgcaagcattgcttccccctcagtaaactacccaaacctcatttgttagcttgtttatgaagtaaatatcagggacatgaaataaaacgtctggcagcaacttccctagggacatcagtgactgtcctcaaactactctcaaaagggagctgtacatttccctaaagaaccattccaatgtaaggatggcaaagtatccttggcaggaaaattaaaccttaaccacaagtgcctaggggccttgggttattttaggacntggattcaaaaacaggcagttaccagggcanttttttgtnttagggngttttattcaggagtggtggttta

SEQ ID NO: 463385 - DNA, 451 bp, Homo Sapiens
  misc_feature (15)..(15): n is a, c, g, or t
  misc_feature (70)..(70): n is a, c, g, or t
  misc_feature (77)..(77): n is a, c, g, or t
  misc_feature (103)..(103): n is a, c, g, or t
caatgctgaacaaangatgaataggacttgtcaaaagctggtgctgtggcctctgccgtcaaccccaagnacttgcnaaagggcctgggagctgcccgccccnaccgtgccccacacccaccttggaagattggcagcttccagggtggccttcttgcccctgggcatttggtggggcacagaactgaggtcaggggacaagggttaaatgtgccagcaggggcagggggcaggcacccctctgtcctgtctacaaatgctgtggctcaatgtgctgtcacgggcagcacgtggcaaacgcgcagtgctcagcctgctgcaccacggatgaggggagcttccacaaggaacctgacggggtggttctctggagcttcaaagctgctcttggcccagcacagaccttactgcgttagcatcttcctcaagtcactcggcggattcctggaag

SEQ ID NO: 463386 - DNA, 427 bp, Homo Sapiens
  misc_feature (291)..(291): n is a, c, g, or t
  misc_feature (303)..(303): n is a, c, g, or t
  misc_feature (348)..(348): n is a, c, g, or t
  misc_feature (354)..(354): n is a, c, g, or t
taaataataatttaatattttctttttaaattatatcgggggtggtcatatacattaatctggtgatttgtatatgtgtttgaaatttttgcattttgtttaaaaaataatatggtaccttggtccctaaaaacagtctgcacttagaagtttatatttactcagtgtttcagaagtggagaacattatcttttatttataaaaatattttgtccttttttaaatgttttgtgtttctctacaggttacaacagttgcttcagttgcctgttttaggtgtttgcacttatnttatttcttctngaaagaatttttatttgcttttgtggtagagattatatgtaattntttttncagtcatataatgggtgtgctgtcaacttaaaacactgacaggtaaaataggaattgtgacactgtagtttga

SEQ ID NO: 463387 - DNA, 467 bp, Homo Sapiens
  misc_feature (109)..(109): n is a, c, g, or t
  misc_feature (172)..(172): n is a, c, g, or t
  misc_feature (365)..(365): n is a, c, g, or t
  misc_feature (378)..(378): n is a, c, g, or t
  misc_feature (422)..(422): n is a, c, g, or t
  misc_feature (435)..(435): n is a, c, g, or t
  misc_feature (444)..(444): n is a, c, g, or t
gtcataataaactgattttattagaaaaaggcactttaatgccaactgctggaaacacgcatagtaaatacatttgcacaaccaaacacagtgccctccagggggcagngggagaagaagagtaggagagggtgatagttgttggcttaacaaagaagagaagagcgaggancggaccaggggaggtagttaggtcaagtggatggttctgtacccaggacacagcaaaggtcctcaggcactgattcacattacccaaagttcaccagataataggagttgtttccgtgggctgacatttcttaggccttgccctcaaacttgggcagggagggaggcaagctcgtttaaagaagggagagggnaggagatccaggncaattggcctaggggttagctttgagagagattaggttgacccntcctcggaaaganggaaggggnaagcagggaaccacgaagagaga

SEQ ID NO: 463388 - DNA, 499 bp, Homo Sapiens
tgtgtaaaactataaaaggctcctaccccatcacccaatcattttggggaggaaaaatgccaattgtaactttaatccagtgccagccgtgcctgaaggcccggagccagcaaacagccagaaagttggaaccagaagctgtgcccaggctaggggctgcaccagaagggcccttgccaagccccagggaagggaatgccagatcagtgttattcaaagtggatattaaacacctcccagggaaaacacagatacagttcttaaaaggaccatagtcccttgggggtacaagctttgagctgaaaaggcaaaaaagaatgagtcacgtgctgaatcaggtagccgagggactggttaggaactcagttgttcctgccatgtgttagcagccttatttgtaaagacagtgtgttgttgaggtgtgacccagagagtacatggctcgttctcaagagagagtgtaggctattaagggggtgggcagcagccagggggatgc

SEQ ID NO: 463389 - DNA, 329 bp, Homo Sapiens
cccctctcctttccagggtatgtctccactgagtgacagaaaaataaacctcttactttcagcagtaaaacgtaataacaaggaacaacaccaggatctctgtttccctggtgtcttcggacacatgaaaacaaatcacaggagatacactggtttggttcaagtgcatccagcgcaaccgcgccggtaatcagtgatggtggactgtatcagctgaaatggtgcaatagccaaccaggaacatcagccctgagcttctagtgacatcggctgccatcctggagaatccagagggctgttttctctctctcctgtccagttgtctgtag

SEQ ID NO: 463390 - DNA, 439 bp, Homo Sapiens
  misc_feature (205)..(368): n is a, c, g, or t
  misc_feature (394)..(394): n is a, c, g, or t
  misc_feature (415)..(415): n is a, c, g, or t
  misc_feature (424)..(424): n is a, c, g, or t
tgtctttctcaatagccattcatgctttatcttttgctgctctaccatgtgctccagcatgagatcaaatcaccagcaggttacaaggcctcagcccagggattggtagatatatgttctggcccattgttttataaagggctcaagagaccaaagcttgttgcctacttaccttgacaactctaaagtagctctgtgaagtagnnnnnnnnnnnnnnnnnnnnnnnnnnnnnnnnnnnnnnnnnnnnnnnnnnnnnnnnnnnnnnnnnnnnnnnnnnnnnnnnnnnnnnnnnnnnnnnnnnnnnnnnnnnnnnnnnnnnnnnnnnnnnnnnnnnnnnnnnnnnnnnnnnnnnnnnnnnnnnnnnnnntacaggaaagggtactgttagggcanttgtggggttttttttgattnaggctattncggggggtactgtag

SEQ ID NO: 463391 - DNA, 503 bp, Homo Sapiens
  misc_feature (12)..(12): n is a, c, g, or t
  misc_feature (417)..(417): n is a, c, g, or t
aggtttcccccnaatcccttccacaagctatgtttaaagccttcctattcattcattctatagttgaaccctaatccttgaaaagggaggccaagatggccaagtttgtttgtggtcagtacatggataatgactacagtaaggccctgtatcctaagggaggatggttttccttagtcaccaccccaaatggaagtaatgtgcatattcactcatcatgccatgtttccttagtaacagaaaagccaaattaaatattcaaggatatgaacagaggcttcacccaaccttaaacagaacacttccaagcacttttcacttggattggccaactttgagattcggttgtcagctggaaaattctctttttctaaaaagtcaaattgacgtgtcttatttttttctgtgcatggttanccttggcaacattgtctgacagttgctttgtaaatgtttcagaaggaaaaaacagtacaggcaaaggactgaagatggctattttt

SEQ ID NO: 463392 - DNA, 733 bp, Homo Sapiens
  misc_feature (416)..(416): n is a, c, g, or t
  misc_feature (623)..(623): n is a, c, g, or t
ctcctaacatggcaactcaggacattttaatccttttttttgttgttgggcttctgataggatccattttattgattccataaatatttagtagactttagacatattaatacattgtagtttgagttaatttgcattaaattctgtttttttccccttaggtatagattgtctgttggaaaaatatattgcttgtggatttcttggggagtgggaaggtgaattatacctgttgtctctacagtccactaccttccacaccctagggcagtggtccccaaccttcttggcaccagggatcagtttcctggaagacaatttttctgtggatggtgtggggatggttttgggatggaactgttccacctcagatcatcaggcattagttaggctctcataacgagtgcgcagcctangatccctcacatgcacagttcacagtagggtttgcgctgctatgagaatctaaggctgccactgatctgacaggaggcagaactcaggtggcaatgcttactggcccactgctcacctcttgctgtgcggcctggttcctaataggccatggacccccacagacgggtactagtctgcagcctgtggaccccagccctaggggcctngccattctggagtgagttattagcatggaagaaggaggaagatcttgggatcaaacgtgggtgatggtacttcaggagacccaagatgaggggttaggggatgggaacca

SEQ ID NO: 463393 - DNA, 533 bp, Homo Sapiens
  misc_feature (448)..(448): n is a, c, g, or t
  misc_feature (463)..(463): n is a, c, g, or t
  misc_feature (470)..(470): n is a, c, g, or t
cagatgcctgtccgtgagctcagcatgcataggtggggtagttggttgatgagcttttctttaggagaacagattttgagctatctttttttgttggaaccctgcacacaactgtcattatgtagatggttttcctctcaggtggttggttttctccagagaagaacccttgaatctcctgcctgtggaggtggacgtgtggttggtgttctgggtgccccttgccctgagctctgttctccatggtgcctgtttcctggggtctgcagccccttctcagtttctctgaagagtaaacctctcccctgcttggggagggagcatgggggttacgtagtagcctgggcttgcataacatggggcttagtagctcagttttccatcatgaaccagagcctccatctttcatgggttcctgtggcctccgagggctggggctactggggtntttgtcagtccaganggctttnttctcaagttttcctccacagtggatatgaatgtttgcaacttaacattcaattacaacggtt

SEQ ID NO: 463394 - DNA, 562 bp, Homo Sapiens
  misc_feature (265)..(265): n is a, c, g, or t
  misc_feature (442)..(442): n is a, c, g, or t
  misc_feature (492)..(492): n is a, c, g, or t
  misc_feature (500)..(500): n is a, c, g, or t
aaatcataattaaatatatttaattctcaaacctttaggaaatgtaaaaagagtcacataataataaacacatatcataatgtgaataatatcatacgggctgctataaaggtctgtggtcagcatccctctgaggtaggcattattatcttcattttatggttgaggaaattggggcttgaagaggttaagtaatttcccacaatcacacaagtaggtagtggcacgctagcatcccatttctgttctatgggactgcaaagcnccgatgctcacactcattccactataccttctcccttgagttcaaaaacttacaggagttctaggacttttcaaactcacggatactaatccaaggaacgattttaagtattaaggagtttcctctggcttcattctgtttccaaaggaaaatatacgtcgcatgaactctggtccntctcaggctggaactcccgagtgaaggctctcctcagcgtgactcagggncctttccncagggcttatctgtcggacgggcttgccttccggtcggttcttcagcttggcaccgtcgggt

SEQ ID NO: 463395 - DNA, 462 bp, Homo Sapiens
  misc_feature (21)..(21): n is a, c, g, or t
  misc_feature (36)..(36): n is a, c, g, or t
  misc_feature (75)..(75): n is a, c, g, or t
  misc_feature (86)..(86): n is a, c, g, or t
ggcccaaccctgtggcccatnccccaaactgtcctnaattaaatatggtccttataaataaatcctgtaacaggnacaagtccccnacccaacatggtgttccttccttcatgaagtgtccttaactgttccttggcccttcactcattggttccccatgcagttttggcagcaacttgtcaagttacatgaactaaccagttgagatttgactaaggtagtattaactatatagatcaatctgaggtaaaatgacatcattatgacactgagtctttctatccacaatatggtagatgtccagattaatttcagattacctatatctttcaataaagttttcaaattttatctaaagtcttacatatcttttataaaatttaatccttataagccttatagtccttttagtctctgttgacattaatgttatagtttaagagatatttccttttttcttgt

SEQ ID NO: 463396 - DNA, 482 bp, Homo Sapiens
  misc_feature (11)..(11): n is a, c, g, or t
atcctcaaggnacctctgggaaaaaaacaaactgcattttgcaaagttttccccattttcccccggaaaatgttaatgcctcctaatcaaacctggtgcctccagctgccagggaaagtgtttgtggtgtcccaagcaagtggctgctgccccagagagagaaactacttgcacctcccattcactcaatccccatcccacatcttttccccagggtaccccaggctcataaactccagcagatctccacccaggcatgctggggtctatgttataaaaggcagcatgtggtagaaaggggctaaaatgagagttagcaggcttcagttgagtccatctctgccacttccaagtcgggtaactgggtaagctagttgacgctaaaaccctggcaacataatgcagggtgcaggtgaagaacaaatgcaatggagctcaacaaagggctttgtgagctcgagagcatcaattcgatgtcaccc

SEQ ID NO: 463397 - DNA, 176 bp, Homo Sapiens
caagttgtattatatttttattgttggcttaaaaaaattacttctttaacctccttaatttgtcagtttgtgggaggtgaatctcaatggcatcaaaagttatagtcttcttacacttgttaaaaataaagtgtttaaacaagtttgtttccattcacaaacttactcccaactac

SEQ ID NO: 463398 - DNA, 462 bp, Homo Sapiens
  misc_feature (12)..(12): n is a, c, g, or t
  misc_feature (42)..(42): n is a, c, g, or t
  misc_feature (59)..(59): n is a, c, g, or t
  misc_feature (86)..(86): n is a, c, g, or t
  misc_feature (97)..(97): n is a, c, g, or t
  misc_feature (125)..(125): n is a, c, g, or t
  misc_feature (147)..(147): n is a, c, g, or t
  misc_feature (151)..(151): n is a, c, g, or t
  misc_feature (155)..(155): n is a, c, g, or t
  misc_feature (161)..(161): n is a, c, g, or t
  misc_feature (186)..(187): n is a, c, g, or t
  misc_feature (192)..(192): n is a, c, g, or t
ctaggagaaatnaaaaatgcaaaaggaaaaactagcttaagntgctatagtgatgaagnagacaaaccagctcattactttaaaanagattcagtgnaaaccacaattgactaagcttgaatttntcttccttttcctagctgactnaaangganacacanaaaagcctccagctagagtcactgnngtgtnttataattaatcattaacaaaacatttatggaaattcaaatggttttaaaattacttgaacctgtttctcttaatagggtttgatttattcatcagaaatctgatttccagctgtactctctcacttttcaggaactatttataaaataaccaagagttctaccacaagcacagaacccccagaaaaggaaaaaggcctcagaacaactcttaatattcatacgttaacactcttgccacttactcatcagatcatattttttcacttaa

SEQ ID NO: 463399 - DNA, 195 bp, Homo Sapiens
agaaaatatgttttttaatattttatcttctctttgcatttataacataattcacttcaacaatcacagactcctttttttccaatgccacagactgttacaaatgaaagctggtactgctgcttatccaaaatatacaagacaattgatgttttatataaaaccactttataagttcatttgttcccaaaaacc

SEQ ID NO: 463400 - DNA, 474 bp, Homo Sapiens
  misc_feature (37)..(37): n is a, c, g, or t
  misc_feature (102)..(102): n is a, c, g, or t
  misc_feature (185)..(185): n is a, c, g, or t
aaattttaaactgccctgtggaaaaaacgtgcctcanaatatcccctcaacaatagctgttaattaaactagctgtgtgaaattagggccatgttgccttanccctcagtgagtcctcattttcccttatctgtaaaaatggggttccaggtaacaggtgcaggaatcctcatttattttgtgcnccatgcataccatgcattgacacatacccatgctaatcgtcagaaaaccctccaagtgagactaacagggtaaacaactcagatgacgcaagttcccctaagccatttaaagacattatcctaagagtactggggggccaccaaagtgtttcaaacaagccagtgatttccctgggtttgtatttaagatggattctcctggttacattgtggtggggccaaagaattgttgagagaatactgtggtaaacccaggcaagagctgatgagaacttgaactaggggagtg

SEQ ID NO: 463401 - DNA, 427 bp, Homo Sapiens
  misc_feature (386)..(386): n is a, c, g, or t
tattttctctcatctaaacaggaaaggctattcaagggctaacttcgaataaatgttatatcacaaaatgaagtaggagaaaagaattattactttggttcaagtcccaatcatcaggtgtatctaagctgtttgtgaactcaggattcatggtctaggtgatttatctttctctttctccattcccaggattgacaagaaaatagacagaattagccacaagttctatcttatcccctcttttatgcctgcaggaggagttctatggaatgcgtaaatgttagacctctagctacaattcttttctgcacttttcactctcagctgcatgtgaaagaaagtgacaaaaagaagctagtaatgttgtaggcagtaaacaaacaaanaaaaagttgctttttgttgttgggagtaatgaagaaaacct

SEQ ID NO: 463402 - DNA, 434 bp, Homo Sapiens
  misc_feature (336)..(336): n is a, c, g, or t
ttttttttactttaagggcaaacaaactctcccttttccaattcctttcctgttatgaaaggagatggttatgaaaatggcttatgttactgcctctagagccatgctgaccaattggccaagcatgcaacacttagaatagatgctcagagataataaaagcccatctctccaagttctatgtgacaactttgtccttagttatggcaatagagtggaaagaaaataataaatgtttatcaaaccagatcacatctatagctgtaaaataggctatgtgacatcttttttttaactaccacaagtggcaaaatatcactggattaggatacatgnccagaatttttattatggacacatttaggtcttatttctggaaaagctatgtgtggggtggaataaacatcttgctttccatttatgtatgttatttt

SEQ ID NO: 463403 - DNA, 596 bp, Homo Sapiens
  misc_feature (22)..(22): n is a, c, g, or t
  misc_feature (67)..(67): n is a, c, g, or t
  misc_feature (270)..(270): n is a, c, g, or t
  misc_feature (521)..(521): n is a, c, g, or t
  misc_feature (529)..(529): n is a, c, g, or t
  misc_feature (560)..(560): n is a, c, g, or t
ctcttacaatgggaaactaagnaacaaccttgcttaggtaccttgtctaagtggaaagcttatgtanaatctgggtcttgggccccaacctaaagcttcctctccttctgaggcactgcacgtgggacacagctgtgcttccgcagctgggctagtggacaggctgtgcaccccttacggcaacatggccctgggacggctcacatcaggggagaggaagccattcctttctccaatcgagaccccaagcagaggttctcccactttgcnaagccatatgccctggacactggcagcactgccctggaggagacagctggacccaaagactgaaagccaggggccctgggtcttccacagctgaacctgtgtgatccctgggcaagcccacttgacccagctgagtctgtcttcttgtccataaaatggggagagccccttcttcatggggctgttgagaggatggacagccaggcagaatggaggatgctttatgccctagcaagtttgttctgcttttnccaaaggncaggaccattgtgtttgcacagcttgatctncacagccagcagcccagaagctgggtcactatcacc

SEQ ID NO: 463404 - DNA, 559 bp, Homo Sapiens
  misc_feature (538)..(538): n is a, c, g, or t
gctgcagctccggtggaaataataagatataaaccacgaggttgttatttgcatagaaatagcatggagccccaggcagcaagggagaaggacacagggatgatttgtctaaaattttaatgaaaacttttgctgaggcagagatttttaaaaactttctttctccctgcttttccccttccttcccctaccccccaaaccccatcattgattttacttaacatggttcagtttgaagagaaaaggttgacactccacatatcatactcccataatgcagcaacctgtaaattgtttcttcctttaatagatatgaagctgaagagacatgcattttcaacttaatacattgcatgtgtgcgcctggctttatgggctatactccatcttgggcatacacatgatgttgcctgtcattagcctgtttttaattagtttacaccttcctatcttttgcttccaaagactcttactttttaaaggattcttttatagccaacagtggaaccttcatataaataaatatttctggtgtttnctgtttttacctttggtggtt

SEQ ID NO: 463405 - DNA, 419 bp, Homo Sapiens
  misc_feature (375)..(375): n is a, c, g, or t
  misc_feature (385)..(385): n is a, c, g, or t
  misc_feature (394)..(394): n is a, c, g, or t
  misc_feature (403)..(403): n is a, c, g, or t
ggtccttgctgcaactgcaagccactgaagacaggtgtgtctgatcccaacgtggagcccacagtaacagcaagcagcgactgttgcttgtgcaggaggccctgtgtgccacatgttgctcttcactactgatcagggctgtttacgtgggtcccacacagctgctctgtgactagggaacttgacgtctccatttttcaactgaaaacacagaagtacaaaggggttcaccaccttgtccacggttgccctgcttctaactggtcatgttggaataaaaacaagcaactgtcatccgggatattaaccacgcaggctgtggtgttgcaaagcagggggagcacggagcagggagcattaccaccctgcttgagnttcagctcantcacaagtnggcaggggntaggggttgcagtgca

SEQ ID NO: 463406 - DNA, 511 bp, Homo Sapiens
  misc_feature (25)..(25): n is a, c, g, or t
  misc_feature (34)..(34): n is a, c, g, or t
  misc_feature (358)..(358): n is a, c, g, or t
gacctacagaaatacaccccggacnggacacagngcccctgatcctagtcaaatcttaggtaacacatccccccaggtcagatccgacataatttacagtcacttgaattatagagaatgttaataatttcaatatatatcaatgccatatattctgcctgaatatagttgggatacttgtcccctcccaatctcatattgaaatgtaatccccaatgttgaaggttggccctaatagaaggtgtttgggtcctgcgggtggatccctcatggcttggtgctgtccttgcagtaatgagtgagttttcacaaaatctggttgtttgaaggtgtgtggcacctccctgctctcttgctncctgtcgccatgtgacatctctgctcccacttagcctttcaccatgagtaaagctccctgagggctccccagaagccgagcagacactggtgccatgcttacacagcctgcagaactgtgagccacttaaacctcttttatttataaattacc

SEQ ID NO: 463407 - DNA, 1096 bp, Homo Sapiens
  misc_feature (647)..(739): n is a, c, g, or t
aatttcaaaaacatttttattagttctttaatcaaatgagaaaaaaggttaagcagaaaaagatgaacccacatttgtaaaaagcgatttcctccaaattttgaagaaaaaaatttttattctaagaaatacatattcgttatagaaaatttggaaaatacagagattagagaaaatgtgaatttcccaggaatccaacaacacacagataaccttacagttttactattttctatatacatgtgtatttttaaacaatttgctcttttcttcttccccaccctacctcccaaaaaagtggggaaggcagctcctggtgggccacacctgagcctggcctctccaccatttccatcctcaccaccggcctcccttccgctgagctgtggcccatttcctcgcttacgtcccagacttttctataaacacacaatccaccccatggcatgccaaggctgctctgctcccagaactgccaatgcccagcgaaacgggaggactcaaagtcaactgccaagctaccttcttcactccagagccaggatccagggaacactgaagatttatctcagctgaccaacaacggagcagtaactaacacctcttaaaatgtatatagcactttaagtttaaaaagtcctcccacnnnnnnnnnnnnnnnnnnnnnnnnnnnnnnnnnnnnnnnnnnnnnnnnnnnnnnnnnnnnnnnnnnnnnnnnnnnnnnnnnnnnnnnnnnnnnaaagcaaaactagtgaatggtagagcttggatgtggagccataaattgactccaaggtcagagctcttttaacatagccattattagcaaactatttttaatctgaccactggaaattaagagtcagaaggatctttaataaatcctataatctactagccttttagtagtcacatgtaaggaacataaggcccggaaaaactagatgactgaccaaagtcgccagctagtaagtgacgaagtaggtctgaaggcacaatcttcagactcccaggccagtgctcactccagtcgtccctagagagcgtgagatggtctgtaataggtgttctctcatcccggtgtcttctgcttagc

SEQ ID NO: 463408 - DNA, 420 bp, Homo Sapiens
  misc_feature (328)..(328): n is a, c, g, or t
  misc_feature (404)..(404): n is a, c, g, or t
tccctgagttctgtattatcccaactaatgatctaattttaatgataatacaatgataaattatccaagtaaatgaaggcagagaggtgacttaataattaattaattgtgtaatacataaaaatggactattcttcctcattgtgattcactttatcactccctgaagcaatacaatctttccgaagatgtaaaccatggtgccaaaccatgtcattgcccagtctagttattatctcactctcattcttcttacagctttgttgggaaggaaagtgtccatgttgaccagaggccttcattatgggccttctctcctctcctgggnttctatggatactggcactttcttggggatttctttcttaaatctctgtatggagggccttgcccgggcaataccnttcttcacatccaact

SEQ ID NO: 463409 - DNA, 460 bp, Homo Sapiens
  misc_feature (214)..(214): n is a, c, g, or t
  misc_feature (382)..(382): n is a, c, g, or t
  misc_feature (442)..(442): n is a, c, g, or t
cgacattattgactattttaaaacaaacatacagggtaatcttcccccagcaccgcccccagcaagtcaccagcgagcctaatcatgttttggttcttttacacggaagtattttacatgaatggcaaacttacgttggatcagatggaaaaactttactagaaggagggctgtgtccaaactcttacagcagtgtagccagtaagtgattctnttccttgcatttgccaggggaaagagcatacatcagtgccttttacctgagcagcatgtgtcagggcacgctcttaacctctaattactttcttctaagctggtaggagtaggagtcatggggaagagtatgggagtcaggttggggtccaatcctggggcttgagtngaccactttacaagtttgttattatcttcctcttgaggccttgctttttcctccttgggnaaagttgagggataatta

SEQ ID NO: 463410 - DNA, 470 bp, Homo Sapiens
  misc_feature (430)..(430): n is a, c, g, or t
  misc_feature (453)..(453): n is a, c, g, or t
gattttaagtcctttaatttattttgaatatcagtaattacattttcaaaatatgatataatttaaaggtatcagtaccataaatctgtatcttacagtaggaaatataagagtaaacagcctatatacactttgtactactgacacaattttatgtatacaactctatacagtatctactaatctccagaaaacccacctacaatccatctgtctggactgtgggcaagtggttctttctgagtcagggtctcactctgtcacccaggttgcactgcagtagtgcaatcatggctcactgtagccttgacctcctggggctcaagtaatcctcccatctttgcctcctgagtagctggggactacaggtacacaccaccatgttctgggatacattttgtatttttggtaggacaccgggttttcaccntgtttgcccgggtgggctcaaantcccgggctcaagtgat

SEQ ID NO: 463411 - DNA, 592 bp, Homo Sapiens
  misc_feature (209)..(499): n is a, c, g, or t
  misc_feature (507)..(507): n is a, c, g, or t
gtaaccattttaaacaaagccgtctgtagaggatcctttccccatttggaatctctagcgttgtcactcatggctggcatggaacaaagttaaatgtcttcagcgtaataaatatctccgactttgtcatcatacatgtacatttccaccatgtgcagctgaaaagtgagaatatttttattttggtttatttgtaaaacttgtccacnnnnnnnnnnnnnnnnnnnnnnnnnnnnnnnnnnnnnnnnnnnnnnnnnnnnnnnnnnnnnnnnnnnnnnnnnnnnnnnnnnnnnnnnnnnnnnnnnnnnnnnnnnnnnnnnnnnnnnnnnnnnnnnnnnnnnnnnnnnnnnnnnnnnnnnnnnnnnnnnnnnnnnnnnnnnnnnnnnnnnnnnnnnnnnnnnnnnnnnnnnnnnnnnnnnnnnnnnnnnnnnnnnnnnnnnnnnnnnnnnnnnnnnnnnnnnnnnnnnnnnnnnnnnnnnnnnnnnnnnnnnnnnnnnnnccacttgnccacagtccagacagatggattgtaggtggggtttctggagattagtagatactgtatagagttgtatcataaattgtgtcagta

SEQ ID NO: 463412 - DNA, 423 bp, Homo Sapiens
  misc_feature (178)..(178): n is a, c, g, or t
  misc_feature (264)..(264): n is a, c, g, or t
  misc_feature (315)..(315): n is a, c, g, or t
agaaattgtggaaaacctggttttaattataagaaggcccattttctgaggaacagtgttctctgccctgggaaataaggtcccagattcctcaaactcccagggacagcccaaggtctgtcactctacccagtaaaacacattgcgtaaatctcccatccatcaagggtataagttntgcgcccttcacaaaggggagagagctcggaagaaggtacacaacgttttataaatagcttcagctaccttctccggcccacatcntcactcacgttaaataaaataatttccccggtgagatgttgcagctgctgncccactgagccttgctgtgagctttacaatacaatcttaatagtttctgtgaataaattattcaatttttgtttgtttagaatatcctcaccccttcactatatacgc

SEQ ID NO: 463413 - DNA, 563 bp, Homo Sapiens
  misc_feature (404)..(404): n is a, c, g, or t
  misc_feature (420)..(420): n is a, c, g, or t
  misc_feature (490)..(490): n is a, c, g, or t
  misc_feature (523)..(523): n is a, c, g, or t
  misc_feature (539)..(539): n is a, c, g, or t
  misc_feature (547)..(547): n is a, c, g, or t
ctgttttaggctcatctgtttataggatgggatggctctgttcatgggataatttatccatccttcttgtttgcctttctatgtgcaggccgttcataaaattgaattgtttgcctctgtccacacttcatagtaggtgctgggagggatttgaaaagtttgctgggtgacatttcattggaagtgaaaaatgacctgggggtggagccccgggggtgtgtgtgtcaaaccactgaaagggatgggcaactttgggctctgtagggggctaattcatacacagataaatgatttaattgtaattagggcaggcaatttaaaatgacactaataaccctcagaccatctttatgttcgctaacaaaaagattcctgtttgtctttatttcccctaagttatgggnatctttttctataaantatataaaacctttgccagatgattcattggttaagcctatactttttaagccgtaattgattgggtttnattaggagaagggagtatatagcattgtcactncacaccctcaaaattnctccatgnaccttcacattgtggg

SEQ ID NO: 463414 - DNA, 435 bp, Homo Sapiens
  misc_feature (210)..(210): n is a, c, g, or t
  misc_feature (232)..(232): n is a, c, g, or t
  misc_feature (250)..(250): n is a, c, g, or t
  misc_feature (255)..(255): n is a, c, g, or t
  misc_feature (302)..(302): n is a, c, g, or t
  misc_feature (305)..(305): n is a, c, g, or t
  misc_feature (359)..(359): n is a, c, g, or t
  misc_feature (367)..(367): n is a, c, g, or t
  misc_feature (386)..(386): n is a, c, g, or t
caccattatttgttaattttattttgatttttaaaaggcattattcagtgtacaattaacaaagaaatcagttttctactctactgtacttaggatgcttcaaaaacatcaggtgaaatgatctatgctttaagagccagaaaactcaggcctcagcaactaaaacagagatttccaaaattgtaattacaaatcagatggtaagcctantttcatgcccctaatattcagntttgtggacactgcaagnggaantatcatttgcttccaaatatctggtcttgaatattgctgcagttaanggntctcgctaaggttaaacaacaaacccaaaccacttggggtcttcacagtttggnctgctttngcaagttgaagaggtagtncggttttcagggatgctgtgggggttggcaaatgttttgtttttgaggt

SEQ ID NO: 463415 - DNA, 550 bp, Homo Sapiens
  misc_feature (33)..(33): n is a, c, g, or t
  misc_feature (59)..(59): n is a, c, g, or t
  misc_feature (91)..(104): n is a, c, g, or t
aacaataccctaagaactaggttgggggtgggnagaactgcaagaagctacaagattgnagttaagtcaaaatctaagtaataatatgttnnnnnnnnnnnnnngtctttcacagaaatggtgagtgtcaacgatcacccaggttggaggcaaggcttgccacagacggggagaaaggaatcccaccatgtttttctctcccaccttttctgtttttacctctcactacaagggtcagctgaagctgaagaattgtccacaattgtctgggcagtgcatgtgtatcttccagcatgttttcactgcgcatttcggattagtaattccccattggaatccagcataaaattcctctggtagtgaatattctctttgttaaaatcgatcacatagccattgaaggaccaaacaaatgtgagatccaaggcaggatcaaaggacgcagcacactgcatggtggcgttttctccaactgtgatatcggcattaattggggccaatataattcgcgtaggatctgtgataacaagggttccagtgctattagctt

SEQ ID NO: 463416 - DNA, 580 bp, Homo Sapiens
  misc_feature (158)..(168): n is a, c, g, or t
  misc_feature (355)..(477): n is a, c, g, or t
  misc_feature (522)..(522): n is a, c, g, or t
  misc_feature (529)..(529): n is a, c, g, or t
taagttagtgttcctggactttggggcatttccaaacaccctgatgtgttgtactggaacaatttacaactggatgtagcccacagaagggacaagaagtggctaacactgggacgtcccctgaaatttttaagaaataaatatatgtatcatccttnnnnnnnnnnngaggaatgaccatacatacttatggatacacttcaataacatcaacaatgagaacttatttacgcctattgatacaactgagaaacaagtttacataactgaacacacatgaatagtaccctaaaaatcacatgatgccatgacactggatgacgtccagcactgaagatgtaggagtgaggcttgnnnnnnnnnnnnnnnnnnnnnnnnnnnnnnnnnnnnnnnnnnnnnnnnnnnnnnnnnnnnnnnnnnnnnnnnnnnnnnnnnnnnnnnnnnnnnnnnnnnnnnnnnnnnnnnnnnnnnnnnnnnttcttttaaataaataaataaactagggccttgttgccaccacanctggggntagttttttgtattttttagttacagaagggttttcacctgtttcaccaca

SEQ ID NO: 463417 - DNA, 519 bp, Homo Sapiens
  misc_feature (17)..(17): n is a, c, g, or t
  misc_feature (26)..(26): n is a, c, g, or t
  misc_feature (64)..(64): n is a, c, g, or t
  misc_feature (79)..(79): n is a, c, g, or t
  misc_feature (85)..(85): n is a, c, g, or t
  misc_feature (234)..(234): n is a, c, g, or t
atgtccctcttgccttnccccttttnaagtaaacttaattccatcaaaatccatctggtaaagnctggactccccaacnggctcnaagcccttaaatttgggcctaacattttcaagcccggccgtggcttcctcctattaaaagggtaaatggcttccaggttaaacatcaaagctggacctcctaagtcaagaagatcgggtatgaggcaaaatcatatggtgcttgacgtnactggggcccccccagcatggtctcccagtaaaaagacagtttctaagaattcaggctttgaattcatatccttctctgctaaataccacagcaattcagacccctcttgctgaaggtgagtactaagacgattgcctctgtaatctggacactcaatgccaactgtaccatcgagggtatatagttccttaaggaggtcaaacttagttctctcctgagctaacctgacaaaccctggactgagagcgaaatcaattaactctactggaaagtactccaaaaat

SEQ ID NO: 463418 - DNA, 550 bp, Homo Sapiens
  misc_feature (15)..(15): n is a, c, g, or t
  misc_feature (514)..(514): n is a, c, g, or t
  misc_feature (527)..(527): n is a, c, g, or t
  misc_feature (539)..(539): n is a, c, g, or t
ttaaggcatttaaancaacctttcaagactccaagtggagaggatttacttaccataggataaatcatactgcatttaatctggacatggcacccctcaaactgtagtcaataattgaattaaaagttggatccctcagggcattagcgtctgaaattttaggatacttattggtgattaaaatatatagttattggatgaacgaagcctcacatatgttaacaacaaaatcaatgtttgttgtctcttatgaaatacaaggacaatgatttatttctcaggaagtcagttggaacatggggtaaggtacatgggtctatattgagaggtgaaaatccttcccgtggcataggattctgggactttgagtgaaaaaaacagatgggcaggaagatcggacacataggtaccagagaacggatatgacactgcaaaagttccctgagtgttacctggaaagagcttagttattttttttgctcaatagtcctttaaggcatgtgtccttaaggtnactgttacacaanatctgtctaccngtgccaagctt

SEQ ID NO: 463419 - DNA, 452 bp, Homo Sapiens
  misc_feature (26)..(26): n is a, c, g, or t
  misc_feature (48)..(48): n is a, c, g, or t
  misc_feature (79)..(79): n is a, c, g, or t
ccttgatctaagggatttttatcganaattgggacattagtttgccantccaccccctactgaatatttggcaagatgnaacccttgtcagaaagattaaactttctgataattaagaccttggttgccagctgagaggaagctcaagagcttgcagtctttgccaagggctatcaaaggaagagcccccaggaccttctgagggagcatggatgagcaagtcaaaagaagtgacagcaaggccctctggctaagaaaaattttggagtggcaaggagctcacacgcaaaatcagtagaggctagaactcagctcctttcaggtggctggcacggccttagccattctatggaggaaaacactgaacaagagagaaaggaggaaagggcatgaaccaggagcccccacagccatggaagccaagccaacccgtagtcccagctagtggggag

SEQ ID NO: 463420 - DNA, 517 bp, Homo Sapiens
  misc_feature (61)..(61): n is a, c, g, or t
  misc_feature (423)..(423): n is a, c, g, or t
agctgttcatgagggcgtacctggaggtggacctggcccagccactgagcactcacctctncctggccttcagccagaaagcccagacacgagacctctgaccacccgacggagggagccagcaacagtgaggccaacagcgcagatactaatatacagaatgcagataatgccaccaaagcagacgaggcctgtgcccctgatactgaatcaaatatggctgagaagcaagcaccagctgaagaccaagtggctgcgagccccctgggaaccccccgtccctcggtcttcaagctcggaatccccagtggtatacctgaaggatgttgtgtgctacctgtccctgctggagacggggaggcctcaggataagctggagttcatgtttcgcctctatgattcagatgagaacggtctcctggnccaagcggagatgggttgcattgtcaaccaaatgcttgcatatttgcccagttacctgggagttgggattccacagaggttgagggctattttt

SEQ ID NO: 463421 - DNA, 617 bp, Homo Sapiens
  misc_feature (51)..(51): n is a, c, g, or t
  misc_feature (512)..(512): n is a, c, g, or t
agggagaaagctaaaaataacttgcccaagatgacacagctagcacagggncagtgcttgagtaacttcccgaggttacacaggtagtgagaggtggaattgctaggttgttcagcaccacacttttctcccctctacctcaatggttcctggctctgtgtgggtgtctcctagcagataaaatggccctcttccatttacatttgtcttatccttatatcttcaaaatggttcgtaagacaaaaagagcctgcccttgatagactgcctcccactgcagcaagtctagcactgagcagccctaagactagaatgccaacttcgtagagggaggatagataggaaaggctcctgagacctggggcctgggagaaggaagtagtaggttcaagattaagaggaggtgagtgatacgtgtggctcagacataaaatgtaatgcccaccaaaaaagtcagtcattcactctaggtaatatttactgaaatggatttttaagattcacagtgatgnaggaaacccgtgaaggaaccaaaatattcaaacttgttaaatgaaagacagggtccggccgggccagtgtggtagttaggcaagtgaggctaagttattgtaatt

SEQ ID NO: 463422 - DNA, 894 bp, Homo Sapiens
  misc_feature (367)..(367): n is a, c, g, or t
  misc_feature (841)..(841): n is a, c, g, or t
tttggagtttgaaaataaccttcctatgacaggaagtgggcttttgctattagttgcccaactcttagaggatcccagcttgtgtctttagacaaaactgacagcctttggaacgatcgcatggtggcgctgccttccagccaacagttctggctcagcagcagaatttatccagctatgtttgtagaatttttttaagatcctactgcattttgctcttaagcttttataaaaatttgacgagaaaatgtaaaaatgatacttggcaataagacatttagttttcatgcacctaataaaaatgtgtccaaagctagatcgctccagatgtgcttaaaatatctcaaatcctaggctctcatgggcntataagtgattgggaagaaaaagaataaaataaactcacatataggagatatggaaaatatttcatcaaatattatgcccaaagagagaaaattaggagttgattttttttagcactctgaatatggaacttccttttaaaaatgtaattctacccttcacctttcctacattgtatgtttctgtgagattttactcattacaagtgaaagtagaggactgcctgtgaattgtttacttctgaaaagaatatattgagatcagttaaaattactcaagagtttgggtgactcagggattgtaaaaagcctgggctctcaacagctggggagggagtcagaggggtgaagtgggggaaaaaatagggactgagaggcaacgaaaagtccctttgaaacctgtgggtcatttatagcaattaggagtgggtttgcccctcttatttcttcccaaggaaggaaattcccaaataggnttccttttcatgtttaggttattactgttctggattttaattttctatttatt

SEQ ID NO: 463423 - DNA, 492 bp, Homo Sapiens
aagcaatcctagaagaggaggtgtaaagtgaaggtgtggggctctgtgcagcccaaatgtcagtaacacttccaggaagattccagaaccaacaaaaagtgagtggcacatatttctgtaatatgtatccaacaaagggacatggaggtcccctcttccccccgtgtactactatacacttctccccacttctccaccctgcaacacacatccatgcacactctagaagagatgatctataaagttagagtctggaggtcttaaactaagttggagcaccttgatttcaagcaagtgccctcaatctctgaattcgtcagtgaattttggattcacttatagagggaaactgtataattcttgtgtcttttagcagcagtctttaggagcctgccatcaccactgcagctttttcccattgaagggggttcacagcacaggctctctgtactttttaagagagaagtcagttctctacattatacatctttc

SEQ ID NO: 463424 - DNA, 466 bp, Homo Sapiens
  misc_feature (373)..(373): n is a, c, g, or t
  misc_feature (433)..(433): n is a, c, g, or t
  misc_feature (439)..(439): n is a, c, g, or t
ttcaaatagcagacaaattttcaacaatgcaacacacacctccaggccaaagtgtaacagttattgttttaaaatatctgtggattgcttatggagagagtccactgaggtctttgcaagagacagccccatcacagttagtgactctactgagtccaatgaagcaacaccctccaagaaacacaactcttgttatgagcgggtatgctcggccctagaagccagggccacagctatgcccctgataactgacaaaatgttttccagctaagcagaaatatgtgatccacgtacagaaggggaaaaaatgtgccccaaatggttaaactatttcatttatttaaaagggcagggagcgatgctgggaattccngtgtttttatttaaggatgtttcatggaattgggacaaatagggttagttctttggggtnttgggncttttttgttccaaagttgttattccc

SEQ ID NO: 463425 - DNA, 441 bp, Homo Sapiens
  misc_feature (26)..(26): n is a, c, g, or t
aaaaaaaacaacgggggccacggtgncctgtgaaaaaccctcacggagttccccctgctgagcgctcccacagcgggacggtcttgtcggttgaagcccgtggcccaagtagtttgaattagggtggaatttgacacagtccacatctgcccaggtgtcctgcatatatcctcagcgggtacgtccgatcaaatgaccacagcctggcggtgcggtcgtgggacccgctggcgaagtacaggctatatggactgatgtccagatcccacacaggataggcatgtccttggtacaacacagtgttggtgaaactccccagatcccagtatctgatggacatgtcttcagaacaagagagcaaccctgagctgtccgcgaggaacctcgtgctgtacactggtccgcagtggccccgcagtatcttcatctccgtgcctgcat

SEQ ID NO: 463426 - DNA, 525 bp, Homo Sapiens
  misc_feature (22)..(22): n is a, c, g, or t
  misc_feature (40)..(40): n is a, c, g, or t
  misc_feature (58)..(58): n is a, c, g, or t
  misc_feature (63)..(63): n is a, c, g, or t
  misc_feature (72)..(72): n is a, c, g, or t
  misc_feature (253)..(253): n is a, c, g, or t
tgaagcccaagtactattaggncattactattacttcccnacaacggtgaggaagggnctaanacaaaactnaacaaacaaaaacaaggctcctgattactacttctagattaatagtaaactctaagaggcctagaaactcagaaggcagattatcagatactcctacttctattaggcttgaatatcccttccatgaaatccaagcaaatccatgtgtttaaatcaagagacttggaacttaagcaagtanacttacagtaatatatggctataaaagaggaagtgaaaagtagctgcagtattcactgtcatatgttctacttccttagagaaaaccaaaaaaggaatagctaaatcagagaattgtggtgaaactttctgtattctcagtgttaaatttgatttggttttcctgataactgtggggaacaaaaataaactataactttcctcagtatgtcttttaccatcaaattagctgttgtctatgtctaggagcacagtcacatgcctagaattcaa

SEQ ID NO: 463427 - DNA, 456 bp, Homo Sapiens
  misc_feature (407)..(407): n is a, c, g, or t
  misc_feature (423)..(423): n is a, c, g, or t
ataatagaggtatgttgacatgaaagcacatgagctgcttaatgttgggtcatagcatcatcacaaatggaagacacactgaagccttatgtttagcaataagactgataaagtttatctgtctagattgtaaaaatcctcacagcatcagcctaactctcatattaatcattctaactcaccacttctttttgtagtcatctgccactacatttatcccattccctatttatagttgtaactgtatagtgattacagtattcatctagatgattctttcagtaccttagcctcttattccttttgttctccatttattactccctttaccactcttacctattactaggagtccctttgtgatctatttcaggactttctgttttccctaccgctacttctgtctntccaggttcacttccngtagggggttcttaaccctggtagggcctttgg

SEQ ID NO: 463428 - DNA, 393 bp, Homo Sapiens
aacccctgtgtttttgtgttgaaaaaggctgggggaaaaaggcgggagggtgatgccctccgagagaagccaggggggtagattttaagccccctgtggacacaggaaagaaagtgtagttttaacccacaagagtggatataaagtaatatgaatgtagataaggctcccccaaaataaagttccctgcctactgttggggccccatcactcccaagtgcagagtcttcaaatgggtcaagaagaggcccacaagtttagatttgggatgaaacctaagaggttgtctggtacagtgacatcattctgccaaaaaggaaactagggctcaagagaggacacttacataaattattactaaagaaaactacctttaaatttctcttgttagca

SEQ ID NO: 463429 - DNA, 529 bp, Homo Sapiens
  misc_feature (21)..(21): n is a, c, g, or t
  misc_feature (35)..(35): n is a, c, g, or t
  misc_feature (62)..(62): n is a, c, g, or t
  misc_feature (72)..(72): n is a, c, g, or t
  misc_feature (82)..(82): n is a, c, g, or t
  misc_feature (105)..(105): n is a, c, g, or t
aagcactggatccccacttanggaacctctcgggntcttgtttccttcaattgggggacaantttgggtgantgcaagctantaagggttaaaattaaattaaantcatatttggggaaaacactctttggaactaataaagctgtcaagcttcaagccctgccttcccccagtttgcagaaccccacttattgaggcatagttcatatcaaagttacctctttcatcacctcagcccatccatctaggggcttcaaaaatgttctcagacctggaatcttaactggggccaaacagtacacagcctagtgcataataccaagatcaaactgactgggacaactatgggaaactctaggacatcccctaaactgtcagcatatcccacacacatgttttccttgccttcactgccaaccagaccaggacccaatatcccaggaccaatcatagcaccatttatggaatgtgttctgtgttctgagccttatgctgagtattgtacttgcaatgtttcaattaatcctca

SEQ ID NO: 463430 - DNA, 486 bp, Homo Sapiens
  misc_feature (427)..(427): n is a, c, g, or t
gttatttattgagacataaacatttatgatagttgtaaatccatattttcaaatagtattctagatcatgtcaatatatttggaactcctgtcagatctgattaatcattgttttgaccttgtgaatgacaaagagccctgtgagttaagtatggtctctgccctttcttggagtactccacacacactgcttcttttcagcaacactttaggtcgtttatctgttgtgtgggtttgtttcattgtaacctgggtaatatgatctgtaaatatatataagtggcaggtgcatacagcacaagtactacaaaagagtttacaagtgtggggccctgctccagtccctccctttttgtagcgtctccctctgtacatggggactcccatggccatatgtggaccactgtctggtacctcatggcagggnacggtagggctttcagggctcaatcccttaaactaaatattgggccaaaggtttaattt

SEQ ID NO: 463431 - DNA, 476 bp, Homo Sapiens
  misc_feature (113)..(113): n is a, c, g, or t
gggcctttgtggctgagaagtgggacagaaagatgattaaggtaatgtgtcctccctgtagcattgtccagggccgttgtgtagatatttgacttcactgacagaaaagaaanccagggagtttgtaagagactgtgcatttttagtataacattttcacccatctgatatggtttggctttgtgtccccacccaaattgcatctcaaattgtaatccccatgtgtcaagggagggacctgatgggaggtgatgggatcatgggggtggtttcccctatgttgttatcataatagagagggagttctcacaagatctgctggttttaaagacagcagtttcccctgctgtcactgtctctctcctgctgccttgtgaagaaggtgcttgtttctccctctgccatgattgtaagtttcccggagctccccggccatgtggaactgagtcaattaaacttcttgtttataaagtgaa

SEQ ID NO: 463432 - DNA, 406 bp, Homo Sapiens
  misc_feature (23)..(23): n is a, c, g, or t
  misc_feature (37)..(37): n is a, c, g, or t
  misc_feature (51)..(51): n is a, c, g, or t
tattagtacggggccattacaanctttttggttggtnttgtgttttgggcnttaaccctcttttaagctgttgtgatcctagggaagtcaccacatagtgtaaaataattaccatgccctaatgaaaagaagatgtcatttccctaattttgatatctcattttcggcattttttaaaatgtaaaaggaaaacctcttgtgttcacacagattgctgaattgatttctccatatttgttaataatttactattatttacaaagattcaaatgcttttatgactaatgtaaaatgaaaagaggcttacattttaaatgttattaaaattatgtacttaaatctataattatttaattattgtaaaaagtccaagcagatcaataaactatataattaatgggtttgg

SEQ ID NO: 463433 - DNA, 166 bp, Homo Sapiens
attgttttgccaaaattttatttttctacatattgagagtgtgttctccattttattcagaattcatagtaaagacgaaagaaaggcagagatctgcttggttgaatagactccttttccaaatccttattatgaacactctggtaattttcaagcctaaagaatt

SEQ ID NO: 463434 - DNA, 498 bp, Homo Sapiens
  misc_feature (401)..(401): n is a, c, g, or t
  misc_feature (407)..(407): n is a, c, g, or t
tcaccccattccttgtgtgtacctctctagtactccccagtatgttccttttgcacaaacatgtagtactgcgtaactacttgttctacagatgaactccagttatttaagtgaggcctgttttttagaactaagtaatactgtaactagtagaattctggcatgttaccacagtcaaaagcagaatgtgaagctgtatgctattgatgggaggaaaaaagaaatatatttcctacctttcctgtataaagcccagaagattcctgttagatttccaaaatggggtttttatataatataatataattcaacatttttttcagagggaaaaaaggaaaaagataagttgcttggaaagtcccgttctctttttgctaggtcgggcttctgtctggataaanttttanttctggtttttgcttccaatgtttaattccattccagtaggggtgttccattggaacacttaccgtttacccggggggaccgtgcctaccc

SEQ ID NO: 463435 - DNA, 446 bp, Homo Sapiens
  misc_feature (303)..(303): n is a, c, g, or t
  misc_feature (308)..(308): n is a, c, g, or t
  misc_feature (409)..(409): n is a, c, g, or t
  misc_feature (414)..(414): n is a, c, g, or t
gcaacggggtcctattgcccttttacgatcccgacttcagcatcgtctacctgtgtggcaagggcgacaaagcaattcggtactttgagattcccgacgagccgcctttcgtgcactacctgaacacgttcagcagcaaagagccgcagcgaggcatgggtttcatgcccaaaaggggactggatgtcagcaagtgtgagatcgcccggttctacaagctacacgaaagaaagtgtgaacctatcatcatgactgtgccccgcaagtcagacctcttccaggacgatctgtacccggatacgncaggnccggagccggccctagaagcggacgaatggctatccggccaggacgccgaaacccgtgctcatttcgcttgagggacggctatgtgccccccaagcaccgngaagntccgggtcacgaagcgcaacatcctgggacgt

SEQ ID NO: 463436 - DNA, 310 bp, Homo Sapiens
  misc_feature (85)..(85): n is a, c, g, or t
tggccagcagccgccagctgacctcaccgtccaggcggacactctccaccgcccctcagccaggctgggtggggcccacagttgnccccaagcggcggccacacagggtgttgtggagatgggccagaggggctgggcttggcggtgcaggctcgtgagaagcaggaaactcaaggccagccctgccacatcacggggcacccactgggcgtgaggcagagccgcggttgttggggcagctccagcccttgcccacaggccacccttcgcccgcacaggcagcatttaggccgggaccttgcttggcgcc

SEQ ID NO: 463437 - DNA, 387 bp, Homo Sapiens
  misc_feature (16)..(16): n is a, c, g, or t
  misc_feature (122)..(122): n is a, c, g, or t
  misc_feature (337)..(337): n is a, c, g, or t
  misc_feature (358)..(358): n is a, c, g, or t
tcaaattgcctaattnaatgtgccttagatcctacttatatactatgtattatctttttcaggtgttaataaatctttcattttcaaaaagatgaccctatacaaatgagaacgttcatatntctcttagccttgaggtgtctgccatatgatgggctactttaggagtatgctgattctcaaaatcatgttattcagggtggctggtattaaacaaaaacgaatgtagaatagccacatttctataaaactttgatttacagagaaccccaaacaatacttcaaaatcaagccaacaacactccacataggaattgtgtggactagtactgtacanggtgaagtataagcagtcagnattagatagcctcactcacagaggtcaga

SEQ ID NO: 463438 - DNA, 707 bp, Homo Sapiens
  misc_feature (351)..(351): n is a, c, g, or t
  misc_feature (489)..(489): n is a, c, g, or t
  misc_feature (615)..(615): n is a, c, g, or t
gtgtagatgattatgaaggacctgcttgttgcaagagaacatcagtgatttttttagttactcaccaaggccttttgtcccagagccagttccctctgggagttcttatgaacatttctcaccttaatatggaggagagaatagtattccaatcatggatgtatcaaattctagtcatttagtttaagtgaaaagaggtttgattgcatattaaattgttattctgtctccttatgttgccatatgaatagctattttttttctttcacttttgacatttgggatgaaaagccatatgtatcataaatatcagatgtaagtcattaaaaactgccttcctggggacttttnacctctttttaaaaggtggattacttaccttatgtacagaataaataatgctcaggaaagagcaagtatttttccatgcattctcaggggatctttttactcccctttgtttgattagttagggccccaatgccaggnaggaggaagggctggggcaatggtagagtgagaggaagacaaacccagctgcagatcatgcttttctaggagccgacatgctaaataaattaggaatgtaggagggtcagccacagttgacttcancaaaagacaaaagccagccaccacctttcaactgtttgggcacagctgtcgggttcttgggctgttccccaattgcagaaagctggttgtgt

SEQ ID NO: 463439 - DNA, 661 bp, Homo Sapiens
  misc_feature (639)..(639): n is a, c, g, or t
tcctttattcaaaacacttagtaaaggaaaaggacacaaggaaattctgattaaagtcttctcctgctctgtttgcaattatacatgctttcaaagtcatttgaaagtaagaccatttcctttggcaggtatcttgtataaagtaactttacaacatatgtttcttgaacagaaactttacaccactgtcattatgttacctatagagacaaaactactaacacaagtaatatgggcttacaattataacacaaacctgtgagagggcatgataaaattaaattttgattgccttcttttattattatcactactactgtctgctcacaaattctgtggccagagtccatttcaaatccttctaagagtccacttcatgagttaaacatatacatatagaacaaagcaggtatactgtaatttttaaaagtaaatctgttttacatagtacagctggaggcagtttaatataatcaaaagttatagctctaaaaaatatgatagtagaatattaaacctcaggttacgttaggtttgttaactcttgatttgctttgagtaatttttttcttcaaaagccacattccaagaagatgccttaagtatcaatgagctatatttggaaagtacatcaactcnggtttaaaggctggtccaacca

SEQ ID NO: 463440 - DNA, 429 bp, Homo Sapiens
  misc_feature (45)..(45): n is a, c, g, or t
  misc_feature (119)..(119): n is a, c, g, or t
  misc_feature (284)..(284): n is a, c, g, or t
cggcggcaaaatggataacacctggggcaagctgggcttcgggantcatcaagttcccaaaacagtcttctcagcaacacccttctggattgcagcattaatcaagtgctactgctgcnaatcttctctgatattgctgggcagcactgtttgcagcatccactccagactgcagctcctccttctgcagggggtcagtctgaccactctgtctcttctgctgtttatcactcaggagctgcttcaagtaccagtcgctattctgttgctgcagtcctcagaancccagggctggtgactgcagagccctgaacaaggccagtgcatctccttgttctaaagccaggcgatatttctaatgcagaaaatgtattgactttgtttatattgccttaatttcagcttgcgtagcagtcctcataaacatct

SEQ ID NO: 463441 - DNA, 494 bp, Homo Sapiens
  misc_feature (260)..(270): n is a, c, g, or t
gctacctcaaattcggtgggcaacggatagttaacactttccctagtttttagtttattttgactgcattccataccatatctgatccttcacgacaacactgtgacaaagggagaggcaagaatgataatcttcattttacagactgaggaactgccgacagacctgccatctgtcccaggccaacataactaacaagtagtggagtccaagacctcagcaaaagttttgttcttttacttttgttagagtggagaagnnnnnnnnnnnggtttacaatgattactgagaaatgaagaaataagccactgtttcttacaagtagatggtcccacatcttaaactttggggaagatatttaaaaatattttttaaatagctggctgctggagctgaaatgtaaaaagaagtacttctttcattctttaatttgctgtgctgataatacagccccagccttataaacctgtttcatgctccactcctacacatcc

SEQ ID NO: 463442 - DNA, 503 bp, Homo Sapiens
  misc_feature (11)..(11): n is a, c, g, or t
  misc_feature (55)..(55): n is a, c, g, or t
  misc_feature (94)..(94): n is a, c, g, or t
  misc_feature (101)..(101): n is a, c, g, or t
  misc_feature (375)..(383): n is a, c, g, or t
  misc_feature (405)..(405): n is a, c, g, or t
agaaatggagnaagaataatccacagttccctaaacatttaattccatcccctcnatgtttttgggaagcctccatcctgtccagccttcctgnaggtgtnaggcatatagatttagcaggacaataaacatttttcctttttggggcagggcagggcaggggtggtatcctaaatatctactttaaaaatcaataaatggacaaagtgctacaaaacagtaacagaatggaaatacttcctttcaactttgcttccaaaggctctaattacagagagcaaagaaaactagtctcaggggctgagaacgtgaaatcttgattaggaatccatacaatggtgatattaaattatttctttttattcaccttttatnnnnnnnnngggggcaaatacaagaaataanggttatgtcaaaagtttggtttttaaagctcaaacttacagagtctgttgtaaggttaatacatagaatgctagctttttagtcacctgagaaatcag

SEQ ID NO: 463443 - DNA, 422 bp, Homo Sapiens
  misc_feature (17)..(17): n is a, c, g, or t
tggaacaaggcttaccnactctggggggggcacctggctgcacttcaggcaagacgtctgcagactgagaccaaggacttctacccctgggtgcactgacaaacgaatgccagcagatccatatggggacacgcctgaggacgcgcactacagcttcctttgtgggaggggagtagggtacgatggggtccctcactgggaggacagagacacaaaaggggatgcctcatggagcaccaagcagttaaagcaactcggcgttcacagagcagcatggatggatcctaaagccatggtgccgagtgaaaagagaacccgacacagaatgggacccagaacataatgcctgtttggtaaactaaaaattgatcaatagccaggtatggtggcgcacatctgtagtcccagccactcagaagatt

SEQ ID NO: 463444 - DNA, 387 bp, Homo Sapiens
  misc_feature (48)..(99): n is a, c, g, or t
taatctttaaccaactttcccccaacggcccaatgacccttcttaatnnnnnnnnnnnnnnnnnnnnnnnnnnnnnnnnnnnnnnnnnnnnnnnnnnnncttggcttctcttcaagcacagcggccccaggacgaaagcggaaggcccactgatcgaagggcccccagtggaccggagctccctgttgttgcctgcgcccggccctcccctgcacttggcagcctgctccccgaggcccagcccacggtaccctctgtggtcgcctggctggtggccagtgtgactctcgctgggagggcatgctcagagctcacgggagccttgtcctcatggttttgaaggtttcagatgaagctcagggaacacggtcccccaccgaagctgag

SEQ ID NO: 463445 - DNA, 654 bp, Homo Sapiens
tatgttaaaaggccgcccctgtaaacatttcctcaaagggaacagtagcagttgagtatgtatcagttactcatactattcatcactatagcaatgctttatagaagacaaacagcttatttctaggctgtcagggacttctagaatattgatgttgttattagaaacaatcctctgtaatccagtcccaggttgaaatctgatctggccttcaccagcaggcattcactaggtcttctgctctgcggctgttgcggtctgggaaggggcttctggcttcatgatctggtaagtgataagatactctgggtatgcctgttctcctctgtaagatgaacatattccagcatatgccagcccattgacgctcggtctaccaatgactgaagtggtgccctggaggcgcgtgggcccattttcatggtgctaaactgcagaaaggatttcccaagggtcactctacagaagagcatttgtctgtgacatatatagcatgacctgtccttgtgtgtagggcagcctgttcctcctccaattccataaacatattggttgctttttgaggagttttcagcaaaataaatcccggccccaaacattcctcctatgtatgcatgtcgctcatcaaaccctttatgaataatggcattaatg

SEQ ID NO: 463446 - DNA, 224 bp, Homo Sapiens
  misc_feature (118)..(147): n is a, c, g, or t
aaatcaaaagggagagaacaaaagctataccaaaagggccatgtttcaagaaaatggatttaaacatatttccctgtggaggtaaagaacattcttatacatttatcagtttcctgcnnnnnnnnnnnnnnnnnnnnnnnnnnnnnngtaatgtatgtataaatataaaatatcaaatcttactaaaagacataatgaaaagcagtaataagctttgttttgaa

SEQ ID NO: 463447 - DNA, 595 bp, Homo Sapiens
  misc_feature (24)..(24): n is a, c, g, or t
  misc_feature (45)..(45): n is a, c, g, or t
  misc_feature (55)..(55): n is a, c, g, or t
  misc_feature (70)..(70): n is a, c, g, or t
  misc_feature (77)..(77): n is a, c, g, or t
  misc_feature (98)..(98): n is a, c, g, or t
  misc_feature (106)..(106): n is a, c, g, or t
  misc_feature (120)..(120): n is a, c, g, or t
aaggaaaattaccccccttctgangaaaagatgttaaactgactnaaactgcccnatcccctaaaattantattaangagacccagggaacccaagantccacaanggaataggccttanttagaaaatcatttctatttggctttgagatgtgcttttctgcttacattgaaatatggatgaaactgaaggcttgagaattcttagtccctcaccctaaacaggggaaatgaccataaagtcccctttcaaaaaagccccgggactgtccaactcctcaccattctcagcacccccagctggtggtggttttaggacctctgaccaagaacttctttcctccaaagaacttgacagactgaggaaaaggcagaaaagagaggtgaaaggggtgcttgaaaaagccgagacagtaaaggagggaggaacttggatgatgtctcatttggccatttcgggtctgctcaaaggacttctacctaatgggaggcccaacacctatgaccagaagaaagtcaaaagagctgagaggttcagtgcaaggctcctggatgccctgctaggatgtggcttggaaacctgagaagttcaagga

SEQ ID NO: 463448 - DNA, 484 bp, Homo Sapiens
  misc_feature (417)..(417): n is a, c, g, or t
  misc_feature (423)..(423): n is a, c, g, or t
  misc_feature (441)..(441): n is a, c, g, or t
  misc_feature (458)..(458): n is a, c, g, or t
aatgtgaagtctcatgtagtgcctttgttgagtttgtgaagatgtgtggtggccgcctatctcaattatccattatggaagaagtactaattcctgaccaaaagtatagtttggagcagattcactgggaagtgtccaagcatcttggtagggtgtggtttcccgacatgatgcccacttggtaaaaactgcatgatgaatagcaccttaatttcaagcaaatgtattataattaaagttttatttgctgtagttctgatataattctactattttgtgggcacagaaatttgatatcttcagtcagtatatgtaaagattgtttatcgggaagacccatggaatgagttttggtccaggaaattccacttgttttccctagtgttatagccagtccatatctccgaattttttttnaatgtnggttcggatgtggaaatnacccgttatacgtattnaaccgtttacagtctaaagggtacct

SEQ ID NO: 463449 - DNA, 352 bp, Homo Sapiens
gcaatgctagaaatatcctggaaacaaaaacttgaatgaactaaaaagaacagatttttaatgcctgctggattcaaaggcatcacttatccctacagagaagtgattcctagtgggttctaccgaacaggtgcaggcgctcacagctcaggtgagtgctgctgaaaatcaccaactttgtcattttacagctttggccttcaagcccaaacactatctagtaatgctggggcttttaaaaagcagaaggataagtcctttcgttcatatttaaatctccatgagatattacactcataataagaatgctacatttgacaaattaattagtttttaactagctttccccttt

SEQ ID NO: 463450 - DNA, 417 bp, Homo Sapiens
  misc_feature (17)..(17): n is a, c, g, or t
  misc_feature (50)..(50): n is a, c, g, or t
cctaacggtgttttaanggatgttggtgaatgccagttccctgtgtaccnactgaatgagtgccatgtataaatccaaagactgtagggaaatccctgctggcccctccaacaagttccatttataaattcagcctactgggtcggttaatgccttggtaaacaatttaccttccgttatgtaccttatgtccagagtcgtgaggaacccctagagtccacagtgggatacaagaggagcacccagggggctctattggctgtgattttgaagaaaatgaattaaattgattgattgaaaaaagcaataggagtgaatttgattaggcatgtatgtacacatttaaatatatcttgtactttgtatgctcaacagcctggatgaacacacagcatacattatagcttaagctccctt

SEQ ID NO: 463451 - DNA, 434 bp, Homo Sapiens
  misc_feature (13)..(13): n is a, c, g, or t
  misc_feature (23)..(23): n is a, c, g, or t
  misc_feature (98)..(98): n is a, c, g, or t
aatccttccccgnatctgcaagnacctgctctgaaagctctgtcaccgcctgccgaagcttgtccagtgtgtctgtgttccttgcctcgctgggcccnatggggaaacagtgagcaggccgctctctggtcccaggggaggggctgctgcctacatttcccggccagactggccccacgcggaaagagaacttgggctggtccgagccacagccgtcttcaatgccatctactaccctgtgaacccaggtaccaggacaacaaatcaatggacaggcagccactgtggggtcatacgggacgggatgccccagcgtccacacacacaggctgcaggagcgtggaactgaccaggagcccaggagaaagctaacatggggtcccttcccctaggagcttacagtttagctggggggccaagcttgagcagcatga

SEQ ID NO: 463452 - DNA, 347 bp, Homo Sapiens
  misc_feature (18)..(18): n is a, c, g, or t
cagttgtaagccaagggncctctttctatgtaatttaattcatttattcattcatctttttttcagtcaataataaggacccaacacaagacccctgattttcctaaagggataattctataatcattctatatacaaatgttctggataattataactaagtgtcctatcataagagtatctcttatagctttttgaggttatttatattgacacagccagaattatatttcaaattaaccattataacataacttaccttcaagaatcctgacaggcacaatatccacaagagagcaaacagcctataaaaatacaattttagtaatttgcaatattgttcctta

SEQ ID NO: 463453 - DNA, 443 bp, Homo Sapiens
ctacagaactcaaggtgggaatggcttgcttgggacacaggccatccctgagtaacccaaatgctagttgcagggcccttcacatacctgcttccaggagagctggagtgattctcgggagcttgggggtctgacgtgtgtagaccatgtcgggccactaggactgatgatgggtcggagggttgggggagctgaagcactgcttctgtttatgatgccagttgccaaattcaggtttgttacctagaaataaagcgagggaaataacctgactttacagagtttttaaaaagcatcattaacaacatataggcaaaatcaagtcaaggccaacagatgctgacccctctgactgaagctgtggctgtgacaaaggcactcaggaaggaatggctcctgtgcacaaagagcagaagtgagagtggtcagtgtcagtgtaagtc

SEQ ID NO: 463454 - DNA, 289 bp, Homo Sapiens
ttgaagatgaatctatttgaagcgcttcacaaatgtctggccctgaatcagatggccttctccacctctacttgggcactgcccacagtgttagactaaataggaatacctctctggaggaaaatttttcgctggccttaatgtccctgggttaggaacagaagattggaagggagggctacagggggcaatggttggccctgatgtctgtcccttcttacctctctgctgggcacgcagcccaggagtgaaaggaaatataggcaacatatcaatctgctattacact

SEQ ID NO: 463455 - DNA, 540 bp, Homo Sapiens
tccatttcatagtgcgttagtacttaaacttcggacacttttccaaactgttaaacaagtcaggaatgcttttcagaatcgcagtagtattattagggtctctgtgtctaggacttacagtcatcagtggtcatcactgggactagaggtgttcttttttttcctcttctcctttgtattaaaaaatagattttgctactgtataatgcggcatttcatgacttcctcttgttacttttcaaggttattctaaagagatggagatcttcattagaggctatttctcataatagtctgccttgcttattttcatactccccctgaaataagcctacttttgcaaacaggccatatgaatcaaattttatgtttgttcctcacaaaattttctacacattatttgttcccactttggctaataataatataatggattttattgttaaatctgtggtttttaaatatttttattatgggggcactatggggaaaccctaattaaataccaaaccagggttaacctattacccccggggtaac

SEQ ID NO: 463456 - DNA, 587 bp, Homo Sapiens
  misc_feature (268)..(277): n is a, c, g, or t
ttttaccatataatgatcaatagtactggctctagagtcacgctggttggattcaagtcctggccctaacacttaactaactcaggtaccttgagcaagcaacctcatttctctatgcctgttttttcttctgaaaagcagaaatagtactacccacttcatatgattaccgtggggcttaaaggcattaatacacagcttttataatcaacaatactgcatctagtatgctcacaattaaatattcacacacatctttactacatcnnnnnnnnnnttctttaaagggaatttccatgtcagaaggtatgccaatttttaaagctgctgaatctaccaaattacagtgtggtttaaagcccttcattaaatagccttctcacttaatactcatttctctttatccaggaaggcaaaaactattatcaagttaaccagtttgtttcactcaattagctttttgttcttccacctgtaaacctcggcatatttaataaaacctcaaagtttataggtaacttgaagacacctagctcaaattctccttcagtacgattcctctactctagaatccccaacttgtcagt

SEQ ID NO: 463457 - DNA, 670 bp, Homo Sapiens
cccttttggtttattagagcacatccatgcaaagttggaatctaaccattctcatgtctccttataatgcctaggggatctttgaaacagtatttttgccaactcatactttctattttcattctgtaaagataaaacatgtaagtgaaaacgtttaacaaacattaagaaccttcttcgaccaggcactctccttcgctacaaaatttccacattacctatttttttattagccatttttgaactctcttccatttctaagtttctccctgcagctttcctgaacatgaagcatttccttttcttttcatttctagctttcctttctctgtacctcatgtacacttggaagcttcagggacttagcactggtcatgccagcctctacagatcacatctctgtctataattgggtctccatggtaatgagaagcagaaagtgctgaagtagcgcactatgtaaggactggcaagagaaaatactgtcgcggcctctacaggcatagcattgaatccccatggtgcccaagaagcccgagagaagcacgctgtggtgtagagcaggagactgaggacacggacttggcagatttattagcagcaatattctaagatgaaccaaatttaagagtttgtaagtgctcttttcaattggaaaagacctttgaaa

SEQ ID NO: 463458 - DNA, 514 bp, Homo Sapiens
ccctgagtttccacagctaatggcagagccatcaggaatcaaagtgggtctctgttcaaccccatcctcttcccatcaggcaccctgctccggatccctcagctcttctcgcctatcagtgggtaggcattagggtctgtactgccattattaatgggctttactttgaaagtggtgtaaaccagacccttggaaactttttgatgcagtatctgctctggagacccaagaggggctaatgtaaatttgaattgtgattctctggaaagtactaagagctttgaattaattattgattgatgtgaagtccccaagttatcttttctaatgccaccaaaaatatgacaggtaagaccagaaaccaagggctaagatcttgtggtgagctgcttgacttaaactctgatttcctgaggaaagtctggcgttccctttgtttcttcttgtgaataacagcgccccccgccccggccaactcttactgctaatgatacatgggcctgggctgtgtcca

SEQ ID NO: 463459 - DNA, 709 bp, Homo Sapiens
  misc_feature (13)..(13): n is a, c, g, or t
  misc_feature (272)..(273): n is a, c, g, or t
cttccaagactancataagggagttcaaagtcagccaattttttcacaacagagagcttgccctccttgccaaaccgaatgagaaagaggccgaagtagcccaagagctctcgacacagtccaattttgtgtgacaccacctctaggactctttcagcagtgtctgatgttataatttcgattctaatactctgttcattgggcagaaatatgtccagataagctttcttggtggcgatgtcaaatgtattcagctgcgccagttttaaaanntcaacgaagacatcacttctcaacacgtttgggtccatggttacattttgcaaatattgttccagttggtccctcctctcatcagccatagctgtggtcattgccagatagtactttggtgggaaggggtggcaggcaatttccaaagaccccgcctttagcttttcgcgcagcgcgtttgctacttgaacgaccgggaccatcagaagcccagacctcagcaccatgcaatatactccgtctaacagagctgcgcagatacccccccaatccaaaattaaaatgaaaagataaataaatgaaaattaggaatgtttgattcccactgagcagtatctttgtatttgagagttaaaagacagaaatagctcttttcccgacagtacagctggaaataacccaaccaagccttttttgaatgcacagggcttttgag

SEQ ID NO: 463460 - DNA, 586 bp, Homo Sapiens
  misc_feature (456)..(504): n is a, c, g, or t
gtggagatctctttttcataaattcagttttagtcaggactcctgttgcaggtgacagaaaccaaattcaaattggcttaacagaataaaaaggaatgtattggctcacatagctgagaagtccaagaacagtcaggtgcatactgctgaggcggctacgctggcagggtaagcaaaagaagcaccccagcctaagtttacagagaaccaggacatcattttgaatataacttagttctaatagtcaaatggccactcaaggtgacaaataggaacttcagtggtcacccctcggaagcaagctttcaatgtcccccacctgtagaaggctgaaaaacatcctccaaagataacaggttccaatcactggaacctgtattacttattaccattaaatataaattttaattatttaatttaaaatattgtgaatattatggagattgctatgtaacnnnnnnnnnnnnnnnnnnnnnnnnnnnnnnnnnnnnnnnnnnnnnnnnngtaaatttataaacatttggcagaaggatctttgcagatccgattaatttatgaatcttaaagaattatgttaaaataatat

SEQ ID NO: 463461 - DNA, 656 bp, Homo Sapiens
atgctatttatacatttattgggtttgttaattattccataggaaaacagatgaaagacttttgtagaattcaattctgcttcaccatacttagggctacaagaaggcaattatattgatgtaattgacagactgaattaacctcagtcatcacatgtgatttttctagagtttttttaatggtgctgacattctcttcaatatgtccatgcttagcttgggtttctggaggacagatgagtagctagtactacccatctaaaacataatgttcactagttggaataatggtgtgatatgatagtcttcaagatgatgccctcaatttctttcctccctgcatgcacatgctgctgtttacattgacaggtagagtcgaatctcccatttcttgaatctgtgctggtcacaatgacttgcttttccaataggatgcagcagaagtcgtattctaggacctccaaggctaggtcctaagaagctttgtagtatttgcctgtgtgtcttgggacaaactaccacgttgtgagcactccaggtaacatggagaggtcaggtaggcatcacactcagcagccaatatgcactgccagccatgtaagtgacccgtttagactctttagcctacttgagctttcagggacttcagcagcggc

SEQ ID NO: 463462 - DNA, 764 bp, Homo Sapiens
  misc_feature (476)..(476): n is a, c, g, or t
  misc_feature (722)..(722): n is a, c, g, or t
  misc_feature (752)..(752): n is a, c, g, or t
ctttaagtttttatatttatccacaagagaaacttactaagttccacttgggtgcagagccactcacagttgccgaatgtcccagtcatctcacaagacctccagatggagttctttgtatgtttccacttctgtctctgttttatgtaaatgttccagatctgacaaccttggaagtcactcagtacccttacttttaaaaccccatttgtgttcctccaaagtaaagaagtcaattttgaaaaatttctgcatttctcaaatgtggacaaatacaatagttttaaagtattgtttttctcagaagggagataaaaatgccgagttagttaaagtcgggtcatgtgtaaaatacgaccacttggatcgtgattatagtgggcagtagagatgatgacaagtcaatttccatccagcccgtgtatcctcatggagaagctgcctgtctgaatcagggatgggaagctggcagtctngggaggagcatgttttgcacagatgttttggtttggtccacttgggtgaggagtgcagacggggctgcctctctctagttcgggagagtctgtgcattccctcgggccctgaccctagcctcattcacatcacttgcccctgtcgacacctaagtttgcaccctttgatagacaccatgttcgatatctgaaaggctcagtgtcaggagacagagactgagggagactgaagacctgattctctgntccctgcttggtttttaacttcaaactcanatgaagccaacg

SEQ ID NO: 463463 - DNA, 464 bp, Homo Sapiens
cagttcaaatgtgagtgactggatcactttattgaatggtaagaaatttaaagagcaaagagctgttgtaaatgctacttgtattttttttcctccaaaactccagtcttgaatttatttttctttcacacaggggcatttctacagccacagggtgcatggctgtgcttaactgtgttttccatcctagtctgttcctgtggacgtctacagaataagaattaaccatccttgtccactgctgggatggctcaggctgccaagtcatttcccaagaccagtatgagagagtcctttctcgggctagctgcttcagtaggaatcagtgatctggtacgtggggtttgctcttggtttctgcatttcttggtaaaaggaaaaccttttaaaatgctaagtcataaaacctttggtagtgaagccaagtggcattccctccagactcctctcccctttaataaggt

SEQ ID NO: 463464 - DNA, 671 bp, Homo Sapiens
  misc_feature (23)..(23): n is a, c, g, or t
  misc_feature (609)..(609): n is a, c, g, or t
  misc_feature (661)..(661): n is a, c, g, or t
ctgattgttaccttttacatggnagatactattaatctggaattgtttcttgtgtatgatgaaaataggggaccagatacatttttctctcatatggatatctattccacacaatccctttttttgaaagaccattatttcctcattacattacggtattgcatttgtcataaattaggagagggtctgtttctggaccctctattgatttctactggttagtttgcctgttcttttcattagtattacactgtcttaatttttgtaactttagcatgagttgatatctggtaacataagtcctccagctttgttattcaagattacctggattttccacctgaatttgaaaaccagtttgtcaattttgacaaaaaatcctgcttgaattttgctggaatactgttgaatttatgaatcaacttgggaaagaaggaacatctttacaaagtcaggtcttctaatccatgaacatggtatattcctccatttatttgtgttttgtctacttcaataatttttaaaaaattagtccagaggtcttgcacagcttttgtaaggtttattcctaggtttttgatttctaaatgttattaaaataagattttntttttggtttctattcatttcttgctagcaaatagaaatacaattaaatttntgtgtcctgg

SEQ ID NO: 463465 - DNA, 481 bp, Homo Sapiens
  misc_feature (116)..(125): n is a, c, g, or t
  misc_feature (469)..(469): n is a, c, g, or t
actcgctgctttatcctttattttcatgattatcatattatcaaactactcaataactcgattttttacaaacagtatgtccgagaacactcacacaattacacagatctaggccnnnnnnnnnnaagctgtcctagcttcttacattatatgatgtgtcttctttgggctcagtgttctataagaatgtccaagagtttgtctatgagacacatccagtaacagaattgctgggcatctatgacttcaataaatattccaattggctgtccaaagtgatagtgcaaatcacactcatcacctgcattggagaggttgctctttacctattctcaatcttatagtaagagaaggaagatatttacaaaatgaagtatgtctgcatgttatatgacttggaaatatgtgcaaaacatgctttattctgcaaattagtatcacatgacacaattggttagaatgtaaatangaaaagcatcat

SEQ ID NO: 463466 - DNA, 576 bp, Homo Sapiens
gaagggtcccactgttacagatttatttgtcatttcttgtaataacaccgacagtaatgaattcgtttgtattaatgtgagtgtcacgaggacttccgtcgaaattccgcattaattaacgtaccattaaaacaaagtgtcgcccaattaatatctaacagaggtaaggctgccagggtcctcttcatctgggtttcatttgtaattcatggtattagcatcctgcttaatgaacgtcatttgcaattcctaccgctggtctctcccacttcctgggggaaggtcagggtgccctaggagctgttgggcccttcactgggcacccccggggccaggaggagaaggagggaggggtgggactctgtttctaggtggaaatcgagtctccgcattcttcattccagaaggggcttggaaggcccttggaacttcctgatcggttggttatccacttcagttacccagaagataccttcttgaggttccaggcttgggacagagggacaggggtgggaggagtccgaggggcaggggaggagagacagcaggagagctgcgttgctggagctgtcttct

SEQ ID NO: 463467 - DNA, 378 bp, Homo Sapiens
  misc_feature (13)..(13): n is a, c, g, or t
  misc_feature (342)..(342): n is a, c, g, or t
caattcgtaagtncaggggtagcaacttccaaacactgtctacatcaaaaatttggcatcacaaatctgagttttatctgcaagcatgcagaagggaaagtataaagaagctggagcaagctttgacttctttgaccctctgtaattgcacgagagtataagatttaaaattgtgaataaatgaatgcttgcaccaactgaaagacaaaagttttaaattatcagtaactgcctaaagtgatctcttccttccttatgggcaagaacccaccttttttgaatagacctctaaccttgaaattctgttattcacagatatatgatgggggctgataggcggtnaaaataatcagtattggagaattatgagaagagcag

SEQ ID NO: 463468 - DNA, 731 bp, Homo Sapiens
  misc_feature (330)..(330): n is a, c, g, or t
gcatgaaaagaggtaaaacgatttatttacatgtctttaaaaaatcaccttggacatttgctaatagaactgccaaaagagggtggtaagtaacaacctttgattaagatgtggtcttttactattaagcttttagtaaaaaggaacacactaaaagttcagagtagatcatttatattcactgagtatttactgagcaattactgggcgccaggcgctcttctatgttcttgaagttttcattccagcaggaagagaaatctagagtatgtcagatggtgataaatatggattagttcagcaattttaaaaaaggatttttatgtactngcacactgttaccgaatatacaaaatcagtcaagaatcctgttatagtttttggtaatgtacaaaaagtgaaggtgtgtgcacccaccccatttttatagagggtgatcagggaaagcctcagggataaggaagcatttgagcagaaacctacagaaagttagagaaggacatttatccgtgagaaaaaatgttgtaagaagagaaaatgctatataccaaggattctcctgccaggttccaggaacactgagtagatcactgtggctggagagggataagagggaagaaagtggtaaggaaagaggttgggggtgtaggcatttgatttttattctaaatgagaagccagtgaggcagaaaagtcacataatgtgacctaaaatatctctcagactcctt

SEQ ID NO: 463469 - DNA, 680 bp, Homo Sapiens
aattttaaaaggaggaatttattttcaacagatattgtgaaagatacaatcagtactgcaaacccactcatgaagaaggcaattttgccctgaaacgttgcattactttaaggtgggaagtggaagaaacaattcttacaaatgggcatttttcgtcatttcttatataaaaacaaacccaaagcttagcatttatttttattgatgtagtgaatgctggtcagcagcaaaaaaagaatttctcctcaaaagtgtaatgacctaatctattatctaaaactagtctaatctctaatggtgggaagcagatcagtggttgcctggagatggtggggattgagtaggaaggctcccaaaagaatctttttagaatcataggaatagtctatagggaggtagtgatggtggctacatatgcataaacatttaccaaaactcatcagactatacactgaaaatgggtgcatcttattgtatataaagcataatctcagtaaacttgatttttaaatttatatattgtcctcctggagttcttcaggggatagcatgttagggagaactaagagaaaaggatgcctttcccaccaagcatctctaggaaaggagtgaggaggtgattgccagggagggaagaccccatcgaccattcaggggggcagaaaaggaaaacggattcc

SEQ ID NO: 463470 - DNA, 729 bp, Homo Sapiens
  misc_feature (375)..(418): n is a, c, g, or t
tctctcctagctcaaatgattcatctaataagtgttccaattttttttaatattatgtgtcaaataaatgccattaaaacttcaaattagtaataaggagggtaactatgaggtcttttcccttttttagagacttgtttattcgtcattttttgcagtttagggaagaatatttcagatgtttctttcaatatattttatttgcaaactgaactatacataattctttctaagtttcctagtaaactattagcatagcaataaactttattcccataggtcttaaaatgtggtagaaaactacagtaacttttcccccctttaaacttttcccctttaacacttatcattcttggtctctttctggaagcaagnnnnnnnnnnnnnnnnnnnnnnnnnnnnnnnnnnnnnnnnnnnnttcaggataagaacacatacagtgtataatttgaaatagtttttaacacattaaaaaaaagaaattaggctggattaaagctcaccagtgacaagttgggcccattttccacttctataggcttttaactgtatattattagcatttatttatacattctcacactcacccatatgttctggtgactaccattaagaaacaagtcaaatgacttcataaaggttatagtagtcaagagttagactaaagaaggaggcacagctaactattatctttctaattgcttgcattatctgttaaatggtatactg

SEQ ID NO: 463471 - DNA, 752 bp, Homo Sapiens
  misc_feature (27)..(27): n is a, c, g, or t
  misc_feature (167)..(167): n is a, c, g, or t
ttatgctgatattaattaattttgganctgaaattgaagattctgattgttttggattaaaaataatccttaaaattttctccattttttctctcaaaatgcatactacatacatacataaataggaaacacaggaagtcaattggccaaaattaaatttaaaaaancaaagtttattttcaatcacttagatcagtatagatcttctaaggtcagacttagcacatcacagtttcccatgattcatgggggaagccaaatcttggcagggattttatgaacattgctaaagtattaggcctaggatttgatatctcctttcaattagcaagaaaatactttttagatttttaatcaaactttatcctgctaatggcagaaatgttcttaagtaagtatttcattattcttagtaataccatggtttctctgaatggaacaatctctaaatctgttatagcattagagacaagggccaaatcctgctaaacctaaattttacaatattttacattcaggtaagaaggattttctaaattttaattcatttctactgccctgtccaacttattgaaggaatgagagcaaaggcatatttttgatatgataattcaatatattgctatagtttgaatgtttgtcgccaccaaaactcatgttgaatttcaattgtcattgtgatggtgttgggaggtgggatctcttagaggcagagctctcatgaatcaactagtaccattactgcaggagtg

SEQ ID NO: 463472 - DNA, 642 bp, Homo Sapiens
aacagaaactttagctttattagaagataattatgtcccaatgttaaacaaatatagccttaactatttcaattatcacaggaatatgtgacattattatcaatgaattatgtttgggtttgcaaggcaggtcatcacaagattgaatcacttttgctagacaagctgtagatcagtctgtctgtgcggtacagcctaccagttacgtactctgtatgtgcaaggagagataatcctctcaaaggagtttatttgaatctgctctcctttaaaagggtcttaactatttccaggatgctttttcttaaataaccctaagcagaaaataaaacgctacatgatatagctcagcttttgaccctaattctaagattcaatcttatcaagctatagttacagggataaaataaacattgcatcctatcttctcatcttctctaatgacttcagaattaacataactacactactttataattaactgcccacaacatctctcaggcattcagttcacattagactaagaacaaaaaataatttttttcttaacctaaaattttaatgacatgggcttacacttccaatcaagatggattaacaggtacagaattttcccctttacaacagctgccaaaaataaaa

SEQ ID NO: 463473 - DNA, 818 bp, Homo Sapiens
  misc_feature (682)..(682): n is a, c, g, or t
  misc_feature (684)..(684): n is a, c, g, or t
gcctttctttggaaaatttgcagatttcctttttatttgccccacttggtgaatggtggtgaggaaaggacatcaatcattacaaagtcaaaaatatcatcatgaattaagaatggaagcatattcaaggaaaagacattatcatcaacgtataatcgtagtaaggatttaccaaattacatgaatttcatctttatggaaaagtcaaaccagataagctaagccaattactttaagtggctccaatgaacagcgcaatactttcttaatttcctcttcagtttgagcacaggggatactatgctttgagattacagatgccaagtagtatggtagccaaaaaactgatttaggtacaatgaatggttttaccagttttcaaaccctttgcttatctagaccacaccagtatttatacatggtgtgagaactggacactggcatagaggattggtgatttcactctccaaaactacagctaatcctaggagccaaatctaggaggtaccaattaagcagaccgaatttctgcttaattgattctcacttattagtgtataatgtatctcattcaagaacagtcaaaataaatggctaagctttgacaccctctagtcctttcaaacattcttggctaagactctagggaatgaacaagaccaggcatgaatagaaaggaaananaaatctatgtccgtgtatgtgggtatgtagtatcttgattttaactctatttttagtttgagtttaaaaaacaagagggttggttatttgacccaaattattccttctaaactgtcaataaataagaaatgagg

SEQ ID NO: 463474 - DNA, 502 bp, Homo Sapiens
acaaagctttgataaaccttcttgcatctacattttcatatgcacctctgatcatgtcaatgctataaattcctgagagcataatagcattaagaggtataaatgcttttgagattcaattcatattgctgaattgctctctagaaagatttttccaatttacactcccactagcaatacaagaaactggccatttcactgtgccaccaacaactggtgttaatcagtaacaacaatctccattttttttgataggttataatcttagtacattttaaattacaattatttaagtactgtgaagttaaatataatttgtttattgattattagaatttcttctatcaattatctattggagcatgggatattggtactttttctattttataagaacttaaatggtttttgtaaagtggttacaagagtgcctagcacattataagcagaatgtattagctttattattaactcccttatatattaagcctcgttccgaatt

SEQ ID NO: 463475 - DNA, 485 bp, Homo Sapiens
ctgaatcattattaccatcacaaaaattcttctcttggccaatatctcatttccctatatagtatacaagcaccatttcttctcaatttttaagaagagaaattagtccattaccacaggggttcttgtcactactaattatacaacaatcttttcccaacaaaaagatgtcctccacaacctttgttttcaaagcagacagcatctatgtggccaaatatactttgggttgttcttgaggatactggttttgggctgatgactatggtgggcagcatggatccattgggctccttctgctaaacagccacattgaaatggtttaaaagcaagtcagatcaggtgatttgtaaaattgtatttatctgtacatgtatgggcttttaattcccaccaagaaagagagaaattatctttttagttaaaaccaaatttcacttttcaaaatatcttccaacttatttattggttgtcactcaattgcc

SEQ ID NO: 463476 - DNA, 705 bp, Homo Sapiens
  misc_feature (14)..(14): n is a, c, g, or t
agttataataaaancacttttccctcctctaccacataccttttctagtcaaatagcttaaataagactttatcaatgtgagtaaatagtaccttccttaagggtgcttggaactatgtgctaatagtgtttattattttctctctacaaatactttaaagtatgttaagctttcatggcacactctggttagttcattaataatatcacataaccctgctcacagatatcaagtgtggctcactgatattttggagtctgttcccaatgcatagagccaggccagtcttttttcctatcttttatctgtctcattcccatggtctttatcttgtttttttccatagactattttcccaaaatgtcaaaattgtttggaaatttattcttatctacatagttaacaaattttattattgctcaccagcatatgatctgtaaactaaatgttctcaaatctacaatctaggtcaggataaaggtgctccattcagttatttctggaccattacatatcaacattccttcctgattaatataaaagccctcttctaccctcttcgagttgctccctttatgtgtggtttctatagagtttatgaatataatttatttccagggggcctttcagaatccaatagttacctgatatcacttacacaccttgaaacaacagttaagactgaataataattagtaaaactg

SEQ ID NO: 463477 - DNA, 210 bp, Homo Sapiens
ctgagcaccacgcccggcctcccagcccctaattcttatgttcatcaatcaatctcttgctggggttcccctaggaggaggtgaaatgaccccagctcgctgttcctcacatgggtgctgccgtgtcactggctcaggctcagttgctgggtcaccagtagaatggacccttcctccacctcagttcagagcacagtgatgattcgtgcc

SEQ ID NO: 463478 - DNA, 728 bp, Homo Sapiens
  misc_feature (318)..(318): n is a, c, g, or t
  misc_feature (490)..(589): n is a, c, g, or t
  misc_feature (643)..(655): n is a, c, g, or t
taataaaccacttttctgtctttatttttcttttaacatgtattcagtgacaataatagctatataaatcttaaccaacagagaaatatatggaggagaaaataagtttctttcccccacttagccttatatcctttgaaagccttctcaatgcatttacatgcatgcatatataattttggggtgtttcgacaaaagttgataatgctgtatgttttttgcagttggctttaaaaaatcttggatctctttcaatggctaaccctttagttcaaaacatctcatagtaatagatataccattaaccatttcccattngatagatggtcattttgtttccatttttttcactattgacaaacaatgctgtagtattattgtacatacttttttgtggcatataaggatttctctacaatatttattagtgaaactgctaaattgaagattacgtccaattaatattttgataaattctgttaatttcccnnnnnnnnnnnnnnnnnnnnnnnnnnnnnnnnnnnnnnnnnnnnnnnnnnnnnnnnnnnnnnnnnnnnnnnnnnnnnnnnnnnnnnnnnnnnnnnnnnnnaatttaagatatcactttccaaggtggagcagacaaattagaggcaggtttgcnnnnnnnnnnnnnctcattaaacttttttaatgggtctcaaaattctgtgacaaatttttggatgtttccattaaaaagtacgatt

SEQ ID NO: 463479 - DNA, 434 bp, Homo Sapiens
tttgtgattaaaaagaagcagtgcttttattaatgttgcttttcaggccacagttgtctctttcatgcatacagcagagatctctgaggtcttaaccaagtacatgcatctcatgtgattaaactagccattaaaatagaacattggttctatttcaaaaacagatgttggctctaccagcagttatccctgcagccaccctctggttttgccttgccttacagggaaagggaagagaggaccaacatttattgccacccactttgaggggtctcactttgtggcagagacttctgattgtccttcagtggtcacccttcctccctgtgccccttcaccctcgattagtaataggatccttgactgttaactagttagtgttgccagataaaatataggacatccagttaaatttgaatcccaaatgaacaatg

SEQ ID NO: 463480 - DNA, 808 bp, Homo Sapiens
  misc_feature (565)..(586): n is a, c, g, or t
  misc_feature (597)..(623): n is a, c, g, or t
  misc_feature (645)..(669): n is a, c, g, or t
cccagctgatttttcctttatttttgaaaggtaacacaagaatcattatataattttcatttttctaatgtccttgttgaattttagtatcaagactactgctggtgtcacaaaataagctgagtaagctttctcctgtattctctggaatcgtgacactcgtccatttattaagtgattgactggtagaatttagtagtgaagctatctgggcctggagattacataatgaaaatattttaatttggaggttcaattcctttttaacagttttaagacacttcaggggtttgttttttattattgcaagtcgaatttttctatggatttgtcaattttaccaaaatttcgcatgtataaagttacttctaatatccttagtcttttgaatcctattcatttctaatattgataatatttgagattaggtacgtacaaatttgaaaaattttaccaatgaactgaatataattagaactgaatgtgtttatcactagtaatgatttttgccttgaaattgtatcttatattaaataacagctctttgccttaaaatctattttcnnnnnnnnnnnnnnnnnnnnnngagacaagagnnnnnnnnnnnnnnnnnnnnnnnnnnngcaacagagcaagactccatcnnnnnnnnnnnnnnnnnnnnnnnnnggatggctaagaataagtttctctagtctgtttttatccttgaaccacaatcatactctttattattatacaaacttttaaatattggtatctgataccataagtccttccatcatttcctcttctgcatctggttcca

SEQ ID NO: 463481 - DNA, 842 bp, Homo Sapiens
  misc_feature (356)..(366): n is a, c, g, or t
  misc_feature (590)..(590): n is a, c, g, or t
  misc_feature (705)..(705): n is a, c, g, or t
aactactaatcactacttttattttgtattcaaggtcacaatcaaccagaagagggttcttttgctctgtcaaataaatatatttaaaagctagcaaacgtcagagaagagttttatcaggcctataaaagagatgagggaaattaatagttatatacagctacacagagttaacatattgcaagggaaacaactatattcaaaggcttcatttctaatacttgacatttcaaattttgagaacattaaaattattgtcaaacaaaactcagaccacattagcaatgtttataaaagggagcaatttaatcattatattacagagtgctttaagaagtttttaaacgtgtaaaagnnnnnnnnnnngcttagtgcattacggtctttacattgcttcttttttaaaaaagttaacagtagtatgaaaaaagccacccacaaagccagctgtctgagtgaggaaatcagctacattgcagcattttggaattactaataaagctatagttaaaaaataaaaagtttataaaaatgaaagcagcatgcatattcaaggctttttcataacattttcaatggctgaaaaacantttccccaagagcttaatatttattatccattaaattagagaaaataaactggctaagcctacatctggtcattcagaaaaacatgttaaaatccaaagctaattaaactgaacnatttcttctacgaagaaagcgcattttgaaaaatggtcctatggtcacaaaagaaagggttcttcccaatatgaatgaacagcaccagtctttacaaagtttgtaaattagtatgaactttcagtctcctgatacgg

SEQ ID NO: 463482 - DNA, 232 bp, Homo Sapiens
  misc_feature (18)..(18): n is a, c, g, or t
cttttttggccctacgangcccagtatttcggcacgaggccatttgtacttttatgtattttagggctacctagagagttcttaaaggcccagatgatgaaaatcggctgcccttcttcccaaatgagttgcacagtccatctggagagggcactcacacttttgtatgaagctgtaggccataaaatggaaagtaaagaattaaaaactgcagccatttggtagcagttat

SEQ ID NO: 463483 - DNA, 359 bp, Homo Sapiens
  misc_feature (348)..(348): n is a, c, g, or t
agtattttctttttaaaataattcgtatagaatacaggtgatttaaaagctgtattattttgctctctcttttactttttctaagttagaaacacttgaatctatttcattgctttaagatatttagaacatttaagatttcaaatgtatagggcaatggcagaaataagatgactgggccagattgagaagaactgagtagctttcctgtgccagggcctcaatgtggctacaagcaaatgtatcagctacagagattgaggaagccagaagcattctcaaaacatccactgcatgaggcagagtcaacatttaggaaatagtctctgagagttggtccccacaacnacttaagcctg

SEQ ID NO: 463484 - DNA, 296 bp, Homo Sapiens
ggacaatttcttttttcctcatctaatattctccgttgtatgcctttaatgaagtcaaggatctaggtaaagtgaataatgtcagaaatgtttgtcaggtcacagctggaatttgaagagaaccatttcagagatcttgaatgaactgccttatttttggggaatgaccttcagattgggctctgtttatggacttgtctcccccatgaaactgtaggtatctaatgcagtgctttgtacattcaatattagctattcagtaagtgtttattgaatgaatcactctgaaacctact

SEQ ID NO: 463485 - DNA, 769 bp, Homo Sapiens
  misc_feature (754)..(754): n is a, c, g, or t
gcaccaacaggccctgtagtcagcagggactcgtcagatttttatttatatgtgttcaccaaatcacattaattctgagagctaaaacatgctaaggatgaaggttattttctgttcaatctaatttatctatgacaataatcatcactaataatgtgtcaaattggattgcagtcattttatgcatgcatgctgatttggaaaatagtgttaaaccatcccgcagtaattaacaaccggtaaaggtatgccgagcccaaagtaatcagcctatctagatggaaaattaagttttatagaatggatttatagatacatatccttatttaattcagaatataaattattcctggtaaaagccgacatcatttttataacaccattaaggccaataaccattggagggactcggcatccttaatttgctctatcccttcattttttctctcattttctgtggttaactttctaatgggtgtgacttccttattggcaagtcctcattttagcagggtttggtagggctaagagatgaatgaatatgcattggtgtaagtgttaatcatggatgaaggaagccacatcatacctcttaatacacaatgccttataattactggtgggggctgggaggtgggcagtgaggagaatacaaagagcggggtggagctagactttggccttttggtgtttctctattatttctcctcacaaaagtagcaataggaaattttacagattgactcataaaggnattaatgtttcttgg

SEQ ID NO: 463486 - DNA, 586 bp, Homo Sapiens
  misc_feature (60)..(60): n is a, c, g, or t
  misc_feature (569)..(569): n is a, c, g, or t
tcccgggcctcgtgtgggatgagactcgtgctgtctaggagagaaaatctgtaggtttcnctggttttagcacatccctaaaatgtatgagcagcacacatacctctggagccctggccaaagttagtggctgagcagaagacacgtgcttcgcctccataaagtcgtctgcgtggcacgtcagaagcctgcagtcctttcaacttccagttcccagggcatcatcaatcacgtcgcagcgattcctatttcacgtcatggccattctgacaaaacagcaggtttccttcgctcatgagtgcagtgagcggttcctggatgctgaccgtgtggagcactttgtacctcgtgggggtgtaaagaagcctggcaggaagcctggcaggtgggcctcaggcagatggaaaggtggggacagttggaagcagccccttcccgcgctggggcctccccgtggtgtagacgtctcctcgggacgagtctcagtggagccatcatagccaagtcagccggtgcttgaaggctgctgcagctagcacctgggcaacgcggaggctgtacttgccagncctgtgccagggaggct

SEQ ID NO: 463487 - DNA, 691 bp, Homo Sapiens
  misc_feature (93)..(101): n is a, c, g, or t
agcaacattcagtgaatacttttttcttaaaatagggagttgaaagaattttaagctacttttggtgagatacgaacacttaaaattttgggnnnnnnnnnactataataatgaaaaaaatttctatccgtataaaacaacataatgatagaacttagcatccaacttctaccaccaagaaatgactgctattaatattttggtgaacatacttttagaaatctatctatggatatagaagaatttatatacaaaattttaaataaattggtttgcctgtatatagtagtcttttttaatggaaaaatatgttttgtacatctctgcgggaattggaaagatacgcgtaatcctacatgatcattttactggctgcctaatgttccatcttttagaggcaccatactttatgcctttgatgaccttttagattgttctagttttcccttgttgatgtattgatcagccttctgcttatatcattgtatacttgttcatttctcttcttagatgtgtaacctgctgggtcagagattatacacatttaaaatgttgagacatggcttacctgtcctctaaagagactaccagtttataacccccctcagaatccacaagagtcctgctttccatatccttgcccacacaattttgttaatgttaatgtatatgtaacttttttccaaattta

SEQ ID NO: 463488 - DNA, 818 bp, Homo Sapiens
  misc_feature (61)..(61): n is a, c, g, or t
  misc_feature (141)..(150): n is a, c, g, or t
  misc_feature (383)..(409): n is a, c, g, or t
  misc_feature (790)..(790): n is a, c, g, or t
attatttataaattttattttctcctaagactcggtttgtagaatcagttttatttaaganaaaggtttattcacccattattagttggaagtgttaactggtaaaaacctctattgcatttggcaatatttatacaattnnnnnnnnnnccttttgaacaagaaattctacttatgagaatttattccacataattcacataggtgttcaacagatatacccaaagatattcattacagtattgattgtaagggcaaaatattgaaaacaatttaaataaccaacaataaaaaactggttacataaattatggtacatccatacaatgaaatattatatagactttaaaaacaacaaagcagctacaagaaagattaaggcnnnnnnnnnnnnnnnnnnnnnnnnnnncgggaagcaagatgtaaaatggtaaatggtgtgtattgtatgctgctaccttttgtatattttcaaaaggatataagtattttattggtttattcaaggaaagacaaaaaagtatgtatacacttgtaaatgcataggctactcctaaaagataaataagacataagaaactattctagttactctcaaggaagggaatcagatggctagaggataagagctttatatttgatacataatctttttatatcttttgatttttatactattgcatgtattcttaaaatttttactttatcactctaacctattattttttcctagtcctacctatattagtttcttctaatcctcacattctaattgtaacacactgacttnccaggtagacggtatttattacaagtca

SEQ ID NO: 463489 - DNA, 503 bp, Homo Sapiens
ggtgtggtaataacccttaaacattttgtaactttttcatgtcaaataaaaagatacagaaacccacacaaaacaaatatttatcatattattagaaagctaatgtccctgtaaccagcactggggttgggaaatagagcataggtagtcaccccagaaatcccttcataagctttgtcctttctcttccttcaaaactagctgtcttcctcactcttatggcaatgaccccatatcttaatggattaagataatgaaagtgtatttcttacactctgtatctatcaccagaagctgaggtgatagcccgcttgtcattgtcatccatattctgggactcaggcgggaactttctggaatattgccagggagcatggcagaggggcacagtgcattctgggggaatgcacattggctcagcctgggtaatgagtgatatacattacctctgttcacaactcattggccagcaccagtcacaaggccccaccaaataccagagc

SEQ ID NO: 463490 - DNA, 535 bp, Homo Sapiens
tgggcataaaacagcatatatttattatcttatgtttttcatgaatcaagatttcagacacagcttaagaggattctctgttgagggttacacagggctaaattaaggctaagcttcgctgatttaaggagctcaggtattcttccaagatgcttctgacagaatttatttccttgcaactgtagaattcatggttgcttgcttcttcaaggtcattcatccaaataggttagacctatgcaggataatctccatttgattaacttaaagacaatagattagagatttaatcatatctggaaaatcctttcacttttgccatattctattgattaaaagaggtttacgtaaaggtttgaatactaggagtcaggagtcatggaggccatctcagatttctggctactagagattctaaatcagaactacccacctaagctcttcctaaattccttacccatatgagataataaatatttgttttattaggtcactacattttggggtattttgttacacagcaataaataacgaa

SEQ ID NO: 463491 - DNA, 597 bp, Homo Sapiens
atctgaagtgggttttatctagtcttagtggcagcattttcgtttactttgggaatatgttctgaaacctgaattgaagtctgtggaaaatatgattcaatatccaaatctgaactttattcatggcctttcagggaagtacatacaattaaagaaaggctaagtaaaatgagttacatcatggtcgtaactaccacttgtagaacactttcaatgagtcaggcattttatatgctttatttctcatcttaatcttatatagcagacttgaaaatgtgaataacagaggcaaggaaagttgaagtaacttacccttcatcacctaagctaatatgtaccagagccaggattcaaatccagcgctgtctggctccaaagccagggcttattagctataaagaaatcacactcctgggtcccctcagttcccatcctgatgtgctccacggaacaacccaaggaggagaatcagttctgtcatcaactgccgctagcaccacctgcatcctcaggaggcaagaatgctgccttcataagccacatcacaaaaacaccctctggaggagaggcggtgtagtaaaaagtattttttcttgg

SEQ ID NO: 463492 - DNA, 972 bp, Homo Sapiens
  misc_feature (216)..(216): n is a, c, g, or t
  misc_feature (219)..(219): n is a, c, g, or t
  misc_feature (858)..(873): n is a, c, g, or t
agcatcattcatttattgtttaccataacccattgcacacaaaggttgcaaaacctccaagttagaggaaatcctgagaggctgcaaaattatgattatatctcatataccacagtatattgttccgatgaatcttttgcatggttagttgttgtttacatacaaataccttctccggaaataaaaaatgtactgaaggtaacaggagctgcaaanttnagcagatccgatgatcccaagatcatgcagtaaggcttgcttcttcatccataaataaagcacatttgcatccattcagtcaaattagctccattaaaaaggtggttataattagctcctttttctggttcacgggtaaaattcttgcatgcctgctgttttgattaaatccaccattgtcttccaatagctagtgctaattcttccagggaattcttcagttgaggtgttattttattctgcgcttccggttagttgtctaatttacgccaagtccctgcagtgtttccttaagcccatcctctttgtcttgcctttgaaatttaccaaatcttacaagaaatcaatacttaattgattattcacttttctgcagcttcaaacagcaagcacgcataagatcctggagtagtcccccgatttccaatgcaggaggttgcttggtggcagagctctgcaagtgtccaacagcaggcattccatggagccgtgcaccggcgtggagtgccagccagcgtctgataaagaaaacgaagatactctaacgaagcaggaaaacttcctggatgaggcagatccatctcaaggctttggataaaaggctgaagcaggagcaattggataccacaacattataannnnnnnnnnnnnnnngcattattccttttgctttttgcttaccattttcttcccatggcactgaagtggaatatcccaagtgccaccgaactcagagaaccgctgtgccgaaat

SEQ ID NO: 463493 - DNA, 747 bp, Homo Sapiens
acagtttcttcagctatagtcaacatcagcaatgcctgtgtgtgcctcaatggcttaggctgtagagatttgtatggctattccacctacttgggctctgctcctcggggggttgggtgctgggctggtccacgctttggagaagtgaggggctggtaaatcagtggcttgagtcagctcaggctctgctcctcacattaaatcttgaaagatgtgaatttcattacctcttagttacataaagccatatacaaactctttgttgtttgttttaaatcttatctctgacttggttataaatgattgcacttttctactatttctaactacagtatagcagtgctgaaacatctggggggcaaaagaaagttagataggctagtaacaccaaagtaatgctgaaacctggaaggaaagaaaacacattactttcctctccattcttctttgctcccctttgaatatatgcttattataatagcaagctgtgtgaccttgagccatttatttgtctggagccacagcttctttacttacaaaataaagttaatgccatttacatctcagaaattgtgaatatacatgagaaatatgtttataaaatctcatgatatgcttgtcacacagtaaggtttggtaaagtgaatccttcaacagcgttccccaattctttctcttgtgctgaaagtggactatctatcttagaaaagaccatgcaaaccaaaatagaatgacttggctacagag

SEQ ID NO: 463494 - DNA, 295 bp, Homo Sapiens
gcatctgttcttatgccagaactacactgttttgactatgtagttttgtaggaagttttgaaatcagaaagtatgaatcctccagctttgtgcatcttttcaaagactgctttggctatttggggtcctttaatattccatatgaattttcagatgggtttttctgtttctgtaaaaaatgtgattgggactttggtaaggggcgcattgcatctgttgatcactttgggtggaattgtcatctaaacattgtcccaatccatgaacatgaatgtctttctgtaggtgggttatt

SEQ ID NO: 463495 - DNA, 770 bp, Homo Sapiens
cataaccctgtgctttggactttattcttctagacctgccattccaggaagtgccagaatataccaaaataaaaatccccataaaagcatttttaaacaaaaatccctgggtaatgtttgagttattttaaatctagatcaaaatcttggattcttctgagtccatgatgacaaatgtttggatgaaaagtagaaaatacagttaaaaataaaaatgtcctaaagtttacagatttttgagtttgtgtacatatcttcaaactcactccttgcatgatagggtttggttttaatggtttatttttatcagcaccaagttgcattgcactattgaggctgagcaaatgctggtggaaaggtgagttttcatttctggcaatggatcattatttgtacactgtaaatatcatgcccagctacccctttcccttatctcttcccctgggataaatgttaaggaatagtaatacttattatggtatgtttaagaaaccttggacattaccctgaatcaaaacttcaaatgttaggtggcagcaggaaacaaaagattacagcttgaatgaaattttaaaattgaatgttgtaaaactatttttgaacgttttagctgccttatttatgttaatataactgtagagagatgccaaatgtataatatcagaagggaaaactacgattttgctgtgcctacaattgtttacattttttaaatctccagttttcaaaagtattttaaattgtcaaacatttgctaaaactggattata

SEQ ID NO: 463496 - DNA, 1006 bp, Homo Sapiens
  misc_feature (451)..(451): n is a, c, g, or t
  misc_feature (557)..(557): n is a, c, g, or t
ggcagataaaatgttttatttatatcaaatctattacatttttgtctttgggcactccgattaagtctgttcctcagattccattactgatagacaacatttcaacatttcaactgcattgaatcttggatcataacatgagtaaacaatgtaaactttattttgtcaatctgatgaaattcaaagtttctctgttaaagcatttacatttacttacactgattaatatatatgataaccacagcactgtggttaagaacatgaggttttaaattacaaatgagtcagagtcatggctccaatatcactacatatggaaatgtaggtaaatcactttcttactctaagtttggattttcttttctagaaaatggtaactatctcattgtgatgttgataattgaacacataattagaactcaacaaatacaggctatcagtatctacaaanccaagataatagcatttactttgtataggattgttttgaaggtgaaggaggtaatctgtgaataagtatttaatatagtacttgcacattctatttgcttaattanaactaatacatgtggatgttattatcatcatcatcaatatgaattttatctttaaaattcatgacaaggtaatgcttcagaatgaccctaagcttattgaaacttcaagcaaaccaaaacttaaattatggtaatttctcagttatccaaccaacaaggtgctgcttacacaaatattatctagttttactttgaatgaacaagaaatgcagcagtagcagtgaccatttaaatcttcaaatattgtccccctccccacatactttatttctgtgaacaattaatgaagcacaaattgctttttggttgcagatatcctggtcctcattatttaaacttctctttgttcttctcagggtgtttccacacaataagttgaatacatttttatagatcaactggatgattttaagagaaaaaccatgaaagaacaataattaatcaccaag

SEQ ID NO: 463497 - DNA, 404 bp, Homo Sapiens
cctctctttatttgtaataagctcttataaatgaaaatggtcacaatagtgaccaaaataagaacatattaaaaattttttaaaggcaaagaacttaaactctcaaatcttactaaagatataaataagatccaaacagaaaatgatatgatgttctcagatgggaagacagtattgtgggtcaaacttccccaaattaatatgtaaatttaatgtaattttaactcctaattggattaaattattacaaacttcaaatgctgaggatagccaacaaaggcagtaaaaagaacagtgggcaggggcttgggaagcggaaaagctctcctgaccatattataaggccaccaataactgaatccatatgatattgtcatatgaaaggagaattgtaagtgaaaccc

SEQ ID NO: 463498 - DNA, 671 bp, Homo Sapiens
ctcttattcattcagtttttttgggaggcggggtggggaagtggtaattaaaagcatgaactctggatctgcctatctgcattcaaatcctatttcagacacttcctagctatgtgatgttgtgcaaaatactttgacctctctgtgtctcagttttctcatctgcaaaatgaagaacactatccacatcactgaattggtgtgaggatgaaataaattacttatgtaaagaacactacttggcatataagggctccagtagtgttagtattacgtattgttatgagttaatcgcaggttgtatcatgttctagatgtctggcttgcagttggtgtgtcatggcactaatgttagaaagaatggctattctctttttcctgcctttcatgctcttaccttctttcagttcacagagacactgaaggaaaataaaatcatccacttaagtgtgctcttaactcagttcataagtattcatttcccactccatcattgctcatactcatgtgtacttacaacaagtttcttgaagactggggaggagagctgaggtaggggacagagaattcatctctttaaccacttcgagatcagattgaaatctaagggtgcagagtaaaatactcagatggacaatgtatatcacataaatctggaagtgtcagaaagc

SEQ ID NO: 463499 - DNA, 605 bp, Homo Sapiens
gctccttctcatccttgaagtctcaacctgaatttttagacaggtcttccctctttagagaggtctttgctaacgccctagtctgaattagattccccctgaattctttcccgtaacaccctattcttgtcttttatagccctctccaaagttgaaatacatatttatgtatagcgttacttgtgtaaagtctctccccagctagaatacaatagcccaggctgtggtatattttaacaatggctaaattttcttgagcaccaatagtgtgtcaggggtcatccttctatctttccatgcaacaactcaccaggtaggaaatgcgtgtattttgaaagtggtaaaaccgagacacagagaggctaaggtaactctcccaaagttagaaagccatcaagaggaggagccaagttgcaaagcaaggtagtctggatccctgagcccatactcttaaacaccatgctatgaatgaataggaatctgacacatgaggacatggaagcaactggcataccacatctgccccttaatgactgagtgatgtgctggaatctgagagcaagagctgtggagtgagtgaggataaatgttcataacgttatagg

SEQ ID NO: 463500 - DNA, 513 bp, Homo Sapiens
aagtttcattacacatgtcctttattagaagctactttaaatcctttttcaaacatgaattgattttaattaaaataaaattttactggaacacagtcatgcgcattcatttctgtgtcatcgagtgctgctcttaccctacaacggcagagttgagtatgcagttatgatggcgaccatcagacccgcaaaccctaatgtagttaccatctggcccttcagagaaagtctgctgttcccagctgtatagcattcccctcccaccttctatcccatcagcccaacctaactcacttgtcattttgtgttctcgatggtttatttcaaaagtgaatgatataacctttacctagctcaggttagcctttttcaaagaacaaaacaaaatttagttgcttccttactggtgcagtgttttttgtcagtgatcctcagggggaaaaaaaggtgtcccaatcctagttttgctagggcaaggtgaaccctttcaagtttgtataattagttttttta

SEQ ID NO: 463501 - DNA, 615 bp, Homo Sapiens
  misc_feature (371)..(412): n is a, c, g, or t
tttatctgaggagatacctttattataaaaaattttacttgaagaaatttatcttgataagcaaatgtaaggctgtcacttttgcttattggcattaaataaacatactacagtttttccatttaaaaatgtgggttatttgattatgccagagtagttacaatcaagaactaacaaacatttgtacttaatgtactgaaaggtctttgcccactttttaaaagttctcttgcagaactacaactctgtgaagtactacatttataagccaaaacatttttaacaaagaagaaaaattcccatcattcatttaaccaaatacagtagtaaactttgtctttaaaatggggaggcttgttattatagttgcnnnnnnnnnnnnnnnnnnnnnnnnnnnnnnnnnnnnnnnnnngaagttgaagggagcgtgctctctctgggggttcagttaattgcagtgagtaaatcaatattcagcaatcatgtcttttaaagccctttctaatcttgagattttatgattctatatttacctttgcctctgctttttccttcagtgataagagtgcagggattatgtaggggttgagatggggaagaattgggctagggttt

SEQ ID NO: 463502 - DNA, 429 bp, Homo Sapiens
ttgaaatatgcccaaatactttattagtatgacaggcagcatcaagatttagattagttgtgttaatttagaaacagcataagattagtttgtgttaatttagaaacatcagaatgaagaactaatagatagtgtttacactgtgccaattaatcgttcaaggagattgacaggaaatacctcatgtaattcattgcagcaatttacagaggtaggtattattgtagtaccctctgaacagatgaggaaactgagggacagacaagacaagcaacttggatggagcccaggagacaggctgagggtcccctgctttgcacactgcactgctgcttccacacattctcgggtgtgatctttcttcctctttaggaacaagagcctgtgcaccaggaagcaggacttcactctcaccaaggtactctctgc

SEQ ID NO: 463503 - DNA, 695 bp, Homo Sapiens
  misc_feature (15)..(15): n is a, c, g, or t
  misc_feature (24)..(24): n is a, c, g, or t
  misc_feature (649)..(649): n is a, c, g, or t
gggtaggcaaagagnaggattccncaggcaggaaaaactgttcaggtcaccccacggttacgtcatcaggggcccaggataaaatgctggctccttaccaggcagggctcaaaggcctgctccctgtctatggccttggcccctccctcaccctccaggtctctgcagatgcagctccctcagccaaggctggcctccttccctgtccctgggaagcttcctgccccctctatcttcctgggtgccgtcccttgtgcccccatagcaccctatgcttccctgttacagcacatataactttgtaattgcttcactcaatctttctcatccacgaagtttttgctccatgagggaggggctgtgtcagtctcattcaccacagtgtccccatcatccagcatggtggcagaaggagctcaataaatgtgtgctgtgtttataaaatgaatgaagacctgccttcaaggaactcacagcttagtgggggagataaaccagatacaggaccacatcagtgccaggcaaatcaaagcaggatttatggggtgtaggtgccaaatgaaggctccagactacaggaattatgagtatatgtggagaagggagagtggggtttccgtagaccttcagagctgggatgaaagtgcancatcatctagactaacagttgtcaaattgttttggctcctgaagtg

SEQ ID NO: 463504 - DNA, 606 bp, Homo Sapiens
agaatgaatgaagatacatttcttttattttctttattaatttcgaacctcaataaagtgtgttagccattctcagaaaaaaaataaacaaatgttttaaaaggccaaagctattctagtactcacaagaattaaaatagacaagtggaaaacatttcaagaacaattaaagcactgaacacagaataggaaacaaaaagaaggcatccattacttaagctgtaatacaagagtccattcttttccattttcagtgggcatgtaacagtttgatgactatgaatgtccctgaagttcatctggtttacaaaccactatttaagaaatgctttatcagataaacaaattgggtttggtatgcaactatatactgtttttttgtgtgtaaggtgagtaaagattcaaataatattttttctgagacagatctccaaattatgatttaccacattatcataacagcctattaaagattaatggaaagtatcttcaattaattcaaggtagtttattatgtgacatgctcaagcactgcaagtagagcttgtggaagagcaaaaattgagagttgatatattgataattccccaggggaaggcaggcggc

SEQ ID NO: 463505 - DNA, 433 bp, Homo Sapiens
  misc_feature (12)..(12): n is a, c, g, or t
caactgcctggnactggtttattgctgtttgttatgcatttgtgttctctgccctaattgaatttgcaactgttaattacttcaccaaaagaggatgggcttgggatgggaagagtgtagtaaatgacacggtaagtgagagcttccgtgttatcattattaagaaaataccctaatgaattccgcttgtaacagatatgtttctaaaatcctgacattaaagacatccatatatatatgaatttgaatcatatcaatttcttttaaagtgttcttgcctgaaatcctttaggagttcttgtagtactaatacttccattaaaaccactccgtagcatctgttgagctgtatgtgtcaggcactgtgctaagtgttttacatatgctctcctcacataatctttatagcatccttatgactagactgccttct

SEQ ID NO: 463506 - DNA, 422 bp, Homo Sapiens
ggaaaagaatgcttctttattgatggttatatttatcagcaaggatcatgactcagtagccagttgaaggaatcagaacactttgggtacatgctgctaaaagcccgtcagctcgtcatccttgtttttgtcaacctggtatccagtaagtaccaagtcctcattttgtccgggaagacttttgaatactttcaagtgcatatatttattatcacctgctcgtaccttaatgtagtaatttgttccagcaacaacttgagttttatactgcacagcttccaattttccataagtctcatttgttttttcttcaagctgtggtttaaccttatcaacaatctcctggatttctggagtggcgggtttggcctcagataagcctccaggtatcattttggctgattgcttctttgctggacagg

SEQ ID NO: 463507 - DNA, 643 bp, Homo Sapiens
cattttacagtgtttatttgcatatattatagaagacatttcagacatattaaagatgagaaacaagaaggctacagtagtctgagtacatcctgtattcctaagaaacaaatgtgcaaacatctcaaatccagacatgggtatacgttttagactagagaaatagaaattctagaccttgtacattgcttagaggattaaaaaggaatgggcatatgatggccatggaggagagaaggatagctgtgttttgtggtttagaagattgtctctttaaagctttgagagccttcattgatggataaactaggaggccttgaacacactggttattaaatgttaatgtgacatattgaggttggaaccttgctccagagtaacatggcaaatattagttttcagaacacctgagcttgtggccttgagcctaacacaactgacagtagcctccaagtccaggctgactcagttgagttggtctgtttcagaggattaagtccttctctgtatacagttgagaatttctccctcacatagatgaagtacgtttagtaagtatgtcatgtatactttcaattaattaccaatccatttattcattcaaaaacatgtatgaagtacctagccagataactgcctctgg

SEQ ID NO: 463508 - DNA, 548 bp, Homo Sapiens
  misc_feature (420)..(470): n is a, c, g, or t
  misc_feature (509)..(509): n is a, c, g, or t
ataaatcacagtcatgagtaattgagtcataattaaatgctgagttctcagcccttctagaaaatcataaaacctggggatggtcttgaggacttcccccaacacaatggcataggagtagagggaaaagagaagggaaaaatgggccaaggagagaggaaagagtagacacataaaggagggagggtaaaaagggaaagagaagagggaaggcagaagagcctggggtagaagggtaaggacaaaaagcaagccctggtgtcttttaaaatcacctttccaatctcttttttatataaaagcattgcttactggttattaatagctagcattcacttggcttagttcgtttccatgccaaactgattgttaaatattttatcagtctcttgcttcttctatggcacatgcttgcccaannnnnnnnnnnnnnnnnnnnnnnnnnnnnnnnnnnnnnnnnnnnnnnnnnnaatggcttttataggatgtatattatatgtatgtatatnctatgtatgcattttttccttttttcctcgtgccgaatt

SEQ ID NO: 463509 - DNA, 971 bp, Homo Sapiens
  misc_feature (299)..(299): n is a, c, g, or t
ccaggtgcatgtaatttattaatggagctttgacagtcacaagttccagcaagtcaggggtgggggctgcagggtggcctcttgccctgtaaccacagtcatcaaatatgcctcgccatctttgaggggctttcctgagatgacagattcctttctggcactgtgtagccaactggagtcacagacctcagcctgggccaaatgagcattttacgggagaaggacaatcccttatagcttagccctaggggagctctgggcagggttttacacattctttctgaaagtaaggtcatttnggggacagggctgagagcagtttcttggctacacagatgggtctgtcagggttgaagccacatgggtgcctgctcatgtgccatgttgaaggagtccctgtccgcctatcagcagcccgcatgggctttactggttggccttacactcaaacaggaaatccctgggtctcaggtggagagtgccgtgccgtcctgcctgctccccagggccctcacaggacacagcaggtgcaggacacaggcccgtgctgctgcagctgctgctggagctgctccttctccatcatcagcgccttcatcttctcttccagcttgcccagctccaccagccacctctgcctgcaccactcctggatggcgctggcagacagcgggccctggatgctcccgtcgcgccgcagaaacacctccccctggtctgtctggtagagttgcggctggctctgggccttgggggtgtgcacggtcaggcggatcaccttgagggggacgctggtctccgaggtactgatcacagggatgaaggtgagagtgtaggcatcgggaaagatctgaggcttgaagccctgcaggatggagtccaccagcaggcgtgcgcggtcctcgtcacggtggctgcagcggatgccctgcaccaggccgctgtcctctactcccacgagcaggctgccg

SEQ ID NO: 463510 - DNA, 651 bp, Homo Sapiens
ccaaatgtgatgccactgctcttatcttgataacttgtaaacagaaacagcactgccttgattccaataagggtatcagaactatggcacagatattcagaacagtgatatttagcacgtctattaaactagccttacagatgtcaatcacatagttgcataccttaaaatactaacaatttatgatcagctagtaatggatgatgtaagttatgatttagtttactgtaatgaaggggatactggtataaaatgtcggcaaaatttgagcggggaaatattttttgcttttctgcaaggctgtgttcaaaacaaattcagattagaagatgaaatgattatgaaagaagatgaaatgattatgaatttaatcattggttaaggatatttaatttcaaaataatctcaaataatattttattacttttaaaatgcaggaaaaacgaagtgaattttgataacgttgtaattttagactcaggtacaagaaattatcctttatataaaaatgccagagtatggtgggagatggcacccagtacagtagagaggccagtccgtatgtcacctgcgggaactcattgcaacaggaggtgatgggcaaagattagagagatggatagatgtttccctcctagccagactctatct

SEQ ID NO: 463511 - DNA, 583 bp, Homo Sapiens
  misc_feature (542)..(542): n is a, c, g, or t
cagtaaaaacattttaattacaccccaagccaaaggaacattaaaattaagggaaagcctggaaaagaagaaattttaatggaagcatatgattttagatcagctataaaataagacagttataacatatccataatatattgaaaagggtggaacatcgaaggtgtattatcataatgaccagttataaataaatcagttgttcattatttccattgagagaacaaactgacgacaacatctattcaacgtgtgaatgattcatttaatagcttttcatgcctcatttctgacacttttttttgggaggctaaaaattactgaagtgattgaaatacactgtgctagagtgacttgtacataatttggttactaattggtacttttatttctaaatgatgatttttttcaccccataatgaaatagcttaaatgctagttcttcaggatttgctatgatgagaagcttacttttggaatttcctcatcagtaacaggtaaattagatggatactttgcatgtattaaattatagtggtatncctggggagactggcgtgttatctgttgataccagactcgg

SEQ ID NO: 463512 - DNA, 569 bp, Homo Sapiens
aggaagacagccagtgtttatgcttaaggactagacgaccctcccctggcaatggcaataaggggagacccagaatgactggtgtgttcttttaagataaaacccagacttagggctcctacagagaaagggctcctccatgttccttcaaagatggaggcagcagacaccaggcctacatggaccacctgaagatattttcgaacatgaaatcaacagtccctcaacccagcaaccgcctatccacagcttcactattcagcatagagagccaacatctaacatcatcccaggaggacacagctccaaatctggggtctcttacttcccaattgcaaactccatgatcacaactttcgatttctgtggaatgagtcccaccctccactaactatccagtctcaggattccctgatcttcctgaaaagccatctctcaaaaatatagttgtttaatccaaaccttggtcaaacctaactcttcccctggtcatatttaccatccatccaggattgtttttcaccagtggctatagggtctgggatatcttaaaacttccctttctatca

SEQ ID NO: 463513 - DNA, 595 bp, Homo Sapiens
ggcgccattttaaagacaattaaaaggagttttgggtctctgagatgtgtgggctgtggggaatcagattggccatttggctttttttcctgcagtcttaaccacaaaattgagctctaaggattccgacactaaatggggaagcaggaagagcaagtcttaaaagattcaagtccattggctcacccttctcactggccagcctgcttaaatttatttgaacctcactttctacacttttgattggggtaggggaggggtagtaggaataatttatgatgctttttacaagtaatttgatgcaaattatttattatgtaaaataattagaaacccagagaacatttatgtaaattatctgaatcccagtctcagtgataagaaaaacttagatgtaaatgttctacttttcagaagaccaaagggcctgaattttatatctgtaaaggcacaagggaagaatataaattgaattagtaattaaaggaaggtctgaatccacagacatagcaaagatggaggattatatatatataagggtaatagagagggacactgacattaaaaggaaatgtgtagccattactgtgccaga

SEQ ID NO: 463514 - DNA, 685 bp, Homo Sapiens
  misc_feature (197)..(197): n is a, c, g, or t
ggcggagttttaaaatcttcttctaccacgaactctacccctgacaaacggtgagaaaataaatagaattgctagtcttcatcacacggaaaagagctagtgagctatttcgtttcctccctttttctgcccccttctcttttcccagcttcccatttatagccctgctttgcagaagacaggaacagatactctangaagcaaggatgaacatgagagttggatttacaacatggaaagcaaagggccatgcattcctaaagggcagggaaggccttaagggcagggctttgacttttcaccactgcctcctctgcctagcacctgcatgcagtgggcattcaactaatatttaaggcagaacaggaaggaaaggcaaaaacttgggaagaaatatacaactgaggagaaaatttccagacatttcactgtgaaggtgtcagaaaagacagttctctattttcagccatactaagtggacattctacttgtattattctgtgaattttctaattgagtcatgaaaattctttcattgaaagcacattcttttttagtactttgtatttttcctcataaaaaagatttcctctaacataaatgcataaagcactagaaaatcatgattgagatgacatggcatgttttccacatttcaattttcaatactttgtatctatcccag

SEQ ID NO: 463515 - DNA, 668 bp, Homo Sapiens
atgggaaaaggtacacaactttattgaaaacattgagtgcagaaataaaccctgctcatgaatgggaaaattcaattttacacaggtgctgattttatccagactgatctatagattcagctgggttccattctacatctcaaggggtttttggggggaatttgacaagctgattctcaaggttacatggaagagcaagggccgagactagagtttaggagatgattcccaaagggcacaggggcagaaaaatgaccagtggagccacatagaaaaatcaattattgtattttcaatggatcactaggcagcagggaaaaggaatgccatacagctacacacaataatccggatacatctcaggaacataatcaagtgaaaaggcaaactgtaaaagaataaactctgcatgatttcattcatatatttgaaaacatgcaaagccaacacaaacacattaataaaactataaagcaaagcaacggaatgactgaaacaggacagtgtctcccccaccaggaaggggcaacagcaggaacttcgaaggaaatggtaaccttctcaaatgcagtggggctgtttcctcttaatttttataaatgtgttcttgtagctcctcactaattaaaaacaacaacaacaacgagtccaggcatggtggctcacac

SEQ ID NO: 463516 - DNA, 773 bp, Homo Sapiens
  misc_feature (11)..(11): n is a, c, g, or t
  misc_feature (741)..(741): n is a, c, g, or t
acatctttttnaatcccaagtacataggctgcttcaaatcagaacagttgggccctattttcaaaaagagagtgaaagagaaacattaatggagtaattacctctaagtattattctctgtgaatatgtgtggcgtgtacagatattcagatatttgacatatacagaaaagtttttatggggaaaattgacattaattaaataggcattttacattttgcctacacaaatatgctttatgtctaaattgaaatctattataaaacaatgaagaaaatcactggcttacttccattttaaaagaaacctttctttaagaaaaaaacattcttctgaaaggcatttttattaaatgtaaacaataattttctttgaaatactcaacattatcctagtcttaataaagttgaccgagataacaattagctcacatatgtaacagacaagttataaagcaatttttaaagactttcattatttcattcttgttatattataaaatcctacagtcatagagttgagcaaaataatttctgcctctatttcagactaataaatatttaaacttaaaaaaatccttaaaaggggattttatattttgtcttaattcactctgattataaactctttatttgatcactgaccaaccatcaaaagacagtttatcaagcaaagtcatactgcaaagttgaagcaaccactgaaaccctgaaacagcctgctcccaaccatatcctactncatcaacaagcaaggaaaacatccacttgtgt

SEQ ID NO: 463517 - DNA, 796 bp, Homo Sapiens
  misc_feature (57)..(57): n is a, c, g, or t
  misc_feature (289)..(319): n is a, c, g, or t
cttttattcatttctcttctaaatccattaccagtattctttttatctggaactcancagattaacttgtagatatcaggctaaaaccaagtagctctaagtatttataaccaaaaaaaccatctagaatccttatctaatgttaattttctatgggtctccaattttcttcctctctttcacgcttccttgagtgagcacagtgtcttcagacatcccacggttccgttgtgttgtcccactcacaccagtagctcccatttatctttctttcaatcgctaggagttnnnnnnnnnnnnnnnnnnnnnnnnnnnnnnntgtcagcccctctacacctgggctttcctctgcatgcatgtacacacgcagcctccttgaggtgagtgtccagaagtcggagggagatttgtgaggtaaagagaaagggataagagagtcctcattaggctattcacatatcaaatactctgaagaaaaaggtttgaaggaggggaatgggcatctttaccaacctgacttgggtgtggcaagtgacttggcctctgcctccaatcaaggtgactattgagtggagcttttctagctgtcactcaaatgaaacgtacaccaagttgacttataccaagaaggacaagcacctaagtactgagagcttcaggataaatgaatgggcttcttgctgtaaatggaaggaaattcaggaaacagagactgggcaggtgaacaggacagcaacttaaccttcatctgctttccagggattgtacatcttgttcttgatgtctgttaccattg

SEQ ID NO: 463518 - DNA, 596 bp, Homo Sapiens
  misc_feature (364)..(416): n is a, c, g, or t
aaaaaaagtaagagccatgcatggtacaaaatgctgtaggaattctgtagtcctcaggaataacacacaaagggcagcatgggactgcatctagacagatacaaaaatttggatgggcattgatactcggcaacaagagtatcttgccagagctgcaaatatacttctagaaattgaaccaaggttatggattctgttttaacagcggttttcaagaataatggagggaacaatccttaaattctttagggtcagctcctatctttttcagttttcaagtctggacaccatcctttgagggaggtattggacaaacccagatgggtaaagcacttggaaaacatagtaagtgaactgcggttcnnnnnnnnnnnnnnnnnnnnnnnnnnnnnnnnnnnnnnnnnnnnnnnnnnnnngaacataagaacaagcttcatctaatcaaagaatatatttgttcagtgattaaagccaatcgttttcctcatctctgtggtactttatagactgttgaaatttagtagttaataattttctatcttgttttaatagtttcactattaaaaatcatgttgtcggccaggcgcggtggctca

SEQ ID NO: 463519 - DNA, 608 bp, Homo Sapiens
  misc_feature (375)..(406): n is a, c, g, or t
gttattaaatttataaatttatttagctttccagatcttcttggaataaatgtcaggtagtagaatttgtacaaaccttggtaatgtcttaggtttagatacgaacttaacaggtatatttaattttctgtattccacaatggagctagaagcaggactcatgaaaatagtaactatatgttttgcatgtatccttcaaagtgaaatccttaacaaatttaacagtatatattaggctgctgatgaaacagctaaacctgtctgccaggtggcttcgaaaatggaattaatttttacatggcattgataagttactatttcaatacaaccaggtggtaattgatacccaataatgtttgaggtttgctttaaatnnnnnnnnnnnnnnnnnnnnnnnnnnnnnnnngtgtaatatagtactgtgggatccacaataacattttctttagtttcccttaatatcaggttgtcattaggaaagattccacaagttatttaaaccagaaatgaagtaacatgtttcatatctatttcaagggataatttttcatgacccagtataatgcaactagcaaatttaaacatacttggaatttaagatatagagg

SEQ ID NO: 463520 - DNA, 478 bp, Homo Sapiens
  misc_feature (395)..(395): n is a, c, g, or t
  misc_feature (425)..(425): n is a, c, g, or t
cattcattgtacatttaggtagacatttctaaaaagagagacatgtgtcttgggacccccacgtttcattatttagctgtgaatttcttttaatctacccacttcttttaaatcgcaaacaaattacttgcagctttctttagtctctgcagaaaattactcaagtaattgtctttatgatgtctttccttcttatttatataaccactgaaaaaggagattttcattcacttgacaagtatttacccagtgccttccctgggtcaggtattctgttgggtagtaggaaggtacaattatgaaaaaggcagactctaacctgaagggcatctagaggaggagacagacacaattacgtaatcacgaatgcaaatgtagcaactttgataatgcanacaagtcctacaaagcccagagtaaggcanacataaacccacctgaggaagctgggactgatgaatagaggaggtgacattaa

SEQ ID NO: 463521 - DNA, 565 bp, Homo Sapiens
gtcaacattatttttaaagctgactcagggaaataaaacctcattgttagtgctgatatatacggtatgttatcctgttgaaaacttaacccctcttgtcctgctcccaactgaactaaataagaggtaagcactttgacagctgctgaccttttgtgcatgttttgccctatggccagtgcctggtttgcaatgggattggcccatgatgtgaagtaaagggcagcacatattcaacactcttcagagaagactctgccaagaatgacaagtgatcagcaaaaatctttgcattttagaggatcaaaaggcccgtgaaacttttctggacacataccatggagcccataacctgtatcgttgttgaacagtgagagcaatgacaagaggagaagtggtgcagaggccccagctcagaggggagatgtggaaagcatcagccatggatgctcacagagaaaagcctgagtctgggatgccagaagcaagggctgcacaccctgtcttctgcacaaaccaaccacaacagtgatttgggcttcaataaaataatcactacgaaatg

SEQ ID NO: 463522 - DNA, 121 bp, Homo Sapiens
agcagtgacagtgagaccctgtctcaaaaatcaaatcgaaacaaaccatatttggtatacatacttatcctacccctaagtagaatatcataataggcatttactttagtaatgctaagcc

SEQ ID NO: 463523 - DNA, 783 bp, Homo Sapiens
  misc_feature (516)..(516): n is a, c, g, or t
ctgccaaagtaggaggaccagagataggatcaagaaagcatcttcagtcggatttaggtaggttattaagtgctgatgattcttcttcaaagctaatccagaaaaatggaagcagtgggcctgactcactgagataaatagcttagaggcaagcaaatccacggttttgtagatttgacttgaaaaaaatcattaattcttatagataaatatcaaaatagagaaatgatcaaatggtgtgagaatctaggaatactgcatgggaggtaggaatgaaaaatagaaaagggtaatctacaagaaaagaatttggcctcttccagtgggaacatatcatttggaggttttttatgtttgaaattttttaaggacagagatgctcattattaatgtgtctgtgtgtttgggcttggccagcctaagattttgtatataaggaggctttaggagtaataattgtgatttagaaagccgggcttgaagaggttggggttgcctagggaatttgttttgaangttgcattgcctggtaaccataggtgcttttactaagattttgtgtttattggggtggctttgctagcatcctcccgctccatttcaagctgtgccctttggagttgtgcttttaaacctttgaacactgctcatatgaggtataaaagggttatcccaaactatgtgtatctgttgccatgagctattgacaaatgtaatatacaataatacacatgtctggaaagtaggaagatctatataagtaagggaaatgtatgaatttcc

SEQ ID NO: 463524 - DNA, 507 bp, Homo Sapiens
gaagttccaacatgctttatttgaggacgagcgctcacccgggatggagtaagaagtgggatgggagaagcgtagggttcaaattttctttgtgtctctgtgatccttaaagcatctcagcaagctgtagagatggtattaaggggagagaaaactttgagatgacaagaggaaacgttaataccattctcactccaatgaaacccatgaccactttttaaatgtcctacagagtcactgggtgagataagtaagatcactgtttcaatacagatggggaaagataataaataaagaagtcttggttttcttcatttgcagggaggattaccagggtagaaatgggtaaaaatcggtaaataactatttactactgtctctggtgttttctcataatcaagccacttaaatacctccctacttttccctcaactcccagaacaaagccaagactttgataccaatttcttcgtgcttttcctcctcgtgccgaattcttggcctcgt

SEQ ID NO: 463525 - DNA, 649 bp, Homo Sapiens
tttttaatacaaaatttattttatttctatgtactaacaatgaacaatgggaggtatttacaattacagtcaaaaccataaaacacttagaattttacaaacttcaagacctacacactgaaaactataaaacatttccgagaagtcaaagactaaataaatggaagatgatactatgttcatcaattagagtacttaatatgttattaattctcactaaattgatttatagattccatacaatcctgctcaaaatcccagcaggctttattctggggaaatattgacaacctaattccaaatgttatagggaaatgcaaaggacctagaacagccaaaacaacttgataaaaggacaaaattgaaatccttaaatttgactcccatatttccaacaaatctacagtaattaagacaatgatataggtgtaaaggaacacataaaaatcaatgaaacagaataaatagttcaaaatagacaatgtgtatttggtaatttgattttagacataacaatttaaacaaaataattcaatgggtaaaaaaagagactttttaataaatggtgctagaaagaattagaaatatctataaatatattaataagcaaacaaacacccactctgactttaaactatacaagaaaact

SEQ ID NO: 463526 - DNA, 402 bp, Homo Sapiens
  misc_feature (247)..(247): n is a, c, g, or t
  misc_feature (378)..(378): n is a, c, g, or t
  misc_feature (391)..(391): n is a, c, g, or t
ttacaaagtacttctaataaaatatagctagtatttccaagatggaagaaaatcatattctagtctcaagcctctgagaagatatccattgctcaacaaaacaactttacgtatactttctggttatactgcaacataaatattttctagttgctgggccacacccgttgacattatttcctcatttttggacactccggagcagacttgtacattttcagaaaactgtcaataacattttttgccnactttgcaccattaagtgttatctttgaatcaggtgttggccaaatcgtgtagactgttccgttttgttcatggttactatggaaactgtgcagtcataatgttttgaggagactagcaggaaatttaagngtgtacaataaangttaacttatt

SEQ ID NO: 463527 - DNA, 399 bp, Homo Sapiens
ctattgttgaaagaaaaaatttattttaagcatatgttagtaagccaagagactttctaaaatactgttaacatctagtataatttccagtaaaattcaattttagaacttacttcagaaggaatttcactttaattatacatacttgcttattccaaaatataattatacaaaggaattaaagcagtttcttacttaaagaataaagttacacttatcaacagaaacaagatgggatataaagcacatagatacagagctttcatagcattaaatgtagcctattcagcttggttgaataataggatgttcaccagtcagttaaatagagtaaattccaaatgataaacaaaaaaggaatgtgaaatgcatcagtttcatctataccctgcagttatt

SEQ ID NO: 463528 - DNA, 802 bp, Homo Sapiens
aaaataaatttccccatacaaatactgtatgtattttgttagattcattcagatcctatgcatttttctaatacataaggcatatttaaaaaaatatgttttctgtgtgttgccaaagaatagaaatgcaattgattttttaatattaaacttatatctagccatggtattgaattcttctaatttctaataatttgtctgtcaatcattttattctttctaggtaaatatgatactataataaattttgcttctttctgtttctttccttttcctattatttacttttcttgcattactaggctactttggacctttaataaaatgtggaaaaagcacatttatcctttatattgattttaaacagaacactctaaataccttattatcggtaagactaatgactgctgaagaattttactgggttgagaaaactgttatttatattgtgttaaatgttttcattataaatgggtgttcaattatatcaattttattttctgcatctaatgggatgatcataagacatttttctcttttaatctcttagtatgataatttacatttttggattttccagaaacatctttggattcctagaataagccagatttatcacaagtggattatctttatcagatatatggctgctcttgagttactaatcttttacacttttgtgtgtaaggaatgtttttaatctaggtgaaattttgaatctatgctcatgagtaagaatatcctttctcatactatccttatctggccttagtactgagctttagattatcttggagggttc

SEQ ID NO: 463529 - DNA, 219 bp, Homo Sapiens
atatgaacatgtgtgattaaacaacctattttacatatttctgtaattctgaggagtgggctgggggtaggaagaaatggcaccacttaaaattcagggcttatatgaagaggtgttttaaggttagcacatgcacaaaggaacgagttggtttaaaaagataaatcactgcaaagaatgaaattggcttattcacatcaaaactagataagatgctaa

SEQ ID NO: 463530 - DNA, 485 bp, Homo Sapiens
cattgggcatatttactttatttaaatattaccagaaataaactgaagattacatttaaggagaggatgtgatggtaatcaggaattggcttaacaaaggatgtttgtgcagtccgggtcctggagagttttagaacaagatgacaaaatccctttttgtcttggatgacttaggtgcagccctactttaaggtgagtattagatgtctgatgctactcatttattcattcaacaaatatttatcagcacctattatgtggagggactcttctaggcactgcaatgatcagtagataaaatagactccccaaaatttcctccctttgtggtgctcacactatagtgaggaaacgtagacaatcaacacataaataaattatatagtatgttattagacaatatgtccagtgggaaaagaaaaagaataaaactaggtaaagggatagggaagtggggttggaaagactataattttattttattt

SEQ ID NO: 463531 - DNA, 746 bp, Homo Sapiens
  misc_feature (533)..(533): n is a, c, g, or t
  misc_feature (543)..(543): n is a, c, g, or t
aattcggcacgaggcagaaaattgcaaacactagaattaattttacactctaatggtagttgatcttcatagtcaagaggcactgttcaagatcatgacttagtgtttcaatgaaatttgaaaagggactttaaaacttatccagtgcaactcccttgtttttcgtcagaggaaaaggaggcctagaaaggttaagtaacttggtcgagaccactcagccttgagatcaagaaaacctaatctttctgactcccaggccaggatgttttatttctcacatcatgtccaagaaaaagaataaattatgttcagcttaattttagtgttgaatctatttgattatattttaatactttgaaaatgaatgtgtgatttttaatagtatatgtgacctgagccagaaaatcagggaactcccaagaagcctacactgtggcccatataaacctcagcaagagaaagaagctatgttcttttaaaacagaatagagaccgcttgctggtgaaactcctggctagtaagatgtgtgtcntagctatacntatttgtggcttgagcttttttaattattaccttcctttcctgagttttgtaggcaccacattcctgaatggcagaaaatagacaccctcagaaaacggaggatttgtggactctttccagccctgtggcttttcttatcacagccttttatttattatgagcagaataaaagaatcagctaggtgtggtggtctgtgcttat

SEQ ID NO: 463532 - DNA, 579 bp, Homo Sapiens
gtttgaaaaggacccattcatttattcttccaacacatctgtattataaaactactatccataaggcactgtgttaggtgctgtgttcctgaccctacagatcccattccaccatagcaaagggtaaaagtgactctacagtgagcttggtagacatagacccatgcttatatactcagggacacctggaagagatataaaaacagaaacatctcacataggaaagttttcaatgcatcgtgatcaggactcaaataatccccttctctttttcttcagtgtactaaagggagcacattgttgagaaggaccggttgcaaatttccaaaaaggagagtaaaataattaatgagtcaaggtctcaggagagacagaaggtaaggggagtccttcagtaagtggggaaattgatttgttttgtgtcctcatctctccagggccatgagcatgtcctttgctggccataagtcaatgctgatgacctcagttatagtgtaatcttcaaggctaatttacgcaaaacttcagaaatggtaaacatcctcatgaagactaatgatgacatattttaggagtgca

SEQ ID NO: 463533 - DNA, 599 bp, Homo Sapiens
tgctatcaacttgttctttatttagaagttctgtttctggaagtatatataattatactgtgtgccacacgtatctgtcattctgttatacaatgacgtatttcacaatgtctatgtgccagataagcgagtcttacatctttaaatgcctaaacatttaatttaaacattttttcattgtagattctcctaaacaaatgacactgtctcttctgactggccttttgcggctcaaggccattgtaacaaatgtcagtcttacataaccataaccaaatgacaccctaaggcacactgaggtctctaaactaaatggccccagactgatgagcttttcggagttcttggctctgctttttatagaaacatttcttttttatgggctatttgtgtatcgctgctcttagtattggtggcctggggcaacgcgtcccacctccttctaatttgctgcattcaaacaaatgtttgttttaccacctacgttactggtgacataatacattttttatctgttagatcctagggctatagacatagtcttttcaattccaagtttcagaaggctactaggttaagtaaaaaatgaacacttatta

SEQ ID NO: 463534 - DNA, 763 bp, Homo Sapiens
  misc_feature (19)..(19): n is a, c, g, or t
  misc_feature (41)..(121): n is a, c, g, or t
ttatttttagtaattctancaattatcataaaaataatgtnnnnnnnnnnnnnnnnnnnnnnnnnnnnnnnnnnnnnnnnnnnnnnnnnnnnnnnnnnnnnnnnnnnnnnnnnnnnnnnnnatcataatagtgacaacagtaaaaatgttccatggctaaaggctttccctctcattacattaagagtctctcaccatggtgaaatctttgatgttgactaagttgatagcaatgactaaaggccttaccacattctttgcatttctgtggtttcacaccagtatgaattgtctcatgttgagtaagtcgatcactgcgattaaaggccttatcacattctttacattcatagggtttttcaccagtatgaattctcttatgttgagaaagacctgagatagaacgaaaggccttcttacattctttacatacatagggtttcaaaccagtatgaattgtctgatgataaattagttgagaattaagtctaaaggtttttccacattccttacattcatagggtttctccccagcatgaattgattgatgtgtcttaaggtctccaacacgactgaaggctttcccacattgcttacattcatatggcttcaaatcagtatgaattatctgatgttgaataagatatgaatgaagcttaaaagtcttcccacattctttacattcatgtggcttctcaccagtatgaattctctgatgctgtgtaagttgagagcctctacaaaaggcctttccacaatcctt

SEQ ID NO: 463535 - DNA, 501 bp, Homo Sapiens
agggatataacacaatatactttattaaataacacaaatgtctatgtaataaaaacagattattatacgaatagcacattattaaataggaaggcaatgtcttaaaatattaaaaaagaatacaaaactaacctgtaaagaaacactaagattttttaataaaataaaaactggatgcttaaagaagtatcatttaagcctctaataaacactgtacacattaacactatagagcataaaggaatcccaattataagataaaagcaaacctaattagattcttactaaatacaacttcctagctatcagattaataacagatatagatgtaaataacaaagtagcttaatatatggtcttttacccattaacaaaatgtagtgaccaaataaacacagtctatatgtatgtaaaatacttacttagtatatggattaagaatagcaccctaaacaaagaagagggaaaaaaatggcggccactcccacttcagattggtag

SEQ ID NO: 463536 - DNA, 784 bp, Homo Sapiens
  misc_feature (145)..(157): n is a, c, g, or t
  misc_feature (160)..(267): n is a, c, g, or t
  misc_feature (580)..(594): n is a, c, g, or t
ataatcaagatctcaaatcatgatttaattttttagccattacatgtacaattaatattcaaacttgatctgaaaaataacattaaaaataacagataacactgaattcatttaaaagtagacatttaaaatagtatagtacacnnnnnnnnnnnnnaannnnnnnnnnnnnnnnnnnnnnnnnnnnnnnnnnnnnnnnnnnnnnnnnnnnnnnnnnnnnnnnnnnnnnnnnnnnnnnnnnnnnnnnnnnnnnnnnnnnnnnnnnnnccttaaaatagtatagtatactatctactaaactagattgtgtttaaaagtcacttggccctatcatgaaacagtttggggatttgtttttaagtgaaaacaactatccgtagaagtgagaagtcagataaaatagcatttgttttcttttgtgagctttctccttcctctgcttcttctaagaactttggtgagcatgtctaaatggtcagatgctgggcttcgtgctctcctcagcttagcttctcatcacctgcaggaatggcagagcagtgtcatctcactctgtcttctgattgctcaagaggaatcnnnnnnnnnnnnnnnaaagtgaaatcttccagttttgcaatgtcagcttcccattcaaaagtgcttaggacaccgtgaaagccacatcagcgggggtgagggagccagtgcagggctcccgggcttccagtttgtggcctctgaatgaaggtgtggcccctggtaagatacaagcactgctgggaagcctaacacatcgaacgcc

SEQ ID NO: 463537 - DNA, 1056 bp, Homo Sapiens
  misc_feature (270)..(283): n is a, c, g, or t
ttttgtttaaaggaccatttattacctcaaaactacaaggtaaatagacaactaggcaaatagaatcaatgacatagaacagaccatttagtctcagcatgtgtaaaagcttcataggaataatatgtagagataaaactctgggagtaagaggtgaattgtccaatatattgggttgagaaaattgaaaagatatttaaccgattaattaattcatatacacattttactttaggcattttacaaaccagaagaatggaaaaatttgcnnnnnnnnnnnnnntttatataagcattaatgaggaaagtttttgtaagcattggtaaagtaataagagacaaaggcaatagatatgacttcataaatttttaatattcgtacacataaaatatacactttaaattataattaaaggaaaacaagttggaaactaattttgagttaaatataattgttaaaacatttaagtactcttaaaaattgataagaagatcaccacatcttcaggagaaaactagtcacaggctctaaaagacattgtcaggaaaatacatacaattggtcttaagctgcataatatattgtcattggtgattattttgtacctatagtctgtgaatttactctctatccacttttaagccctccctaaataatcccatttatactcgtgccttcagttatacacccagggccctcatatttgtatcttcagctgagaattatttttcgtgcttcaaatgattcatggatgtaaacaaaacgaagtttttccccacagtttcttaaaagtagttcacatttaacaaatccaaaatatattacatgacccagtcactcacaaaacttattcttctacgggtctccattcatctcatgatacaagctagaaaatagagtcattattgaccactcttccatcatcatgaatgcccaagacatctcctggtcctgtcaaatgtacctgcaaatatttccaacttttttctcatctaccttttcaccttgtctccatgcattcacatgggcttcattccaatcctcgttccgaattc

SEQ ID NO: 463538 - DNA, 475 bp, Homo Sapiens
  misc_feature (107)..(107): n is a, c, g, or t
tgcctttttgcgtttctcagggacctgatgcccagaaccctggacgggcagatcaccatggagaagacgcccagttacttcgtcacgcgggaggcccccgcgcagcnatctcggccatgtccaaggacaccaagctcatcgtggtggtgcgggacccggtgaccagggccatctcggactacacgcagacgctgtccaagcggcccgacatccccaccttcgagagcttgacgttcaaaaacaggacagcgggcctcatcgacacgtcgtggagcgccatccagatcggcatctacgccaagcacctggagcactggctgcgccccttccccatccgccagatgctcttcgtgagcggcgagcggctcatcagcgacccggccggggagttgggccgcgttgcaagacttcctgggcctcaagaggatcatcacggacaagcacttctacttcaacaagaccaagggctttccct

SEQ ID NO: 463539 - DNA, 601 bp, Homo Sapiens
  misc_feature (277)..(277): n is a, c, g, or t
tcaatgctcagctatttcattttacatacagatttaattttacatacagacaataatttgcacaatgttcatacaatttaaaaatttgtaagttacactgggaagatgagaaaaaagtgtattccacgtatgggtgaaatcaagtagttaagaaacttaattcttcacttctcataaagtcaatgaacatttttctagattgaagaaatattataataaccatattatttaacatcctatacagtaagattgagactgttttggcacatgtatgaangattaagaaaatcatccctttcttatcagaagttcacagatacaaacaaaatatcaacagaaaaatgccattctggagaaacgtgcacatgctatatgagctgacactaggaagcagttcttacactttgtccatttttttatctgcacgtgtgcatagaaaagttcttgccacctatggacagatcaacctgagaaaaatgattatgcacacacagacactaaaattagtctccaaaatcagtgacctaaaattagtcacctacaatgctttattttattatattagaaaaccccatcctatcaatccctaatacaaaataat

SEQ ID NO: 463540 - DNA, 191 bp, Homo Sapiens
agtagatggtgtgtttaattttataagtgaagaaactaaggtaaataagtgcctgggttgggaccattcaaagccaggtcccctggctcccaatccagggctcactccattaaatctactaggtccccataattttaaagtgcatgttcattcccacacatttgcctaagacatttttgaatagggaatcc

SEQ ID NO: 463541 - DNA, 612 bp, Homo Sapiens
atatgccccaaacatgatacttatttattgataattcataccctgcctatttctcaaaaatgacttgagaaaaactgcacaacatagcgacaatacacatacagaaattaaaagtgaaacaggaatacatagagatataacacacaaacatcaaactatgattagatcaggtaaatgagtgttctgaactgctttggtgtcacagaggcatttaaaaatatagtaaatactacagatccttgtcccagcaaaattccttcaagcacatacccagctttgttcgatccctaggggtctgcaactcctaaacccctacatgctaaagactcctaggcaggccatggacccccagattaagaactctaaagtaaatgaaagtcagagaaaatatggatttgaataaaataatgaaaaaaattgagttaacaaatagaactggtagaataaaaacacattttgagattacacaaatgcttttataaaaactgataatatattcaggcccaaagaagtcctatggacacttagaaatgttgacaccacagtacagtaagaaataagcagcaataccctaagcattcatcacttagaaattttttttatatatatttt

SEQ ID NO: 463542 - DNA, 870 bp, Homo Sapiens
  misc_feature (628)..(681): n is a, c, g, or t
tggctttgaagggctaagaatttttaaaaaaatatttgggtaaatgaccttggcaacatcagaaagtatattcagaagaaatgcacaagctattacagtacataaaaaagtactttatcatctattcaaaattattttcagtggctatcctactcccagaaatatatcttaagatcccccccaaaattaaaaccaaaactcatgtttaactttttaattcattttcattttaaattgctcatgctaatgaacacagtagtatggctttacagatttcctagacacaatcctcaatttggctcagacttgaatatacgtcatccaagagaactttttcgttccttcttaaggtgtttaaaaaataaatggctataaagtatggggagaaaacatttaagattaaggtcagagcacacattcagatacactttggactcagatgtactcttagagaactgtagagataaaatgctaattatagtacatgtaaacatctgttcaaattgataaagagtgaacataaaataataggatgatattattgtaacagtcgtctccagacaggaactggtcttgctcttgcagtcacaaagctaaattcaggcaatgatgatctctctctgctggnnnnnnnnnnnnnnnnnnnnnnnnnnnnnnnnnnnnnnnnnnnnnnnnnnnnnntgaatcacatcataaattgacctccaacttttctaaacattaaaaaagtctatttgagaaagaaatcaaaatcaaagttgcaggaaaattacacaaagctttgggctaaaatgattttaccaaaacctctctgcatcatgctcccttcaaacattaggctgcaaaagatcacagcatacaacatatcta

SEQ ID NO: 463543 - DNA, 987 bp, Homo Sapiens
  misc_feature (45)..(45): n is a, c, g, or t
  misc_feature (69)..(69): n is a, c, g, or t
  misc_feature (71)..(71): n is a, c, g, or t
  misc_feature (102)..(102): n is a, c, g, or t
  misc_feature (136)..(137): n is a, c, g, or t
  misc_feature (143)..(143): n is a, c, g, or t
  misc_feature (159)..(160): n is a, c, g, or t
  misc_feature (165)..(165): n is a, c, g, or t
  misc_feature (207)..(239): n is a, c, g, or t
cttcattaaaaacatatctttatttttttaaataataaatatctntaaaatgctaggcaacatgcaaangnaacatccaagcatggcttttactattgaatngagtggttaattcccaactgagttgcatgactcnntcaatnagctttagtaaatatnnatatncatcactctagtttgtaatgagctataaacaaaaatgcccannnnnnnnnnnnnnnnnnnnnnnnnnnnnnnnnccaaaaataggaaacttgatttagacaataagtattacacatcatacattaataaaatattattctatcttacttgctcattttcatgatttaaatgttaatatagcatctcaaaccttggctagcaaaagaggtgaataatacacactggacatagccaactgattttaatgacatacaattaatatggtgagaaggaggaaggtatccctataaatacaccattgtataaaaagggaatgatccaaaagttggtttcatgataattatctttcctttggtatcattatcatatgtcctcactttataaaataaacctgaagaagaatatggctcagaaacaacatatttaggtactaaaagaaaggggtactaatgcctgttttattacatcctccattaggaacaatatgcaatccttaaatatctgcactactttctttcaggaaatccaccactccacattgaatcccagcctatttgtagttgagtgttggttacaggggataatcaaagggaacatgatgctttatcaatgtgttcaataagtgacttttgattaatagtttggtgaaatttcatcattggtactaataaaatgacaatagtctatttattgccaatgggtcaaaaatatcatgacaaatacaaaaagtggtacattatactatttttagaaagcttttgtcgttcaaggcgaaaattgaacagcaaaccagagataagtcttattactacatatttcaaa

SEQ ID NO: 463544 - DNA, 733 bp, Homo Sapiens
tgagtgtttcagtgagtttattatgagccattctgagacaggaacaaaccctgacagtctcaaagtgcccccaatttcattagaaagatcgaaatctcacatctggaagacaagacgcctagtgccactttctcttagtttctctgggtaaatagtgaaatcctggcccaacatctaaggaaagagttagttctctgaaaaagtgggctgaagatgagtttttaagataataacctgtcacagggtcaggacttctgggcataagctgtaatgatgggtacatgacaacctgatgttgtggccttgcaaattcagcctgtttctcatctctgcacaattccagaggcctgtgctcaatcgcacaatcagcttgtaggacaagaactggggatttgctccatccgagtcctggcccttctggtatgaacctacttatcttctttctcctacaaatgtctctctcagcaagtccttaactgccaaccagtgaccacttttctcccaactcacagctcccctagcagagcagctcaaggtctggctgcttctctcccttctcattttaggacctcatcccctggatgcagggctggtgtgcagttctctctgggacaagtagaactgcaggatgcaaggaaaggcaaatccacgattctcatgggatagtgaagaagaggtaagccaggagcaaacatgtatttaaacaacttgagccttctcatttgtggcattg

SEQ ID NO: 463545 - DNA, 797 bp, Homo Sapiens
  misc_feature (216)..(216): n is a, c, g, or t
  misc_feature (408)..(477): n is a, c, g, or t
  misc_feature (776)..(776): n is a, c, g, or t
  misc_feature (783)..(783): n is a, c, g, or t
aatttttataatatattttatttaacccaatatatccaaaatatttcaacgtgtaataacaaaattaattattaatatcattgcaaagagtttatattctttctttggacagtaattcttagaaatctgttgtgtgttttacacctgcagcacatctcagttaggattagctgcatttcaagtcctcagtagccacctgcagttagtggttactgnatatgacgtgcagtcatggatgggtctcactgtaaatgggctacattaaagtgctctaagttgataacgaatcacttggagttcactaaagctgtcaaaagtagaaaagcttaaggaactcccccttcaacccctgtaaagaaaggggagagaaatctactttataaggttcctataaattatatattaccnnnnnnnnnnnnnnnnnnnnnnnnnnnnnnnnnnnnnnnnnnnnnnnnnnnnnnnnnnnnnnnnnnnnnngaaggaaaataacgtcaattggtttgtggggagcggtgagtgagtaaccatcgaatgatccctacatagccaagacatctctttaagttttgaatgagttctcgaaatctccagggtggaagggagcctcgagcttcgcagagtcgcacagccatcccctgacccgcggtctctccctttgctggaagtctggccaggcagagagagtcccggctcggcctgagctcccacagctgttcacctccctcaacgggaatcccagtcttaagaccccggctcacccctcagcagcgagattnccttggnctttgttgtaagac

SEQ ID NO: 463546 - DNA, 555 bp, Homo Sapiens
  misc_feature (90)..(98): n is a, c, g, or t
  misc_feature (514)..(514): n is a, c, g, or t
ttaataatatattttatttaaatcactatatccaaaatattatcatttcaacctgcaagcaatatcaaagattattgagttattccacannnnnnnnncatgctaagtcttggaaagccagtgtacattttacattcaattcagaaggctcccttcttcatacttggtggccacattggctcatggctgccatactgaacagtgcacgtagagactcaggtgactgaaagaggtggacaaggttgatgaaggccgcaacgaagtcggaagaaagtgcagcaggttttggcatgtgaggagacacttcagtgatccaaagtacaatgatgttaggtcaggccgccagctcatattgccaaaattgcagctttgtagatgattattaagatgggcccaagaaaacagtataacattcagcatttcagcagaagtcttttcctatttccacagtcaccttttcttggaaacagacacgcacatgggtgcacatgtaggggaagatgtgatgcagagngactaaagtttcgcctagtaattataataattttgttcttt

SEQ ID NO: 463547 - DNA, 726 bp, Homo Sapiens
aaaaaggaggactagaaatttattggcttgtttggattcgggagacattatattcaccacttgggtaacattttacaacctctgcatgcagtcactagaaaatgctgtgactttcactggggagagaaagagagcatggcttttgaacaagctaaacaagcagtgcaactggccctggacctatggcccatatgagatgggccagtagaactgcaaataactgtcctaaatcaacatgctaattggagccttaggcagaaacaagatgggaagagggtacactttgggttttgaacccagaaattgccagaggccagcaaagcttatacccctttcaagaaagcaattgttaccttggctattggggctttgctgggaaatggaacacctctggcttcaaccgtggatgtctttataaggtctgaaattcctattatgacttgagtcatgagttcccccaaaactcaccaaatagggcatgcccaagaaagtaacatcataaaatggaaatacaacatagaagaccaggctaagccaaaaccaaagggggtatcatttttacatgaggatgtacaaaacttgccagctcaggaaaccactgaggaagtgctgcacatagggaaggaaaccgcccctccccccactcaatggtgcagttcctttaaagaactaagcccagaggatcagaaacatgcttggtttactgatcgatccagcaaacatatt

SEQ ID NO: 463548 - DNA, 458 bp, Homo Sapiens
gagacagtatcttgctatgttgcccaggctggccttgaaatcctgggctcaggcgattctcctgtctcagcctcccacgtagctggaacttagggcgtgacaccagcgcccagcttctggaaaggacatgaatggggaggtggaacttgattggacctgttctgtgagttcaggagaggtcctctgacaactcacttggggtggggaaaggaggtaaagagtcctgtggaaacttttggctgtggggaccccatttcactgatgattgaatgggtccacctctgtcaaaggaattcagagtcccactcatcattcagactgggggaatcaggctcagttgactggcccagccttaaatccactgaatttgtttttatctctacatagaaaaacggaattacagttgcttctcactggtccaatgggggattggttcctggagcctccctgaatacctg

SEQ ID NO: 463549 - DNA, 503 bp, Homo Sapiens
  misc_feature (103)..(145): n is a, c, g, or t
aagtgaaaagataggctgttcctaagagacagaagctgaatgaaatgcacttgattttttctttctaccttcagcctgggcgacagagtaagattctgtctcnnnnnnnnnnnnnnnnnnnnnnnnnnnnnnnnnnnnnnnnnnntcaactgtgcattcagaaagtttctaattttttaaaaacacttctcttggttttttgtttgcttttacacaatgctatggtgaacatctttaaacacaaagatatatccattttgattgtttttgtagaataaaccactagaagtggaattcagtgaatgattcccagtatttttaatgttttgtcttctgagtaatgaagtatatctaaaaattaaattttaactttattgaaattaaacattttagcaatgtgtgtttatcatttagttttaaatccacactaaatactattaaatgctaaaataccatggcttttcttcagctgcatctctgctaaaatgaacactgagccctcc

SEQ ID NO: 463550 - DNA, 659 bp, Homo Sapiens
  misc_feature (135)..(143): n is a, c, g, or t
atttcttcttattttggtgtaaacatcaatttggatggcaattagaatgtctttagcctctttaaaaagcccttctggggcaaacctttgcaagtcactcagctggcatgtaatgagaattttatttgcatggcnnnnnnnnnctaagtctctctagaagaacataaggacattctgaacatgcaaggaatacagttattctcacatcaaggatcaattttattttgtatcttcattttatgtcattttcctttattttattcacattaatctagcattaattccccccagttggaaatgatatttttgcttgctgccacctgtgttattaagtgacagcttttctttatctgcttttctgaatttcatatttatatactttaattgtagttttttaaaaatctattctagctgggctagaatcttccaagtattaattcataatgaacttccctcttctggaattgtttaggagggctaatgttccatgttcccttcgttgctatagatatgaagttattttcgatgttctttgagtgctttattatagcgataactggtactgcctttgattaaaggtgagctatatggagttaagcatttttatactagtaactatttattgagaattttcagaattctatagctacttgtcttta

SEQ ID NO: 463551 - DNA, 260 bp, Homo Sapiens
  misc_feature (47)..(47): n is a, c, g, or t
  misc_feature (69)..(70): n is a, c, g, or t
  misc_feature (184)..(184): n is a, c, g, or t
gggcctcatccccaccaggtaaaggcagtgatgtaaagagggaaganggaggataagctgtgaaggagnnaaaggggaagaggcaggaggaaagcaggcagtccaggtcccagccggctcagggggctactctcaggggcgtgaactccctctctctccttttcgctcagaggcattgggctcnacagctgtgccagcctttgacagtgacttccccatgtcctccctcattattcctctacaggggcagggggactggc

SEQ ID NO: 463552 - DNA, 797 bp, Homo Sapiens
  misc_feature (18)..(18): n is a, c, g, or t
  misc_feature (53)..(93): n is a, c, g, or t
atttctgagttctctagnagttttgtaagttggtaggtattggtagaattggnnnnnnnnnnnnnnnnnnnnnnnnnnnnnnnnnnnnnnnnncacatgctgtggtaggcagagataaaatattctctcatgaagtctgtattccaattttggggacagtatagctctaaggaaatacagttttcagtgctgttgtggaagagggagtaacagttttgatgtagaacttttatgaaaaagcaaaatggtagagagcaacaacagtaaaagggttagagttaaggttcccctctcaccaaatgataatggggtaaatgttggaggatttgctgctgctgtgcttacaatcaaaccttccttcatattactgttttgtaattcattctacactgaaatagttcattgtacctaacactgctccagccagcttttgaggcactgacttcaccctcaatttctcttaagaggaagagggaaaaaaatctctcactcgctacttcacagaatctgtgttgttatacatggaactttgttatggagagtaatttttattttagacacattgtaaatgtttcttacaatgattatttttaaagcaagctctagagtttccaaaactgggcattgagtagaatccagcatcgtaataattcagatttggttcctgtttgcccttgtactgtgctggagctcactgtcctggagctcaagggaacccactggcactagaggtgtattgagttgagtcaatggaacacctgtcagcttccatctcgataccatagggagcatgaatg

SEQ ID NO: 463553 - DNA, 782 bp, Homo Sapiens
  misc_feature (429)..(429): n is a, c, g, or t
  misc_feature (731)..(731): n is a, c, g, or t
aattttgaagactagcttttcaaagcaggactactgttcttgtctccttctttaatatccttcattacagatgcaaagacctgagtccattttttggtgctattctgcatctgaatggctgcaatacaactgaacagcttttccgatgtgatatcttctggcaatttagttagaaactgtgctatatgaataaagtccatctgcaggagaatatcttcatataatcggaggattcctaatccagtcctaaataaaaattcttccccatctctgcaaaatacatcccagactcgacaggccagatcaagtggtagtgatttgctatatagtgtgaagatccagtctatcaagtatatatctggtgtaagactgtaagatttgaagtgaagaaataatttggaaagattttcttcaaggattccttcaaantgttgcaaaatatttcaacatcatgctgtgatccacacgaaaaaaaggccaactggcatggcttattcaggagattggcaaatgcgataaaggcatctgcctcttccaaattgagaatgagtactgctgcaatgaaggacatcccttggacataaccaacatcaggcctgtagcatgtgtatgcccctaaaatactatgcaagacatcatgatatggaccacccttctgaaagatgtagagagatggaaatgtacgggatatgtccaacttaattaattccagactggcctctcgatcagcnaagagatacaccttctgtatcattctctgaacttgtttcactgaaactttt

SEQ ID NO: 463554 - DNA, 766 bp, Homo Sapiens
  misc_feature (59)..(227): n is a, c, g, or t
cattatatatatttgttttaccattctcactttctttctcactctgcctgcctgtctgnnnnnnnnnnnnnnnnnnnnnnnnnnnnnnnnnnnnnnnnnnnnnnnnnnnnnnnnnnnnnnnnnnnnnnnnnnnnnnnnnnnnnnnnnnnnnnnnnnnnnnnnnnnnnnnnnnnnnnnnnnnnnnnnnnnnnnnnnnnnnnnnnnnnnnnnnnnnnnnnnnnnnnnnngacatttaatctacacacccccagtgacagtttgtcaactgttccaatagtggtcccaataattttcccaataatccctcaaattgggtttaaacatgcaagaattttctcaggagaaacacctgtgaaaggaaaggagaaagagccaggaaatgctgggggaactgtcagatcacattataagtctgaccctgagtgaaggagagaggaaggaaggtcgggtagaagcttcctagaccaaagtgctttatcaaaaaggtttggcaaggccatcagggagtccccaagtcaaagttggccatcagaggagtcccacgtctcccagaatgggcctgtctcttagtgtccatgctgtgcttggtcacttgctggagcagcctgtgggaagtgtggcctcagcacaaaagcaggatgagtttcagagagcagcagttggggcccttggctgtgtaagctctccataattggaggtctgtcaggtgcattctcacaccacagcagtccacttcttatttatttatttatttgagacaaagcgc

SEQ ID NO: 463555 - DNA, 713 bp, Homo Sapiens
  misc_feature (44)..(53): n is a, c, g, or t
aatataacaatttgagcttgggaacatatgtttcattataaagnnnnnnnnnntggttaccccgtaattccaagattcatatttcccagggtagaagggatcatgcacaagttctagtgtaccttcccatatcatgctgacattcctataaagtgcttgttctcccctacagatagccaactcatgaccttccaaggaaacttaactccctttttgattctgaccatttgaaaatgctttattgtatttgagatgaaattcatgtttctgtagttaaatctttcagaatttaaaacttggaactcaacagaggtaaatctaaacctctccttcttctcacaggcagctccttatcccaattcctaccatttcctttgctaggctataatatgcattctttctcttatggagtagctttcattcccttaatcactgtggctcctcttcttggaagaagctcaaatttgcctctgtctctcttaaaggcatgtgctgatggaaaactaggctttaaatcacaatatctacattaaattacatctctgctactgattacatgttggaactggggaaaattatttactcttttgtcattagggtagcaaaggtgaataaaagagacatggtcaaaataggcaataagcaacttaacaaacaaataaatatataattacaaccttaatcagtagtataaagggctgtcaagggagttc

SEQ ID NO: 463556 - DNA, 508 bp, Homo Sapiens
  misc_feature (48)..(143): n is a, c, g, or t
ttttcccactaaaaaattacatgttgactgggcgcagtggctcacacnnnnnnnnnnnnnnnnnnnnnnnnnnnnnnnnnnnnnnnnnnnnnnnnnnnnnnnnnnnnnnnnnnnnnnnnnnnnnnnnnnnnnnnnnnnnnnnntccccataggtggagtatacttttccatcccattagctttgtccatggccatttgacgtgggttggtcagtggaacggttgtagatgtgaggcaagcagcatctttaaacttgtgacaaatgatattggcttcctcttagggggtgatagtttccttttaaaaaattttaaggaaaaagaattagtcaattaaaagataaacgttaagtgtatgatagtaaagtgatatccagatgtagtgaaaccataaagatggattctgaatgattgaaatttgtgactcagtgaagcagtggaaacttgcaatctgtattttaattgtggatcaatcatttgccagttgtgtgttctcctcgttccgaatt

SEQ ID NO: 463557 - DNA, 656 bp, Homo Sapiens
tcaccgtgaacaaaagggtttattccaggaatgccagaatggctcattattggtaatcacttataattcattcattatgttaacaaagtagtgtggttaagtctgtagatgctaaaggagatattatttactaccattttctagttaaaactttaagaatagaaggaaacctcttaagcataataaaaataacccagtcctaatacaaataccacaccaaatagtgaaatgctgaatcatttccaatacatgcattaatacaggcatgctagctatcattaaacatggaaatgttaatacagtaagataagaatttagttaaatcgttagtaaaatatacacagttatatttgtttgtaggcaatataattaaattcttagcccaaaagaccacaaaacctctgtgaataagattttggaagctgttctgagtttaagctagatacataaaaacagaatcagattattgtccctccagttcagggagttcagggagttcccactaacatctagggaaaaatccaagttccttcccttgtccctcaagcccctatgtgtttgttggcccctgcctccctttctgacctctgccttgtgctccttcctttttgctttccatgccatagcatgcttactgagttcacagagttccattt

SEQ ID NO: 463558 - DNA, 719 bp, Homo Sapiens
  misc_feature (59)..(59): n is a, c, g, or t
  misc_feature (141)..(141): n is a, c, g, or t
  misc_feature (146)..(146): n is a, c, g, or t
  misc_feature (529)..(529): n is a, c, g, or t
cttgtaaaatgtatctccaaaacagcgatgtaaaaatctgaaaaattatgtgtcttagnaatggtaaaatagacatgctgacatatttggccaatcgaaatgttaatattactaatagtcaaaatcatctgaaccaaatanctcanaattgatcattattaattattcccatttgggtaaaagatgaataaatgtgtgctgaagatacctgaagatgcattctctttatatattagggggtctatgatctggctgcatatatctttatgatataataaataaatcctattgtaaacaagttgtagtatagtcataaaatgcattactctgctgcaataaaaaggaactactaatacaaatgaatttcacaacattatttcatgaaagatgccaggtatacacaaaaaagaatcattaataaatggaatcagaattctacttacaatattcaaaaaaagtaaaactaatataactaatatatagtggcagaaattataacaatggtgcctctcatgggagatgatatttnacctggaatggaatactgcgaaaaaattgctggagtgatggatgtgttctacaccttgactgcaatcagttacaatgactatatacatgtatcataagatctacacattttactacatataaagcattttttttaaaaaaggttatataggccgggtgcagtggctcatgcctgtaatcccagcactttg

SEQ ID NO: 463559 - DNA, 711 bp, Homo Sapiens
aggaaagttattcatttattgattcaacaagtaattactatgtgcatttctgggtattgaactgcagtgccagtccagttgaagagatggaaaaggaagtgccagaaggaaaaatggactttgcagatatcaagatgatcaaacagacaatactataggaccaaatgaatatgcagtcaggaaaggagaggagtcaaaggagactgaacttcctaatgaacgggaggaatagtgttaagaaaattaagagacagagacaatttcagagacatgatgaattcagttaaaaatacatccaacttgaggtataggtaggttgcccaagaagaaatgtctagtagggttttagagaagagctggttagaattttgaaggctgaagtaaatattatagcatcatctgtgcagaaatagtgaaagcactacagtgactgagatgaaatctaaggcattatatagaaaatacagtggaggactgagaactaagatttattaaaggagtgaaggaagacacaagaggagaacctagatagggtagagtcaggaaaattaagagattgtcacatattgagaaaagtcagcaaaaattcaactgaagagaccattgtctattcctataaggagcctcagatctatttcaaaacacatagagttgcatcagaattcaagcagccacatgtgatctatacttaatataaaatatacaaatata

SEQ ID NO: 463560 - DNA, 733 bp, Homo Sapiens
  misc_feature (94)..(94): n is a, c, g, or t
tccaggggttgatcacagggagtcgtgcccttgtgggggccggaggtatatgaaaactctttgtacttctcactcaatttttctgtgaacctanaactgctcccaaaaaataaagtctattaaagcaatgaaattgctcaggagggcttgatagtgaaatttctggagctgacagactgaattagggtcctagtgtgtagagacctgacatttaaatgaataagcaatacagaaaattttacttaagatgcaaatattggcttggagtatcctaaaaatctggatgtccatttgattgccaccattaaattgtattataattacataccaggatcttctgcatttgaacacaatgcccatacctttaaccaatgatccttttgtttgatatttatgttggcataaatttttaatatgagtgagggaaagaagaaaattgcttgtttttctgaggactgtatatgtttatgtcattgaaatgaaggacaacacttaaatcaagaaaatcaaaaacaatcagattcacaagcagactcaaaacaaaagaaataagggttttaaaaaatccccttagtttacaatggggacaaacaacatgatagcattttagcatctaataatagccattatttatacaagcatatttagactgttatcagagggaaataaatatggctgtagtaacattcaatttggattttccatagggtagacagggttgaggttccccttt

SEQ ID NO: 463561 - DNA, 529 bp, Homo Sapiens
  misc_feature (19)..(19): n is a, c, g, or t
  misc_feature (37)..(37): n is a, c, g, or t
  misc_feature (78)..(78): n is a, c, g, or t
  misc_feature (124)..(124): n is a, c, g, or t
accttagatggataattanatgcattgcatcccctgngctcacatgccaggatatggaggttggaggaaagaggggcnacaaaaactccacactctgaacttttgttgtttcaagcttgaaccngctatacactgagaagtccaaagtggaaaagagaagccactcagctaaaaatcgcaagtcgatttttatggcaggtccttgtggggaaagggtcagtcctcagagacagatggagatccacctaagctgggcctggagcccctgccctctcctgtacccttagccgaggactcagggtctttgagtcagtccctaaccaggtctcagtttgagggggtggttatccaagcacacttagataatttcaaatgccattgaagttatcctagaatctttgagactggctgagatgaactagtcccataggagaggttgggatagggatatctgatgatccagggagtggtgggtagggattcctttcctctcaagactggaacctggcataagggaaaggagaagcta

SEQ ID NO: 463562 - DNA, 1097 bp, Homo Sapiens
  misc_feature (1059)..(1059): n is a, c, g, or t
taaaatacattcataaatttattttaacaatgcagaagacacataatttatggcacccatctaaggcaatagttaaaagaatgaagccactttgttgcttctattaaggaaagtctgtcatctccattttgaatcttgatatttgtaacattattgtaaaatttttaaatagatttagcatactgattctatctccaagaaagacatatctgatgtggcaatggctattaaactttcaaatatgacatattacttatggttggaatagttacctccgataaagctaaaattcttataaaactaaaactatgcagttcatatgcagttgctagtcaaagcagtttgacttcataggtggcgtttactgttttatctcacgtaggcccatgatatgtacacagtaaactgtaaaaaattttaaaaagacatattttcccagattattggtgaaactttcactcttggactctcgtaacaaaataattgttagaattgttaagacatataaagtatggttggttggatagaagactcagaaaagccctggcaataaataccaagtataaaacagcattcttcttaaatcggtagtaaaatctaatagggtcaataaagaagattgtaaatcatgttatttctaggcctcaagcatgcttatagctgtatatgacatagtctgagccatagttatatggaggcatacaggatttatttaagtagctaatgtatatatttcaatgcatatgaaaagttataaatataatcccctctcttcattaactgaagagatatcctcttatactagccaccttaaaatgcaccaaaagaagcattttaaaacacttatattttaattttgcttcttacacaggtttcttatattgcttttgtatgatcgttataatacaaacgctatttcagtgcaactgtgtaatcactttagagtacagtttctgacaatagtatttttggggatgggtcatggtgaaaacgttgctgatgataaagaaaagcattgttcttttctcctaggcagaatctatgtatgttcttttgttnctggtggtaactgcagacaatcaataaggtccaaagct

SEQ ID NO: 463563 - DNA, 737 bp, Homo Sapiens
  misc_feature (40)..(40): n is a, c, g, or t
  misc_feature (54)..(54): n is a, c, g, or t
  misc_feature (64)..(255): n is a, c, g, or t
  misc_feature (258)..(321): n is a, c, g, or t
aaaaggctgcaagtcaatggctgtttgctgccagaattcnttcttgcttagggnaagtcagcannnnnnnnnnnnnnnnnnnnnnnnnnnnnnnnnnnnnnnnnnnnnnnnnnnnnnnnnnnnnnnnnnnnnnnnnnnnnnnnnnnnnnnnnnnnnnnnnnnnnnnnnnnnnnnnnnnnnnnnnnnnnnnnnnnnnnnnnnnnnnnnnnnnnnnnnnnnnnnnnnnnnnnnnnnnnnnnnnnnnnnnnnnnnnnncannnnnnnnnnnnnnnnnnnnnnnnnnnnnnnnnnnnnnnnnnnnnnnnnnnnnnnnnnnnnnnnagacaatatagtgtattatgaggtatttggactttatcaaagggacttttgttgtccaaagcccaggtgtctttcactatgtatgctgtctctcaaattaatggtttttcatctgagcagaaatacgttctcccagggccaaactcttgctaaaagaagcatccacttgtcctaacagtattgtatagggtctaatttatccaccgatatacattttgccaaggatgatgatctgatctaatgaagtaggcgcctgtcatgataaacatctctctacccaagaggcagtgacataagtaagggagtcattctgtccttcacagtctctggaaactttttgatcctttccattcctgataccaacccttgaacttaggaccctactacttcttacctagaacatatattacagcatt

SEQ ID NO: 463564 - DNA, 399 bp, Homo Sapiens
  misc_feature (344)..(344): n is a, c, g, or t
aatagaaaaataaaatgttttattaaaaaaatatatatctaaatatacacatatacctttgaaatatttgtagctgcaatttaaaaagtcttaagtggaaataagctgctctaatcaactttatattttctgaggacaattcagcatctatcctaggccattagctgaggaaaatcaatgcaaccaattcaaacatattggagacttgtatggatttgcttcttctacccttccccccacacgatggtatagttttgttctctttaggggaattcaattaacagtattagtctcttactctgtcggtgatggacatcatccgagattttcctcaccacccaaangacatgtaagatggggcttacggattccttgacttgctagttaacaggagaatta

SEQ ID NO: 463565 - DNA, 822 bp, Homo Sapiens
  misc_feature (112)..(112): n is a, c, g, or t
tgtgtagttataatgtttaatatggaatagatatttcatatctatatttggaaaacacataatagggaaataactgccctataattgtatgagaagaataaaaacagttccntttagaattcttattgttttctctattctttttcaggctaagacaatgcatagcttttggttgatacaggtaaccctggttaccactaaagggtgatccccttcagataataaacccatttaactccagtctcactcccttcaccaggagggcagctcacagtcagcttggtggtgatgggggttttgctgccagatgggtttccttcaaaggagactgtgatgttgttgatcttcttggggccgcacagactctccagcgcgaatggtgaaggctgggttatccacgatgatggagaaggtcaccatgtgatagaagacattcttgaagggggatgattatgctgtacccggctcggatcgagaagggaccttggggcttgggaggcagagccattccaaagagggggatgatatactctccacctgcgagcgatgataggatcaggatgcccttggtctcacccaggtggctgggctcgaataagacttccacactggcttcagtgcctccctggcctcctggggctgcattaatgagtttttctgcgtggaagtctgtacagtcggtcctgcagtagtattctgtcctctgccgtgtgtaattgatgaacttcacaaggatgatttggctgctgccaaggacagtctggaagtgaacaggcttttccggaagtgctggcgtggctttcagatagagctcatattggt

SEQ ID NO: 463566 - DNA, 612 bp, Homo Sapiens
  misc_feature (248)..(248): n is a, c, g, or t
  misc_feature (548)..(563): n is a, c, g, or t
acagaaataattcaaattttaatccatcaataaaaatatcagcctgagttctatactaaataataaaagcttggcctatttataataaagaacagttattctttaaggaaaggacattgagttgggagttaggaggaacttctagttctttgtctgccatgggtctgcccatatgaccaggggcaaatccagttttcaagtggatggtctttaagatcttattattctaataccagtgtatcatgtangaatggttttaaaggctgcttggttctggtcttttggttacttaagcacaattatgggggtgcttttaccccctcaaaaatattcctaggcagtccccattggccttaagtaatcctcaagtttaagttgtggggggtggtctccacctcttcgtgtcctctaggacaggatgaaatcctagctggagagttcctccttcagaatgtgttcttccctggagctgctgatgctcaagtgatcaagacaggggtcccaactccaactctctggtcacaatttccatccctctctcttcatannnnnnnnnnnnnnnncagtcactgcctgatccaggcatgagctgcctgtgtcccccgacatcat

SEQ ID NO: 463567 - DNA, 1053 bp, Homo Sapiens
taaggaaaacaccatccagtttatttttctcctgattcatctcatgccaacacacagacttcaatggacagcaggcaaaatggggaggcatccccagagcaagccgattctctacacactgccttcccttcctgtaagactcatcaaaaaggcaccccaactttgcatggatctgctgttggtattccttggggtgaagccagaagtcaggctttccacagagagacgggactacatggccacctgggaaggctagggagtcaaagggcctgaggaatgactacttcccttccacaagggcattccctgccctgctctgcttcctgggggcttcagcaagccttccttctagagctcctagaaccctcccatggtcaacacaacagcagcccagacaatgagatgcaagaggcctgagctcacaggccattcaggtaagccagggtgagctgggcagctagatgacccaattttcagtccagaaagctctatctgctggactaatacttccgggctaactgatgtctgtgaaaacttgccagacaaactgaaccccaatcagactctggctgcctccatttggataggttaggggtgaggaagggggatgagctgtggcgctgtagggtatggaccctggtaccctcacacacccttctggccccttttcattggcctcctacttctcttcttcatcctcctgctcttcatcttcctcttcttcttcgctgtctgagtcctcgtataggttgatggttgcctggacaggaaagttctgcagtaaaatctccccagcactgtacagatagtcgaaggagcgggatttaggccagaagagcctttcactcccatttacttcttgtccagaggagagaaggcaagatgggcttaacaggccagggagtgccagtggggcttgtgctaggtctggagctagggccaaagccagggctggaacaggggtggcagcagcagcacaggcagcagagtccattcttaggggaccaaagccagtggggtctcctacttcccagaacctcctcgttccgaatt

SEQ ID NO: 463568 - DNA, 847 bp, Homo Sapiens
  misc_feature (46)..(46): n is a, c, g, or t
cactcactctcctatgttgcacaaatactcctttaatatacctaanctgattgttagaaattggtgggaaaataggtagaaaccaaggaagcagacacaacatgcatttatggagattctttttcccttttagacttccatctgaatgagtcagtcaccagggtattctgcatagcattgtatattctgtgtatgtcagatggctttttctttttgactggacttttgggtggtggtagatttttaaacaaatgaaattaaagcaacaataattttgaagcatttgaaaaagccaaagtgtacggtagaaatttctacaaaatgaatattatcaagagtttcatgtgatcactgcagtgttgtcacagctcataaatagcaacagtgtttcatgatttaatggcttcagaaatagttattccattagtttttaaatttttaatttctaaggtacagagatctataaaaccttgattatttgttagttttgcaattcaaaacagctaatgtctggttatttctcaaagtaagtattttaaacagcctgttaattataagaaactcagaataatgagtgtaaatgtgttatgttatccacccaagtgtacatatgtacctattttttttcaaaaagcagaaatagaaatacaagactggtaaacatgcctttaaaaatatatatattttcaactagtattgtctataatgctgaaatattacttattggtgattttttctgtttcacacacctctaaaattataagtaaagccaacccttttttttaaggctgagattcccaaaatgagaatactactttataccatttggtttataagtatggaactg

SEQ ID NO: 463569 - DNA, 676 bp, Homo Sapiens
  misc_feature (505)..(601): n is a, c, g, or t
gaagttaatgcattattttattttcattgtatttgccattatttacataattctgtttatggaaaacaatacaagtttttcttctatatagactagtcatcccttataaaaataagttaatatgagtaaaagaagtaaatcaatttagaaaatgttttgtaaaggctctttggtgcatatcgtgataaatgcatgcatacatacacacacgtgtacatatacacacacaactgtgaaggaagccctgaacagcagaaatcctgtcatttgtgcaactaagtccttgagtcatgagacccccgcctcaagtaccactgtctttgccactaactaccaatgtgtctgggagaaagttacccttctgttcctcagtttactcacctgtaaaaagaagataatataattgagctataaaaatatattatttcatctctccaatactatttctcatcctattcatacagtataaaaatagcactgctgaaaaacccagaggtgaggttcnnnnnnnnnnnnnnnnnnnnnnnnnnnnnnnnnnnnnnnnnnnnnnnnnnnnnnnnnnnnnnnnnnnnnnnnnnnnnnnnnnnnnnnnnnnnnnnnnttccctagtgataggcttcctgatccctcatcctaacaccctccattcctgcatattcccttccccaaataaact

SEQ ID NO: 463570 - DNA, 701 bp, Homo Sapiens
  misc_feature (646)..(646): n is a, c, g, or t
gtgtgtgcatgtgccactgtgccaggcctaggatgaccttctagacatgagctataataagcacatacacccctaattttattgaaatacagatactggtccagtgccccgggggtgagttctgagactgtatttataatgagctcccagatgacactgatgttgcaggttcacagaccctcaggtccagaagctaagctttggaagactgtgcttgccgacaagaattcaaaacctccaccacagattgtcttgccaaaatcttcagagatgtgtcctgatatttcttgttatgaccataaatgtcaaagatataaatatgggatacagatattaacaggcctatattttacatgtatgggacccccattaaaaaaagttggcaaatgtgcataatttcataatcaatgcaaatcagaaaagtaatcactttttgtaaactatgaaaatttgagaaacagtcataggtgaggtcgcctagaatatctggcatataacaaattctcagtaaatgttcacggttgttgctacaattgtgattgttactattattcctcttccttctaagggggcgggggtgaagtgggtaaaaggatagctgtgttcctggtacattcagttcctagttggcatctgatgcagtctncaaagaaacaaggagaaactgtgatattcataccaaagttccctcgttccgaatt

SEQ ID NO: 463571 - DNA, 620 bp, Homo Sapiens
  misc_feature (131)..(215): n is a, c, g, or t
ataaagaaaagaggtttaattgactcatagttctgtaggctgtacaggaagcatggctagggaggcctcaggaaacttataatcatggcagaagaggaagggcatggacacaaatccaaaccataaatcannnnnnnnnnnnnnnnnnnnnnnnnnnnnnnnnnnnnnnnnnnnnnnnnnnnnnnnnnnnnnnnnnnnnnnnnnnnnnnnnnnnnatcggtgcccagcaaaggtatgttcttgaagttgtcttttttctgagatttatgcaaatggtgcatttggaaaaatagatctgttcgggattactattttcaacaagattacttatgtgaaactggactccaagaatctttggggttaaattgatgctcctggaggagagaggccctatttatcctagtatctatgcctggggtcccaactggaacttctccagtttttgcaccgaaaggttcacatcccaggaacccccactcccagggaacttgagttgtcatcttagccatgctgcaggagtgcccagctggaaacgcgtgatgttcatgggaaaaccccaccgtataacatgggttaagctgtgaggtcctttttatatttcagaactttagttgctaaag

SEQ ID NO: 463572 - DNA, 744 bp, Homo Sapiens
  misc_feature (275)..(275): n is a, c, g, or t
  misc_feature (281)..(281): n is a, c, g, or t
  misc_feature (392)..(436): n is a, c, g, or t
  misc_feature (610)..(610): n is a, c, g, or t
  misc_feature (720)..(720): n is a, c, g, or t
  misc_feature (730)..(730): n is a, c, g, or t
gcacgaggagagaacaggaacacatgttttctgtactacatggctaatgcaggatatatggctgcagttgttgggtgaagctttgcccgaaagttgagaaatgggtgcagcgcaaggatgcagaacaggagtcgcagaccaaagcagagatccaggatatgaagcaagagttatccgcggtcaatatgatggacaagtttgccagatctgccaggctggaaagaaagatcaacaagatgatgaataagctcaaaactcatgtgaaagttcagacnagctcnaatcaggaatgctaaaatgggttataagtgttgctttctacaaattgccaggtaccgtgatcaggctataaggcagtcttgtggggttatccattacttgacagggtctcnnnnnnnnnnnnnnnnnnnnnnnnnnnnnnnnnnnnnnnnnnnnngtagcctctgccacccgggttcaagtgaccttcccacttcagcctcacaagtagctggcactaaaagtgcttgccaccatacccggataattttcatattttttgtaaagacagggtctcaccatgttgcccagactggtcgcgttttcttcctctgtttaaaatggcatttgntggacaagcatttgtatagtactatgtacttacttgaagctgttaatttttcattacaatggtttgtaaatttcttcatgaggccataatgcattggtttgtgctcaaantttgcattgnatttaaagcattca

SEQ ID NO: 463573 - DNA, 864 bp, Homo Sapiens
  misc_feature (592)..(691): n is a, c, g, or t
  misc_feature (731)..(745): n is a, c, g, or t
ctacgtacacttgagaatatttattgactatatttgcaaactgcatcatttctccatctttaaaatataccccttccccatctgttaagtttgttaagatagaatgatctcagtattttagttacagcagaggctttttgtcagagcttttactcctagttgtcagctaagtaagatttattgtataactgcaaaatagagtagtaagtacactaccaacttctcagaaaaaagtacaattatgtcaaatcacctgttctagaaaatgtaaagagcaataaaatcattaatcatttggattaccacctataatgcctatcagaaataaaatgcagtagtgtttgttgcctattatcagtaatgctgttactgttcaccaaaactgatttctcaaaatacattgttatatccatcaactgtgatgttagataggatccctggaattttaaattaatcacatgaaatttcacaaggaaattggaattcaaggaattaagaccttgaatttgacctaatacagtattaaaagaaaaaacctttattgagaaatataacactcaatatcacaacttcagtccatagttctattaannnnnnnnnnnnnnnnnnnnnnnnnnnnnnnnnnnnnnnnnnnnnnnnnnnnnnnnnnnnnnnnnnnnnnnnnnnnnnnnnnnnnnnnnnnnnnnnnnnncagttaagtcattttaatgctacctttaggactttatttnnnnnnnnnnnnnnngtcataaatttcttggtgccaagcaccaacagccttgttctggatatgtaaagtatgccaaatcaaataatgctagtcagattccaataaacagcctaggtgaatgtcgcttatttcct

SEQ ID NO: 463574 - DNA, 1000 bp, Homo Sapiens
  misc_feature (974)..(974): n is a, c, g, or t
ggaattaattgttaattttattgcaaaaaggattggtacattctaaagacagatgtaatgacctttgaattatttgtaggacacttccattctagcattccaaataattcggttaatgtgttcccctttttaaaacatttccaagtcccactttattctaatttcatcatcatctagcactttctgtgctttcataggagtcttcatggaccattttgccaataccgattattttcttctcaataagaaatgtggtggcaagaaataaaaatctctttctatatttgtatgcttagttcacattatacaaaatccttgggttttctagtaggttttatggccaaaatcatgtcttgttctttgtagggttgtactgttttagctgcccagtaggtctcatttttatatatttcggaggatttgtatatttaggcctattacctcaaaatctttttgaagtaataatgcttcttccttcatgtttgcaaagctggtcagtattacccttcatatttagttccaagttacctcatggcagtattttttggaggtttatcttaatccttttcactgggcatatttaaaagggggtctttcagcagagagcagcagaaggcagcttcccctcccctgtcctccttgttcttccctcctctcttggccctttgttcatccaaatagatttatcctaattggtggtgtggaagtcaagggttatcttcagtggtgcagaagtgaattattgcccctttgattacctggggtatttaagttctgctttgagggtaagatgacaagagttgaggttctctgtagtagatgaagtcaagtcttttttgtgagaattgtagcgtctttttgttgcttcctttgtaaattctacatacagacctgcagtagggagaatagtgggatacatgtggggtcttcatacttgacttaaaagctttttccttatttctgttctcacactncttgtggtggtggagtgggtcctgga

SEQ ID NO: 463575 - DNA, 570 bp, Homo Sapiens
  misc_feature (178)..(187): n is a, c, g, or t
  misc_feature (472)..(472): n is a, c, g, or t
  misc_feature (553)..(553): n is a, c, g, or t
cattctctgctcgattttcctttcttctccctcttctttcaagctatctgttttgcatggaagtctaaagcctctccctgcctgctctggctgcctaccctcttccccatctcttttaatcccatctcatcttggcatctgtctcttggatgactcaaaagaaaacaaatatgtgggnnnnnnnnnnctaattatacctatcttttcccccactgacattctaatacttgccctagacccaggaagcatgtcccacttccttcttcctccctatgagttgagaattaccattagacaatagtggctaaattatttaacactgattaaattagccaaatatttggggggcacaaagtctatgatattattattatataataatatattactataggataagtacacaaataaatcaaaagtccactaggagcttataatcaagttaaggagcaatgatttacagagaaaatgnggttttaataataatacaaacaataacaattttaaggtcctgagtttatgcatctatctgtttgtctgtctacctgtctgnctaatctatccgaacag

SEQ ID NO: 463576 - DNA, 572 bp, Homo Sapiens
  misc_feature (11)..(11): n is a, c, g, or t
  misc_feature (84)..(84): n is a, c, g, or t
tgaggaaatgnaagtctgattggtcaggaagcaggagtaagtgggtaatttggggtcacagacccccctcagcaggcaagcagnccagaggtgggtaaagcacattaggaaaggatgctgcaatccagggactagggccctggacctggatgccaaaagggagttgggaaagtagaaaagaaaacaatttatgcttaaattgtgctcagagccagggctctatgcaaagaagcagcaggtgacctgttttctccctcctgcactgcagagaacctgccctcaaagacccagagctcagcttcagtggaagttgaacggcactgtacaagcaaaactgagaacccagtcaccctgagaaaaatggtttctagggggaaacacattctttggtccaaacaaccaacttacaaatgatcttttggaccacgtcctgcctgcaaactgaggctcgattcacctttaatggaccagttctggcagtgccaagggagagaggccattagcagaaatgaaaaaagcaagagatcttttagtccactaggttaagatttttttatgctttgttgtttatg

SEQ ID NO: 463577 - DNA, 779 bp, Homo Sapiens
  misc_feature (118)..(118): n is a, c, g, or t
  misc_feature (120)..(120): n is a, c, g, or t
  misc_feature (209)..(209): n is a, c, g, or t
  misc_feature (343)..(343): n is a, c, g, or t
cacagtgacagtgtgtcatttaatcgggatgccaagagatcattttcatacaaggccagcagatgtaattttctttgatgcatgaatagttcatcattttgctactagatgacaaggngntcacagggtgactttagaatgcaagttcactgtttggtattttgagttctcaaaatgaaaaaaagatttatcaaatataaatatctttnaaaaagtagcaaaagtgctacatatgtggtcaaggaaaaaaattccattagttactgccgcttaaagtagattaaactttacaaatattaccacatccattatcaatatgggcttccaattattaaataaattngcctgtagcaatacagcttttcacacctctccaaggacagagtaaagaggacaggcaaagcaggtacccatcgtgttctcatacagccacaatgtgagtaggaaacgtcccctgcttttctctgctcctatctgggcaagtgtctgcatctgtgataagcagcacaaccccactatgaagtcctctagtgacctctcagagtgagggggcttccgtttaatggatacaaacactgcaagttttttcactcatttttgaccttagctccatccttgaaagacttttttggtagcagggaaaggggacactgacaggaggcaaagcaacttccacgatgacctccaaaacttttccaggcaggcactgctaactgtgccatggaatgtacagtggttctgaaaactggacttagcatccattagacattcagctcata

SEQ ID NO: 463578 - DNA, 1055 bp, Homo Sapiens
  misc_feature (633)..(744): n is a, c, g, or t
  misc_feature (808)..(869): n is a, c, g, or t
tactatggtgttcatgatttaaaaagtttggcaatcagagccacagagaagcagtgcatacaaataataatactagctactatctactgactgctaactatgtgcaaggtactgttcaactgctttattcatattaactcatttaatctccccaacaactctatgaattaggtgctactcctcatattaagctactcctgtgttattcccacaccactgatgagaatattgaggggtaagagaggttgagtaacttatccagagacacaaaacatctcatggaaggatttgaactcaagccagtgggcccccagactgtgctcttaaccaaccctgtatgctgcctctggcagtttactgaaccgagtgagaagaaggactgggcttagtattctgagggccatatatgggaagctcattctcctcactcctggtggctgagaagcattcttcattcattttgggatactctctcatcttgaactaattctgtatgccagatgttggcaaagataaattagacatggattctaccctcaagaagttacagtcaatgcagaagataagacacttacatgaataactataatacaagtagaaagtgagaaagttgcctgggcgtagtggctcatnnnnnnnnnnnnnnnnnnnnnnnnnnnnnnnnnnnnnnnnnnnnnnnnnnnnnnnnnnnnnnnnnnnnnnnnnnnnnnnnnnnnnnnnnnnnnnnnnnnnnnnnnnnnnnnntgagccaggcatggtagcatgcacatatgtggaaggctgaggtagaaggatcattcaagcccannnnnnnnnnnnnnnnnnnnnnnnnnnnnnnnnnnnnnnnnnnnnnnnnnnnnnnnnnnnnnggaccctgtcaaaaagaaagaaaagcttataagaatttgaaagcgcatctcttccacagagaagaattggggaagactgtagaataaaccacatttgagctggtttgaatgccaaagtttatccctcacatcaccatctaattttataacaaatttcatcatgaaagtgtctttggaaatatttgt

SEQ ID NO: 463579 - DNA, 768 bp, Homo Sapiens
aggatattcagcaattctttcctggatgtgatcagcaaagacaagacatctgcagctgatgggatcacctagatttggaggttggggaacagggaagatctaaacacccttgttttcttggcctctttggtctcagccacatggaatcagattatttgactaggactattaatgcataagaagggagaaacacaaaaaggtgatttcttgaggtttcagcttaccttgtcaatgattctgcaactgtgtgccatgaattcttagtcctgcaacatggtcataaagacagaaacattccacaaagttgtatatgatggtcttctcctcctacttggagagttccctgctattgttagcccttctagggccccctactctccctcaaaagagcattttctcaaacagaaatgcccactctagaagaccactttgtttttgatttggaaaatcaagcttggctttgcctgaaggttctttcatagatggcctgctttgggaactcggtggagacccagtattacacacacgccaggaagcccgggaggaccttcatctcacccttgccacgtgcccctcaggcaggaggtcaggtggagccacgtcggggccttggagactcggctgagaggtgtgatggaagatggggcgtgatggaagatgggacatgaaagtgctgcggctgcactgacattcttatggccctcactccaagcacttctcaccactcaaaccagcgggccccaagtaaagcttttgggggcactgaga

SEQ ID NO: 463580 - DNA, 838 bp, Homo Sapiens
  misc_feature (808)..(808): n is a, c, g, or t
aaactctaagtattttattaaaaacaaagatattcaggtctcttaaagcgggcttccaaaactatggattagttgcttgtgaaatggccaacctgtctataatgtaatattcttacaatgaaacatcagtctgggaaatctacacaaagtgaatgatttcaaacaactcaattgaaaacgtatttcctttctttcgtgtaaaacaataataattaggaaggaagtcagtaggagatcctttttaggttattgtacatgaaaataaaatggcaaaagcaatttccccccaagggaatgagactcaacaaaacttagcctcctatttccaatgttatttttaaaatttcatctaaatatgtcttaatctaaactagagtaaaagaaaaattgagattcgaatacacacgcatatacacacagaaaatggacacagatataaacggtggcacaaataatacatttttcacagcaaatacttcattacttaataaaaaaaacacatttgtgtactagcgtatacaataaatacattggtgtagttatgttatacagataaacaatttatctttagcagtgaggagagaggtaccaaacatgcaagaacattcaaaattaaatttaaaaaagtacaaccccaaattactagctgaagacaaggtcatgacaaacagtgtcagcatgacattgggcattgctaaatctaaatgctcatcatgaaattctccagatacacctcattttatttctgccctctatatgttttattctattattcttcacttaggaagctggtgcaattttggccttncttgtagtcagacttagacctttgcatttc

SEQ ID NO: 463581 - DNA, 882 bp, Homo Sapiens
  misc_feature (68)..(152): n is a, c, g, or t
  misc_feature (595)..(613): n is a, c, g, or t
ccaccctggtcagatgatgtttcatagtaaagatacagaatagagaattgagagttggtaaatctgcnnnnnnnnnnnnnnnnnnnnnnnnnnnnnnnnnnnnnnnnnnnnnnnnnnnnnnnnnnnnnnnnnnnnnnnnnnnnnnnnnnnnnaaggactaaactattcaaatcagttccataagcattcatcaggcaccttctcggagtaagacatcatgctcagccacctataaaattctatgatcctgaatagtatcaatgggaaaatatcagagcaaagcaaaatagtctgtttgtggcaaggttgaagagagaacccaaataagccgactgcattaccatcatctcaatgagcaatgtttgtaaatatccaaagtgtttaattttggagacactcttggagaaatcctttggccaataagaaattgggcagatatggttctattaacacctatcagccttgaaccttccaaaaattaaacatttaaagtcactttgcaccttagtcaaatggcgtgcttctggagagaaatctgggaagatcaaagttattaacactcccgatggcaacagtttaagaataggatgtgttnnnnnnnnnnnnnnnnnnngacatatctggttaaaactgcaggggggattccaagagcaaatgcaatgcatctggacaggacatggaggccagtggcctattgtttacaaaaacaagcctggattatgaacagtgacaagaggccaagacctcaataataactcacaaccacacctctctcaatcccagttcaactgaagctatcaatcagtctactcccccatctctgtaataaacctaccaatatttgcagccaagtggatagaaggccccttagggcacctccag

SEQ ID NO: 463582 - DNA, 368 bp, Homo Sapiens
  misc_feature (261)..(261): n is a, c, g, or t
aatttatggctttctgttacctggtatgctgtgtggcctgatgacatttaagtaatctgaaatgtaccagttcaatcaaagattgctaaaaagggcaatccattcttattagaaagtacagctgaaagtaacagaatgcgcaaaagaaagccatgttttcaatggacgttaaatagcaaaaaaacagaaaagagaattcagttaactataaaattttatgaatgtccagaaacaatcacaccacagcacatgactgcctcngtgccggaattcttgggccttcgagggcaaaatttcccctataggtggagtcgtattaaatttcggtaatccatggtcatagctggtttcccggtggtggaaattgg

SEQ ID NO: 463583 - DNA, 693 bp, Homo Sapiens
cctgatttaaagtattttaatgcgagctgttaagtatgttagcatctgcctgggttcttatcggtcagtcattacatagaccccaaatcataaaggtgttctagttttatatctatggggaaggctggaaaattaccacaaggggagagagagaaggtggtgtaaaaaggcagcctaactaactatttttaaaagcagatcaggagatacaggagctaggtgagatgctgtggacagtgcatgaggttcaattgtgaaaaccgatgtcctcattaatgacagagagaactctgtccctccatatacttggctgggcatcatcagtccagggtctcttatacttggagttttccagatgtttgtttcatgaagcacactttaccaaaatttaggaaaagaagagaaagatctccaacttttaaggtaatatacttttggctataaatacaggcaactaaaaacaatgtataaactctcattctgcttaggtctgtaaatacatgctaataactgttcgtaactttaaaaggctgccttgaattttgtcttactgttgctgcaaaagagactgtgaggagagaaacacctgacactttcagagactgggagggagggaaacaaagttgggggagtgggcagctgagtcacaggaacagggcaagagactgagctgggcagcctgggaaggtgcca

SEQ ID NO: 463584 - DNA, 839 bp, Homo Sapiens
  misc_feature (380)..(447): n is a, c, g, or t
  misc_feature (532)..(532): n is a, c, g, or t
  misc_feature (534)..(580): n is a, c, g, or t
  misc_feature (600)..(620): n is a, c, g, or t
gaagaccaagagagtttattgctagcagacctacactgcaaaaaatacaaaaggaagttcttcaggcagaaggaaaatggtaacagatggaaattcagatatttaagaaagaatgaagagcttttcaaatggtaaatatgtgggtagataattatttcctagaaactgacataaaaataatcatgtttctctatgtagcattactttataatgtatataaataccacaaatttcaattgagacaccaagatacaacagagggcacattccagaggatatgataatccagatgcaaattttcaaaggaaacagtcaaaaatatgttagatgactgcatcccttattaaggtgcataaaaaggccaggagcagtggctcatnnnnnnnnnnnnnnnnnnnnnnnnnnnnnnnnnnnnnnnnnnnnnnnnnnnnnnnnnnnnnnnnnnnnattgagcagtagtgagacttgcctgtaaaaagaatttggaaaacaataaagttagttgggcatgctcgtgtgtgcctgtagtccncnnnnnnnnnnnnnnnnnnnnnnnnnnnnnnnnnnnnnnnnnnnnnnngagtgagaccctgtctctgnnnnnnnnnnnnnnnnnnnnngctcgaaatgtttggctttttggaaggttgaagagatttttgaggatgattaatttagagagagctatgctatactgtaattaccaaccttcaccacccaaatggattgggtaagctggcactcaattccggtgacaggggtttccataagactacttatatagcttgatatgtgttaaccatggttgaagggcattagtggattttatttattaagtc

SEQ ID NO: 463585 - DNA, 436 bp, Homo Sapiens
ggtttgatttttggtggtggataaataatactaaaaggactctagtggaaaggggggatatcgaagagcagggggttgtgaatttccaggtacttggactttttgtagaaggagagagaagaagatgaagtttgccaggagggcccatattttttcagctgaagggtaaaatctttctttgcagagacagtattttgctgaatactttttataatgtgatgattattaaaaaagcaaaaattttggtcacttccaagctagaaggaggaatcagataccctttaatattttttcctcgctccttctggtatatgcatgtcactgcatgataattgagttttcctttgttttaataaaactgttctccagacattaagctaaactaaggagaaaaataactttgttgccaaaagggttgtgcctatcccaggatttt

SEQ ID NO: 463586 - DNA, 417 bp, Homo Sapiens
caaatttggaggaacattctgagatgcattgttgaatatctttttatgtgcttatctgtcatctatcttctttagtgaaatgtctctttatgttttttgcccattttctaactttttttaactgttgaattttgagggttctttatatattctagatgctagcccttagctgaatatgtagtttataaatattttcacccagtctgtagcttgtctttttatcctcttaccaaggtctttcagagaacatgaattttaaattttgatgaagtctaacatcaatttttccatttatgaatggtacttttggggttatgtcttaaaaacctttcactgaaccttaggtcctgaggattttttccaatgttatcttctaaaaattatagctttatgctttacatttatttgtttgttcac

SEQ ID NO: 463587 - DNA, 719 bp, Homo Sapiens
  misc_feature (688)..(688): n is a, c, g, or t
tagttttcccctttcttgtctctggcgctttctcttgtcacctgcatgtccaccctttcatcctcctgaggggccatgacttctttcccacaaccactccctgctctggtacaaggctcagaacacggtgagaaagtcggagtattctcctccacctgaagatttccattgtaacatcattaggaatatgaagagagcatgaaaccccatataatacttatatttaacgtaaactggagctcattttggtatttcccgaaaagaaaagagaaagaatttttaaaaatctactaagttattaacactaaaggaacttaagacttggtacttttcaagttactactaactcaaaataaataacagataccaaggcactgcagagatgagtttttaggtttcagaaccctccttagaacatccttttcccaactggggtcttaaaatcctaggggttttggtttcctcattcatgaaagatgagggctgggctaaatctctcttgctgctcccaatcttgacatgctccgatgctgacacgcaattttcatccatgtttagtttttaaaaagaagtgataactgttttccctttgctgtacataaatttcgtttactatgctacactgcacattcaaatttatcttgctgcagatggtgtgtcccacagtgagacagcatggggcagttanacagcctcgctgaagtgcggataccactgag

SEQ ID NO: 463588 - DNA, 741 bp, Homo Sapiens
  misc_feature (380)..(655): n is a, c, g, or t
ctcgagaatatctagtaccactggtaaaggaaaaatgagagtatctttgtcaattgctattattatagcttctctttttccttggaaatggtaaaaggcaacagaactatccatcacttaggatttcaataaatataacaaatttcagtgacattttttcagttagcattacatgttgtctgcctgagaagtaggcacatgttcttcaggtttgaaatgtgaattaaggactgcatatagcgctagaattctgcacctaggttattaaatgtgtggtgcaaaaaggaaagggattattggggagagttataaattggaagtcaaagaaagtctttgaagcgaatcttaggtcaaatgacaggtacctgtacttttgaaannnnnnnnnnnnnnnnnnnnnnnnnnnnnnnnnnnnnnnnnnnnnnnnnnnnnnnnnnnnnnnnnnnnnnnnnnnnnnnnnnnnnnnnnnnnnnnnnnnnnnnnnnnnnnnnnnnnnnnnnnnnnnnnnnnnnnnnnnnnnnnnnnnnnnnnnnnnnnnnnnnnnnnnnnnnnnnnnnnnnnnnnnnnnnnnnnnnnnnnnnnnnnnnnnnnnnnnnnnnnnnnnnnnnnnnnnnnnnnnnnnnnnnnnnnnnnnnnnnnnnnnnnnnnnnnnnnnccatattggagaaaatagaactatagaattagtctgaaagtgaaggagtggttaggattgttgggctgggactttgcaaagtatag

SEQ ID NO: 463589 - DNA, 801 bp, Homo Sapiens
  misc_feature (288)..(559): n is a, c, g, or t
  misc_feature (716)..(727): n is a, c, g, or t
caacagaaatatcaaagatgcttttactacacaaatttaaacttcaaactttttacaggcaatgagtagaatacatactgattccatgcagaacactggaatgggcaaacactgctaattaggaggagttcttccatctacgcatactttcattctacagatgtttactagagcatcatctctaagcctgaccctagctgagggttttcttctggcagggcaactgaacaaaacacacatctaatacagtaatttctatatgagttaaacatttccatttttttcccnnnnnnnnnnnnnnnnnnnnnnnnnnnnnnnnnnnnnnnnnnnnnnnnnnnnnnnnnnnnnnnnnnnnnnnnnnnnnnnnnnnnnnnnnnnnnnnnnnnnnnnnnnnnnnnnnnnnnnnnnnnnnnnnnnnnnnnnnnnnnnnnnnnnnnnnnnnnnnnnnnnnnnnnnnnnnnnnnnnnnnnnnnnnnnnnnnnnnnnnnnnnnnnnnnnnnnnnnnnnnnnnnnnnnnnnnnnnnnnnnnnnnnnnnnnnnnnnnnnnnnnnnnnnnnnnactcttcaattatctattatttaatctccatccaaggatacttagtaaataaacccagtaagttatttcttctaaattacttcctaatgaactaagtggatgttttatagtagatactgaacaaaaacaatgtaattgtaccatgtcacataccttnnnnnnnnnnnncgacaggcaaaaaacgtatgcctgacaattacatgttgttcccttcacaacacaaaatatcattaaatactgac

SEQ ID NO: 463590 - DNA, 1010 bp, Homo Sapiens
  misc_feature (426)..(449): n is a, c, g, or t
  misc_feature (999)..(999): n is a, c, g, or t
cagattctagaactttattcactacattcattaatgtaagaaagccatctccatgtgcaaaatcaaaacaataagaaacaaagcatctttattgctctaccataaaactgaccctcaaatatacagaaagaatacatgaaatatacttaaggttttaacgaaaggataaaataaaatatagcactatgttaggaaggaaataggaatataattctaagcattcattcattagctataattattatttacccatttgaaaaggggaaaaattcttttaccacaactttaaggtatttgctgagatatctttttagttaccaaaggaaagtctggagagtcctaggtatgaaaaccagtaagttaccagaaaaacaaaatcttacaaacttacccgctccgcagttccctcctctcctggtagacatnnnnnnnnnnnnnnnnnnnnnnnncaagctatttccatcatagcagagccggtaggtgcatcagttgtggatgaagacctgggtcggcctgactgcataacagctgtcatctcctgaccagacttcctgttgatttggggacttccctttggggcctctggcttgccccgcctactatgcaagcttgtccctctcttcatcttgggtggcactcgaatctgctgcaggacacgattcagagcttcatcactcttccttaagcacttctaaggtgtacaatccttttaggaaaagctcctcaaaatcccagcaatagcttccctttctttgcataggtgaggatgaacggttgtaatccaaaaggtttcccaaaaagttattttttaaaaagacatagaaacagaagatccatatgaaaaagagatccaatctgggaggatggacactgtgtcttctaaatcttgtgaccaaaggcaactgttcaccgagcgtcagcatctgaagaaagtgctaactgtggatgtgtcttctccagagattaataccggcggggaggggaggagcagccggcgtnctccgccagcg

SEQ ID NO: 463591 - DNA, 1105 bp, Homo Sapiens
gattttcacatcattttaatgacaagataaattccaccaacttggctttctatataaaaagacactttaaaatgaaacatatttgcaagcaaacaaacacacacagagggaattatttgttttgaattgctgacttagtgtaagtaacttgatcaactaacggaaccaaactaattctataaaccttagagtattttttataaaccagtggttagggaatattgggatttaaaagaggatcttatgcatttttatgttcctaatgccttcaatcattttaagtccttgaataaatttcactgaataatatttgttttaccgtctgtaatggcccatttgtttatagagttaggtgtcttttaaaatggcaggttaggtttaagtaaggacaaagaaatgttttaataatttcaggattggtttcttattacatcatatttttatgcatttgtgttaaattaataaaatccattatcataccatcttaatggtatggaaaaattcccaaatctacatctggtgatcctagtcaaacgtcccccatataaaatgaataaagaagggagaaagagcaatggtacagtctaaaacgttgatgaacatgacaggttacaaggtatagacacaaaaggctttgggtttatctggaaaaccttgatgttccattatcatatggctctgtagttaacagtgggcaaagcaagttacctcgaccaagtcatcaggactggctatttttccaacatcactttgaggccaagttctgttgcattttacatttgctttttgaattcctttttttctgaagaacacaccaggaagctcaagttctttgtgcctgtggattatctggggcagcacataaatgcacgatggggttgattctcttgttctttgggagccatctcccaggtttgggagcacctcatttcaagcaagagagtgcaagcctcaatagcagtggctcttaaatatggtgtcacaaggggtttgtaacccataatagagtaccaaaattttggaatacttttttgagtatgaattagattggcttcaaagttacccttaaagtaacgtcactccaatctgctccctgtgccgaaat

SEQ ID NO: 463592 - DNA, 522 bp, Homo Sapiens
  misc_feature (167)..(167): n is a, c, g, or t
tgaaaaacaaaatacctttatttagttaacactgaatttgcaaacacagaaaggaatagaaaacctgactccacttggacgcacaggcctttggggagttctgacaccagggccccatcggcagctccaccagagcatcctggctgcacctccttcccggagtcctnggcttgcctacctattccatgggaggttggcctggatgtgtcaagggggcctttcagctctagtaaagacatctgtctccacatccaaggagctttgcaaaagacacgtggcaggacaggagactggacgcactgtggcctggggaaggcagcggggcttggccctgggctgctccccttggggagaacctgtgtggctgaggccacctgttatggggtggggcctgggcctggacacagctgcaggctgccctgtcctccaagaggagaggcggggcttgaaagatttgagttagtgtcttgaccttaacgtgagagccttggacaagtgttttcagctctcagagcctcaagt

SEQ ID NO: 463593 - DNA, 1051 bp, Homo Sapiens
agagagtcttaatcgtacagtggaaagtaaaggatccattaccattaattccggtggggaaaaaaaaccagggacctgacattccccaagcttatttggcttttgataaacctagtatcttgagagatcttagccatctgtggaataatttaataaatactgctctcacgtgagaggctgtttaaagcgtctgcaggtctgcattctaccttgctgtcatttacatctttctctcaaacccatggaatttgtgctgtctgtgcaccacagtcagcagcacattctcacttagaacgggcgtttcatcctgacccaggatggcaatttcctctaggcttagttctgaaaagaccctgccctttgatgttacatttggtcttacaacttttcacatatggtaagacaagtgtctagtttttctcacatagtcatcaccaccaaacagtgaagcaacgtttgtagcccaaagcttacctttcctcccatgctctgagagactcggcatctctcgtccttggctcactaacatggtgggctctgtttatgaggtcagacattcctctctgcatcttcctttaaacaaggctgactgtatcgggtgtacaaataccccagctccctctctccttgggtgggataaccctgaggtgtacgttctaccagtttccccatggagcttgcctgcagaggtaaccagcttgatgacaaatcttttattggcttccttccctgctctccaacagtttttcctgagatcaccttccaaataaatgacttgccctcaaatcattgtttcaatccccttgaatagaggaaatcaaacagagacacacacttgacctggtgctggtaggcttgccacactgcaggttgtggtaccatggtatcatcagcttgcaattcccaagtcatactggaaaacccttaagactctctgcagtctgctgccaacagtgcatgcacatataagacgtgtcctacacaaatcgtgaagcaaacccagctgtcatgggcacatcaaatgtttttgttgtctgtgcctgttccgaat

SEQ ID NO: 463594 - DNA, 713 bp, Homo Sapiens
  misc_feature (169)..(177): n is a, c, g, or t
  misc_feature (322)..(322): n is a, c, g, or t
tatacattaaatctttttattgtttaaaaatctgggttgaacagtcaagctgcatatacataagtgaacccaaacaacaacaacaaccacctttaaaatataacccaggtccttacaaattgttaacagactactggactatcaactagagggccggactggaggaacnnnnnnnnntcccttccaacgctgacactctaggacagaaaataggagtgacacccactttcccactcatgtgcccccacatgcacagggatgtatgcacaggtgcgaccatctgggggaagaaggaaaaagctggagacggtacaataacatncattcacgttactgaccgcttcctacatcgttcagaatggatgtttccagtgttaagaaattatgggtatcctctatattaaaacaaaattacagaacagtgaaaacgttaggacagttttgttgctattatttggaaaatacagccccatagaaaatattaaatttttaaataaaagcattgcgcttcttatctaagtagttaaattgaacagacttttgttagtcacagctgagcaagaggaccctgggacaggttatacttggaatctacccagaagagattgtctccatctctttgggaagatgttttgctctgtttcagaatgaaaaactaaggaaatgcagcagcagtccattgcctattctattgctaaatttaaagcaaacat

SEQ ID NO: 463595 - DNA, 578 bp, Homo Sapiens
  misc_feature (129)..(129): n is a, c, g, or t
aataaatgaggaagtagggcatggtggcgtgggcctgtagtcccagctatttgagagactgacgtgggaggattgcttgagcccaggagttggaagccgggatgggcaacatagtgagacccccatctnctaaattaaataattaaatgaggtagggaaattaaaactttcacacccaggacatgcctgttccaactttgtagccttcatgcaatgctcaaggaaaaagtcttcataattccttggcataagtcacaccaagaaaagtttttaaaacttagtatgcgaacctgtgataggcaacacgcccttccctgagtttcctctctagaatgaaaacccagttcttcaagagtaggcactgaggaactaaattaagttgcctgaaatttcccactcaggtgcccaccacttctggtgttcaggaagagaggcatttgggaattgtgaggagcacattggcactcttggggctccaactgaactgtatttaaataagcagcaacacacacattgactccctaaggactcaaaggagtccaattggctgggtgcagggcttatgcctgtaatcccag

SEQ ID NO: 463596 - DNA, 781 bp, Homo Sapiens
cattttttacttttgaaatatttcataataccctttgttactattcaactaacctttaatatttgttatcaaccagtaataccaattgttattaaatatacaagttattaaacaaacccttaacattttaatttagtttaattcataaactaaaagatatatccaaggaggcattacttaacattagaaatcctagtaacacagagtcatcacattaatgcattaaaagagaaatggtcaaatgttggctaaaagcaaaggttttgcttgttcactgctgcataacaagatgtaaactgtagtacagtttttataaatggggaagggagaaagtgaagaaggaaggtaattatgaggaggggaatcatcatatcagtaaggtgtcaaaaactgggcaaagaattgcattagttagaataagctcagtagaatatggacattaaaggccaagaagataacattttaaaactaaaaatataaatacacataaatttgatgttgtatagacatcttgattatggacttgtttttcttgtttctgactttaaaattaatatttctatttcattattgcttataatatttgataattttataaaagagaaacttttcttaaatgtatgagtatagttttttttgatactgatatttaacttgatatacttgcggtcagagaaaggagtaacattctgcacttgactagaaataaacctataatgtaaaattcctatcttcctatggaatttttatctacatcttcttttcattattaagatattta

SEQ ID NO: 463597 - DNA, 992 bp, Homo Sapiens
  misc_feature (797)..(806): n is a, c, g, or t
  misc_feature (972)..(972): n is a, c, g, or t
aggctttgaaaaatcttttattaaaacttaagatgaaattcccataacatacagttaatagctttaacatgcacaattcagggttgtttagtgcattcacagcgatgtgcagccattacctctacctacttcccaaacatttctgtcaccccaaaaggatggttggtttttaaacaccattctggaggcatgcagcagagaacaggctgaagtgtggtgaaaagaagtgggcaggcaaggtaggaggccacttcagaaccctaagggagaaatggccagcagagatggacgtggtcaagtctgagacgtaattcagacgtaacacttggcttggctggcagctcggctggatgtgggggtgcagggagatggagacgttctggccttgagcacagaggtgaggaacactggaggagggagaggcctggcaggaagttgtgggctccagtttgggatgtgttaacgtttgagattcccatcagacatcactatcaagaggcagctgggtgcatgagttgagtgctgcacaaaggtagaaatgtagagccttcagcatttaaatggtatttaaagccaagggactggatgaagtcacagaagtaaagaaataaagggttcaaattaagaaccagcagcccagggctggtcttgcattgaagagtctggtggtgaaggtaatttggtataaagaagaaaaagcagtgtaaaaaaatgtagttgcacaaactgttaatcttgggatggtttgctactcttgaatgtcagtggaaaccttcttctgttagttgctgacttannnnnnnnnnaaatatcacaagtaatttgaaactgtttctcttttattgtgcatatttgtaaaaaatactgagccgcagttcccatttaaaagcatctgtttcaggactatcagagggttgattgaggacaaataaaaatgcgttagccagttgatcattatggcacgtattcagnattatacgcagagcacgtca

SEQ ID NO: 463598 - DNA, 1040 bp, Homo Sapiens
  misc_feature (111)..(111): n is a, c, g, or t
  misc_feature (419)..(419): n is a, c, g, or t
  misc_feature (1030)..(1030): n is a, c, g, or t
tgcagaatttgatttttatttgtaaagaaacagtgtaaccatggacattggccatgaagagatcaggcaactctgattctgacagtgcctgagaacagctcctcctggganttatccaaggtgctctgagaccttctagactgctcccggatccttctgagctgtccagcatggatgcttccttcatgccagagagatttgggccccagcacctcattgtgtcacatcagtgacccccgacacacatctctacaaggtactcccctgaagatacaatcagcacggccttcactatggccagagtgtgtgtgcatgtttattccgagtgactctaggttcgtaagtagatcaggctgggttttcagggatgaatcaggatgtgggtcaacctctccaggtgattctaattgggctatgcntggttaattcccctccgtttgcctcctcctgatccactctttccccttgaccaactctgtggccaggccccaggatgctgacgactatgggcacattatctggtcccctgccctctggtttctagctgggtttgaccattgggaggagctggcaggagattagaggcagagatgttggggaatgtattcttcctgctggaccttggctttgtgagtagctgggttttgctatcaaaggtcagagtttgtgtgtctcatggctctatctgtggtccaactctttttggggagaaaaggtcttcagcatcccttgtggctgccttagccctgccacaactctgcaagtatagtcatgtgtcacttaacaacagggatatgttctgagaaatgcgttcttaagcaattttgttgttgtgtgcatatcatagcgtgtacttgcacaaacctagatggtctagcctgctacactcctatgccatacggtgtggcctattgctcctagactacaaacctgtacagcacatgactgtactgaatattgtacgcaactgtaacacaatgcatttcggtactagacatgtctagacgtagaaaaggtaaagtaaaaatanggtattataa

SEQ ID NO: 463599 - DNA, 596 bp, Homo Sapiens
aaatagcaatttttaaaaacaaggttgaaagtttagagaagttaatttaaaaaatgatgctatatgagtaaaacatatttgacatactatttttagatagttagaaatcaaatgtcgatcacaaaagaatctggaattagaagcgtatgttaaactcatgtccttcatgcccaatatagcaaatttccagactttccccctcaatacactgacatgcaatgaaaacagattaaaagtgactaattttttctggtttaagaaaaagatcctggttactttaagagtactattaaaaatgaaatgaataaaccttgtttctgtcaatggattagaaaaatcctctactggaggattataaaaaacattctggttgctatatatgtggcagcataaaaatgtgaagaataaaaatttgttctctaccaacaaatctagaaaacaaattctctgcaggagagtttgaaaactatgttctaattgagaaatgtactgacaacttacagtttatcattagataatgtattcttagggcaaaaatgccttgaaagaaacctacttgcaaaatactgaatgtatgtttgtgtagaaagatttct

SEQ ID NO: 463600 - DNA, 695 bp, Homo Sapiens
  misc_feature (283)..(283): n is a, c, g, or t
  misc_feature (601)..(601): n is a, c, g, or t
  misc_feature (645)..(645): n is a, c, g, or t
  misc_feature (661)..(661): n is a, c, g, or t
  misc_feature (663)..(663): n is a, c, g, or t
  misc_feature (680)..(680): n is a, c, g, or t
ccgaaagcattttacctgtgcttcagagggactctttaacaaagacatttgccattttccactccttctttagcctccctaggagatgcccggtggctgacacccagaggaagcacagcctcccctctgaagcttcctctactgcagtctctgtgctcatcgcaaggatctctccatattgacttatatttgtttctggtcttatatttttctctatggacagacttctattttcagaagatagatatttaagtcacaatattctggactctggcttagttangaccaaccggtctcttgatcgtctgtggaaactgaatcaggaacaccccagagagctggctctggatgtaattcacagcttcatttaattattatcatcaaagttaatgaaggccataaactgtttcataacataccaatgggaagtgtgattggagggaaagctggacacctcaccataaaactggcacagcagaaacggctcgacttaacaaaaccttcttatgaagaaaaagacaatgaaaccatgttcagtttagtgaacctttcacacttggcaacatgaatgttaagtcaaaagaacaatggagctatgagnttttttaatcaaatttttattttgggtcaaataagccattttgnttggttggtattaagngnaaagagagcttttcggntagctattttagtta

SEQ ID NO: 463601 - DNA, 704 bp, Homo Sapiens
  misc_feature (186)..(186): n is a, c, g, or t
gagcttttgatcattttattcacaaaatataagcgagacttacatccctttctggtgaaagttttcaaataattttatgggtagggccttgagatgtatcaattataaaacatgttaaaatgaaaacattttttaaatttacaaatacaaaccaatactttatataagaattctctataaagttcngtcaaagtaaaaaataatttgtttcaactgaatataaggcatgtccagtttatgtcattttgtagaattatttttgttttgctggagacttttctcttccgcccggtcctgatttttctttgattctctggattgttcagagtatctgctagatttttcccatcgtctctcggcaccattttgatatctatcttcatcacttcttgagcctgagtgctttctattcatttcctttgactttgatctatcttttcttctgaaattttcactgtctttaattcggtgtgtatgcttctcattttcagaaaaagaatttcttctctctcctctcttctttttgggatcaccatgcttattttccaaatctatatgcatttcttggtctctgtcattcgcaactctactgtagttattttgttcagaaggaacatctttgtctgatgtgtactttgttataggatctctccaatttgaacctacttgaattttgatctctgtgtttttctgaccttctttct

SEQ ID NO: 463602 - DNA, 761 bp, Homo Sapiens
taaaagccaaaataataattttatataacataaatacagactaaagcaagcgtaaatgttatgtgttttaaagtctatgaaaacatacatatttttaaagcagtcaactcattgaaagatactaatatttaaagtagaaagttgtgttgtctgctgaacatgagactctgaggtatttgtgagagagaaattgtcaggaaagcagtagaacatttcctgcccatgggtgcagtcttgagtatttgtaatagccatgacgaatccaaaaaccatcaccacagcaccaatgggaagcatgacacaagacataatcttatcggagtgtgtccttggttcttcagacagtttcagataacaggctgatggaatgataaaaatgaggggagttgcacagagcacaccattgagttctagaactatcccgaggcaatcaatcagcaatgacaccagcgtggctacagtgatgaccatcactgttaccaaccaatgtggaaaacccgatgaaggattcccaccaaaaaacacattggcaattacctctcttgtcacaaagcattccatagggtatgtcaaaatgacagtgacaccataacaaaatcttccaaatgttaccaggtcatcatttctgcagtaattttcaaataagtcccctagatagtaatataaaataagtttatttactagatactaaatgtttgagataactatctaataaattaaatattagatattacagttatgcatcacctaatggcccacat

SEQ ID NO: 463603 - DNA, 912 bp, Homo Sapiens
  misc_feature (105)..(122): n is a, c, g, or t
  misc_feature (351)..(351): n is a, c, g, or t
  misc_feature (371)..(371): n is a, c, g, or t
tccgacaaagagtatttattttgtttgtccagtttagtaatgccataagattacaggcaaacttaatgtcttatattttacttaaagaaataatcacaaattgannnnnnnnnnnnnnnnnnaactccacagactttaaactgtattaacagattctactttcttctagggtaaatgccttttttggaaataaacataacttgactacattttttgttacttttttctggatgcatgtgtaaataggtcaaatgagaaatccttgaaattacatttaaagtggaccaaattaagatttccatactattgatttacccttgatgtaatttaaaatgtgtaaactgccactcnagaatagaagtgcaataccntgaccttttaataatttggcagtcttttagatataggtgaattactgcactgttatttgaactgaagcatctcataatatatatatatgtaacagattttgtatgatacaaaactttacagcaagctatttgaatgtttattaaaaaaattctcaaaatgacatggaaacatgtttactgtataaataaaagcacttatacattaagagtgtacattattcaataatttacatcatcgtaaaagaactggggtgtaagttaaccagtgcaaactactatactatattcatattacagtcatgttcatcataaaaatatcagttatttttaaagcatcgaaaaagtgaactgtatttcagtataaaaattctggtaaaatattctctaggcctaatgtttttgttaacataagtttgtctgtttaatgtaaagtgcagaagagttgcctggcaattaagttggatcggcatagaatgttaggttttgctagagaaaggggttctgtggtcaaaaagtttggaaaaaactgggtcaaataaaa

SEQ ID NO: 463604 - DNA, 773 bp, Homo Sapiens
  misc_feature (722)..(722): n is a, c, g, or t
tgttgggatgtttttgagggactttctcatcttcaagttctgtatttgaatcataactatcttaattcccttccaccaggagtatttagccatctgactgcattaaggggactaagcctcaactccaacaggctgacagttctttctcacaatgatttacctgctaatttagagatcctggacatatccaggaaccagctcctagctcctaatcctgatgtatttgtatcacttagtgtcttggatataactcataacaagttcatttgtgaatgtgaacttagcacttttatcaattggcttaatcacaccaatgtcactatagctgggcctcctgcagacatatattgtgtgtaccctgactcgttctctggggtttccctcttctctctttccacggaaggttgtgatgaagaggaagtcttaaagtccctaaagttctcccttttcattgtatgcactgtcactctgactctgttcctcatgaccatcctcacagtcacaaagttccggggcttctgttttatctgttataagacagcccagagactggtgttcaaggaccatccccagggcacagaacctgatatgtacaaatatgatgcctatttgtgcttcagcagcaaagacttcacatgggtgcagaatgctttgctcaaacacctggacactcaatacagtgaccaaaacagattcaacctgtgctttgaagaaagagactntgtcccaggagaaaaccgcattgccaatatccaggatgccatctgggaaca

SEQ ID NO: 463605 - DNA, 759 bp, Homo Sapiens
  misc_feature (45)..(146): n is a, c, g, or t
  misc_feature (460)..(547): n is a, c, g, or t
  misc_feature (739)..(739): n is a, c, g, or t
ccacttaccgaggatccattatttactgatcacttgaagtacctnnnnnnnnnnnnnnnnnnnnnnnnnnnnnnnnnnnnnnnnnnnnnnnnnnnnnnnnnnnnnnnnnnnnnnnnnnnnnnnnnnnnnnnnnnnnnnnnnnnnnncattcagattaggcaattgaagctgagagaggcgaggcacttgcacaattattctggaaatagtaattgcaacggccacagcagaacacagttctgtcttccaacaagccagattccacagcatgctgccttccagatgccagactcatctgaaggatattaggtctcagtggaatgttcgattgtcactgagttccactcagccaagggcatcgtgagggtttacattgaagatgtaggccctagacagtgctcccaaagcgtggtcgtggaccatctgcatcggaacctcctgggtgtctatggaaacttgnnnnnnnnnnnnnnnnnnnnnnnnnnnnnnnnnnnnnnnnnnnnnnnnnnnnnnnnnnnnnnnnnnnnnnnnnnnnnnnnnnnnnnnngttggttcaaataaagcagaaggatttttttaggtaaaaaatcagggtcttgaaagaagatacttgatttactagaaagttttgtgacaaccagcccatgaataaaaaatacttgcttgtaaaatagcccagagatttgctttagttcttactacatctttggaaagatgaattacctttctgcttggcttnattttagggttagaggatca

SEQ ID NO: 463606 - DNA, 872 bp, Homo Sapiens
  misc_feature (115)..(159): n is a, c, g, or t
  misc_feature (214)..(227): n is a, c, g, or t
  misc_feature (766)..(785): n is a, c, g, or t
gtgttaagattgtgtttatttaggttaagatttcattttgactttatcagaatgaaaaacttttgctctttgaaagacaccattcttaggctgggtgtggtggctaagatactcnnnnnnnnnnnnnnnnnnnnnnnnnnnnnnnnnnnnnnnnnnnnngagttggagtctagctttgtcaccaggctggagtgcagagtataagactcagtcnnnnnnnnnnnnnntttgtccaggggagattcctattaaagatctatataggtggtcacggagtttgtccagggaatgaatcatttaaggatctctttattagttggggtttttgacattcagaatctttgaagacacaggtagtagggagggattgaattcctcatcagttaggtccctcatgaggcccattgctggtaaaatctttgtaatattcctggaatttcacttagtgattcatgcatattcttacaccaatgccccttggactgggtcagtgtgagtggtccaggactttgtttcttgccactaaaagctcttcactagaaaagggtcagagttctagtttatgactaagggttaggttaagattagatttagaattatgctcatggaaaacctagctcaaatggttcctagaaattgtccacatagtaagtgatcagtatatattggtcaaagaaatgaatgaatggaaactggtttaagcaaatggaatctgttagctggcttcaagtgactcaaacaacataatcaggaatggagagggggnnnnnnnnnnnnnnnnnnnnaacctgctctgatctctgcaatgtcatgcttagatgacccactatccacgacctaccaccactgtgctaaaggattccttgtccttc

SEQ ID NO: 463607 - DNA, 510 bp, Homo Sapiens
  misc_feature (93)..(93): n is a, c, g, or t
  misc_feature (95)..(95): n is a, c, g, or t
  misc_feature (425)..(425): n is a, c, g, or t
  misc_feature (438)..(438): n is a, c, g, or t
  misc_feature (462)..(462): n is a, c, g, or t
  misc_feature (470)..(470): n is a, c, g, or t
ggaaggacaaggaatcctttagcacagtggtggtaggtcgtggatagtgggtcatctaagcatgacattgcagagatcagagcaggttgagananagagagagagagaccccctctccattcctgattatgttgtttgagtcacttgaagccagctaacagattccatttgcttaaaccagtttccattcattcatttctttgaccaatatatactgatcacttactatgtggacaatttctaggaaccatttgagctaggttttccatgagcataattctaaatctaatcttaacctaacccttagtcataaactagaactctgacccttttctagtgaagagcttttagtggcaagaaacaaagtcctggaccactcacactgacccagtccaaggggcattggtgtaagaatatgcatgaanactaagtgaaatncaggaatattcaaagattttacanaatgggcncatgagggcctactgatgaggatcaatcctcctactactg

SEQ ID NO: 463608 - DNA, 462 bp, Homo Sapiens
ttagggatgcaggacatgctttaattctgaggacagacaccaggagaccagaaaacaataaaaccctaaaaaaaacagtgtcaaagactgtcagagtgaccttgaaatcatttagcaatagataccaactttccatgtgagggtaaaagtaagttattcaatgtggctaaattagccatcttggttagccatcttggacctgctgggtcactggcatgttattcaaaatctataacatttctttgggaaacttttagaaggaaaatatgggtctataagttgattcatctcctacacatctttgattttaaaatgatgacctaaacccaggtcaggaaagcaacttcatttcatggcttgtttttccccttttctgcgttctgccactagcagtcgctctcattcatttgaggagtaaaatggtaaagcagtgatctctaggtctatactacttaacttact

SEQ ID NO: 463609 - DNA, 614 bp, Homo Sapiens
ctgagacctgtataaatggactaataagaatcggctcacccactctaaccacagcctttattgcttccccactttcaaagaccttgagagcttttgaaactatggggaaactgaggctgggaacatctgatacacccagtcagcttagtcacttagtaaataactgctgaacaacttacgtggcacaaggacgaaaacagaggtctgtttgatcgaaattttcacttccaagctgtgtacactgtgggtacttaataaatcctcctagacttaattgattttgacttaattcaccacttctgctgaatctcctcaaacctcatcacgtagacgtctcataattctcagaacatacctggaccattgccaacatacatccctggtgtcactttttactgtaactgttgtttcatgtggctttccccttttactagattaggagcattcaaggagaaaatagatctggaaaaaatatagataacaatttacgtttcttcctgagcaactcctgctctaacaactgtcagaaggagttgagatataggaacaggatcacccctatttgacagatgagaaaattgaggcacaggcacagactattatacgttatttgt

SEQ ID NO: 463610 - DNA, 676 bp, Homo Sapiens
  misc_feature (61)..(61): n is a, c, g, or t
  misc_feature (64)..(64): n is a, c, g, or t
  misc_feature (503)..(561): n is a, c, g, or t
atgagttaatggactttattggacatatatttaaattcatatatcatataaaaatatatanctnataaatattgtcttttccattctcataaattatgaagcaattttatgcatactcaacacaagcagtgtctttctcatcattaaggatcactttttcagccatcttacatgttttcccagaacagatgtccttctcttcagtttaagcgaagggcttgggagaggacacagcacagtttgaattcacagatgatgcagtccttggaaactttatcctaagtcacaagtttcctttgcatcacactagaacagttggttttttgcatgcaccctgcctgagtatattcatgacttcaaaacatcacttaatgtaatactttttaaaaattatatttctgttaactttttttactgaaatataacatctatatgggaaaaggccacaagccatcataaatattcagctcaatgaactgtcagagtggaacatccctcaggtnnnnnnnnnnnnnnnnnnnnnnnnnnnnnnnnnnnnnnnnnnnnnnnnnnnnnnnnnnnagtactactgtattgctttttaaagcaatctttaaaaagcatattttgagacatccaacacatgcgattatgaggtcatactaccaggaagagttaccaaaggctgtgttaaatt

SEQ ID NO: 463611 - DNA, 545 bp, Homo Sapiens
tgaatgtatagcaatattttattaattctttctagcaggtaaaactttttttcctcccaaggtaaaacttgattatgttgtttgggctcctcctcgttatgtcaggcttaaagaaactaattaaattactgaaaagtaagggaagatcttttaataaattctgaagtgtcaacacagattagagtcttgatcatctaaagagtataatatgtaatactctatttacctaaatgttaatattttttaaatggacactgatttatacacgtgtgagcatgtgcatacatgcacggacatcccatttacttgtttctttgtaaacttccgaatagaaaaagcagcacatttaagatggaaatataaaaggaaatgaactttctaagcttttcagattactcccagtatagcaactttcaaattacataggagtttgtaaatctttaaagaaaaatgtgtagttttgtccaaaacaaaaacagtgcctcatatttttaggaaaaataaaattctaatcactagatgatagttatggtgctgcttaatga

SEQ ID NO: 463612 - DNA, 696 bp, Homo Sapiens
agtttttttcttttgtttacgcttttggtgtcatatctaagaaaccatcacctaattcaagattatgaatattcattcctgtggttttctcccaaaagtgttatagttttagctcttacttttatgtccatgaaccattttgagttaatttttgtacatttagtatatggtgtaaagtagaagtccaacttcatttttctgtatgtagatattcagttgtccaagcaccatttgttgaaaagattattcttcccctattaaattatgttggcacttcttaaaagaaggattccaaaagtagattaagaagcagttttaaaagaggattccaaagatgttacttactgttccagtaactcatgtcctccagaggtgatttttgaagagtgcgtatttttggcagttactttccatggcagttcagttacttcatgttcattaatttccctgactactggttgtcattttaattgtttaattgtagtaataatttaattgtttgttattttgaaggaaggggaagggaggttcaatgataagaaaagcattcttcctttttaatttaaataattagaacatacaatttgtactgaaatgatgtaaaaaggctcttattattgaatcattggttttgcttatccttttgtttgaagtataacttgtcatatcctttatagccacttaaaaaaggagaga

SEQ ID NO: 463613 - DNA, 767 bp, Homo Sapiens
  misc_feature (14)..(14): n is a, c, g, or t
  misc_feature (271)..(294): n is a, c, g, or t
tatttaatatgaancagtgttacgggcacaaattacccatttctacaaaataagtgtgcaagtgatgccacatattatccatattcaactgagctgtcatcaaaatacattttatttacaatatgtactatgatcagttggatattaagttctaaaatgatttacttcactgctacattataaaggtaaaagcaatgtgtagaaaaagtgtgagattgtgtttttacatactgcttttgtagttgccatcgctggttcagttcgacttctnnnnnnnnnnnnnnnnnnnnnnnntaacattagctatttatgaatttttgtgctaataaattttaacacattatcttcaataatacatttttaggaacctaattttcctttggtataaatatttaacagccaatttctgaatgaataaattactctgattaatctttaccacctttgagcagttttaagatagactttgtggtttggaaaaaaattccatacgtagggaattcaaaaataggtgtaccctgccacttaaaacaaatgttttctgaaaggtagtatagggattttatgtttagaaacgtagtttattcttaataaactgaaaatttttaaattatataatttcccagtttctgaatgcgtaaattttcacacatcaggaagactgctgttgttaacatttgtaatttgaatccctgagaaattgctgtgctcccaaaactaattttcaaatctggagggccaggctgatagctattttcatttttcac

SEQ ID NO: 463614 - DNA, 534 bp, Homo Sapiens
tgcaattaacttgtactttattttgaagttgtgactggaaagttgctttaaagtctgtctttaaacttagaaaaattatctcaaattgctcctaagagaggatcagtagagatttagttcttatagtatttcctcaattatatttggcaaattagattttcaaaacaagagtttaacttgttattaattcctcatatttacatacttaaacctcaggtagaaaagtattacaagctatcagtgacgtctacaatataggtgggaaaggtgaacgcaaagaataacacatattctatattaacagtgaacatagctatttctgttctccctcagctaccaaaaactgtcttaagcctccagatttaaaaccgctggggttcattcactccattcagccatttatttttgtgagcatctcttaggcagtcatgtgctgtgctaatcctatctgactcttccctctcctttgtccttcaaaccccgttagtggccaagtcccattaatgtgggcgtgtcccacttctcctctttcca

SEQ ID NO: 463615 - DNA, 772 bp, Homo Sapiens
agcttcattaaaatcttgggaaattttaatttgcattcaccttctctaaacatgaacatgaatctgtaaagtgatacattctttcttgcttaagaaattaaagcgtttggggatttgagtttttatactctttgaaaattgagtttcttgtgctaaaatcatcattcacaaaatgtcctctcacctgaggaattccaacacagcaaattcaatctgaaataaattgaggctacatttaagagacgggacttccagctaaaaataggtattagagagctgtttttgccaaaaaattgaatacttaaccttattcttcactcttgactcatttgttttgtctcagttctgggtgaactggagggttttctttctttgtattttcatttctgtattcattttcttaatgcgattgaattagatcaacattttatgccttctcttcccgtaacttgcattcacatagacctgatatatgtatgagcctaaatctttgtggttaacacttattattgctttggaataactgtccatatatggaatgattcattcggttggtataaccatttacagggttcttgatacacatttccaaattaacttctaaaaggttttacatgaaaactcttcccatccatagccatcaccagtttcacctcacacacttgctaatgctattaatattattggtagaatttatgctaatctgatgagcgataaaaatgcctcatggtttggttatttggatttctttaatcggtaatgaagttgaaca

SEQ ID NO: 463616 - DNA, 978 bp, Homo Sapiens
  misc_feature (196)..(243): n is a, c, g, or t
aaccaggatggaaactaaatttattagattctaaaagaaagatggagaaaaagatacagaacttcattctaccactttttaagcaataatatttaattttgttttaatttaaaataacattaaatatggggtgaagatatattattaaagagataaaaaagagttcgggaaacaccatgaagtcagatttgatgtnnnnnnnnnnnnnnnnnnnnnnnnnnnnnnnnnnnnnnnnnnnnnnnnaagaaaacaccctcttaaatgattaaaagaccaaggaaaatggggaatcacaaagtgataaaatataagcattttattttaatttaaaaacatgtgactgcacattcatgtgccaatctttgacaaacggctaaatcccccttgcatgaattcatgactgaagtttgtattgtttagacataagaaataatttccacctcaagagatacaaaatctatcatggaggatatagcactactgagttgtgcattatagaggaacaaaagattggacatgtgtgaagacttgataaatcaagagaagagtgtaaactaaatcataaaagtgggagactgagaatatgcccagaacaaattcatttggaaaaagtatgaagtttagttagaaattagattggaagaagatgagtctttccccatgggtattctgaatgacaagatataatagcttctttcttagaaccaaagagccattatatcagggagacaggctgttaaagcagagggaagatactcgtgatggaaagtccgttaaaaagacctcaataatgaccaatgagagactgactaaaaaaatggtggtgggattagacagataaagggaagggaaatggtgtagtagaagagttggcaggagttggtaaaagtgtggattaaatgtgaagggaaagggagagatcatatgtaattgcaatgtttccagctgaagactcacaggcagagttaattaacagga

SEQ ID NO: 463617 - DNA, 794 bp, Homo Sapiens
  misc_feature (292)..(318): n is a, c, g, or t
cttttggtataataacttttattgtaaaatacaaaggttgataaataattgtgaagatacattttcaaagggaaaaagaatttgtaggcctgaattattattttaaatctataaataatatattttacagataaatagatattgcgatttgtttttaagctgtcatgaatcaaagaacagcctttctcagataagcagaaattgattaaaatagacatgatttcagatttttatttatattatttttctgttctcatgcctaatcatgaagttctacaaagttccacatttnnnnnnnnnnnnnnnnnnnnnnnnnnntaagatgtaaaatatttgtttttgaaaacactgaggccatatcaggaagggtaattgggaggaaaaaattaggtcacaatgagtaacaaaatagtatttgtttctgttttcacttgctctgcaatagccataatctccctcaaattcctttcgatatctcagtcacatgtgttcatggcacagccttttcagcttccatttggtggctgccaatctcttcctcttctgctccatctaacaagagaatatcctctacgttggcctctaaactaagtccccagttcacactgccaaagtgtgaattttctcccaggtctggacaagactctgcctcaattcccatccagcctctatgtcagtccacactcagtgggcgctggggatggttattaagggacctcgggctcttccctcgcttgagttaagaagctgcataggagagagagtagagctaccttaagatctctttgaacctt

SEQ ID NO: 463618 - DNA, 661 bp, Homo Sapiens
  misc_feature (16)..(16): n is a, c, g, or t
  misc_feature (37)..(37): n is a, c, g, or t
  misc_feature (45)..(45): n is a, c, g, or t
  misc_feature (50)..(50): n is a, c, g, or t
  misc_feature (89)..(89): n is a, c, g, or t
  misc_feature (111)..(111): n is a, c, g, or t
  misc_feature (117)..(117): n is a, c, g, or t
  misc_feature (650)..(650): n is a, c, g, or t
aaaattttaggattgntaaattaaataagcaagaggnccttggcntgagnctgtctccagactttgagttcccatgtaataaattgcancctaatttagtacttaaataanctgaancctaatttaggattatatagatatatttttgtaacagataggtcacagccaatcgcatgctgccaacttgccttacttggagcagaccatgtccaaataaggcaaatgcctatctgtaaccaatcaagctatttctgtacttaatttttgttttctgtctatgaatgttcactgcatacctcgcaaagcagagctctctgaatgtcttctggttctcagtgctgcctgatggatgaattgttcttcactcaaataaaatgttaaatatattttgctgaaagtttctcttttaccaggatcttctttttggttctggaatttcacaatttcactgtgagtagaagttgaagtccttacaaaagttagaaagctaaagtccttacaagtgacctgcaaagccctctatgatctggctccccactttctctctccctctaacttcatcttctctcctgctagctcactccattccagccacatgagcctccctgctgttccttgaacctgccaagcatgccttggagcctgtcctnctggcctttct

SEQ ID NO: 463619 - DNA, 524 bp, Homo Sapiens
  misc_feature (11)..(11): n is a, c, g, or t
gtaaattttantgtatgtgggttatatctcaaagatgtttaacaaattcattgagctaatgcatataaggtatttaacacagtgactagcacatggtgaatgagcagtaaatattagctattcttaatattacaaaaccatttgcattagcagttatagtcatattagaaagacctttgcattatgttatatttacctaccagatacctaccccagtggtatggtctgaattgtatggaccacttgttggcaaccctgtctagcctgttcctcttgcccttcacctgctaggctgggttgatgagcagcattgccagtgatatccatacactgaaggcagagaagggaaaatgtgtgactgggaggcacaaattatcccctccctccaaggattggtttatgtttaggcctctggtccatttggagatttcatgtttgtgtttggtgtgtggtaggtctctgacatcattttttccaaatggataggcatctagcctaataacacttattgaatagtaattcct

SEQ ID NO: 463620 - DNA, 663 bp, Homo Sapiens
taactgcttagttcccattttattaaatgtttcatgatttatggtcagttatttgtttcgatattatcactcacaaataatatgaggatgtcaaaattgttatataaatcaaaattgaccgttgctagtttcttctgtcttctaaggggatgttttctaccagtgaggaataagttcctgtgctgcttacttccacccacaggagcaagtgaagatgagagaggaaagactgaaattaaaaacctccgccagttcttccatgggactcctggatggggcccagattaggtgactgtctgattgtcagagaacatgagtgactttgtggaccaagatggaggatgctggaaaaacagaggagcagggagatgtgaagagagtctgaggaccagcagcatggtgggagactggaatctgcagagaaatgtgaccagtgagaaatcctcaggggatgctttgatctaagaggttattagaatgaatgtccaacattcagttctaatctgtttgtatttctgcaaatttaagagccttcccccgcccaccaaacccaagcaaacttcagtgacgtttgcttttcacatatgcttgtggcggtctgagaaaaatcaggacaaagaggtgagtgtgaacccaggttggcataagcaaagagaagaaaag

SEQ ID NO: 463621 - DNA, 494 bp, Homo Sapiens
  misc_feature (340)..(340): n is a, c, g, or t
gtttttagaacagtcactagcaatgtctgttttttaattagcacaatatttaattgctttctgatttcagatacattttttttctcttgttcttacaaaaaccctgcagagatgaagaagctgtggtttaaggcagttatgtaacatacccaatttcacacgggcagtaaaataggctattaagcagggggggccttagtgagtgaaaattgattataattggatcaaaacagccttacttaaaggaagttgaactaatgagttctaattttccttttaaacaccaagattctgcatttatggtggtttttcaaaaaatccaccctagagatgatactcntgtaagtctcatggtcagaaaaatgatcgagtggtatctataggttactttgctcccagcacagacatgaagtcttttgagccctaatggagatatgatagtgggccaaatctatataaaaatgacattccacacattgaaaaataaaagtggc

SEQ ID NO: 463622 - DNA, 711 bp, Homo Sapiens
  misc_feature (237)..(237): n is a, c, g, or t
tagttaattgctaagttttattgaacacttattatttgccattcattttgcatgtgttatctgattgaagccttttaacaagtctatgtaataggtactcttataagcaccgacttagacgtgatgaaatgtaggaaaattaacttctttactcatggagccaaaagagagactcattcacaagtctgtctggttctcaggtccatgctggtaacttaactgctatggtggttcctnctgacaaacattgtttaaggcattaacataacctgctaggcatgctcaaataatccaagcgcccatacaatttaaaaattgccttgaaatttttcatgccctctgccttgttagcaatacctgcctcttccacctctttgcaattctctagattcagacacagatgagttctgtcagctcctctccacatcctgagctctcccatcctcatgggaaaaggaaatacagaaaaagtagagttttccagattgtttctagtctggcttatttctttttggatggaaacatttggcaaagtgatcttcttaaggctattataacaactatatgcagtaagcttcttagtgttcatttaaatagaagtgattttcatcagttcaagttcctggtctgcacttcagttaccgtgactgttcttttgagctgtaaatctagtctgactaatgcaggataatgagcaaagtctccctgctc

SEQ ID NO: 463623 - DNA, 810 bp, Homo Sapiens
  misc_feature (11)..(11): n is a, c, g, or t
cttcccttttnaattacatggtcccttggcaccgccaaattgtgaaataaggacatcaactgtggggactagtataacacaaggaattcagggtgcgtaaataagggggccaggaatgtcatcggatgtcaggggagtagacggactgatgagagcgcctgtctggattcccagaagcatgaactgccttgaggtggctcgaggacaggatgaaaaggacaatcaatgaaggtctttgaccagaactggaaacaacgcgtggcagccaagtggactggcgtgatgctggttttgttacaagttcattcgaggacaaatcagacactgcacttacacggaattgactctgccgttcaattcatctttccaggtggaggaaatggattcccagaaggaaaacttctgcatggcaggcagcaccggatgtggtgtgcatcctgacacatgcaatgtcccgcagaatgagagtgagacatgactctcctgagggcctgagcccgaggagattgtccacagcacagagagcaggccccgggtctgggtgtggcctggggggcaggcacacagattcaggcactacatggccttggtttaaatctcacttctgctgctcactcaatgtgtgaccttgagcaatttcattaacctctccctcgagttttccatctgtgaaatggagagattaataacattcaccttgtaaagctgtctaagagtttggtagatgaatatttggaagtgtttagaacagtgcctggcatagaaaatgctatagaagtgttcaataaactaaataagtctgatataacc

SEQ ID NO: 463624 - DNA, 621 bp, Homo Sapiens
  misc_feature (544)..(544): n is a, c, g, or t
  misc_feature (598)..(598): n is a, c, g, or t
  misc_feature (601)..(601): n is a, c, g, or t
tttgggtaagggccaagatagccgaatgggaacagctctggtctgcagctcccagcgagaccaatgcagaaggcaggtgatttctgtatttccaaatgaggtaccagttcatctcacggaactggttaggcagtggatgcaacccacagagagcaagcagaagcagggcggggcatggctttacctgggaagtgcaaggtggcaggggacctgcctcccccagccaagggaagccatgagggacagtgttaccggccccgggtactatgcttttcccacagatcttcgcaatccacagatcaatagatttcctttgtgagcctacaccaccagaaccctgagtttcaagcacaaaactgggtggctgtttaggcaggcactgagctagctgcaggagatttttcatatcccagtggcacctggaaccccaatgggacaggagaaccgtccactcccctggaaaggggcctgaatgaagttagggagccaagtggtctcactcagcaggtcccactcccacaaagcccagcaaaccaagaaccanctggcttgaaattctcactgccagcgtagaagtcggagttacctggatatgagnctngtgctggctcgagggccaat

SEQ ID NO: 463625 - DNA, 586 bp, Homo Sapiens
tttttcttttgtaaataacaaacaccactttgttatgaagaccttacaaacctcttcttaagacattcttactctgatccaggcaaaaacacttcaaggtttgtaaatgactctttcctgacataaatccttttttattaaaatgcaaaatgttcttcagaataaaactgtgtaataatttttatacttgggagtgctccttgcacagagctgtcatttgccagtgagagcctccgacggggcaggtactgtgccagggcagctctgaaattatggatattcttatcctcctggttccttcggtgccaatggtaacctaataccagccgcagggagcgccatttctcctaaagggctacaccactgtcaacattatcctggactctgtgtctctctctgttgggtcttgtggcatcacatcaggccaaaattgccagaccaggaccctaagtgtctgatagaggcgatgatcttttccaaagtcagtacttacaaactggcattcttacaggctgcaccatttcctagtatgtctgctttaagcctggttcaacctctcatcgaatattaaatttttctttgtaag

SEQ ID NO: 463626 - DNA, 538 bp, Homo Sapiens
  misc_feature (400)..(400): n is a, c, g, or t
tcataaatggtagttttatttaatttcatgtcattttaagggagggggcagatgtaaaagcttgttattgagaaataaggaaacagaagccccaaatttgtggtctgcaatttttccttcacatgagaaaactgttcaccaaagctatatttgcaaacaggaataccagaatcttttacaatatttctcccactaaaacctcaacttttagtaattggacacttcaaagtttggctatacaatcttttcctgcaatatacatatttacaatataaaaatcaagacaaaaaatacacagtctgagtcaatagggaaggcagataatcagatgtaaatgttaggttccacagcctatcagaaaagaaatcatcatttacaaagatggtaaatatagtgctcncaataagaaaattagtaaatccaggaaactctacacaataaaaaacatttatggaagaaggcttatgtgggaaaattacatttccatctttaaaattatctgcaaattacctaaaatttcgttttcagcattatttcc

SEQ ID NO: 463627 - DNA, 838 bp, Homo Sapiens
  misc_feature (134)..(201): n is a, c, g, or t
atacaaatccatttatttgaaatttgaaaaaaaggcaaaatgccttatatatttttgtattaaaagaatttatctagttattatcaaagctgatcacagtttacaactaccttatgtatcatccatgcccatgnnnnnnnnnnnnnnnnnnnnnnnnnnnnnnnnnnnnnnnnnnnnnnnnnnnnnnnnnnnnnnnnnnnnacagtgcagagtgggagtataggagagaatttttcaagcattcagtagtcgccacaaagagcaagactgagcaacactgacgacgctgaagaaccacggctgatatatattaacaattaagcacttccaactgagtactgccaattgtcttctcctggcgaaagcctcgtttttagtattgtaaatacagaaatcaaatcacaattgagattttgcaattaatgtgtttaaaatcaataccagttgtaatagccaaatcaatcacagaatgcatcagccaccaaaattaacaccccaaaaaccacggttttatctctccaattcaaatatctgctccaagggccatcagtaagaacagggccttggtctccagctccaggtgcattgccttttctcctcacttctccgtgcttctgggaatgctttttctgcaggagacagtcaggtgatattcatcaactactgccctggccccagctctccagcattgacaatcagatacatgagtatttgaaactgacaaaaggttttcctctcacattcctcgtgagaaaaattggaggcagtagagaggatgaaaaggcctcctttgcagtgcaggacagggagcaggagatagctggtgtgatgctccata

SEQ ID NO: 463628 - DNA, 435 bp, Homo Sapiens
  misc_feature (262)..(262): n is a, c, g, or t
catattttgaattaatttcctagaaaaactctagcaaatacatttactctatcataggttgtaagcatttcacaatccttgataaattatgcttttccagatgattataataatttacataaacacaaatgatgtctaagagatttcatcttgacacaattggcaccatcactaatttttccagtgctaatgatgtgtacaaaaaaaatgccacctcattttaatttgcatttttaaattcataataatggtaattatttcncatacatttacttaatttgttcctaaattttatataaaatttcaaatggcttcattttggagctcagatatatacatatttgtgtacaattatatacaaatgatacacatataatttgcctatagggttttaaaaatcaaattataagggttgttggtattagaaagatattt

SEQ ID NO: 463629 - DNA, 735 bp, Homo Sapiens
  misc_feature (724)..(724): n is a, c, g, or t
atacttgatataatttcaaatctttattcacaacttgagaaacttcaaaaggaagagtaaatgttaaatgtacagttaaacagttaacaatttacctcccgtttctccccatttttgattctaaatgtcttctaggcataaaagcagctgctcctcaaaactctctctcttccgtctctcatatgccccatcaaactgtcctaaagcccaactgctgtggacagttacactttcctttcgaatgtcacagctatgtatactacattttattcacaaaatttcaaagaaaaattttccttcagcatttgaaaattatttctaaagttgactaattaagataatttaaacaatatacactgcaataagactgctggttattttgagtatttcaatatcttaaacatgagagagagacataaataaaattattttcaaaacgcattatcatggcttttctaggaatatccacaggggttaatttatttcttcaccagttctgcatttctttaaacttttctgggattagagatatatttattttataatcttcttagaatttcatattattttgaatactttgggactgacaatactcttaggaggtccaaaagaagagaaacagcatctctgactttcagaggttacagaatgtgggtcaattgatttttgattggagcacaagatttagttgctttcctcaaggtgataaacacttcaggcactnatcagcagaat

SEQ ID NO: 463630 - DNA, 835 bp, Homo Sapiens
  misc_feature (142)..(142): n is a, c, g, or t
attttttaactatataaatttatttcaacagcaaactttatatgcttaagtttattggaaaacattaagtagaaaccaaagcaacatcatcaattgcaggtaggtacatacgacggcctaccaaagacactaggcccaaggntggctctttcttggttccagatggagatgaacagtgttggaaaggtgttaagattattagcaccaaactgggactcttctccttgagacaatggactggctttctaaccatgtgtctccatgttatggcaagaagatctgagtcacccagtgtcacctgtcatcatccccaggggagcagatgctgttccgtgccctccacatagccctggaaccctccagcaggctcagagccacttctaactgccaatatcttcttctttttgcctgcaggcttttgtccatgacctcagcagtccactctacccacacctgtggcaggtgggaggtgccaggggattaacactcacctccaacaacccccaagtaataactcataggagttggtgtataaataccgcctgtccctcgctcctgggattcctctattgtgtgtgatttctgacttataatggatagaagtggcagtcactccaaaggcaaacacagcaggaggagcaggtttgggaaggaatttgaaatggattaagccagggaaggagattgaggaggaggtgatttctgttggataaatgagaccggaactcagaggagaggcaagaacaacagtgaccatcgcccagagtggagtgggagggaatccgcagagtcagacctttgccagcggattcactctcatttagcagagggaagt

SEQ ID NO: 463631 - DNA, 622 bp, Homo Sapiens
cattttcaagatatataaaccacccatttagataagaatgttttgagcagaaaataaatgttttaatatatgaaatatgaatgctttaaaacagtatttgcccatctaagagtgtggagaagaaaagctcaatgattaaaactctaaatagacatagaatcacagaacctcaggatagctagtcaaatcttcacaatgtatttggctttgataatgaggcttatagcaaggctaagcatgatccatgagtttgtctagagcagcactttccaaaagaactttctgcaatggtggaaatgttctatatgtttattgtgattgctgagcccttgaaatgtggctagtacagctgaataaatttttaattttatttaaatttaaatagacacatatagctactaagcatttgaaatgcggctagtatgactgaggaactaaatttttaattgtatttgattttaaacagctgcatgtgggtagaagctactcttctggacatcataggtcttgagccccagtctgccaccaagttcagaaagccccttttcccacataatatcaaatttgatattgttgtatattgtatatttacaatctttttgtatattcacaggatatacaa

SEQ ID NO: 463632 - DNA, 161 bp, Homo Sapiens
tttagtctggtgcaaggagggtggagaagatatctagaattaatccacagcgatacacataggattcagaaaggtggagataggcagagaccatccacttatcagaacttgattaagaatggcatcagtaccataaaaatcacagtgaattatttttaata

SEQ ID NO: 463633 - DNA, 447 bp, Homo Sapiens
  misc_feature (263)..(277): n is a, c, g, or t
  misc_feature (401)..(401): n is a, c, g, or t
  misc_feature (421)..(421): n is a, c, g, or t
taggtatgtacctttggatttatgtattagtagaatagtaagactttggagctgaaatttaggccaaaataagctttatgctctatcaatgttgacttaccaatttgtcatgagatggaatacacttcccgaactgtcttttaatacaacatacaagtattttaaattgttgaagcattggcaggcattgtgaaatggaattgtttttaaattagtcttaccttttgtttgcaaaaaccagtctgactatatttatttgtctnnnnnnnnnnnnnnnaccatatttgtcacctctacacttcctagttgatgtccacaccctttcctttctaaccactatcactcctagttcacactccttagaacttcttcctcaactactctcctccacctgactactnacaatcccacaaatctcttncctgagatacccagtttgccttgatc

SEQ ID NO: 463634 - DNA, 658 bp, Homo Sapiens
  misc_feature (561)..(580): n is a, c, g, or t
ccaccaaaagtagcatttgtttattcaccacccacttttcaagcagttgttccaatatttgtagcagcattatttttgtaatttatttactttaaagctactctgcctgaccttgcttaattatctttatactattttaactttataatttcttttttatcaaaataatacatgtacatagtttttacaggaatataaacacacttataagaaatcagaaaagtttcttgcttcatccttccccaagctaagtctactcttcactggtgttcactttgcctttcaataatgtttactctccattttctctttctggaactcttgttggttacatgttgaaattccacagagtaattcttttcctgttgtattttctacttgccatcacagcattttggtcaaactttgagatttttctcaaatttatctttcagtctttatgttaattctatttctgctatttgccttccaaaagctcattcttgttccctgaatattcattttaaggatattgttttgaagactttgacttcacatcctgcactgctctgctttctccannnnnnnnnnnnnnnnnnnnctggttgttttagtctctttcaatcagttttattgtttgttaagtacactaattttaagaactttatattcaaaaatt

SEQ ID NO: 463635 - DNA, 588 bp, Homo Sapiens
  misc_feature (398)..(458): n is a, c, g, or t
  misc_feature (486)..(486): n is a, c, g, or t
tgcacccggcaaccctatgtttttttctaagaatatagtgtcccttgccccctgctacaagccttacccagtgttacataatttattgtaattaaattgtttattaatgatacattcttgctgtagaagaaaacgtgtccttttgggctcagtacagtatatgtttcttaagtaagagggatcatattaaaccagctacttaatgtgaagcagatagccagtgttctccatgtacaatcttagggagggtaatttttgttttggctgtgtaattatggtttgaggcagcccattaatcgcatatttcagctgtcaaatagaaatttggcccagaaaggaatacactttggctttacaaaactgcttattttcaaatttttaaatggggacaaaaacgnnnnnnnnnnnnnnnnnnnnnnnnnnnnnnnnnnnnnnnnnnnnnnnnnnnnnnnnnnnnngaaaatgcaagagcctgaaaaacattgngaatatacttgtaacattgcaaagctatttcaccagagtaaagatattttggttgttcatatacgagtgtgttcgttgtttatctaataaattgctaaaact

SEQ ID NO: 463636 - DNA, 449 bp, Homo Sapiens
  misc_feature (40)..(40): n is a, c, g, or t
  misc_feature (124)..(124): n is a, c, g, or t
ttttatcttgcagggaaatgctgctatgtgcttaaattcntcttgtttctgtttcttgtagtcttgtctatattttgtaaaggcatcaaataaatgataaataatttctgcactaaaaattctnaactcctaaactatccagccatttcttggtgcatctcgttcaattctcacatcgaaggccaaaaattactgcatactgagggtcatgttccaacatcactgaagccttcataacatcttttttatgcactgggccaatgttaattcctgcatagggcacttctgatgttttcagaaattccagtagagcttccaaagaacccagtgtagatgcctggacatagactcctttttcttctaatttgatagcatttagtgtctgctttaactcatggatcaattcatctttaagaacagggatttcatcttcttcctcgttccgaatt

SEQ ID NO: 463637 - DNA, 780 bp, Homo Sapiens
  misc_feature (547)..(547): n is a, c, g, or t
  misc_feature (550)..(550): n is a, c, g, or t
acaaaaaaatttttattaagtacagtttcaaatttagagcttccacgcttacaaatgtgattggatatttaggatacataatttattcttaaaatacacaacttatatacagatattaaaaactcagtctccaaaatgctcaataaagatgtctgggtgacacttatagaattgacctagcaattttttcttctctttggcagaaagttttgaatcctcatcaagagtttttagtaaattcaacagctcatctttggttgtcttctctgtattgttggaatagtcacgttgatcaattctctggcaataaatatatcctgcatctctatttggatctcttccgttctgtatggccataagcttaacacttacaattttatgtagagttccaggaatcttaaaaacatctttctgatgatccatttaaaaagagtaccagaagatctgttttgcctttggataaatttttattgtcaacaatagcttttgagaatatccttttcacaaccattcggttgtcactttctttctgtaatttaaactcagnagnaggatttgctgcaacagccatgaaatacagtagtcttctaaattcttctctattttggaaatctaaaagctttagaaggagctgggtagcttctaaagctatttccgtcttcccattcactaagagttctgcaattccattatgaacgtcagataagtgatttaacagaggttccctactactgtaatatctgccaatggcatcaaacagaagttctttcactaagtctg

SEQ ID NO: 463638 - DNA, 548 bp, Homo Sapiens
gatataaaaaaccttttttaataatcaaattctgtaattagtcagagatataaagtcaaaccataagtacaacattggggtcttgatattcttataagcctttttagtctctttctgctggacaaatgatgggtctatgagaagatagcctgatagcctctgtaaacttccaaagtctttcatcttgttgttataaaacttctccgtctttcagaaatgtaatgaggcaggattatatagaggaaaggactcagggttgggcataagcatcatgaagactaggcactggtgtgtagaaagtctcaacttctctatgcctcggttttcttattggtaaaatatagcaagtaaataaaatcattgcaggagtctttacctgctctaaagtttagtgattctgtgatagcaaattttctcaaaatcagtctcacaagtaagaaaaatgttgaatgtatatttggtgacagtctgacagtatatccatggattttctgtgtgttccactgttagttcttaataaagataagtaagatttagtccttgctctc

SEQ ID NO: 463639 - DNA, 532 bp, Homo Sapiens
  misc_feature (136)..(154): n is a, c, g, or t
tcatcagaagattgtgcatcaactttattgaggtctaatttacatacaatgaaatgcactcatttcaagggtgcagtttgatgagcctcagaacattttgtaaaaataagacagaaggtattaaatatacactgannnnnnnnnnnnnnnnnnncctgtagaaacagtctggtcatgccttttattaatttttctatttaggtattaagtgatttttttattgattcattaaagctctttatatattaaatacatccaccttttgtctgccatatttgtttaaaacatccttctgttggtcagttacattttaataaaatcaggtggttcaaaaaacttggtatagtataatacaccttaatctttttctttcatgttttagaaagaactttcccattctgagacaggataaaggtcaatcttcactcactttcctcatccagcactccgtattactttctcaagaaagcttcctctggctgggccaactctcccaatgttccatgctcagtaccacatgcccaggacggtt

SEQ ID NO: 463640 - DNA, 781 bp, Homo Sapiens
ccttatccttgaatcatttctgggttttgtagagtttgtttgaagcacacctttaactcagaattgaggttgactgataaaactcagctttaagtaaccctctgggcaagttctgagcagagatccagtgagctgaatgtcaggcaccacctccctggagtctgtatcagtcacatcagcattctcctctgattagaatcaggtttcaagggtcttgttcaagagtttattctctcctttaaagatgccacaataccgtataaggaatgtctcttggtcccaactaatctacaataagagaggagcacgtatagtcagagggccagaaaacaaccgcagtttctaagtttcaggttatattctcttggaacagactccttgctgaggggcttcttagaaaaggaatgcaatggttccacctctttctaagtaggaggggaagaaggggcttgtattggtggatataactcctttcctatcctctcaactgtctaatccccaagtgacaaccatcctctccttctgttgtactttctagcttaagataatcacatatatcacacacaccaatgaagtgctatcagttggaaagggtggagacagaaccagaagatgggaaggaaaaggccttgaacacagcctgtgtgtgtattagaggtgtgtcttaatcttttggactagggactacccagtaaccaccctgagttcagttttgtatcactttgagactaaactgctgtggtaatatttgttagaccctgaaataaattactgacatgac

SEQ ID NO: 463641 - DNA, 322 bp, Homo Sapiens
tgggaggaatcaggtgttttctttgttaagcaggtagtcacccgtgaagtgggatagtgttatctgaaagtggacttgaattggttgtaaatgtatattgaggaattaggtgtgttctttgttaagcaggtagtcttatttgtgggatagtgggatagtgttatttgaaagtggacttgaattggttgtaaatgttactgaggaattaggtgttttgtttgttaagcaggtagtcttatttgtgggatagttggatagtgttatttgaaagtggacttgaattggttgtaaatgtatattgcaaattctgtggcaactagtt

SEQ ID NO: 463642 - DNA, 458 bp, Homo Sapiens
ccgtgttttgcactttataattatctgtaatgcaatttaatacactcatatttcattcattcagtcgacaaaaattaatttagtccctacgataaaccagatatcccctcatatgctcacgtgcctgacactccagaagtttctcaagaccgaggtggagacactggagtgttttaagtggagagatgacacactccgactcccaggagcaggaccactgtgaaaagaacagtcacgtaacaggtcatgggacagtgctagtgtcacaactcacaagtgacagtgtggtggggactaaggggacaggagggcctgaaggatgaaaaggacggagagaagggctggagaagcaggaggtgaagaaaaggagcagaggaaagaattcgaaagcagcagaattcttaggtttaaatacattgttttatggattttaatacatccatctacagagcctagca

SEQ ID NO: 463643 - DNA, 685 bp, Homo Sapiens
  misc_feature (21)..(21): n is a, c, g, or t
  misc_feature (39)..(39): n is a, c, g, or t
  misc_feature (118)..(118): n is a, c, g, or t
gagcttgagccaaaccaagtntggggtgggaaagatgtnaaggaagattgacacacaccctttggccaagctctggctttagatgccagccagtgtctcctagcccgggaccttttcntctggagatcacagatgggagagagaaggaagtgattcttggtattgagctcaaaatagatacttaaaattatgtagactaaatcggataaaacttgaatcttcttttcccacttagatttggtttcaaaaccagagaagacacctgaggctgagctggctgcagtgtggacactcctcgggaggacagcagctccaaggacacgagaagcctcagccctgggccccaggtgagtccccagcagtgccagtgcacttcctcagtgcaactctttgaagtagaaatgtctctttaggctgtttccagatttgttgcaagaatgctgatgtctcttccacagcatgctagtgttggagatgtgaccaccatccccatcttgtgggaaggtagtttggaagaagggaaggccatggatcttccagtcctggtgtggcaggcagtgcagagtcctcttcttccagcactgcaggggtttaatccaaggtccaggatcagtgcatgaacacctcaggggccttgttccttagtcagcatttcattattgatgaatacaacttcccacaaatg

SEQ ID NO: 463644 - DNA, 947 bp, Homo Sapiens
  misc_feature (387)..(387): n is a, c, g, or t
atttagatgtttctatcatcatagaaagttctattttacagcactggtccagagtttgtgagataattgtcagaagaatcaaaaccagaaattacacatgataagttcttagcactgaggcttggggagatgaggggaggactttactcttcatattatacctccttcatgctttgaatatttatcacctatcttatattttgttatatgttcagaatgctcacccttgacctgtcatctcaatggctacaatgatccatttccaaaggattttttacaatggtttttggtttagagtcttgtgtgagattttaaaaatatttttagaggggagacacttgttcttatacatttgaatagttacatctaaacataagttgttaaacntgttgatccctactttctacctaacatctaacatctgtggctttgaataaatacataaatattctagttgataaaactgaattgctcattgccttcacttatgtactcaatgctttgatttctctgatccttaaaaagagctaagcgtttccttgacagtaaaagtcagaacttctcagggagaggaggagggcatttgttggtggcatctgaacattgccatgtaaggaggcattggccatgctgtttcccatggggagtgggagaagggcagtgtgagggggcacatgcactttttaaatttacatttgtcagcatttgactttttttggtaacaatgagcatgtacttcttttgtaattaagtaaaacgaatgcaaagtgggttaaatataatacaactaaatggttggcactaatcttttaggaaaacaagaacaaactccctaacaaggactgccaagccctccctgagaggtccccgtgcccttgcaactccctcgacaccctctccttttccttactctgcaccccagtctcactgtcccctagtgccgaatt

SEQ ID NO: 463645 - DNA, 335 bp, Homo Sapiens
tgagccactgtgcctggcccacagtctacatttgaggctcatattcaaggttgagttacaaggcccaaagtccacttccaaagtccaggctcaggcacataagtccaaggtctaattctaggtccacttctagatcttaaatcatcccaaggcccagattaaatccatgtctgaagtccaaggttaaatatccagtaccaggtcaagtatcagctctaagatccagatctaagttctaagtccaaggttatgcataatcattctgagttataggactggggaccaggaatttaggttcaactctaaggtctgatggtcacgtctaaggtctaaat

SEQ ID NO: 463646 - DNA, 379 bp, Homo Sapiens
caaaacttttggcagatttctgattgccctaggaagcatcttcgccccagcaaggagcatttccttccattgaacacgcaatctacagggaattaggacatgttcttacgctgtgacttttggagcattttattttcttttttctagttcaaaattttcctggaaaataatgaagtgaactcagacaccacaggctctataattatgagatttttgtggaaaatcctggggacaatttggcttaatgcatatttatttaaatgtcataaaagtcaactcatcgaagttgtagggccactttcaaacttgatgccatattcgaggaagacaggaaatgtagcagagtaagcctatgtcctctggaaattggttttgttac

SEQ ID NO: 463647 - DNA, 824 bp, Homo Sapiens
  misc_feature (575)..(736): n is a, c, g, or t
  misc_feature (769)..(780): n is a, c, g, or t
acaaatgacaattgatctttgtctagtcattcatatttaagagtgaagcaccaaaaagctgactataagctatgtggagtccagcttatcaactgacaagagggatcaggtgggatatctccataccccacctgagaagtatcagcctgcttgctctcatttcggggaactgagatgggaaggagctgagggtctccctgaatatagtatttcacttcccacagctctcctttgggcctcatgttcttgggtcctgcttctgtctggttctttatgactctgctggggtggcagaggcataaagagactataaacaacatccaaacgaagttaagtcagtgggcagtcagtaaagtttctattcagcaacattttattgcgagcttgctctggtggtgggcacccgtccaatgaagcacatttcaaaggtgagtgacatttaaggattaaagttactaatgaggatactggataaacctaagttgctcggtagaaggtgtagggtgaaagtggacaacataccttgccatgaacaaaggattgtgaaacacatgctgagagaaaaattggaaatnnnnnnnnnnnnnnnnnnnnnnnnnnnnnnnnnnnnnnnnnnnnnnnnnnnnnnnnnnnnnnnnnnnnnnnnnnnnnnnnnnnnnnnnnnnnnnnnnnnnnnnnnnnnnnnnnnnnnnnnnnnnnnnnnnnnnnnnnnnnnnnnnnnnnnnnnnnnnnnnnncaacctaagaatcacacacaggctgcaccttgnnnnnnnnnnnnagaccgagcctcactctatcacccagactggaggcagggcagga

SEQ ID NO: 463648 - DNA, 690 bp, Homo Sapiens
  misc_feature (615)..(615): n is a, c, g, or t
  misc_feature (638)..(638): n is a, c, g, or t
  misc_feature (665)..(665): n is a, c, g, or t
atttactatttaaatatacaaaataggtatagtaaatagataataattagtatctctagttagagaacctatattacttacctaactagagaacctatgttacttataataaatagatcctaaccacaaaaatatgtagcatgaaaagaaatcagtgtggaagttctaggtagctgagtccgctgcagaagttgctgcacctgggcgtgctgtctcctgtttggtgggaggacggcaggcagtaagaaaggcacagaccagcaccaaatgaagtctttctctgtgatgcggttagagggactgaaagagaattgaaaaggacatggcgttctccccaagtgaatgctttactcaatagtgtgcctatgtactacctaaaatccatgcatggctgcacccatgggattatgtcacgtttttgggaacactgtcctcattagaagttggggtgcccatggcctggaaggaattttcacccccactccatccccaggtgtggggagggggcagcatgggtcctgtccacccatagagggcgccatgcacactgcagtttgcatgctgtcctctgtgacaggggaccccaaagatgggacagtgccccacttgcatagncatctaggaggccctggcctggnggaacccaggagccacgactgtttganaagggggctgaggaggacttgccag

SEQ ID NO: 463649 - DNA, 768 bp, Homo Sapiens
  misc_feature (501)..(543): n is a, c, g, or t
  misc_feature (671)..(671): n is a, c, g, or t
gatacatgaccatataatttattcactatgtgtaacacaaagctccctaaaatatggatcctgccatcagggccttacaatgctgacattgataatgggcatatgagtgaaagaatagtttagtcttaagtatcaggtgctgtgagagatacaaagggaataaaaagcagtttctgtcctccaggagctctttcatcttcttgggaagaaaaaagatttcaaaccttttgctccagccacaattcagagagcccctgaatgagccatatacctttgcagatggtattttcctttcctgaaactgcccttgtgagtttagtaagctccaaccttggtaactcagctcaaaacatcatcatctctctgctctcaaaatcaacacttgcctcaatgaaaagacttaaatattgcatattgattggctggcctttccataaactgtaagctctttgaatatagggtgtttgtcttagattctcaataaatgcttcttgaagtgannnnnnnnnnnnnnnnnnnnnnnnnnnnnnnnnnnnnnnnnnngttttcttcatcagacatgtattacttttgtaataatataaaaactgactgttccaaagtacagccactagactataaacttcttaaggataggagctatcactaatatgttttccattccctgttgngcttatagcactgtatgtaagatatttagatagtacttaaaattttgatttgaatgtaaaaataaatgtcaaatgtatattaaatatagtaagtgct

SEQ ID NO: 463650 - DNA, 515 bp, Homo Sapiens
tttttaaaaaataactcacagagcaataaaaatccttgaaatgtctatgcacagagatctaagcaaacatttccaccaaatgatggagaatagccatttgaaaccctgaaaaatgaaaatacacataactatagtagtttattatggactaacactttaaaaacaagtagatcctacagaatactgttcaaatggaatgtttaaaaataacatttattaataaatatcttataaaattctaaattaatagattcctgttcaaattttgctttggtcctttgaattccactgtatacacacatacatacatatatattttcttagatggtttttcctttttttaaccagaaagaaacacattctatcctaactggatggctagttttatagcagttaccgaggcttaaaactcccccgccaaaggcttgtctgttaccgcagctggtttatgattttaatgacaaactcaacttacacactaaagtttacttaacaggcaacaaccaccagaacac

SEQ ID NO: 463651 - DNA, 681 bp, Homo Sapiens
  misc_feature (670)..(670): n is a, c, g, or t
gcgagaagtttgctaacccctgtctaagcctcattgtcctaaaataaattcagaaacctcaactgctactccttcagcccagacagcacctttattttctctctccttcattttaatatgcacgacaccactcagcaaaatgtcctgcatgcatggcctggcctaggtactccactccctgatctggcaaaactataaagtgaaactattttgagtttccggaagctgacccaattttaaagacctctatatggaggtaggccagggagggatcaataattgtccctaccaggtaagccatcagtttgtaccctcacttctgacactttttctgggcaaggccatttctccacattgtacccttagagtgtagccccaaagcgatccctggcctctgggaaattatccttcccacacatgagcacttagggtcttcttcccccagacccctctgcaggcagaatctttccaattctttggttgttgtgagccttcagtccttttgttgtgcgtaaggaacattcctgggaagaaaaatggtccagcaataaagtctcccccacatgagtcatttttagctagactgggttggcatctgtttttcctaagacagccttttctcgtcactgtgaagataaatcaatttaatggacaccactggttggggggnagattgtactt

SEQ ID NO: 463652 - DNA, 913 bp, Homo Sapiens
  misc_feature (200)..(200): n is a, c, g, or t
tacttgataccttctctttatttaccagttttcagaatgataatttcattctgtaacatcctcaaggtaaagtggtctgcatcttcgttttttgagtgtaattataaacatatgaatttaaacatatttgatacgtttcagtttgttacagatattattcttattgatgctctaattgccccactgttggccagcggganctcttcaagttggtttgttggtccttttgacacagctccagtagtcgttgatggctccctggcttgctggtataatgagatgttttgagcacatcttagcatttcttgccctagagctagaattagccatttctctaaggaacgctggtttcttatggtgggaaagggggtatacggggtactatcaaaggcaggtcggtgaccatttccttttaattctctgaaatctaaacagctgaaagtgccaaatgtggtgtctagcctggctccatggaatttttgacacggagttctcacacagcatgtgatcattcctcaactcgccacttgatgtcactgcatagtcaaatgagcattcaaaattaccctgcagtggtttgtgttatttctgattctgttgaaagcaatgttaatgagatggtagaaggcaaatgtactacttcaaatgcaaaagtactctatcaaataatgcagtgagtgcattcaatgacaaaattaattctaaaatgaaagcctggcgtccttcattcagtcttccttctttatgaccttgtgaagagatgtttacaaagggattatacatttattagcatcgttaattaccggtgcttttagatgaatagaatgctgtgaaaaaaaatagcactatcagaatatgtttagtattcacaagaggcaatagaattatcctcacacttagaccagcagcaaca

SEQ ID NO: 463653 - DNA, 720 bp, Homo Sapiens
  misc_feature (697)..(697): n is a, c, g, or t
tccgagataagaattcacttttatttttcccagaattaataggaatgtcattgtgctttgaagaataaccaaggaaaagaatgataaaagagttggaaaaatgagcaggggtcatgccaagtaagaatgtgtacgatatggtaggtgtcattggtatgttataaaatgtattatgaaaatattttgatgatatttcaaaagggaaataatgctacctaatgataatatgaaaaaacgactctggctgctgtagggagaaaatataggcttggagttgggagaagagtgaaaagaaggccagttggagacaattatactacatttagctttaggaaggtgctgaaggagtcatggattgagattgttttccaagttttcagttgaacaatttcaatatggtggcattacttaatgacatagggaggccagagaacaaacagatttggaaggatgtggtagagaataaaaggtttgcttttggctctgtcaatgctcaggtgggattatatgaaatctaagtagagatttcaagcaggaatttgaattaatatatctggagattagccaagatgttgcagatggagatgtaaatgttgagacatcatcattgagctggaaggcaaggggctgacagagctcagatattaatgacaatgaatttgatccattgtgataatttaaaaaaatcatggctatncttgaaggccaacatttatatcg

SEQ ID NO: 463654 - DNA, 556 bp, Homo Sapiens
gtttttacaatttattttaaactaacaacattaaaattgacaggacaggccaaaaataaaaagaaatgtcatataaaacactagagaatgtagttcctggacaatcaaaactgtaaacactgaaatagttttttgttgttattaagaacatgttttctgatactatgagtaataatgtctgacacttgaggaggctaatatgtaactgcaactttcagttaatgactccataggatctgcttaaactgggttagactgaattttcagtggggaaacaaagatcccttagccatcattccccacaattaagcaagggagcatctgcagtggaactgggaagaaagtcttgatgtatattcagtgacttctctccaagaaggagtgcttcaggagctggagagcagaaggtcgctcatgctggtccctggtcaggcacatgcgcacaaagtctgctgcattttctgagaagtggtctggtaaaggaggcatcagccctcggtgtgctccgatgtaaaacatggcggccatcctgtccatgaagccagtgaggcttccc

SEQ ID NO: 463655 - DNA, 757 bp, Homo Sapiens
catctaacaatgagaatgaattttcctattccatcaagatttctatgtggccatctcttcaggacataggtatcagctactgttttaaatttaggaaatgcacacacatatgcaaccaaccacataatgtttccaaagcaatatattgagattgatacaaatacacatttttcaagaatcctggactaatcccacactactctgagccgcctttactttttaagcctctttatttctattatatgactgtgaactaagtagatttaacttttgtatgcttttaaaatcagttatattttctgatatgtgataacaaatatactgtgtatttcattgaaacgtataggaaaactgctctttttttccttttaaaatcaatgcctatggtatagtcaacaaagtatttaatgagtggctattttgagccatttttaattggctggactactgcagacataccattttaaatgattacacatatgtctagagaatcagcataggatttttgttttccctttgagattgaacaatttttatttcatcattactaaaacttagctgacaatttttattttttcattactaaaacttagctggatgtcagtttctgcctttaaataaaatatccaaatccaggattattctcaattgcaaaaatgcagctggtctcaactattccttttatattttctttcacatagggtagaaaatggtgaatcattgtactttcatataataaaaagatgtcttgaatttt

SEQ ID NO: 463656 - DNA, 939 bp, Homo Sapiens
agagaatcactacagagtttattgtttccaggtacaaaaacaatacaaataaaccaactgtattttacacataatcaacaggaaataatgtgggctaagtaatttggattaacattctcacttgaaaacatttagaaaagctggataaaatatacttttcaaagatgtaggaaggcagcagggagctgataagttggtgaataattaccatgccaataatatctgagaaaagatagaaattcagaaaaatgaaccattcatttgggaccactgtgttaggagtatttatagattgcaaaaggccacctgggaagttgagtaggtagagctaaggggctaaagattcaaaaagagtccagggtcagtgaagaggtaagggcctggtaactccaaaccatgctttgaaaccctgaatggttgaaccctagaaataaggatgaacagaagagcattaccacagtctgtggctcagctttcagtcacctaggtgacctggaaaatttcagtatctgaaactggatcaaaataatcctaaattactaatgcaggtacctgccagaagcaaaaaactctgtggaggataaaaatatcattctgagcatcaagttatttctagttttttcaaacaatattggtaaataattaaaggtaaccaggcacacaaggagacaagacagtaagaatgaagactagaacaaacaaaataaaaacagacccacaggcgggttttgattctggaattattagacagactagaaaataattatgcttttcattttgaagcagataagaaattgaaaatttcagcaagacaattagaaactgcaggagtgacaaatttacatgctttcaattagaaatatgagaactgaaaatacaaggggctgagaatagaccaagatactctaaaagaacaataagttgggaggatttgttggc

SEQ ID NO: 463657 - DNA, 662 bp, Homo Sapiens
  misc_feature (430)..(455): n is a, c, g, or t
  misc_feature (634)..(634): n is a, c, g, or t
cctccttcggcctccatttagacatcacttttccctcaagtatgtgtgattcttgtgccttatcctccccatcatcctgtaatagcatcctctgcttttcctcatcatagcatttagaagactgtatttaaattacctatttgacacatacctcagtagctatacattttccctaaggggagggttgatgtcttgtttctcattgcatcctgcagtaagcaccgagtaagtgtttcttgactctggggctgtactgagttgaagaaggatgacatcactgactacagaaccctttgtataagcatcaaaggggtagcagtggggtaaatgatcacatcctggctaaatggttccgattcctacaaccctgcagcacgcccccccggctctaaaccttttagtcatttcctgtgaatcttgccagcactcnnnnnnnnnnnnnnnnnnnnnnnnnncttcatctttcccacatagtatagaccagaatgaatcaaggtctaacttatgctgactgtccgtgttgcatcatcagtctttggggccccttctcagtttctgtggctgctcttgtgcctgctgactccatccctgtagaccttgctgttcctcccagtctgtggccactaacctcagntatttttactgaatgtgttacctcatcc

SEQ ID NO: 463658 - DNA, 471 bp, Homo Sapiens
gatagcaaatgcagtgaattttattgccgatgaaagtggctctcagcaggaaggggagctaaaaagagggtggggcggcaggtaatctttccctggagtccacccatctctggctgcattcttctccaaagttatgtcatcaagctgtccctctgaagtccggctgcttctctctgatgtccagctgtttctcccctctgctggctgagtctggggtctttataggcacaagatagggtggggcaggctatgggtagtttaggaaaagacaacattcaagcaggaaaacgggaatataagttctcactttaggcagtggtttcaagcttttcagctttagggtggtgctttgccagggatcttcccatctgcctagaatttctctgcctcctgcctctatcactgtatcactatcaaagaacagctataactgggtgaaacatctagaaagctaagaagcctatactctag

SEQ ID NO: 463659 - DNA, 1017 bp, Homo Sapiens
  misc_feature (346)..(346): n is a, c, g, or t
actgtttttaaaactatcttttaatcggaaaatgtatctggcttttaatttgtaagtacatgctataagttgtttgtatagcactttacaaaaaatttttgcattgtagtgttttaaagttagatagtctcatcatttatagtcatttaaaaaagtcaaagatcgagaaagatgagaaaactaaccatgtggtaaggttaagtgatttgttcaaggctgtatagtttagttacaatagaagagcttaagttatttttttaaaaccgcatggtaatagcaacaacatacgtggtatggattagattccagaaaagtactatcgtaggattttctaaaatgtgttttngactgttagattcaaactaaggaaatctagaaacatcttggcagtaatcttactttccttaaatgaagggaggaaaaaacctctctttaaactggacagtatgggtattggattcctatttagtcattttcagaccttatataataaaatttctttacaagtatatcaggccctagtgactttttataaccaactaattgtttactaaaacaaacaggtttgtaacaaggtgcagagatgggtattagattcataataccaaggatccaatatttataaactttggacacatacaaaatcttcctgtctataggattgtatgactggaatctcagggagtttgtagactctcttttcctggaaatcttaaccatagtttaagagcaagttccagcttcttgaaatggtgtaaattacagctgtgctggtagaagttactgaatgccttttagtatgttttaaatccatagaaccattacaaaatttagactgacttggtagttattacttagttaaaacaacatacgatgctattacagggatataaaaatcattacactggggctaaaagcactgttagaaatgcttatgtatactaatcagatgactttgctagctggctgaaatctaaggggctttgagagctgatgagacttctacaattccattcc

SEQ ID NO: 463660 - DNA, 811 bp, Homo Sapiens
ggtcttagatatttattttatagataacaaactttatcaggtaaaatacattaggtattattctgtcttctcattctcccggattttaataatctcttattttagtacttcatcaaaaactattttcagtgaaggtctcagctgctgatcgctttgtatttctgagaatattttttattatgctctgatctttggatgacagtttggacatatcattctaagttcagatttcttttcctttaattctttgaaaagacacgatagtcttcttgcttccagttgtttatttttttgaattctgatagaaatttgctgcttctttcttttttatgcaatccgccttttctctatcaacttttaggattttttgtttgtctttgaggtcctaaaattgtactgtaatttgtctaagtgtggcttttcctttatcatcttcgtctttaaatgatctcttcaatctgagggtctgcatcttatttttttattccaggaaattttctccattatgccttcaagtattaccccctccccatttttatttctccctctttctgagatttctactacccagatataagtactgctaaatttaaaaaatacatatttttctttcttttgttccctccttcaaggaaattccccaaatctgatctttcaatttattaatttgtttcttaactgtatccattttgttgtatagcctgttcaagatgtcttttacttcagatattgtgattttatacctaatatttgtgtttgatccttattttatgtttctttgtccttctttcatattagtgatgtgtcccta

SEQ ID NO: 463661 - DNA, 591 bp, Homo Sapiens
aaaagcaataaatttttaatatcaactgatgtttaccaagattcttgttctcaatgaaattttattttcattaacatccaagtatactcttttaattccttttgtgtttttaaaatattcataatgccattcatgaatcactctacggcatcatcatacattaactttgttttttaatacaatgccagtaaatttcctcgtgtgtattgctttatttcagcatcaaacccccaaacaaaaccaacaatagagtcagcatctcacttcacaaatgaaagtgtgagtctcagaatctcccccagctcctcggccagcttttggctccggttcagggccatcttctgatgtaaacgtcagaactcattctgtgccatccagttgctgctctttctgtggagtcctgagcaagttgctaatcctatttggcctccatttcttatctgtacagtaacagtgatggattcgcttgtctgagatcctttccacaccttcgatttctgttaaattctgtgggtgtctcatcagtttatagcactgacatgtctggcttataaagacgatctgtgacagaatgagacggagccatcatgg

SEQ ID NO: 463662 - DNA, 595 bp, Homo Sapiens
tgctctttatgtaaagtctgaggtcaaggcaaggtcacagatatacagtaattgaacttatagttttgctttctccagctagtactgaaaatttataaacatcttattaaggcacttaagttactttaagttccttaataagatagttttgtacaattatttttgtagcctctccaaaagtgacaagtcactgacatgtaaaaaagtagttaatatacgctctccagagtcatacgcatgagattctcttaagatccgtttgttctgcataatattaaaaattacgtatcaaatccagaaaatgaagaggacatattagattctgaaatagtaaattccttttagttcccaactcagatcaaatctgagcaggacataaaaaatacaatgaaaagtttaataaggctctattaatgattaaaggatccatagtccagtatgaattctagtttgtaaatctgcccacttcaggaaggaaaatagttcctaaaaaccaaaccattaaacagacagggacaggttttcaaaacaaaaatgcatacttcataacattttaagattctcaatatcctgtatccttgtgttctttcattat

SEQ ID NO: 463663 - DNA, 790 bp, Homo Sapiens
  misc_feature (545)..(581): n is a, c, g, or t
  misc_feature (776)..(776): n is a, c, g, or t
gaccacattcatttatttttataatgtcaatgtattattgatagcattaaaaatgttacagaaggcaatggacacattgtactgatgtgatattaagaaacattgctagctatggcaccaaaatttatgtgacataaggaaattataatacctaacacatattagttttctcttccctggttctaactagcaagtgccaggaggcaggctgggttagacagcgtgaccaagagtaaactttggatggtccaggataaaattataacataggtggtttgtcgttgcttgtgtttatttaatgttctctcgctttccttgtctagccaagatcccatgctatgttgacttgtcatctccagaaatgtcttcacacttggaagttcccttaaaaagcccttaaaatttacctcctctaggacttactagttccaattttttcaatattaatacacatatgaatcatctggggatcttgcccaaaagcggacttctgtaggtacagggtaaggccaaggactctgcacttcttgtaattatacttctgnnnnnnnnnnnnnnnnnnnnnnnnnnnnnnnnnnnnnccacagtgaggcacgcaagaacatttagaactgcacattttaaacagaattgtaatatgttaggttggtaatagatgttagaagagttaggcaaacaagatttaattttgaatgcttggaaactaagaccttgaacaaatatgagaaagaaatgagaatacatttggaaaactctttttgaatctttcaaatttnctttgggttatgtc

SEQ ID NO: 463664 - DNA, 463 bp, Homo Sapiens
  misc_feature (397)..(397): n is a, c, g, or t
  misc_feature (406)..(406): n is a, c, g, or t
  misc_feature (432)..(432): n is a, c, g, or t
caggatttaaaacttggtttatttgcccaatgagccgaagctcttatccattctaccacaatatttgcctagaaatattgcccctccttcccaatagtagtccctcccatctctcttatttttgctgaagtcttagtacaaggctgagactactgtttgtccttatgttgctgggtcttccaggtcttcaaggggaagggttgtaatagtaaagtcactcccaaattcaaatattgtaaatattgtaccctttggagtcaggaatgaagtacatgctcaccatcaactcagatttttgtcaagaggaatgagactgatgggaaataatcaatagcttttttaaaaaaacacacttattggagaaataattcatataccatttaggcacacccatttnaaaatgtanacttccatgggtttccagtacattcngaggttggacaaccaggatggacaatctaaa

SEQ ID NO: 463665 - DNA, 704 bp, Homo Sapiens
  misc_feature (664)..(664): n is a, c, g, or t
gcaggtaggtagataattttcatagtctttaaaaataaaaataacatgtaagagactgtaaaatcagttattataaatataaacttatctctacaaatgattttatattttgaatggtagctggttaatttaaagcctgatgctaaggttaacagaattgttcaaataattaacattaattagcaatatcactaaaatgattcagaggccttctagtgatggcttgaagccgtctttctgttttcaggtcatgtggatccgaaggtgccagaagctgaaggttgccgccaggctgtagggcctgcttgttctatatggggccctatgaaagttgacagatgctgttaattgtatacagccttcagctgctctgataaggagcccattcatttcctaagccaatttaaactatgccttttggttatgttgccttcaaactctgttgaaatcctctggcagcattccaccagttgagaagcttcattgttttagattataagaataatttgaatgaatataacagaggcactgtagatagaatcccagatatttaaaggaaaacatgcctatattttaggaatatcttctgaagaacttcataattttatttgaagtgtttgtaaattttttaataaattatttaaatgtatcaatagtggatagntggaagaatgtctttgaggctaaaaagtagtactctgaaa

SEQ ID NO: 463666 - DNA, 325 bp, Homo Sapiens
  misc_feature (60)..(60): n is a, c, g, or t
cagacaacttctcgtttatgttgttttgtaagcatccctcccaccaggttctggctttgntttgtatgatttatttctattggctccatcatgacctctcagggcacttggaagatcctgttgtaaagctctgaagctcttgacagtctatctctgggtagtttcaaagatgagttcagggatagagttgcaggctgcagatatgacccaggtcttcagagaggtgcacagaaagaactttacataatcgtggttcttgtttaggcaaaatgggctctctcttgcagcactttcctacatagtactgtagacacgacccatttgg

SEQ ID NO: 463667 - DNA, 709 bp, Homo Sapiens
  misc_feature (32)..(32): n is a, c, g, or t
  misc_feature (583)..(583): n is a, c, g, or t
  misc_feature (659)..(659): n is a, c, g, or t
actactgctacattttttaaaatgccacaagnaaaagagccctggatacagctagagagcaggacttcaccctccaggagctgactgggtgttgctgaagcaaatgttggactttgtgttagatagtcttgcatatcttaatcgacattcccagtcctttcaccaccagaaccaactcctctttcaaacacagcagtggattctttctctcagaagatcatgttgtgggaatcttttttttaaatagtgaaatattgaggcagcaattttttacaaaaaggtcatcctctgctctatttgttaccttgttattgctgtctcaacatttactacagctccatttacagaactgttgcttttttgcagttgtctttgttcttgaaaaaccagtaactgcttctgcataccttttgtgtagagcttttaatatcatttgaggaagttccaaatttgtagccagttccaaacaaatttaaatattgagttgagacctgtatggaattgtgttcgcaggagataaggcttgcctttgagcctactcttgattcatgcagagtgccaataagataaatcaaccaagttntggggcctcaaaagagacaccagcaactgggccttgagaacttccatttttttgcagattgtctgcagaaactcanacagctcatcagcagcagcagctgtattggattttacctcatcttcagag

SEQ ID NO: 463668 - DNA, 342 bp, Homo Sapiens
ctgaatgaaagatattaaaattcctattttacagataaggacactgagatttgaaggatgatattaaagaaagatggatattttactgcaagttagttatctggtctcagagccaatagagacttgattatatgtgacaactccaaattgtcaggttataccaggatttatacagcagaatttcttaaatacatcttacccctcactctgttcccaattttactctggtttttagaatcaatctctctctttgtgcttaaccattattcctctttcttcttcctcttttcccactgaagtgtgctctgtagctctacagattatagcacaagactccatctc

SEQ ID NO: 463669 - DNA, 739 bp, Homo Sapiens
cagagtatctgagctatgtttgttaagtctgggtggggaagaagtggggatgtttatttacttagtgttttgaatctgttaactcatttcttaaacctttacatcactttatcccacaaattgtcattataccatcaacttctccctccacaagtcactggactatttgagaatatccctcaagtcttcatgcgtgcatgcctcagccccaagattagagacagctattccactaaggctgtgttttcagactcttttaacagtatctcttagtaagaaatccattttcttatgtgtgcatgtatgcatatagatccatgaagcaggcgtttcacagtacaatccttttggtttgatgcatgttgatacttgcctctctattctattttattgccaatggtgactaaattgattttacaactcactaacagatcttgacctacagtttgaaaaacagagtactgaagagtcttgtttcctttatttagaacagtgcaaggatgagtatctgggtagagttgtgcgttgtacataacctttgatagtcatatagttgaaccaaaaacaatttctgtagtgacattgaaaaacattttgacttgatttatcctgacagcatacataatttttggctggctaatacattatccgattgttaattacagcaaaatggataagggaaccttataagaaaacctaccaaataccaatactgtaacattaaacttatttaaatata

SEQ ID NO: 463670 - DNA, 645 bp, Homo Sapiens
  misc_feature (572)..(572): n is a, c, g, or t
  misc_feature (603)..(603): n is a, c, g, or t
  misc_feature (627)..(627): n is a, c, g, or t
acttaatgcttctaatatttactttttatttgaaatgtctaatattttagctgaattttaaaatgttaggcattctgaatacctttccatagaaaatattgataatcagtgttggtattttagcaatgtagggaataaatacttgtattccttcatgttgtttttctctggtactgcaattataatgctgtgctaattagctattgttaaatagctgtaaattaatttaaatacattgacttataataaattttttaatttaaactaatttatagcctttaccaataactaaccatgtgccaagcaacacgtttaacatcctacatgggaactacttttgtcacggccatttttcaaataaggagcctgaagtttacagggttctgtgactcgctctggacctcagatctggggagaggctgagccgtggattgaaactcagacagtaagactgagcacctcacccttaaccatgaccccacaggacaaataattaagagtgtcaaataagtcagccaatacataataaccatcattttctagccatctttgcttttgagttataatgtgcncagtacacaccctcgtgccgaattcctggcncgagggccaattcccaaagtgagncgattaaatcgtaatcag

SEQ ID NO: 463671 - DNA, 727 bp, Homo Sapiens
  misc_feature (13)..(13): n is a, c, g, or t
  misc_feature (46)..(46): n is a, c, g, or t
  misc_feature (139)..(247): n is a, c, g, or t
  misc_feature (327)..(357): n is a, c, g, or t
ttttaccatttantcttttgtaatgattgaaatagagaataatganaatcccagaaaatagcagggtattaattcatttctagaaattcctgatattttaaaaaaattatagtactatagtctaatgtagaaattgtgnnnnnnnnnnnnnnnnnnnnnnnnnnnnnnnnnnnnnnnnnnnnnnnnnnnnnnnnnnnnnnnnnnnnnnnnnnnnnnnnnnnnnnnnnnnnnnnnnnnnnnnnnnnnnaaacatatatgatttttacagtaaaaacctgtatagggtccccataataattcactttcattccctgcatttaaaagtgnnnnnnnnnnnnnnnnnnnnnnnnnnnnnnncatctggaccaaaatagaaacaagtcacatgttataaacaaatgacctactatactagtcacaagttgtaaatagatttggacatttagaccagaacttgtggaagaaggtgattaactcagtgatccttaatttaacccctcatttaccaagccaaatctattatttccagcctagttccaggtaaaaagaccaaaattacctactcttaaagtattaggcaaagtattatgtcccatctgtggaactgttagagggttactggaaatgctttttgtctggaagttggggttgccataaaacaaatctgcggacactacagtaaagacttcagtcctacaatgtgtccctgggatgggcggattcctgg

SEQ ID NO: 463672 - DNA, 648 bp, Homo Sapiens
  misc_feature (11)..(11): n is a, c, g, or t
  misc_feature (28)..(28): n is a, c, g, or t
tgtaagcgganccacatttaactgaaanattgcttttatataataaacgagactagaaacattttaactaacggagtaagtcttcaaattgataatctgaactatacaagaggagaaacttcaggcactcaaatatttgaaatgatacaaaatatttatataaactattatttaacaatttctgtttgtagagtgctataatcaatataaatgacatctcaagtctttctatcgctttgaccacatttacctcctaattttaattactaatatgttggagcaatgcatacaactagattctgatcttcctttttaatgagtaaaaaatatgtcctttgagacagcattaaagaaagagcaccttgtataaattcaatgccaagagacaagatattcttgattctgaagtcttgttcttttatacaacaatgtaattaataataagaagaaaagcaggacatagatgtggagtctattttaatcaaaaattgtctatagattttgatgataaaatttaaaaatctactatatttagtcagttacaaaaaactaggttgtgggaacatatttggtcaataaaacacccctaccaaatgctaacaagaaaaagttatgtaccacctttcttctctgcagatggcctgagat

SEQ ID NO: 463673 - DNA, 237 bp, Homo Sapiens
  misc_feature (197)..(197): n is a, c, g, or t
ttttacatttatggacatataaaatgtctgattaccccattttatcagtcctgactgtacaagattgttgcaatttcagaatagcagttttataaattgatttatcttttaatctataacaatttgtgttagctgttcatttcaggattatattttctacaagttccacttgtgggactccttttgttgcccctatntttttttaaagaaggaagaaagaaaaataagtagcagttt

SEQ ID NO: 463674 - DNA, 472 bp, Homo Sapiens
  misc_feature (66)..(95): n is a, c, g, or t
  misc_feature (314)..(314): n is a, c, g, or t
tttttatactttaatgaataaagcaaagaaatttaaactaagtaaatataatctgagaggcagttnnnnnnnnnnnnnnnnnnnnnnnnnnnnnntgaagaacacaatcttttgaaacatttaatcagtccatagcaaatagttattacataccaaaagctctaagtgttaactagttccaccacaatgccatgtaaatcttgacaatttagaaatcttgagatcaacacttaagttcttttcttgatctctacagcttggtttgtaagtacatacatgcttttgtggatctattcccctcgccacacacacancattttcaaggagccaataacatttttttccatctgtgcctaaaaatgttacaattcagttctagcacattgaccctgataatgaaaatgtttaagttaaagatggggacacaatttcaatcttataaaaatataccagtattagaccaaaccttaaa

SEQ ID NO: 463675 - DNA, 892 bp, Homo Sapiens
  misc_feature (168)..(213): n is a, c, g, or t
acatctttacctcatttatttaataaatgatttcaaatgatcattatgacttgctatagctcagttaataatacaatttcatggtactattgggtaggaggagaagacagaagccctctaaaagaaattgcataaagggaaaataattactaattgccaatagtaaannnnnnnnnnnnnnnnnnnnnnnnnnnnnnnnnnnnnnnnnnnnnngtataaaagtattatagtatctttgtgatcagtttttcgatatttaatgtaaatatctaaatagtgtagtcacaaggaataaaacatcagttatatttaaagtaccaaaataatgattgatgtctaaggtttaagtcacattacatttatagtgattctaccaaccacacaccaaaatttatactctttacttaaggctccatcactgggttctgtctacagtatcctctctatgcaaaacaatattacactgttcatctcacacaccatagactctagagaggttaagtgcaaaatcacacactctagacaaagtggttctccagctaaagagactcatggggaggactcatgagtggctcacctctgtgtcccagcacctggctcgaggcccagaacactgtagatgctcagtaaatttttgttagattgaagtaaaattataccataaagatgagtaactttttagcccttggttctatgggtgacagctctctgaaaccagtatctgagaggattctcaccatgtttagtatctaacattagccatactctctccaaattcagacagtaggtggatattgggctttagtggtaatatatttaagatgactggtttagtctttttagatacctttatgaaataaaattactgaacctttaaacctcgttccgaatt

SEQ ID NO: 463676 - DNA, 708 bp, Homo Sapiens
  misc_feature (565)..(565): n is a, c, g, or t
  misc_feature (688)..(688): n is a, c, g, or t
aattatttttttaaaagatactagtattcacagcaaatgtgcagacgtaactaagacatccccacacctctgttacaactagatatgttcattcgattttggtagttatacagttcccagtgaagtcaccaatgtttattggccccttccttcactgagatacgttcatgggttctgatgagaaatacttgtaattattctaagagcatgctttagcatgcaacacttggtaaaaatatggtaggatcatactcttaaaacatcttttcttttgtctgagtgcaggcattaggtaaattatgtcacacacagcactgcagtgatttatagaagttaaataaatgttcgtaagtaatcttaatacctttaaaatattttgggaggtaaggttttacattatgaaaatattctgagcattttataaaattattcaacatttatactttgggttatagtttttggttaaatagggaatatctaattatataaaaaacgggatatattggcagagtttcttaataggagttctttttgatgtttcctttcatctcattagttacaaggnttaaattctatgccctaagttcattggcatttcacaggtagactttttgctgctattttccaactttagatgtgtgaagcctgtactacagcctctggatgaatggcaacataaaactagggntcttcaattaccagcttaaa

SEQ ID NO: 463677 - DNA, 849 bp, Homo Sapiens
caacttctatggtggttttattatgaaacaaaataaacctttcaatatcatattcaaattatcaaaaatatagctcaaaccttcctacactgataaaaataatatatatcattcacatcaacatcatgacagctcaaagttagctatttgaaataaatcatcatacttttgaaagctactcttattacatttctaaacagagtgctatttttcctttttctaagagaaactataaagcataccccaaagtactcacattctggctacatttggaaaactatttgaaagattaaaccttcatgtttatctcatctcacaatttacatttatgtattaatttaaatggctacagaactatttaaaaatttattttataaacatggtactacaaattttaaaacttcctgttctaaaagtaactatttaaaaagatttctggaacacaccatcaaaaagatactgttagaaaatttccctagagtgacacacacaagcaaatcaagccgaagaattaagactgttttagcatttctaggcaatgtgtatcatgtcttaatatgacatgtacatgcacttagcaatactcttttctaatgaaagagatggagttgagttcatgagtgttatccaaaactatgccagaagacacaaatgcgttgccaggcagagttaaaagaatctaacgagctttgtgtgaattttaaaaacattgtttgaactcaacttctattaattaaacacaaagtgatggaatgctaataaatattcagcaaaacgattgaacagagcatacactacttaaaatgtgtgttaagcagaaagataaaccaaagtatcttttgccataaa

SEQ ID NO: 463678 - DNA, 806 bp, Homo Sapiens
  misc_feature (16)..(16): n is a, c, g, or t
ttaaattctgaatatncttcccactaaaagcacaacaaatctatttacagtgcctgaagcctgggagagccacatgagtaaaaactcgtacgtggtttagatttgttccatttacatttttcttgggatttgttgtgcttaaacctttgcagttcccacagatctgaaaagaaagcatttttcactgtaatacattaagagagagagaaaaaagtcatattgactattttacttgtttgaatcgctgtttttattacaatgacatgaaatacaacgtgtaaaagtctttaacctgtgttgggtaagggtaggactgtttcaccaccctgaatttgaaatttgaaaaagtcttaaagtggtagggtactttaaatttttaaaaaaatgacccatgggagccagtttttctctgttaaatcctggtaaacttcgggtttttgaagactttaaaagatgaaaatgaccttgagcatctttattcctttcctctgccccttaatgttgggatggggttcaggatgaaagggaggtgggattctaattcatgtgccagtgacaatcctgcatgcatatagaaatttttatttattgaatgtacacaagtaatgatggagtttgattatatggttcattttcatttatcctatgcagatcacgaaagagtaaactgaaaggaacaaacgctaagtaaaataagggccagaaatctgtaaatttggtattagattaagaaaaaaagaattgccagttttttcctggactctttccttgcagaagcgattttcaggacaactcaagccaattaa

SEQ ID NO: 463679 - DNA, 743 bp, Homo Sapiens
  misc_feature (398)..(398): n is a, c, g, or t
  misc_feature (604)..(690): n is a, c, g, or t
agtatggaatctaactttattaacccaagagacttttccagccggagtccacaaaggaatggaagttaccttctcccagaaatcctattggttacaggtcaatcatttgtgattattacatagttgagtaaagtggatatttgaggtaatgaaccaagtagttgaaactaatatttgtgtactttaggtaaagtggttttaagccagaattatctaggattgtctgtattctcaacttcaaaactaatgcattgtttctataatgagctctctcaactttaagcttgtttcccagtactctgtcttgccccaaatccttgtcagtcctgaagttataaagtcttaccctgtcttcacatgtaataaaaatctccaaactttgtggaaactagctttgntgttaagaacagtactgaagaattaaaagtcaagaaattatggctgttatagattctaataacacttttttgttctagtgagtgagtgatctcaactagatcattttagtcaggagtgtctaagaaggtctcagttcactttaaagcctagctagtgtttactgagcacttactaagtgccagatgctacctgacttgtaggccannnnnnnnnnnnnnnnnnnnnnnnnnnnnnnnnnnnnnnnnnnnnnnnnnnnnnnnnnnnnnnnnnnnnnnnnnnnnnnnnnnnnnncaatttgaagtgtcgagttaggattcagtctcccgtcgaggacccagggcctg

SEQ ID NO: 463680 - DNA, 803 bp, Homo Sapiens
gccagttattgcaatttctttatttcataacagttgctttatacatcaataactaaattacagtgtaaagaagaggattcacatatagttcttctttttcttactgataacaaattcttcctctgtttgctatgcttagtaaggaagtcaatgagagccagtagtcagtggttccacacaggcaggagcctaccagcatagctgttgacctgcagcattggtacccagcccccaccaatacataatttgactatcacccttaaacaaatgctattttgcaataagaggtaaaatatcagtgcaacttaaaaaacaacacttgtacatatttttattcaacattttacattattccacaaatatgtacaatttcaataataaattaaaaaaatgagtaaagtaagtctgagagaagttcatagtcactatattactcaatgacatttttctgccttcatttctaagagttcatctgatccaaggtctgatcatcttcttgacagaaaaacttgttttgacagcacatttgaaatgccgagtgttttgttatgtctaagcagcagagtgatgtttgttaataacagaaacactttaaaaagaatcaattgcaatcaagaagtgttgatgaacatttggacaatatgtacaaaactctgcaaaaattctttaatatttttttcctccagttcctcacattctttgcatccagattctgttacattcccattagaagacaaactgttgtttgctaggatgatcagattttctactgtatcatgaatacttgcatctccggactcgcc

SEQ ID NO: 463681 - DNA, 816 bp, Homo Sapiens
  misc_feature (155)..(206): n is a, c, g, or t
gcatttgaaaagctaagaccagcctttattggagaaagtaggataaagacatttccatatatgttcatgggaatttaccattccaaatttaccattcaaactgggggagtagagatcagtcacttttgccatcttatctgtttaaaactctttcnnnnnnnnnnnnnnnnnnnnnnnnnnnnnnnnnnnnnnnnnnnnnnnnnnnngaatactgtgtaagaaccacagaaaaaaagctaagtaggagcagatgtgggtgctctttccttaacagtcagcatagaatgtagagactgacattttctttaagaacagattattataactaagcaagaaaaagtatgtgtacataagttggtcacagtgacacttgtagaaaatataagtagctgtaaatgagaaaatgtcaaaaatgttccatccaaggaatgttagaaggtcccttctttgccttgctcatctgaaaagttccaattcaccctacaagccttagccccaaggctgggaagccactgcctctactaccaagaagcatccagtgtctcttttgtgcagcctggcacccctcctgtggcttcatgataacatctatcactctttagggatcatttacacttctgctgtctcttctccctaagacagagaaaattgtcacttgttcttttttgtattcttggcgtccagcaaagggaacagacatctatccatttaattaagctctgctaagatgctttgagttaaattgtgtatgtttgtgtgctggaaaaatatgtaaaaatcagtgagacacttctacaaaggcagagtagacatcct

SEQ ID NO: 463682 - DNA, 646 bp, Homo Sapiens
  misc_feature (555)..(567): n is a, c, g, or t
cagggtttgggatggcctttattttgtttaaggtttttaaaaccgtgcctaatataactagtagtttctggaaatggttaagatttttgtcttttgcaaaattgatcaccttcttgtgcatggagctggtccttctcagtggtctctggaaggccacagagctcccgacaaaagaaagtcagtaggaaaagctgcggggtttccacctctaagcagcttttatcgtaagtggaatcacatccatgaatcctgatagaaaaatgctagtctctcatggatctaaaagtatgaagtgctgtataaacgtcagaacccatcacatttctctgggcaatttcagtatgtggtaatttaatggacagccagccccaccctcagccatacgaagatcaagtcttacaggggttgggaggggttccccaggcatagaaaagattgacggatcttttaatccacctggtcatttgtcttccagagcccaaggatcttcacttaaagggcaaagagccttactgtggaccatttccctgtgcagttcttttttgtttccacttnnnnnnnnnnnnngacttaagcaggtttctccatgcttacatcgaataacaaataagttggatggcatgctatgaaagcctcatgccgaatt

SEQ ID NO: 463683 - DNA, 670 bp, Homo Sapiens
aagaatcctctagatttttatttccttcaatttgagggttaaatacagagtacgctttccatagtcaaacagaaagaaaagactttcaggtacctttcagatgtgaggcttttcacaggctctttaatcattaggtggtctatataatagaaattacgtaaatctgcatcagaaccactcaaaaaaagaaagaacagtccagatcggttaatattctacagaatctcaaattcctccagtgtttaagactcctcacgattattctgtaacaactctttttggcaggatggtgtaaacaaccaggactatcatcagctcacatttgctaataaaaggcagtttacagtgcagcctctcaagaaaaatccaaaataacaaaacaaattaggagaggtttacggtattccaaaaggtcttccacttaagaagaacatcccttccttcgtccctaacattacctaaaattattggtttttaaaaagcttgatttttctaaacttttaaatggggcacagctactgcctaaatgatggcacaccacacagtttcacaaacgcactaaactcattacagatccaggctccaattcgacgtgcagggcactgaaccaggcacaatgaatgtcttccatgatggacactgtccagcggaggcttttcttttctttttt

SEQ ID NO: 463684 - DNA, 455 bp, Homo Sapiens
aaaaagacatatttttaaagtgtgtcatttaaacgttgagttttagggactttatgaatatttcagcttggcttctgagaagttagtgtaacatatcttttcataaatataattgttacattgaaaaaggatctcttattccaggcatatgcagagagagaagaaatcgagacttcagtaaggtatgtcaggacagaagagttcagttaccaaatcccgggaagtaacatcaccacacttatcagagtgaatgtcatagattcagtcgccactgcacatcctgctcctgttgtgtctaaagtactgccagtgtctgtttgatggatttgctttacatcactgaagttcatatcatctggcatccagtctgtgatcttcagtgtcctcttgacttctccacttcctgatcccccgcaaccatcttcatcatcacagtccccactgacttgttcaac

SEQ ID NO: 463685 - DNA, 555 bp, Homo Sapiens
ggctaaaaaacctcttaactcaaaatgaataaaatcgttcactaatgatatttctaaggtatcagtgacacttgagttttcctaggagggacatcaataacagccccctaaagaagattcttagagccagctttatttttatgttgaaacagcaatttcccttaattcatcgaagtaagggtgtacttcctacatctccttctactaatacttctaaaaattttctgttatgaaaacctatttaattccactaaatttgttctttgatattggaattattcagatgcctaaattctcattctgttatgtgaagatttaaatattttattcaagtttatcgcttccatgtgagagaagcctacatcttcttattctatttaggaatcgttctttaactcttcttattcattctaggcatgactcctatataatagattactcataaatataccctcctactttcaattttttcttttctttattactcatacatttgctcaatttgtacagaatactgacaaacttaagcaggttattaaacatcatgaggcaaaa

SEQ ID NO: 463686 - DNA, 849 bp, Homo Sapiens
  misc_feature (686)..(686): n is a, c, g, or t
taaattatattttatatttattagcacagaagaataatgagagccacattttagttcaacttcttgtgttagctttgatcaaagtcaggacaataatcattgagaaggtgcatgtctaataaaataggtaaatttaataattgtgagacttccagtttttatctccaaggttgtatttagagtggagaaacccaacaactcattacagtttcgctaagatttgaaaggttaaaaaaatttatttccttatgatagatgccatacttttccatatggagtagtcaggaacccatgaaattttttgcattccagtttttttaataaccatttgttttctcacagtatggatctagttcataatgattcagattcttttgctgaaacacaattagcattgcagggagccttctgtactactgacatgacacttcatttggcgttctaattttgtatcactacagtgatgatgtaaaaatgacatggccattggaatttgcctagaatcccggccctaggtccaaaagtatattttgcaagatgatttcaatgctaatttcaaaaaaccacgttgatgaagaggaaggaaatgtatgaagaaggaagtgggttagctcaggaaatgaataactgcctctataagagtttattctgtgactgtttggtttttcactctgtgggagccttgngaaacgatacccagagaagcccatttgaggtctttcaaacaccctcaactaaattttagtagaagagaatctgtaccactagtgacaacaaagtatgaacacaaattctggcaccaacaaaagagggcattttattcttaaaataaatacgttattaaatttg

SEQ ID NO: 463687 - DNA, 525 bp, Homo Sapiens
ggagctcctgggactgtgcatgaaaaaaattgagacataagttaacctccctgacattcctgggcaaagtgtcaccagtttccattccacatttaacttggtaaagctttaaataaaagacaggaaatcctaagtcattgattttggtaagctcatgatagtgcagtttattcaaactctaggcttttttattaatactttaggcctatgactcagaatggaaaccaatgtaatagtgagatactttttctgattcaccagtgaggtaatgaaaatctcattcttacacagggggttggtaattccatatgagattgttatctttgataacttcctagaaaataggaacaattaagagcttcccaagagaactaagctgggtaaggatttgggaaaccttatatggtaatagaattgtcactgatcaacactgctgggatgttttgatcttttaaaccaaaagctcttgaatgctagtcagccctccatagatgtgaaactgcatccatggatgaaaaatatttg

SEQ ID NO: 463688 - DNA, 487 bp, Homo Sapiens
  misc_feature (15)..(15): n is a, c, g, or t
  misc_feature (29)..(29): n is a, c, g, or t
  misc_feature (40)..(40): n is a, c, g, or t
  misc_feature (69)..(69): n is a, c, g, or t
tctggattataaggnttctgcagcctcantacaagtttantttcagagggttaattcacaaagtattgnaagccaaggaaatactggaaagatgtcaatgacatctgccacaccaagtagttaccagaaagcctctcaaaaagaataagaaagtatattctcaccaaagatatacacttccaaaaatcacccctccatcaatcacatcttttatatattttctaattctgtttatctctttcaaaagtttcctgtaacataacaggatgttacttggatctttccaataaaaacaaagaaagttaagttcttagctgaggagcaggcaaggatgcaaatcagaaaaacgctgaacaagaacagatgacctaagggaagatgtcactccagagattaaccatgtgtccagatgctcccaggaaaacaagcagctcagagtctgtaagacagcagcaatccccaacaccacatacacataataatggtg

SEQ ID NO: 463689 - DNA, 636 bp, Homo Sapiens
  misc_feature (610)..(610): n is a, c, g, or t
aaaatccccatttcttttctttctcttttcacagtcttggtctgaatcaagccatattcatacattgaatttgtttgacagagtctctgaatctgttaagtttgaaggctagctctcacattctctatcaccagctttatctctgtcttcctttcccacccttcttatttgtaatttgtttgttaaagagatcaggttgtcaggtaaaattagtcttccacaatctggattttgatgattatgtcaccatggtattgtttaacatctttctctttcccccaaaccattggttttcagtcatgagagatagatataagcattaaaactctatagctgaaatggccttgaagatcctttgtaacccatagcttttaaaagctggtacaagtcaattggccaaaggatattgagttaggcagggccagcctttggcaatgcaattgctgcttcctcagactcaacaaaaattatttgttttctttgaaaatgggaaaaagctacaggataagtcataaggcataagcataactagaattgtctgcaaaataagcttatacacatggtaaaggcctcatgattctaagcctgtgtcccaggttccctttcaagntaccaagatttgcagagctacttcat

SEQ ID NO: 463690 - DNA, 432 bp, Homo Sapiens
  misc_feature (302)..(302): n is a, c, g, or t
  misc_feature (398)..(398): n is a, c, g, or t
  misc_feature (410)..(410): n is a, c, g, or t
  misc_feature (412)..(412): n is a, c, g, or t
gcagcctgggtggtggggccactatgcttcctctggtgattctctctaagtgaaagagcaagcatgacctttcatcacatcttctcttggatgcattcaagatacagccaccagcagagccccaggtactttggcaggaggtgaaaaatgtcttacaacttccggaaacggcagtccagatcagatcactgtgtgactggctaaccgtgtagtggggatactcagacaatcttgtgagtcttcatggcctcagccagttttgctttgggagctgtggcttggtatctatcaccgcgagcganctcattcagccaaccaaccttcatggaaggaatcaagtcaagatgtacaaccaagcacgtgtgcctgcccatccctcctgccctgaagacacggcncaaaagaaacantnatctacagacaggataactg

SEQ ID NO: 463691 - DNA, 425 bp, Homo Sapiens
  misc_feature (26)..(26): n is a, c, g, or t
  misc_feature (38)..(38): n is a, c, g, or t
  misc_feature (51)..(51): n is a, c, g, or t
ggccaaccaaaaattttcctttcccncaatcgtttccnaaggggtgccgcnatccccccgcgaacagccaggagggggcctcggctaggtcccgggcgctccctgaacgtttaacaacgcctgcttaggagtgtttgtcggtgacgtgaatgaacgaagctggctggctgtgcggggaggcctttatttttcttgccgtgaggcgggagcctgggagccgtcccgtgggaccggaaagcagcaagaatgtctgcaggagggagaagcgagtgcagccgcagataacgctccagcgcctgttaacacttcttgggactgggcagggcttgtcctcttcttcttacctggcacggaaagacaaagacaacccagttggctttggaaggttcatgttaccgtcgtttgtcactttgcacggaaacccc

SEQ ID NO: 463692 - DNA, 384 bp, Homo Sapiens
ggtttttgagtatatgacactgaaatattagtgtatctatgatactaaatcatttttatatggctaaaatcatcttcagtaagaactctcttaggatatgaatttaagtgaaaatttactgtcttttttttaaaacatgatgaaacagtaatctatagagcaatttcattagtatatgtgagtaatgatggtttagttaactctacaggctgggtaagggctcataagaaagcttctaaagctctgtgctttgtgttcctctgtgaatgtccattctacttctctttctaataatgcatgcttttctttttgtaaacaaaatgttgacttcatggatcaattaaagagaattgtaaaaacctaaattggcttcagttaacagtt

SEQ ID NO: 463693 - DNA, 203 bp, Homo Sapiens
accttttgtgtctgaaggtggtgtctttatttttgtggaaaatgggagaaaaatgaataattgtgtttatttggctgattggtaatacactagaccattctgttattattgaatgaatgttttgtgtatatctctgctgttgcacatatgagtataggtgaggttgtcattgtttgctctgggattcagggagggagtcactt

SEQ ID NO: 463694 - DNA, 614 bp, Homo Sapiens
  misc_feature (207)..(215): n is a, c, g, or t
  misc_feature (280)..(280): n is a, c, g, or t
  misc_feature (573)..(573): n is a, c, g, or t
gtgatttatatatatagcagctttattcataatagatcaaaacttgaaacaacctaaatgtccatcaataggtgaacagctaaacaaattgtggtatatctatatactagaatactattcagcaataaaaaggaacttattattgatacacatgataacatggatgaatctcaacatggatgggtttcaaaagcatcatgttaagcnnnnnnnnngtcagacacaaaaagagtgcatattatatggcctatttatttcaaactctagaattctgaagtcnaaatctaacgtatagccacagaaagcagaaaagtagttgactagggatggctgttcaggtggaggggaaccaactgcaaaagggctttagagaactttttgggtgatggacacacactatatcaggatggtagtggtggtgaagtgggtgtttacatttgtcaaaactctcccaactataacgttaaaatacttgcattttattatttctaagttatactcatttaagaaagttaatagaggtgaacagaggatatcctaattcatttcacattcttcccttccatttcaatnctagagtcaacaatgtggtctgtcacaattccaactcgagc

SEQ ID NO: 463695 - DNA, 785 bp, Homo Sapiens
  misc_feature (203)..(203): n is a, c, g, or t
  misc_feature (456)..(456): n is a, c, g, or t
  misc_feature (481)..(481): n is a, c, g, or t
  misc_feature (628)..(628): n is a, c, g, or t
tttttgactagctttagtttagaaatcgcaatagacatttctcaaaatccattctttacagagaagaccagaaacttttgaaatccaatttagattctttctgattaagcaacattgttagtagagagaagcatttctttgttttgctcatgtcctttgaagagtaaataactgctgactgtccagaatgtaggtgtttaggnaaattcagtgctgagctctggcctttggagccagacctggagaactccgagggtcaccctgtggtgttttccctgctgggcctgatcttaggatagtaaaattgtttcccattgctcaaggaagcttctcgttttaccatcatatttactgttctgtggcacattttacaattaatcaacaaaattgttttggtgactttgtatctcttcataatttctgcttcccttaaaacggagtgcatcttattttgtnttctcagttttaaaaatgtctgtanttttgcgtcaattttggcctgggctggcggcacactctctagacttcagcagcaccagcagctggaaacagcataggtgtgattcttcaaaagtgctgtcatcattgagtgaggagctgaggtccaggaagagcaggccaggctctngagcaggtatcttgtagttttatcagtgcagccccaaggtagtgtcgttgctcagggagccaccacggcctgcgttggacagccgaaacctggtttacgccctctcctgaatttgattgtgaagaaacgatcagacaaaccccaatcgagagatatt

SEQ ID NO: 463696 - DNA, 325 bp, Homo Sapiens
gtaagtcgtcttattttgcaccaaagtaggcaaagatgtcatcaaggatttttggtgtattcttgagtccattttctgtctgaattggagaaagaacaaaagtctcaaatatgtcattcccttaccatcaagaaactccattcccataatgagtatagattacatatccagaagattccaagccaggacccccaggcaaaaaggtacgtcccctgtccccacttgacaactcatagaagtgaggtaacaggagaaagtggcccagctcagaactatagtcccataaaacccatcctccagtgactcagccttctgaacccacaaa

SEQ ID NO: 463697 - DNA, 265 bp, Homo Sapiens
catgttaaacaatttattcccaatataatttacatagctttattaataaagtatctgtcatctgaaattcataaatatcaatgacattaaattttatcatgaaattaataaacacaggcttaaatcttaaagcagcctgcaaacaatcaatagatactacatttcaaaaactgggtcactcctactacatcccatcactactaataagaagggcttcaagaccttggatcaagctgtatataaaacaacttacggaagttgacga

SEQ ID NO: 463698 - DNA, 572 bp, Homo Sapiens
  misc_feature (389)..(389): n is a, c, g, or t
  misc_feature (404)..(404): n is a, c, g, or t
  misc_feature (480)..(480): n is a, c, g, or t
  misc_feature (508)..(508): n is a, c, g, or t
  misc_feature (557)..(557): n is a, c, g, or t
gcggcacgaggcacttcccgcacatttgggctgtgggcagaattcaattccttgtggttgtaggacggaggttgccattttcctgctggatgagggccattcccagcttctagaagccatctgcatgccttggtttgaggacccttcgactatcttcaaaaccagcaagggtaggtcagacccttctcacaggctcttcttccttcctttttatggactcatctcattaggtttgcagccacttgaataatcccagatcatttctctattttaaggtcagctgatcaaggtcaactgaattctacctataaccttaattattttttgccatgtacggtaacgtatgcatagattctgggggattagtatggagacatactaattacacntgtagctagatattntgtgtcggaagggggggcattaattctgtacctagaaagagaggggatttgttggggctgcagggtgtgtacatgntcagtgttaactgattctgctaagtggntttccaaagaggcatgcccactaaacactattctcttttattggtctgnttatttattctcatg

SEQ ID NO: 463699 - DNA, 510 bp, Homo Sapiens
  misc_feature (198)..(212): n is a, c, g, or t
cttaatccactttcctcctttcaagtttctttaaataaataaaagctctgagtcctctccttgaaagtatgcagtcaatgtgccgggcgcggcaccactgcactccagcctgggcgacagagcgacactccgtctcaaaacaacaacaacagcagcaacaacaaaagtatgggtaatgtaacattacaggagttttgnnnnnnnnnnnnnnnttcagggaactccaagatgagtgaccatcagcactgttgagatgctagaatataaataccagcatacgacagaggaactatttacaggtagatcttcacatcattatgaaatttcttctcagtcattcccaacacaaatattactcattatgttaaaaggacctgcagaataaaatccgcttagaatgtcacacaaagcttgtttctctgaataaactgttgtaatttttaaaagtgtctgattagtacataattgattatttctctttttttgtagttggaagctactaaaaagtct

SEQ ID NO: 463700 - DNA, 273 bp, Homo Sapiens
  misc_feature (258)..(258): n is a, c, g, or t
tatattttggtccacaaaagtttttctttaaaagtgaatggtcgaagtgatgatgtaaccaaaagagctggacaccacacagaaagtaatgattttcagcgttttcctggtaccaccagtatatgcttttttgagggtgtttgaaatttttttataccagtgaatataggaaatgagcagtgagtaccactagaagcaaatagcagtacatcccccatcgcatgacgattagtactttctttaatttgatatttagtnctcagaattttatag

SEQ ID NO: 463701 - DNA, 364 bp, Homo Sapiens
tgggtttaatttcccattttttggatttacggttttacttctgcttctgatttctagtttcattccattttggtcagaaaatatacactgtatgatttcagtctccttaaatttattaagacttgttatgtgtcctaacagaatgctctgtgtgtaattgagaatatcatgtattctgctgcttttaactggaacgttctgtatgtgtctcttaggtctaattggtctgtaatgttttaagttttttattttcttattgatctatctggttttcttatattcatgattgagaatgaggccgtgaaatctataattattgtgctgctgtgtatttcttgcttaacttctgtcaatatttgtttta

SEQ ID NO: 463702 - DNA, 344 bp, Homo Sapiens
  misc_feature (20)..(20): n is a, c, g, or t
  misc_feature (77)..(77): n is a, c, g, or t
  misc_feature (114)..(114): n is a, c, g, or t
gagggcagcccagcctcgcntgtggggtgggctgaaggacctctgataggcttaaacttggctgattcccagagacnggttattaaaggagatatttgctttgttttcccctgngtctgacattttggcctctccacccaaatgcacaaaatccttggccggtgaccagatggctctgagagattcctgagtttagctgtgcatgaaattaccaccatcccaagccacaggaaaggagcactaagctcagaattcaggcacaccagagtctgagccaacaggcacaccaagcaggtttcctagtatcaaagtctagtagccaaccatgaccagggatagagttt

SEQ ID NO: 463703 - DNA, 151 bp, Homo Sapiens
cttaaaccttgtttccccttgttggtctaaagctcatatggtgttctgtgagagtgttctcctccttttcaatacatactaatcattttttatcctgttatacagttcgcctgcacaaaaatatagggctattaattgaaagcatctagta

SEQ ID NO: 463704 - DNA, 555 bp, Homo Sapiens
atctaaacatttttctttcttttttcagggacaataattttgactatttggagtttcgcctttggattggcctgtggtccgcctttctatgtctcattttggtagccactgatgccagcttcttggttcaatacttcacacgtttcacggaggagggcttttcctctctgattagcttcatctttatctatgatgctttcaagaagatgatcaagcttgcagattactaccccatcaactccaacttcaaagtgggctacaacactctcttttcctgtacctgtgtgccacctgacccaggtgagggcattacgctttgtgtttatgctcgctttgtatttggaggaaggtgtaggctccatgcttgcaaattttcaacatgctgtcatggtcctcaggaattagtcttgtttttttctctgaaaaactctgctactgaatttgatgtctcattgcctgaggtattttagctgtatgattcaaccaggaaggagaccaggagctctggaatgtgaacataaccaactcaatattttgaaattaactcaaactgtg

SEQ ID NO: 463705 - DNA, 822 bp, Homo Sapiens
  misc_feature (19)..(19): n is a, c, g, or t
gactgtgcatacattctgngatagacttgttgctaaaatatggtatgggaataagtagccgtttttgagaagttactaaatcttaggcatggtgctaagaatgttatataaattactttttgcagtctgtactacaaccatatgagacaggcgtttgtttattatttccattttacaggagaggaaattcagggacaacaaggttaaaaaatttgcctgggtcacataactgatacattatgaggccagaattaaaatgcttgtggtttgacttcagaagcaactctcttaatcctaatgctgtgatggctcccacataactgaataacagagccaccgtggatagtgtctatgagagagagaaacaagcagatctgtctttactgtgaagtgaattttgtggcagtagtaagtaagagatgccatggggacatattagtgggggcagctaaatcagctttgggaggtaaggacatgaggaaatggtaaggggagagaccttgttaatcttttcactgtcgtattcccccacctggccatggcagtacttggcaagagaatgtgctaaacaggtactgttaaactggtaaattaatcaggtgtgacatctaagcaaaatcttaaaatttcaatgtatgaaatcccaagagatctctttgagaaattcgtatgattataatgtagatgagtctcagactacttgttctatgcattgttatattcttactgtgtagtatctaaaacaccacctcagtgttactgaccaagaagactaagtgtcactccaatttattatagtaaggctacattggaaaaataacg

SEQ ID NO: 463706 - DNA, 809 bp, Homo Sapiens
ggaggttcatcctgagagttatatttcacagaggaaaataaccaacagctgaaaacaacaataataaagctctggtgagtctgactcatactcggagaaagtttttggaatacatacacatttggtgcatataagagttgggtttccttttcccactttctgagatgtactaacctctgccagacccttaaatgattttgttatgttttgcatttttgaggccaaccttattttgtaacctgaaaaaagtccagttttgcatacacagaaatttggtcattttaagaagtctcacaacctgaataatttgataataattgaatatgctattaacagctttttaagaaaaggttctattagtcagttttttccttgtctgtcatattatgttggttaatgtctcttatggcccaatcttagtaaacagacctaacactcactgcatccttttgtgccttactttttactttccttttgcccttttggtatgtgcgcatgtaagatggtaagtttaaggctaatgaatatatgtttgtaatttcctactcactactctgcagttaaagctaaggccttaggcaaaatctagaaatgtttatattgttttgttttttatcaagtggtgtcaacttgagaaatacaaagaaaggctatgcttaactgtataaccgtgggggattttagccatgagaatatgaagctgatgtcagcctgctaacctgttttaccaaaaggaaaagatgtttccaaaaatgttttcggtgtagactgtttaaagatgaaaataaattatataatttattatatga

SEQ ID NO: 463707 - DNA, 709 bp, Homo Sapiens
  misc_feature (547)..(576): n is a, c, g, or t
  misc_feature (638)..(638): n is a, c, g, or t
  misc_feature (667)..(667): n is a, c, g, or t
caataatatactccttatgttatttctaatcctaaatgtagacatcacttcccacctttcgtatttgggatcattacagcttggagaagttcagtgaatttacccatggtcatacggtgacaaaactaatattagaaccaaatttgattttctccaaagcctgctttttaaaaatatactacctacatatttttctcttcagatccctataggaacatgtatttttactgcttcatggttcaaaaagttttttatttggaataaattaaaataactcgggtttagtgcttcctggttcacccaatttattaacatttacttcatgaatgtttgattaagtaattactaaaataattttaatatttctctaacatcaagccagaaagaggattcttagtgggttctcccatcctatccatcatttttttcatgagacttctaattacactaatttgtccatatttcatttcttttctctattcacttgcccttgctctgccagactccttgagagaagtcatggatttggttgacttattgtattagnnnnnnnnnnnnnnnnnnnnnnnnnnnnnngtgtatatataaaaaatatatatagtcctcttcatcttttgcccttttcatcttaagactgnctttttattcattttggtatattttacgntttgattgctttgcctttttttatttgctatggtaatttctt

SEQ ID NO: 463708 - DNA, 313 bp, Homo Sapiens
  misc_feature (41)..(41): n is a, c, g, or t
tctggttagtgtttacctggcatatatttttaatcatcttnctttcaagctttctcagtttttatacctaaagtgtgacttgtataaatagcatatatagtctgatgtcacttaatggcagggatatattctaagaaatgtggcattaggtgatattgtcattgtgcaaacatcacaaagtgtacttaaacaaacctagatcacattacctaggctttatggtacagcctattggtcctaggctacaaacctgtacagcatgttactgaattgaacactttaggcagctgtaacacaatggtaagtattttgc

SEQ ID NO: 463709 - DNA, 664 bp, Homo Sapiens
ccatggtacaaaaatgtttatttaaattaaatatttgcagcaaattaatattgacaactgttccaaagtatgagttgttctttcaaaaaaacgaagcagtttagcttaatgtctgtgatactgttttatgagattattcatacatgctctggactgcgcatcagtcaatcatatcatcaacaatttactatttattaccaaatggcatataaagtaatagcataaagagtaatcataccttataagtgattttacaataggacatcttagaaggacaaaaaggatttatcaacaatacaaaacataagataaaaataataggagattatataaaacatatttcatacaggaaataatatggctaaaatccaaaaaaccaacaactgtctttcagcacactgttatgcatgctcctttaaaggaggtttgggggaaagatgaaaatattttgggggcaggggtccagggctcagaaacatttttggaatcacagtgagtttctgatttgcgggaagttgctctaaagcactggctgaggactttgcctgaggacctggctggtgaggaagacaaattctcacagcagctaaaggaagcatgcttgggctaagtcaggggctgtttcagttagggaccagttcagcagtggaggaagagcagaaag

SEQ ID NO: 463710 - DNA, 734 bp, Homo Sapiens
  misc_feature (36)..(36): n is a, c, g, or t
aggaggaggatggcagagccaagtgtagggggctgnatgtggcaggcagttgaacaggaaccagaggatggctgggccagacaactctatctgccagatgatgccaccagaaagtcatcccattcaggctcctgatccctttctcccttcccagaggtttcttttgtttcatgacagcactctaggctcagtctgtgagaggtgttcctccggttcttctgggtgaagagaacacacttatcagaacctgttggcttcccctagctgggaaaggctttcacaaccttcctgtttcattttctctttcacacaaataaatgtgtttttcctcctctctccttcactctgcctcaccgtaataagtgagcttcttctcaccttccagactaacgcttataggggaagatgaggctcaagccatcactttttatggggttgtttacctgtgcatatggccctcagatgcaaaacaggcacatttcaggataatggggttctttgtctcccctcaagatggcttggagaggactgggctgagaagagaattccactttccaccgagaaattggcacaccactaaaaagctgtaatgccttcatgctgtctcaaaatatgaaataatcttttcaatatgcatccaacgtaaccactttgcctaactctattgtcactctggattattaaaagaaacaaaatgccgtgctcctgcccagagtgaaatgggtagccattag

SEQ ID NO: 463711 - DNA, 728 bp, Homo Sapiens
ctcacacatttccatctcttttcagaactcctgacctgtatacatagtccaacttaatatcttcccttggatgttaaatttaagccctagagctcagttcctgatctatgctccagaactggcctccatacatccttatctatccgagttaatggtgctgcagttgatcaggccaaatccaggagacatccttattattttttttctcagatcttatatctaatattttaggaattcctattaatatatacctcaaaatccaaatatcttttgccacctctacagcaactcccctggtttaagccaccagcacctgtctccttgactgtagcaatggtttcttacctattttcataactgttctccctgcattgccttgcttttcctctgttgattctcaacacaacagaaagaggaatcactagaaatataagtcagattatgccacttttctgctcaaaaccctgaaatgacttcccactgcatagagagtaaaagccaaagtttatgaggccttgtgttatctgagtctctactttgaccatgtcctactacctctgccccttatgactgatcaaatacactggatcaggccctttccctactcccctcccttccattcccaatcctctttaccttgctccattttttctttactccaaagcacctaccactttttaatacacagtgtaatttacttatttattggggttattatttattgcctg

SEQ ID NO: 463712 - DNA, 363 bp, Homo Sapiens
  misc_feature (51)..(61): n is a, c, g, or t
  misc_feature (316)..(316): n is a, c, g, or t
  misc_feature (341)..(341): n is a, c, g, or t
caaatcaactttttatggaagagttctatgtttaaaaatacctctagtgcnnnnnnnnnnnaacattaacaactgtttaaaatcgcagcttttaaaatgtactattctttttgaacatcaagtgttttccttcacagatttgccggtgaaattaaaaagatttggctaaaataagatgacttcagatgatataatctcagctcttaagaaactttgtacatttggcatctgatctagtcccaagtcaccaagaaatagaggctctctagtcactgtggagcagtaggtggcacactaaatgttttaaaatgtattnacccctcccaaagaaaagcccattncaggttactagggtggttttaa

SEQ ID NO: 463713 - DNA, 733 bp, Homo Sapiens
  misc_feature (23)..(23): n is a, c, g, or t
  misc_feature (634)..(634): n is a, c, g, or t
  misc_feature (693)..(693): n is a, c, g, or t
aagagcatcaagtgtaataaagnatttttaatgatataccatctgttgttagagcatattatacagacaaatggatgtaagtctggaagttacaagttgaggggcactaaacgcatttatttgagtactatattttgagtagaaagtgtcacatatgaaaatcaccctcctcataagttttcagtctttgttaagtgctactactaatgatgacattgatgatggtgttgggaggagagtaaatggtgatgccagtcttgggaaacatgtgtaagaccctctcaggaaattgtttttagagaaacataagtttgaagccatatccaaccttctgccctcaaatgacatcactaattttgttgcatatcttacacaggaaattctctctaagataatttttgatgcttcaaaaaatcaaatttactccttaagactgaatatttgacacttctaaggatatgtataaaaatgtattgtaggtgccaatggaagttgaaaactatggcaatgacagcattattggaacttagcctcctgggatgaccattttgtatgggaagacattcagatggatgctttgataaaaactgctacttgtcctctatatccattttcttttcatacatggtagtanaatccctgatttttagcctggatacatgactgcatggaagaaaggctacatttccttgnctccttcccaacaagatgaaatcatgtcacttggttttgg

SEQ ID NO: 463714 - DNA, 583 bp, Homo Sapiens
  misc_feature (20)..(20): n is a, c, g, or t
  misc_feature (82)..(140): n is a, c, g, or t
  misc_feature (375)..(375): n is a, c, g, or t
  misc_feature (406)..(406): n is a, c, g, or t
accaatccctagcctctggntgtttgggccaatcttggggtcccctgccccaggggatttacccaagctcaatctgatcttnnnnnnnnnnnnnnnnnnnnnnnnnnnnnnnnnnnnnnnnnnnnnnnnnnnnnnnnnnnatcttccaaatctcttcccatgagtatcaccttcctggtttcctcttcccttttacagcactacagggtgaagggaatacaaaggtatggacctagggctgtgacttacaaacccagagcttgtaaccacctgatgtactcagtttccatgtcttaacattaaatttcaagagagaaaagtgagaatggcccagcttggcccaatcagttgtgactacagggtagccggggaggntggtcaaatggcaccaccaagagagatggantcctggggagctgtggatgggtagaaaccatccatttatcttgtataatagagaagcatagaataatagaacaaggttgaaaacccatcctccaagtaaactacagatcttccagaatgtgaaaactcacccttcacttataattttcattttatctgagaccaaccttttcttcta

SEQ ID NO: 463715 - DNA, 461 bp, Homo Sapiens
  misc_feature (372)..(372): n is a, c, g, or t
  misc_feature (431)..(431): n is a, c, g, or t
tctgatcattcacccggtggatccccggcagctccttctccttcccgagctgtggctcatgggccattggattcagagaccttgagctgggtgctggctgccctaaaggagcacgacccctccagcctggtgaccgggaggcagagaagtgcagctgtccttgacaaaggcccagcctctgctgcctcaggccagcctggccacaccccgatgccacagtcatctgccccgcccaggcataagcctgactcaggtgatacaggcgaggcttctcccatgggtcctccccttgtgaagaaagggtctgtgctgtgtaaccttctctctgcacagccattgtcagtgtggtttggaagtgagtgagcctcccgncactgctcagggggaagagcttggtgagcatgactccatgggcctcctgctggttgggngtccttcttctgattctcacccgcaggagc

SEQ ID NO: 463716 - DNA, 805 bp, Homo Sapiens
  misc_feature (552)..(552): n is a, c, g, or t
  misc_feature (562)..(562): n is a, c, g, or t
  misc_feature (788)..(788): n is a, c, g, or t
cttatcaaagacatttatttttgataaatttcagttttttcttaattctgcccagcagaatgaacaaatcccctagaaaagtacaagactaagccaaaagaccaactctagaaaaaataaaagtaaccagaaaacctacccctaaacttggtatctgcatagtttgttaaaatgaaagggagatttgttatggttgaatttattattgaaaagatggtggacaagattacagatcagacttggcatctaggcttgacatttccttaggaatgcctttagttaatcctgacacatatttttattcaattaactacaaatagtgaatgacatcatgcttttaatccactatgaaggagacaaaggtccttagaatctaacatgattcatgatgtataagatacatgcagaaatactgatagtagataccgctctatgcaggagacacagcatcacacagttcaggggtggaagagcacctggaaagtatgagcaatcaaggatttttttctgtagtagttagcttctcagttggcacttagagaatgtggcagnaattgcgggncgggggtaatatgtgttccaggttaggaaacaaaggcctagaggtaggaatgaacaggttgtttctccgatccagtgtggcttgaatgtaacattctcagtcagtgtatcacttcccatttcgtgacattagctaccgtttatttctgtcttttaacgtcaagctcttgacaggtattatttctaatctttaagacaaccctacagggtagatatcattagccttnatatagacaagaagatt

SEQ ID NO: 463717 - DNA, 584 bp, Homo Sapiens
  misc_feature (15)..(15): n is a, c, g, or t
  misc_feature (28)..(28): n is a, c, g, or t
tttagcttattttanagctggactttgnggactcaatgctttggtgagtgatagtggcatttccctggactgaatgtgccatattttaatttaagactcttttgtggataactttaatctttgttataacataggagaagcaaaataatttcttaactcagtggaagttacagaagaatactttaggtagagttcaaaaattctcactggggaatatagggtttggatttctctcggttcttaagcattctcccaaaatttggtatagagcctgattcacagtagatactcaataaatacgttgttgattcaatgaataaatgattttggctgtaagtaaaatgtccctgagcctatgacagggaaagctttgattttcctttgtttaggttagtttaatggagtcacactaaagtttataaagatcaatacaatatgaatggctaattgacaaacatttatatttcagtgttaggaaatatggtaagattaggaaaacaattaagacaatgatttatacagaattgactagttcaggcaatgaaaacttcacagattacagtttaacacgattaacatcacaa

SEQ ID NO: 463718 - DNA, 429 bp, Homo Sapiens
  misc_feature (40)..(40): n is a, c, g, or t
  misc_feature (53)..(53): n is a, c, g, or t
atagggtttaggaaaggaaaggggagattttggggaaaantaaatttaccccnggggggaaattagattaggaataaaaagagaagaaaagaaaatctgaaagtaatatttgtttaccattttagcaccctttactgaccatatattttaggattttaaaatacttaaatgaatttattaacaataaattatacagagaagatatatggaaaaatcagccttgtgaaactttccccacagatgaattgtataaattcaactggtatgtctatgacttagcaagaaaggaaagaggacaggggccataagctatagatcagtcgtgtagaagttgatcctgagcaaaatgcagaaagagatgatcatatgactggcttttttgcttacctgaattcttcctctaccagactatgagcaatcacgaagcgc

SEQ ID NO: 463719 - DNA, 654 bp, Homo Sapiens
tgcactagtctactcaaccatttatattattatgtgtagctaaagtaacctgcttttttccccaaacacaaaagaaaactagaaaactgttgaattgttttaaaattttagctaatttcaacaaatttaagatagcaaaacaaatgtatgtaatcataaaagtcatttgcatacgctgttaatttgtagccatctcaagaaataagggtaaattaaaattatattaagtcttataagtcttttgaatcctgttcttaggaattgtctaggtatcaaaaattatttattgattcaatttaatattggtcttaggtcttaaagttgctaaagtttatgattttaattaatgtattagttctttctgtttgtaatattaaaagaagttttataagattaaatactttaaaatagcatctgtttttacaattctatttaattaccatacaatgactctcttgatgagaggttcccattactagctccttttcacagatacgtaaactatctactaagtatttataaactatttagtactgttagaaatcattctgaaggcttcacaacttaatcaatttcattttgataatgtgttttatacattgtggctatttggtctggatctgtacaaagattcccttttgtactttcgttcta

SEQ ID NO: 463720 - DNA, 946 bp, Homo Sapiens
  misc_feature (448)..(448): n is a, c, g, or t
gaaggaagtcatggattcttatttatttattgtttgaaatttacaataatagaataaacatatcttgaatatatttctagagaaaacttcgcacttaaatgttcagattcttttctacatgtatgatgatgaagacagttccttaatgtgaagaattctgtctgttaacattcagtcaggttggaatggatctgaaaaccatgacatatgaagggcagttgaggaaacagtggttgggagatgatgagtaactggccttgattatcttcagggttgccatgagaaagagggagtaaagataatctgggctgctccataagacagaacagggtagcggggtactaggcagattttagcaacctaagaaagaactttctaacaaagagatatgcccaacagtgggaacagtttgcccttaacagacaatgagccactatccctggaagtnttgtaggcagagttggtgtgatcattttctaagggtaattgggggaggtagtgcctacatggggtgggagattgaggctatttttcttcttccaacctgaaaaggcattgttcaacaaacctgaaagtcattctacaaatttagtgttaatactaagcagataattaacaaatactttcaatactgcacggtcttccatgagcatgtaacaagtaggtagaacatcattgtcagtttgttctttgaatgttttaccagtcgatgtagacttgacattagttactacccaaagaaaatttaggttgtgtcagtatgtaaaataataccatatcccaacagaggtctagaatgcccttagaaatttcaaagactctaggatttgttctttcactacatcctgggccactatacttgtgtactctgttattgcaaacttagcttattttctccagctgccccctaactagacaattatctctaatctctttcccccataat

SEQ ID NO: 463721 - DNA, 734 bp, Homo Sapiens
  misc_feature (221)..(230): n is a, c, g, or t
  misc_feature (347)..(347): n is a, c, g, or t
ggcctttaatcatatcatctggtctgattaaataagttattctttctatctgtatttagtgtgaattatttcaatttaatagtcaaattcatacataaaaacctattataataccctataaaaatatcatcccaaatggtggggatattaataatattttgtccaagtaaagaatgagtgcttctctttaaataattagaaaacatgagaccacagaaagnnnnnnnnnntgtgggaaaaacaaatttactgtggtgagattaatgcaaagtcctgtatggaaagtgaggtaaggaaaaggttgaaaattatccatggtaaatgggaagtttattccataccacatncactagaaaattttacatgctgaagctctctgattgtcaagaggcaccaaaataaaatctttcaatagaagattcagttaactcattttcttctcacttttaatacttcgttgttttagacattttagaaaatacagaaaattataaagaaaaccaaaatcacagtccagagaacaccactcttaatgttaattgcatctgtttttctggacttttaaataattttatatgatggtatttgagcttctggatcaaatcaggaataatttttcaattatgtccatcagttttgaaaatggaattgtaatataatgtgctgttttgaagatgcagttatccattgggccatatctcagtgtcttcttatatcagtaaatatgtagacat

SEQ ID NO: 463722 - DNA, 579 bp, Homo Sapiens
ttaaaagggacaaaaaggaatttttttgtattttacattcagtccttttcatggaatagaatattttaaaacaactttggcttgaatttttaattatcatatttagaaatcctgcttttatgaaaatacagaaccctcactctgtggcttacagacaatagtagtatattatgtagggtagcctaaacaatggttgattattgtgtttgtgtatatttcattctctctgaattggacttgagaggcaaactttgtctttaaacctttagctgttgctttctggacctttgtattgcctaagggatgcaaacttcttggaaagtagaaccataaagttgtaaatgaacaagggaagaaatagaaaatataatttttgtcttcattaatgtttctaaagtagacagtaatttcacaattacagtatccactctcatgaaatttactaactacattaatgagcaaatgtgaagctgttttgctaatgtggaaattaaattttttaaaacaaaacttttttattctgtcaccaaagaaagaagcacattggttatgttaataaaaataatagaataaacagtc

SEQ ID NO: 463723 - DNA, 745 bp, Homo Sapiens
  misc_feature (53)..(53): n is a, c, g, or t
  misc_feature (434)..(460): n is a, c, g, or t
gtagatgtatcataatttatttaagaaatccccctgttgggaactacaattantttgttgtcatttttctcactgttgaatgtaacacagacatgaacagctttatgcataaatctcaagaatccctaattacttcctaatggcaaattcccagaaatggaatagttggctgacagagcttaaatattttcaagtcttttgtaaatagaagttaagcttcaaggaacaaacccaattggcatcaaaatcctggaatgttcaggacggaatctcagatcagctgagactccttcaggcaggcaccaaggctctgggtacacatggttcagaatccaggagtcagagaccattgcactggagacctagacacagcaggtgaatgtcattcctggagcaggagctgttgctgttgacttgtattgccacatgctggnnnnnnnnnnnnnnnnnnnnnnnnnnncatgcacacacacatcaagttgggggaaggggcaggaaactgggttcccaggtgttcacaggagcgagaaatctaatggcctctggatgaaccctgctgccaactgaggcagggttagacttgcagtgtgacctctcagacatgtgagatttttcattcattttatgctgcctctgcctacagcatctaccaatctcaaatatttacaatccactttgaaataatataagcaaatatgtttcttcacagttcttttctgctgtccttgtttttccctatctattg

SEQ ID NO: 463724 - DNA, 726 bp, Homo Sapiens
taaaatgaggacaattttgcccataaagtaattatatcaaagtcatctttttaaatcaatgatttaatagcctttaccatcattttatgcatatattagaagtgtgtaacattctctggacttgggtttcaatgtgtaacagattttcctagactcattgaatcaaaaagctattccaaacatattagaataagatgaatctattgccaaatatgaaactatacttggaaccaatgtttcaaataaaaactaggatattcatttatgcctttactgacagaccaaaacttgagacaaaaaccaaatttctatcaagagaaaaccattcccactgtaaacaaatgtaaatttgagttgagttttaaggtatatcattcttcttgagattatttcagagggattattacacattatcctgcttacaagaacacaaactgttttagactcatgcttggcataacattacatgctgtagaaatataatgcaacgttttcatagaatccaacttatttttcaagtttaagagttaacctaaagaatgcacattttaaactcaagctccataaacttatagctttttgtttgaccaaaaatatgtcaaacgtttgggcaaatagatataacatggtaaaagtagtttgaaacttgaaatattctttcttttttcctttcctcatctatcccttgctgtattcaaaaatggctagtttctcagtctttttcat

SEQ ID NO: 463725 - DNA, 479 bp, Homo Sapiens
agtgtaagaatccctcattgaccctgggccagcaagaatgcagaccatgaccccagcaagaagtcacacagcaggcagggtgcaggccactgtgaggagcaagtaaccaccctgtggcatgccaagtagagatagccttgtcaatgggaccaagaaggccgaggctgccagctgccaacatcctcaggagatggtgggagggagtccaactccagtgccgaggagtcttccttgcaggggttggaagaactgttcaggtgctacaaggatgagtgggaagatgcaattttggaggaaggcatggagcacttttgcaatgacctatgtgtcgaccccacagaattccgagtgctgctcttggcttggaagttccaggctgcaaccatgcgcaaattcaccagaaagatttttgatggctgcaaagcattaaatgcagacagcagtgacagaatctgtgcacggttctctagcctcttaac

SEQ ID NO: 463726 - DNA, 453 bp, Homo Sapiens
  misc_feature (19)..(19): n is a, c, g, or t
  misc_feature (40)..(40): n is a, c, g, or t
  misc_feature (53)..(102): n is a, c, g, or t
  misc_feature (126)..(163): n is a, c, g, or t
  misc_feature (264)..(264): n is a, c, g, or t
  misc_feature (433)..(433): n is a, c, g, or t
  misc_feature (440)..(440): n is a, c, g, or t
ttgggaggggaggcggagncagaggcagaaggggatcgcntgagcccaggaannnnnnnnnnnnnnnnnnnnnnnnnnnnnnnnnnnnnnnnnnnnnnnnnnatgacagagcgagatcccatctcnnnnnnnnnnnnnnnnnnnnnnnnnnnnnnnnnnnnnnggagatctaagaaaatcaaacttaattatttagccataggaaaaggagatagcccgatatatgtttgtaacaatggaaacaatttagtggttaactgtgtngctataaacatatggctggttgggttatgtttttctgcatatacattgcctaatatctggtgagcctctatcatgtcaggcactttatctgatggtacacactaatttttgaatctggtacacagtgtttaaatcttcactacagtgagtctgcaaagtaacttaaatnctgtgtncttgggtttctct

SEQ ID NO: 463727 - DNA, 573 bp, Homo Sapiens
  misc_feature (175)..(175): n is a, c, g, or t
  misc_feature (305)..(305): n is a, c, g, or t
aattctttttattcaaaggggtaggattaaacaatgaaagacaggtctatatttttctaacctgtgtctttgctgagctgaagcatgaaatatcaaatatttataataaagtattcatagttaagtacactgaatcattaaaatgttggaaatattgaaatggatgatccggtcncttattggagtccttgtgtgatacaggaacttctgtatttactgttaacaagaaaaactcaaaaggttacattcctttttagattcagagctcaaatggaattgatttaaaatttaaagcacttcctaantaggacatttcagcattgcataaggttaaacatggagaaaaaaataaatacatttatgtttttctattaatacttactctaagttgtttactagaactcagaataaatgtctctaaagatttagttttaatttttggctgcttagctcttacaatgacatttattctgagtaccatattaaatgtgtagtaataattatatgtatttttcctagcttgtgatatgaggtatcttgcattttggcatattattctgattttagagacag

SEQ ID NO: 463728 - DNA, 376 bp, Homo Sapiens
tgctgtacaacttctgttttatttttgtgtgctttttttataggatataaataatgacaaaaattacaaaatttataactggaagcccaagcttatttacacatatgcttctgtttcagcaaagctcctattaactttgctcctatacaattgcctcctggtaccatattttagtgttatttaactctcattttgctacatacatatcaacagtgaataggcaaaatatatacaaggaactgttcagttcaagtaatttaatattgtattaaaattcttcaacactgaactaaaacccgtatacatttgttagtttgaaataaaatgtagttattcttcaaaactcaccaactggatgaatggtaactggatcatc

SEQ ID NO: 463729 - DNA, 499 bp, Homo Sapiens
  misc_feature (338)..(338): n is a, c, g, or t
ataaagaaattttattgcataattcttgtatacaataaacataggaaaagggtttttaatgaaaattcatgtcatttttcaaaagtgttgaactgtctggagaaaaattattacaaagctatctaaggcaaaaataatatttaaccatctaaacaaaagataatcccctttaccatttgttttgtatttaaagcaagacattttaaacacaagtaatacggagaagttttcaaattgctacgtcatttgcattaagaatttaaatgcatctaagaagtgaagagtttaaacacatgggaatgttctctagtaacagatattgctgctttcttcagatnccattctggcttgaatgtaaggctatactttttggcacaccaacagaattctgcatcttctaatggtacagtaagagctggagtgcagagagggaaagtcccatgcacttcctatgttaaatggcataactcccacagatcacatacaccttgccatattg

SEQ ID NO: 463730 - DNA, 461 bp, Homo Sapiens
taaaacatgaaagtgttcacagtagtttattagtattggtcatctgttagagaagaatagtggaggaagaaatgcaataaataatcaatgtatcagttagctttttgctgggttgttatcatgctgcccaaaacttagtgacttaaaacagttaacgttttaatccattattctggtagttgtttgggatggctgggatggatggcagaaccttcctaatctgggccagtgtattattaacctattactgtgtaacaaattaccctaaaatttagcaacttaaaacaacatttattgtcttgcagtttctatgggtcaggaattccgtatggctcaaaagatgcctctggctggaaggtccctccatgagtcaagctatctggcttacagtcaagctatttggctgtgggtccctcatctaaaaggctaaaccggggggaggatatgcctccaaagttcac

SEQ ID NO: 463731 - DNA, 324 bp, Homo Sapiens
taattttctgtagagacaggatctcaccatgtaacccatgctgatcttcttgaactccaaggctcaagggatcctccagactttgcctcccaaagtgttggaattacatgcatgagccaccgcactcagcccctcaaggtaatttccaaaaattatgcagtgcaaagagttttatgtattaggtatacatttttcataatttacacagtattttcacatacattatctcatttgatcctaaatggactttgttaagcagttattatccacatattccaaataaggaaactgaagcccagagaagaacttgaaaatcctgttctt

SEQ ID NO: 463732 - DNA, 237 bp, Homo Sapiens
cacaatcaactctggctttatttcatgtaacagaagcagcctgagaaaaagcataaaggattccatatgtttccacaatgagcccactgactcagatgatcaagccgatatcagtgagcaaaatggagtactatccctcgtgacccatgagaaattcgctctataaaaacaaatttatcctatagtagtcctcctcatcatcctcttgcaaccaagcaggtaatacaataaaaatac

SEQ ID NO: 463733 - DNA, 551 bp, Homo Sapiens
  misc_feature (31)..(31): n is a, c, g, or t
  misc_feature (382)..(382): n is a, c, g, or t
  misc_feature (512)..(512): n is a, c, g, or t
ttaccattattagggaggagatggcatatgntaaattagaggaaaagttggggctttttgtagccctaaaggatttattcaatccatcattaggtaattctcaggtgatttataacttaaaactgaaaacttccacagttaatttgtaactgccgcatttacaaaaaagttctgggtaatagaacctgttaaaaacagactggtgttgcaattaggcccaatactcatttatttaaatcacctaagacatttgcaaaatttttcaaagttaggaaaatgcagttattaatatggcttcattcagttaaacctatattctgcaaaatattcctgttacacacttaagtacaactggatcagcaggattacttgcacagaaagntgaagacttaattttcacattaaaattatacctggtttcctacttttatatctcaaaatattttgggagaagaccattaatggtcttgactgtaacagtttattgcatttttatgcctcatttttcaccncagtacgtactctagtttggagttttaagttctactttt

SEQ ID NO: 463734 - DNA, 461 bp, Homo Sapiens
gtatttaaaaaaatttatttgtgatctgtacatgtgataaagtggggtagacctttaaagccaacaaaacaaaaatccaaagtaaaaatgtataaatacaatatatattttcttacaaaaatgggagatttacaaaatatacatactgtacttatctctattttacaaatttcacatgcacttaaaagatacagcacaaaagatgccacaacctgtgttggagttttaaaaatctgacagatgagatagttttgaaggttgaagaaacacaagatcgattttaactttaatgtaaaaagcagttccactcaagtgaacattacatgatataaagtaacttggtacactttacagttcccctctatggattggccatttaaaaactggttctggagaaacagggatagtgttggcaagattgggggggtagtgtccaaggtggggataaagggttagctccc

SEQ ID NO: 463735 - DNA, 452 bp, Homo Sapiens
  misc_feature (199)..(199): n is a, c, g, or t
  misc_feature (431)..(431): n is a, c, g, or t
tttttttctgtttaagtcatttatttcaatacaggcattgttttaaatttgcaccttgtctttaacacatttcataaccagagaacaggtctgagaacaagtacataaaaggattatttgacaaagttttaacaaaagtgcttacagcttatttgtttcagatatacagaactggccagtcacaaaagagcccactaangtggaaatacagccccaaacttgcctgggaaagtaaaatattttacatatttacactgtacatttaaatgggatattctgaagcattattattatcaataaactctaagcaagaagttctcttaaaccctctggcacttaacaaagaatattaattttatggggctatggagttttacagtttgattcccatctttgccataacctaaatgggatttttacccccctccagntacacatatttacctccctac

SEQ ID NO: 463736 - DNA, 458 bp, Homo Sapiens
  misc_feature (36)..(36): n is a, c, g, or t
  misc_feature (41)..(41): n is a, c, g, or t
  misc_feature (442)..(442): n is a, c, g, or t
ttattattacccaataaacctctaggccaggaggtnctctnaaacccctctggcacttaaccaaggaatattaaattttatggggctatggggttttaccagtttgattccccatctttgccataacctaaatggatttttaccccctccagtacacatatttacctcctacacaaagtagctgttattagccttatcaccaaccaaacctttgttagtagcagttggaattttgttggcatcaatgtatttacaatgtaggagtaaattatttagaggggagtctctaaaaattaaaataacttcattaaaccctattttaaacagactttacagtataaaatttatggttatagaaatctagtatctaaacaagtttataatttataaggtatttattacgattggttcccctatgatttactccatttacatgaatgtntattttaataatgcgc

SEQ ID NO: 463737 - DNA, 618 bp, Homo Sapiens
  misc_feature (413)..(413): n is a, c, g, or t
  misc_feature (534)..(534): n is a, c, g, or t
  misc_feature (542)..(542): n is a, c, g, or t
  misc_feature (571)..(571): n is a, c, g, or t
tccatttaaaagccctttatttaaaaggaacaaagataactgacaagcgaagtacagagacatctcaatgaaatttccaaagaagaaagagaaatcagaggctaaagcaaatgcgaactgggcttgatggaacaggccagcactttcctccccctcaaaaggagagcagataaaagacaaaaagaaagaggtggtggtcattgggtctgtgcggtaaggatcacagaccaaaccaaattctaaaagtccacagccactaaactttaaaatggccggggtggctccggtgggggaaggtgaaggagaagctagatcagtttgggggaaagagatattggaagttttgcccctgccttggaggctcttccccaaccttttgataacaggtatctctgctttgggcttgggggtcntagggagccccaggaggatggggcaggcaaggcatttcgtttctggggcacatctgagcccttccaaggggctgggcaccacaggcttctgtcctacagccacgttttcctacaatggggncccaggcngggccgagttcaagccacgatcccagacncttaagattttgggtcaaaagccaggggactttaagctcacactcag

SEQ ID NO: 463738 - DNA, 676 bp, Homo Sapiens
  misc_feature (520)..(520): n is a, c, g, or t
  misc_feature (525)..(525): n is a, c, g, or t
  misc_feature (561)..(561): n is a, c, g, or t
  misc_feature (577)..(577): n is a, c, g, or t
  misc_feature (597)..(597): n is a, c, g, or t
  misc_feature (613)..(613): n is a, c, g, or t
  misc_feature (638)..(638): n is a, c, g, or t
tcaggatattagtataatctgcattctaatatatttcataaaagaaaatattttatttccattacataggcaaagtttgttttttcccatatcaaagccaaatattatttgatgtactgaccaataatatatgtagaaagaataacagcaaaatatcttatttctttatataatttaatatataccctattaacaccagtgtgcagatgtacagtactgacagtatactaaatagttagtattaaaaattactttaaaaatgttttcaacattaggtactggtggaaccagagctgttattttgtacatcatatcatttatgtgttgcaaaggaaaagtaaaatttccagtagcattagaaaaaaatgtactgatattttatggtagatatacaaaatctcatgacatctattgaaaacctcacaattctattgtgcactaataaaaacaccttttcaaacaacttgcacttatactggagttcataaaggctactataaaaatattgcaaccgcattanaaacnccatatccgtacaaagtcttttggttttttaaaagnccaatttttaaaaggnccggtatttatataaatggnggccataccttttagnggacccggactaacattttggttanggattatccggattttaggaaacctaggttaatggttt

SEQ ID NO: 463739 - DNA, 744 bp, Homo Sapiens
  misc_feature (685)..(685): n is a, c, g, or t
  misc_feature (692)..(692): n is a, c, g, or t
cttaaaaacaaattgtcaaaagttttctttatgaaaaatattaaatcatcaggctttttaaatgatatgatttttagattaagacaagttatgtaacttctggacaaccatgaaataagatattattactgataaacttcatagcaatgttaaaagaccacattttgaaaaatacaggcatatcttggagatattgcaggtttgcttccagacaactgtaataaaatgtttaacacaataaagggagtcacacaattatttttattttccagtacctataaaagttatgtttaatctatattatagtctattaagtttgcaatagcattatatctgacaatgtacatactttaatttaaaaatattttattgctaaaagatgctaacgataatctaagtcttcagtgagtctttgttgctggaagacagtcttgcctcactgttgatggctgctgaatgatcggtgtggtggttgctgaaggttagtgtggctctagagatttctttaaatgagacaacaaggaaggctgcaacatcaactgactcttcctttccgaaagatttatctgtagcatgtgttgctgttggatagccttttacccacagtggaacattcttcaaaattgaagtcaatcctctcaaactctgctggctgttttatccaactaagtttatgtaatattcnaagtccnttggttggtcatttcaacaatgggtcacaggatcttcaccaggagtagtttc

SEQ ID NO: 463740 - DNA, 426 bp, Homo Sapiens
  misc_feature (239)..(239): n is a, c, g, or t
  misc_feature (249)..(249): n is a, c, g, or t
atacaccagtgtcttttacattcatttttcagaagtccactttataagagcacatacgttcaaaagcaaacagagaataagaaacataagcttcagaatcattaatttatgaggcattcaaaaatgacaccactaggaaaaagggccttagaaaacatcaacttattaacttaatcaactgattttctttttaaaaacaacaaagtataattcacaaaaatatatatattaccaaaaangtggggaaanctgaatcttaagtaactggttttgaatggtcaagagggatatggaaaaagttaactagaaaagtgggggcgaggcagggtgtgagggaaggggaacaacaaaaccgaacacatcaatgtcaaaggctaatccaagacgcagtttttggctcatgtacctcggccgcgaccacgctaa

SEQ ID NO: 463741 - DNA, 261 bp, Homo Sapiens
ctattcaaaatcaaatcggagatttaatgtttggtacaaacccagaaagggtatttcatagtttttaaacctttcattcccagagatccgaaatatcatttgtgggttttgaatgcatctttaaagtgctttaaaaaaaagttttataagtagggagaaatttttaaatattcttacttggatggctgcaactaaactgaacaaatacctgacttttcttttacccccattgaaaatagtactttcttcgtttcacaaatt

SEQ ID NO: 463742 - DNA, 608 bp, Homo Sapiens
  misc_feature (41)..(41): n is a, c, g, or t
  misc_feature (43)..(45): n is a, c, g, or t
  misc_feature (47)..(50): n is a, c, g, or t
  misc_feature (87)..(87): n is a, c, g, or t
  misc_feature (154)..(154): n is a, c, g, or t
  misc_feature (182)..(197): n is a, c, g, or t
  misc_feature (238)..(238): n is a, c, g, or t
  misc_feature (408)..(408): n is a, c, g, or t
gtgtgagccactgcgccttggcccaggacttagtttaatgngnnncnnnnagagagggaagggaaacaattaggtcatgtatgtggngtggaagaaggaagcccagagcagtaagtagatcaggataggcaattggatgagagtcatgggtagntggtatttggccttttgagtcccacaannnnnnnnnnnnnnnngtacaggcattttcagtaaatgccatgtaagcagtgcagantgccacaggagtcactggtcagtcgcttcccacccaaccgtttccttttgcagatactgcctgggtctgaacctgattaaagttctacattataggcttcctactccaaatcctaatgtttattctaactagtatcagtctgtttcagtcaaaatacaaactataaccantggacacgctatttttagaaatgttgccaaaatcctttcttttgatctatgattatgtttcttttaaattttaaatgtattcctaggagtgaacgaaagcgtttcttcatagtgttttatggtcaccattagagcccaaatcctgctttccctatagcaactgggtggttgtgtttttattaatctattaatttatttta

SEQ ID NO: 463743 - DNA, 307 bp, Homo Sapiens
ccctttttaagtaattttacactttagtatctatttcagaggtcatatttaaaactatttattagtgactacagtacatgagacaacaaggttactgagattacaattcttcaaaggttaatgataatgtggtttatactgtgccttaatagtaatgctatttaagatatttatttttaagttttactatgctgcactctaaagaaaggaactttagatgtgacactgtaaaattatgtattcatctcatggcataaattatttagtaagtctagatgtagcgtattaaatattaacctattcaact

SEQ ID NO: 463744 - DNA, 423 bp, Homo Sapiens
  misc_feature (20)..(20): n is a, c, g, or t
gatggtaccatatttttttncagaaaaccttttgtgaagtttaaaaaattttacctcaaagatatccatgctttgccacatttgtaaagaaatactggccaaaagagacattttaagatgctgaattacaaatgcatactgcatgttttcatgaggtagttgttcaagccattctacatttcctgccctctacctgatcattttgattcaatggttaaaattagttgaacgcagccctgagcattcaagcaatacacagtgccatttttttctcccgtaacctcaggccgcactgcagataacgcaaagcattacacgctccactcagacttgttggattaactgattgattataaagcaggctagaagttcattctggtgtatatcactccataaaattagtgatcatctaaaaagagtgat

SEQ ID NO: 463745 - DNA, 484 bp, Homo Sapiens
  misc_feature (50)..(50): n is a, c, g, or t
  misc_feature (317)..(317): n is a, c, g, or t
tctttgccatggaaaagggcagtggctcctgagtgttgccatggtgatgnaaactgacatggcacactggtgggcgtgtccaatggaaagatgcttccgctctgtccctgttttggctagtcctcaatttggtcctgtgtctgagccctacctccagagtcaagatctgtttcttacctccaagagggtgagggaagccccttcagaggccacctcacccctccacccaaccacactgtctataaacttggcctggcccccagctctgcaagaaggtgagttaagttggggcggcctcagggctccttggaggagcnaaccctgatcctggctccatgctcctgtccaggtctggggtcagtgacatatcagagaccccagggagacccatataccctgatgacaagtcccaggtacaacacagagacccaaaccactgctgaatcaccctgtgacccttgtaggtattaagctcttgccctgt

SEQ ID NO: 463746 - DNA, 406 bp, Homo Sapiens
  misc_feature (241)..(241): n is a, c, g, or t
gttttatgcttttactttcccaattgttacagatgctttcaatattaaatctgttgttcttgtacataatgaagttagttttagcagataacagttatcaaatttttggtgaatctggtttggattgcccttccaatacaaaattgatgctactggccagccaccggtagcctggcagtaattttctctgtgttggtgatggactgtgctgcctgagccaccgacatcccctctcacattngcccactgggacaaactgcaggcatttgcaagatagttagttagctaagtttaggagtagagtctgtgacgaccggaacgtatttttttctttgtgtgaaaattaccagcttataatgctattacaattttactccatatccttaaaaaagtgcacaaattttac

SEQ ID NO: 463747 - DNA, 727 bp, Homo Sapiens
tcactttagcatgctctactggatatttaatatacatttttgtattcattataaagtactcttacttcaatagtaaaacagacgttactttgtttttaatcaggaattacaagtaccagtctctaatttatattatatttagatggtctgattcacacaaatcctgaagtgacaggtcaccagatccctggcacctcttaacagtaaaagtgacatcagaaacgtatagtaatgttcttaccaaaattaataaatgcttagatataagaacgactacttaaaacttctaagtcacaaaacaccatgctaaaggtttttatcaacctcttctttacagaacataactacttctcttatgtgggggtagacttgtgaataggccaaaatttcataggaaggtgggacatggaccttccccctccttattaaaagtcattttggtcaggacttatggtgggctatatggtgtttcaaatgctaacaggaaacaaatgagtcaacttatgcacatgaaaagcaaactgtgaataaagaataaggaaggggaggaaacagttcaataagttcagatacgacttgatgatactgtcacaggctgtcacaggcctcagtatcttctttatgtcctaaagaaattgagccaccaacaggaaaaaaggtcacctcacagagaatgctgtgagatttttaagttgctagactcctttccatcttctccttctcctca

SEQ ID NO: 463748 - DNA, 428 bp, Homo Sapiens
aatttttaaaattaaaaatgttttattggctattgctttaatagatttactacaataaaggaaaggaatatttttctcaaatgtgctaataagaaaaagacccaggaaactgaacgatattggacacagttttcagtgttttagacataaataaactcatgaatttcatatggattctggaatatttaccactactcccctaacgatgcatttagcatagaacaaaaatatgaacatttgaacaagtccaatctaacacatttcaaaacaatcagatctttggaaaactgttttccataagtaccccttgccattcatggaagagttatgaggatgcccatgaatttattcatggacactcccatactaagaaaaagaaaaccatgtagatgggtaatataatttgactatttgttcccgcccaaacc

SEQ ID NO: 463749 - DNA, 465 bp, Homo Sapiens
  misc_feature (403)..(403): n is a, c, g, or t
ttttttttataattaagcaatatgtatttttccctttaaggaaattccaaaaattatatcgttccaaataaaaaaatcatctccagagtcctgacgcagcaaccattacattcccagtaatggaaatgttaagtcagtccgtgctctgggagaaatcccacgacagaacacaggccaggagaccgggcctagattccggttttcgaaccgtgggggcaaacacggaggctgcaaatccatccccagtccggcaagattctcgaacatgtcgggagagggctgcataggaacttcaaaaacgagtagcggctcccctggattcagcgtgagggggaaaccgcggggcaggttcgaaactcaggagtccgacgtctgaaggagcggggaggctgcttccgaggangcccggggcacgacgggaagggccgcgcggcaaggcaagccctcctcccggcagccttcggg

SEQ ID NO: 463750 - DNA, 417 bp, Homo Sapiens
aaatctccttcgattttggctgtagaaaatgaatacatttccacgaggaaatattgtagataattggtgagttacataaatttataaaacattagttcctctttctgcagggtaaatttctgagagtgaatatctctgttctgtatcctgttatcttgatttctgagtttcatactaaatttcatgagatgaaacttggtacctcctagaagtttttccctatgactaattgtttactacattatttttaatagaaataatacaataataaatttattatctgaaagaaatagatacttttgctactcgggaggctgaggaggcaggacaatcgcttgaacccgggaggcagagtttgcattgagccaagactggccattgcactacagcctgggtgacaaagtgagactctgtctc

SEQ ID NO: 463751 - DNA, 664 bp, Homo Sapiens
  misc_feature (240)..(240): n is a, c, g, or t
  misc_feature (325)..(325): n is a, c, g, or t
catttttccacttcttttcaccttaatcctcatttttcttctgcatgttcatcctcttgttatgcataatattcatgtttgttctttcatgtacattcttcttctttgaatagaattggtgctattcagcccagacagcaaacaatgggtcaagaatacagaatttaaataaaagaaatgataaacttgggcttcacattatttccaattaggatatcaccacttcactatatcattccntttatcccttggcattttcatgttttacacgaggtcagtgtggttcaatgtgatgctgcagcctcacagggttcttggtgatgtnggactttattagtctgtatttaattaagaattaacacttgttttccttcttctttctaccttttctcacgttgaagtcatttctcctggtcagaactctgggcttagaagaaatcatgtgcatattcctgaactgtatcctttggccccaatttccaattttgtttagtagagtgtgatgaattagtttagagatgcttcctacctttgcttaacttctgtacatgtcttcagactttattggtcacagcaaaaaataattgttaaagcctttcaagagacatctgtttgctactttatttctaggaaaatattgatcagttgtaattgtcatccttcc

SEQ ID NO: 463752 - DNA, 453 bp, Homo Sapiens
tcacaaatctagtttttatttagaagataagattcagatagcccatataaaaactgctgttagataaagctttcaaagtacatgaataatgagtttgtaatgcaaataattattttcatttcccagtgcttgtcagatataacaaataaatgtattgggtagcaaatacaaatgtgaataccataacttatactcaaatatgattatgatcccagagcaaggaggttcagtgcataaaccagccaacgattatgctcacaaaatcaacagcaatatgtaatcagatggacccaggtctcaatcatctctgctcatgggaaacaaggtaacacacccataggtaccctccagtcttttataaatcagtagttccatcctctctcttatccaaagcctttcaccagagtgtgtgggaaaggacaggatggactaactggaagccctcctggtccc

SEQ ID NO: 463753 - DNA, 233 bp, Homo Sapiens
tctaattgcccaaatagttaccagccatgggccaagtaggtacctgcattatacatagaatttctacaaagaaaatctgcagttaaaatttgctccaggatgtattaaatgcccttagcaattcaagggccacacccagtgttgctataggaaccaaagcacagtaccttgacaacagagttgcagttgtcacaacagccctacacaaactttacactttgaaacagcagcca

SEQ ID NO: 463754 - DNA, 393 bp, Homo Sapiens
  misc_feature (21)..(21): n is a, c, g, or t
  misc_feature (155)..(155): n is a, c, g, or t
  misc_feature (169)..(169): n is a, c, g, or t
ccctggaaaagtgaacttgtncaatctccatttaccattttagtgcattttttgacaattgtcacatttttaacaaaagtaaggaaaatgcatatagcactaaagagtgtttcatcacatccaaatgcttaaaggggattaaaaaatatggagcnggagaaccaaaatncattgtgaatggatgaacctgttgtaaaatgaaaaaagtccaggcaaagttgttacaagtcttttgtcactttgatgagtcacagaaaatgaactttggatacctgtccactttaagggttttttccttaatcttttgcatgtaaacatagtgctaacttcagtactaagataccaaaactccgtcctggtaagcaacatcctgtgtagttgccatgatttcca

SEQ ID NO: 463755 - DNA, 158 bp, Homo Sapiens
cagactatgttaaaatattcagggaaatctctcccttcatttactttttcttgctataagcctatatttaggtttcttttctatttttttctcccatttggatcctttgaggtaaaaaaacataatgtcttcagcctcataataaaggaaagttaatt

SEQ ID NO: 463756 - DNA, 462 bp, Homo Sapiens
  misc_feature (33)..(33): n is a, c, g, or t
  misc_feature (42)..(42): n is a, c, g, or t
  misc_feature (419)..(419): n is a, c, g, or t
  misc_feature (444)..(444): n is a, c, g, or t
ttatggaatatccaggatgaaaggataatgganatttggtantaaggatccagcactaatacatataataagatcaacatttttacagaattatttctttagatttagaaagaatacacatttcgaacacttgaaagagggctacacatgtaagttatcatctgccagtatcaaaatgatgtgttgaaaaccctgaggaaatgagttaatgaagtcacacaggaagagtcaaagcaaaagaaaaatagttataataaactaggaacacaatttctttttcagtttctatgtttaatgcatataatacatctaagaaaaaattttctgtttagtaatttcttaaaaatgttcatatatttaaagagaaaaacaaaatcagctacaactcatcaatacactttgaaacttcatgtaacaangtacatggttgctaaaccccagacngaatagaagatgtgtggt

SEQ ID NO: 463757 - DNA, 404 bp, Homo Sapiens
  misc_feature (28)..(28): n is a, c, g, or t
  misc_feature (88)..(88): n is a, c, g, or t
  misc_feature (166)..(166): n is a, c, g, or t
cccccccatgcattggccagttattaanccaccatgggtaggtgtggtaaaattattttacctccaatgggatggaggtccagccacnggttgggaaaaaaaatgggggaaagttaaaaccacccaccagaatccatggggatttttaggagctagggaaggtccnttaggagatattgtttccaagtacctttagtataattggaacaaactgaggcataaaaattaaccagcttgcctgtctaacataccatatgtcttatttatcctctctctttccacaagattgtaagttccatgagggtacagatttttctgttttattcactgctgcataaccagcacctagaacagtacctggcaaatagtatatggtgaatatctgttaaatgaatgattattta

SEQ ID NO: 463758 - DNA, 358 bp, Homo Sapiens
caggtactaaaggtatttttaaaatagtatccaaatcaggatgtaaacagatgaaatttatagccatataaatttaatatggattaaaatacgtaagaatgtaacaattagagaaattaggggaaaaaatgacaatcacaggactacatttctacaaaaattctttgacgttaagaaggttagaaaggtgttaaaagtgctgtcattttcagtatgacagactgaattatctatcatattgctagactgaattatctgatgtcaagagaagtaagcgtttagttaagggcttccaaagtatattctattcatagagtatttctccaacattatttttcccaggctgaataagctgtcc

SEQ ID NO: 463759 - DNA, 356 bp, Homo Sapiens
  misc_feature (232)..(232): n is a, c, g, or t
  misc_feature (248)..(248): n is a, c, g, or t
  misc_feature (268)..(268): n is a, c, g, or t
  misc_feature (315)..(315): n is a, c, g, or t
  misc_feature (339)..(339): n is a, c, g, or t
ggttacactaagttttattttaaactaaaattcaataaacagtgcagccagggaagatctgctaaaccatgccgttatttggaaaatcattgcaatatattaacaactgcttccttctatgatgtttactagatggagaaaaatactccatacctatattgcaattttatttttatctagaaaaagaaaatattaggcttcagacccaactgtgcaaatttcatttgctttnccatctcttactactnacctctggtgtcataatttnaccacgtaacatacaactcctgtctcttaaggcagctaccatatggngtttatgtcagactggatatattnacctaattttgtgaaat

SEQ ID NO: 463760 - DNA, 596 bp, Homo Sapiens
  misc_feature (479)..(479): n is a, c, g, or t
  misc_feature (562)..(562): n is a, c, g, or t
attggtacgtattactttattgcagtgggcacttcactgtatttgaggagattcacctaaacagagcagctccactacttacaagggaccataaagcattactccattttggcataaggttgagattttttttctgaattttcagtacagtacttttcttctaataacagcagttgactgacagctgttactaaaaaaacttgtatgaataaccttcaagtgcagtttcataaagtaagacggaagatcacaactaatgaatggaactgtccttctggaacacaaacataaaaaacttgcatagctatgtctaaagaggttttaaggcacttaatcgatatttcagtgtcgacaaagtgtcggtttttttctgtttctttaactgcttaaagcttttctggatacagtcactagcaagtaccatgggaaaaattagactggcagttattatcctttggagttcagaccctatgagtccncaagttgggataccatgatgacattccagtggtttaaattttcagggtattacacattcgagatttcaaacttctctagcccnttccctcatgcttccatccccacaactggactag

SEQ ID NO: 463761 - DNA, 429 bp, Homo Sapiens
ctgactgaaagtttcttttattaacaggctttttagtttttggaccttacaagaagcttccttaggcagctgatacataacatgtgttttcagggtctttatcttaatgcagactttctcggtcatataataactcacttgggttttcatcccattaatatgacctctttttttctggctcgtttgagttcaagttccttaagccatccatgagtttctggcaaagtatttggtctccactttatacacctgttttattttccaagggcaatgaaacgttcattatatagtaacacacaataaataactcactgttaactctaagagtaagaatgggaagggtgcctattgcatagcaattacagaaaaatcaagtgaggcgcgggataggaacggtacgtacagcaactccacttaatgggattttcc

SEQ ID NO: 463762 - DNA, 278 bp, Homo Sapiens
tgacaaaaataatcttgtttttattttagattcagatttcattactgcactcaaacgactacaactgggcttggcgttattatacaatccaaactgtttccatcagaaacgctaagactcagtgtgcaatgattgttattaataattagctccttggtttcttgatagaaaaaggctatcaacaagcatttgtttatccacaacaaaaagtataattagcttatcccacttagtaaatcttgtatgcatgccaactcataccaaactgctacttttac

SEQ ID NO: 463763 - DNA, 473 bp, Homo Sapiens
gatttttctcccaaccagtgcccagttttcttattcccaattttgagagttgacccaaaattgtgggctatgagggatggtttttaaaactcctctgatggttcccgagggcacaggagcgttgaaaaggagggatttctttggctattctgaatttgtgcattgctgccatactacttcccaacacgaaccagcaagaccaccacaccaaggagtgggtaacatcttgatttaatttacaaataaaaagccaaaaccctcaatgcaaaggaaaactgcagtttacacttattctggagatcatttttaaccacagaaaatgtgcccctgtagcatgtttttaaatggcaagtgctatgattgcccagacatccataaactgcttgtatggagtaagaaattcataaatgaagaaagatttgttttctgtcttgtttctcctaggtcacgaacaggatatttcccacaaaatg

SEQ ID NO: 463764 - DNA, 754 bp, Homo Sapiens
  misc_feature (392)..(408): n is a, c, g, or t
ggttatagggatttttgtgtcctgtttaagaaatctttgcctaccttaagatcatggagacatccttgtattttaccttctagcagttttattattttaatatttacatttagatctacaatccatctttaagtcatttctgtgtgtggcgtgaaatagggtcaagagtcattttttgttttcacatgatcatccagccgaaatgacccagccacactactttacagtgccacctatgtcatataacaagcacccagagatatgtgcatttgtttctctactcttctggttccattgggctatttgtctatccatggggataataccaccatgtcctaataattggagatttatagtaagtcttgctatggggctgaattatttttttaagnnnnnnnnnnnnnnnnnctatccctactgatatgtcttaagtcaccccatctaatagccaacagtctaggggcttccacagcagcattgttactaacagagcacctggaatggttcccttacactgctgctctgaaggtcaacctgtcaagagcaggaagccaatttgaggaagcacagagaagacaaagaaatggtccttttacaaggccagtaatactgatgatagacctgatctcacaggaatgttttgagaactgaacaaaatactatatgtaaaatggttaatacaatctgtggcacataaacactaaacattaacttttattattattttcactttatattcctcctatctagcact

SEQ ID NO: 463765 - DNA, 232 bp, Homo Sapiens
aacacaggttttactgtctagaattttgcaacatggctaatggctaccacctggtcaccaaattaacacttcattcattgtaaagcatttggggattttcaagtgtgaaaatatttcatcagtgattagataaacaacaactttacgccagtgccatgagtcttgtaattcttagccccaaggaagggaggataacagcctaacagcaattctcgaattggcacaaataatt

SEQ ID NO: 463766 - DNA, 276 bp, Homo Sapiens
  misc_feature (246)..(246): n is a, c, g, or t
gaagctttggctcccatctttccagttatccgaaatgtttgtcaaagtcaaattgtattaattttacatgcaaacattctataatatgcatactaaaaacaagtaaaactacaagttagttactccttttatctactcgcttacaaaacacataatagctaatccttcaaatagacatgggtttgtaagttttctactttattctttattaaaaattattttaaatgtttaaattttgaaatacanatatcttagttataatgtatcttaattctg

SEQ ID NO: 463767 - DNA, 377 bp, Homo Sapiens
  misc_feature (24)..(24): n is a, c, g, or t
  misc_feature (347)..(347): n is a, c, g, or t
caaaatagttagttggaatctgcngctttaaattttaaaaagaacaaaattgttccaatactctatataactgtaaatgtcttatattttttctaacaagatttcaaagatagtgctgtaacctcacctcacagggagaaaaggagataactccaggaatttcatgcccatgccagagggagctgcagggaccagcaatcactggtaatgtccaggtggacatctggagccacctctccctcttgcttggtccaggccagcatcaacactgaagcaggtaggggttccaggagcattgtgtcctggcagtggcagcacacagtgtctgggcagctgacaacgtgganctttacagggtagattgtccaggcatgatc

SEQ ID NO: 463768 - DNA, 401 bp, Homo Sapiens
  misc_feature (152)..(152): n is a, c, g, or t
  misc_feature (248)..(248): n is a, c, g, or t
  misc_feature (314)..(314): n is a, c, g, or t
  misc_feature (335)..(335): n is a, c, g, or t
  misc_feature (344)..(344): n is a, c, g, or t
  misc_feature (360)..(360): n is a, c, g, or t
  misc_feature (370)..(370): n is a, c, g, or t
  misc_feature (389)..(389): n is a, c, g, or t
aaagttataaaacaaaatttattatcgcaatactttctcataatcgaattgcatctctttggtaaaaataaactttataaacattttaataatcagagattagatacaaaaactaagtatttgtaagttgtttttaatatgagcaaagattnggcaactgagaagtggttcacttgtgactggtcatctactggcagttataactcaaaccgggacaatttttatgctacatcagaaaagaggataangggaacagtttgataacaaatttgttgaatcagaaagcattcttacactttcatttaaaaataaantaaatagttacaatccaattnggcaatttntaccattttttatacncccataatgnatgggccaacataaatacntttaaaaattaa

SEQ ID NO: 463769 - DNA, 460 bp, Homo Sapiens
  misc_feature (68)..(68): n is a, c, g, or t
  misc_feature (399)..(399): n is a, c, g, or t
  misc_feature (449)..(449): n is a, c, g, or t
taatgaactatagggatattttgatggactgttctttggaattaacaggtccacaagccagtggtttntctggaaattactgaaagctaattcttcagaagagtatgttctagctaagggtgtactataaaggtggtaaccagtagctagcaataacaagcttgttgttggtttcactgcagaaaatttaccacttgcatgtacttactgcattggtttaccctcaagaaaaagaaatacagcctctatatacctcttacacccactagatagaactaatcaggatctcttttgatcactggagcagataagcaggaaatataactaaccaaggatttaattttcacatattatctattaattatagttttttcctaatctaccccttggacttaatcntaattatttttcagtttcaggggggcttcctgaaaatggggggacaaggntacattttcac

SEQ ID NO: 463770 - DNA, 535 bp, Homo Sapiens
  misc_feature (422)..(422): n is a, c, g, or t
  misc_feature (485)..(485): n is a, c, g, or t
  misc_feature (496)..(496): n is a, c, g, or t
  misc_feature (520)..(520): n is a, c, g, or t
aacaatggaacaaagaaagagtttatcaaatgctttggaatccctgagagtagaaggctcagcatcgccaaagcttgggttgtaacttttttgctgtgtaactggattgaaatccagccagcccaggtgacctccctgcagagccaggcccctccatattaagattccgcctttgtctgggctgaagtttaagtcaagtctccacattaggttagcagcagtctcccaggtttttcttcctctgctggtatctgcaaagttgcaaactggcagtaagcctctgtatctgctggaagaggatagggcacggcaagggtaacaaattaaccctgaaatctcatgggcgtaacacatcgcagtccaaatgcatcgggcggctcttcttaatgaggacttgctccagttgctctgtcttggcgatnctggccatcttaagcacaggctctgtgcagttgctgcagcaagggaagagagtttggggtgantcacgagagcntaataagcaggcctgggatacggnaaggcctcacttcca

SEQ ID NO: 463771 - DNA, 433 bp, Homo Sapiens
  misc_feature (37)..(37): n is a, c, g, or t
accccattactgtcttaagaagggaattttggaattngaaaagccatattggatctctgagtaacccatgccatgaaacaaatacacaacagaaaagatatgcaaagtcacctttgagatgaactgattgctggctatcctactgtcctcgaggtaatgagtatcagtaaatccaaagaaagtatgtgttgtcacagagggaaggagggtattgttatgtaagcatgccagggaaagaagggcctgaaaagagcccttctgtggcttttatctccatcggaccactatgtatttacctatgaatttcattactatctctctcaaccaaaatgtaactccttaagggtagggactgtgattattgctgttatttgtagagccgcaatgagtacccagcatgtagtaggtgcttattaaatatttgaatgaatga

SEQ ID NO: 463772 - DNA, 316 bp, Homo Sapiens
  misc_feature (48)..(48): n is a, c, g, or t
  misc_feature (109)..(109): n is a, c, g, or t
gtatctcatgacttctttgaacctcgctgaataattatgtacatagtnatcctgtttataatgagaaaggaagagcaacccctacagctgtcagctggaactgagtatntagccctaatggctaggctattatattctgttgaatataaacaatgttatataacaccaacatctgacaagtccactctgagtgtggtggaggaagacaaaaattaagacactccataggcatgttggaacttagcaagattctgtgtaaatcatagagcgaccaaacattcttgtctcttggcttatatgtgtgatatttgctcca

SEQ ID NO: 463773 - DNA, 600 bp, Homo Sapiens
  misc_feature (540)..(540): n is a, c, g, or t
  misc_feature (564)..(564): n is a, c, g, or t
gcgatcggtcatatcagctataaaaaaaatcaactgccagccaagaactttaaaactttaagctgtgtattatagaaccgttttgtgtagcattggaatattgctccattttgtaagtccattgtgaatgttcttaattatccagcttggaaggtatttttgtattaaaaagttgacattgaagaacctaagtggatgatgggatttggggccagtagtgaaagtatgtttcctctaaaatatttccctaaacagtggtatacatggttattttattatgagatttgtatatgttctgtgtttctctgtgaacaatgtttcagtctctctgtcaccatatgtaaggggaagtccacaaatatagactacattgcacaaaactaaaattgttaattacaagaaaatataggtgcttaccttttgaaggtttattaatacatatgggttgtcacaatacgtatatatgataaatggtgtacatatacagatggtttatgggtgtataaaatttttcccatacccaattagaattatcctccnggattccttaatcaataacatgcnaattcccccttccaggtcccaaagggacagaatgcc

SEQ ID NO: 463774 - DNA, 547 bp, Homo Sapiens
  misc_feature (11)..(11): n is a, c, g, or t
  misc_feature (482)..(482): n is a, c, g, or t
ttgtctctgtngacttgacaaaagaggaagaagcaattttatgtaaaattttaaaaatagaggggagctatagttaatatagacgtggctcaacaaatcacaattatcagcagtaacattttgtatctttattactcaggaagggattttttaaatctacccacccacttccccaaagagggcaaaaataaataataattttttaaagaaacctacggttctaaagccagtcttaataagacaggttcttattaatattattaagccagtttgtgttgacaatcagcaacacttttaccccaacattttctttgttctaccttgattggttcctcagccctaacaactcgagtctgtcttgtttttgaactggcatcttctagatttgaaccatgtgctttaccaacagcatttcaccagcattttactagtttgcaaatctgccatgtgctataaagtatttcataggatgtttcatttcntaatttgtcctccaagccaacgctgaaagtaaagttttggcttgggatcttccatgctcctttcc

SEQ ID NO: 463775 - DNA, 362 bp, Homo Sapiens
catctccagaagtcatatttagtttttctttatatcattcatttctcttttaattatatacatgtttttctttaaatacttaaacatggttataacagctgtgttttaagctccttgtctgttaattcccatccatctggtcatttttgcatctgtttttattgactaactttcttcctcatcatggtcacatatccttgcttcttcccatatttacgtaaagtttacgttggatgctggattgttttaatttagcattttggagtgactgcttttgcacttgcctttaaaagtattgggacttcgttttggatagttggaattacttggcaaatcagcttgatcattctgagactggtttt

SEQ ID NO: 463776 - DNA, 200 bp, Homo Sapiens
aaatgtgaagcagactataattctcagttctcttttcttcttagccttaaattaatattctctttcttctagttttggaaagtgtagtgggaatattcagacaaaagaggccattttccatttttaaagcttcttactggtgaaacagcccagttgtagtaggtgccagtcagtcaaggcaggggccttctctccggcga

SEQ ID NO: 463777 - DNA, 539 bp, Homo Sapiens
  misc_feature (16)..(16): n is a, c, g, or t
  misc_feature (39)..(39): n is a, c, g, or t
  misc_feature (66)..(66): n is a, c, g, or t
tttttcccccaagtgnatgaactaaacctaatcaaatgnaacagggcatctggaatctttctctanagtttaattcatatttaatcacccaacttgcccaagaaattttgttttaacctcaattattaggactaaattgggcataaaatatgtctacttctgttttcaggaacttgttagtcacggatatggaggagaattattatgctaccatttaggtctaaggaaattttctttggagggactgtaccacatgagaaaaatttgcaaaatcaacaaatagcacatcttaaccctgcaagacagttgctgaaattctcatatttatatccctatggacacaatgtatactaacatgtaaaaatacagcattataatggtataagatttggcaagcaatggaacatgatttttatagtagtttaaaattaattttatgtttaaatattcaggaaggaggatagttctgtttaactgagagcaggggctagcatctctgacttactcctttgctttactaataaacactccactacaaa

SEQ ID NO: 463778 - DNA, 452 bp, Homo Sapiens
gagttaccagtttaaataccctggcctactttgtatcccagggtgtttgcttgggaattaccatatgaagggtaaaaatttgagagtaaaagccctaaagaaaagcctaccctaaaaccctctgtgtactcacagatgtttctcttgtcactgtcatagtgatggtcgctggtatggaaaagtgcttatatttttatcaaaaaattgatttgtccaggtaaaggtctgtgtcaatgataatgtgaacaagtagtacatttaaaatgtttgtcttgtctttttacagtcatgcctattttagagacaccttcataatgtccttgggagagggcctttagtttcttggtatctggattttggaggttttgatgttgtttttgctatctatttatttaatgtaatttaatatgtgagtttcttgacaaattgcatttcatggcaattgcaccttg

SEQ ID NO: 463779 - DNA, 487 bp, Homo Sapiens
  misc_feature (30)..(30): n is a, c, g, or t
  misc_feature (68)..(68): n is a, c, g, or t
  misc_feature (453)..(453): n is a, c, g, or t
aatttgctggtttagtcaccctttttatgnatgaaaacctgttgttggaggaaaaaaaaccctgttgnctaaaaatgtggaaattattatgaaaagtttgtgcctccatcttgtccacatcaaagcccttcacatatgaaataaggttaactggtttaatgggttaaatttgaagacaacctagacaaaagacacgcctgcctcttaaataaggacagtctggtgttaggacatggccagagagccatctcttctgtccgggaaaggacacattgatttgtgccataatctgtttactgaaaatttatctgaccttaacggcaggtaattctagaacaaaaacagggtgtaggccaagtgcccctaagaaattcctcgtgaaacaatacaagctgaaacacctccaaatttgtaactgcaagcaatttattgtaacctatgaaaaagtactgntcacatggaaacctcacatgtgttggaagagggg

SEQ ID NO: 463780 - DNA, 683 bp, Homo Sapiens
  misc_feature (638)..(638): n is a, c, g, or t
atttgtcagaagactgtttattggacctgggagggggtgtaacactatcacaaaggccaccctgaactcttgatcatcagatagaccaaatccatcccctactgaaaaggatcttaggtaggaaaaacttgggacacagccatccacatcttccaaacagaggaaaagccatcatgcggactctttgtgggtgagagctactgtgtaaacagttcagggatggggaaggcgagaactgcagggaaagcctggaaattatgtaactccactcaaaagctggacctgaagaggccgccgcctcttggggcccccaccctgggcaagtcagaaggaaaagccacaggacaggtgatggtggccgccatctcctttcaggacaccatgctctcctctttgaggctggtccttggtcttgcagaaagtgacacagggaccagatgtcacccaggtggccaggctgcgtgggccatggagggggcacgggagtgggcactggagccaggacgtggagggagctgcctccctttcttcatggcattgctgttaggatgacatggttacggtgctctttccagaagaacttaggagagcagatggtgatttctgtagaggatggcaaggaatatgcagttactggngcagccttctaagaaagcattttccttatttactgagcacaggca

SEQ ID NO: 463781 - DNA, 225 bp, Homo Sapiens
tcttatgggagggagttttatacatcttcaagttatttggcagttaaaagttttaaatatttctatgatattctattaaagaatattaattaaaattttatgttaatataactatctgtaatctatgaaaccatttccaaataactaatgaggaatttgcattttgttataatattagcaaggtatgtcaattcgtgatatattttccttctcatacccacaata

SEQ ID NO: 463782 - DNA, 308 bp, Homo Sapiens
  misc_feature (49)..(49): n is a, c, g, or t
  misc_feature (176)..(176): n is a, c, g, or t
acatcttgaaagtaaaggtgacttagagaaaagagacattttgacaganacttttaatttgtggttgtctccatcatgaaatagaaacgtgtttggcacttgtgggtggctattttgatttggcatgactacttaattttttaaaaaaattgtggtttgtgaattgcacctttgtncatgtttctgaatctggttttcaaatccagtggagcctttcagtgaaataggtgactattaaaaaagtaatagtattacagaaaaatgagcgattaaatagtaatggatacaattaaggagcaactatctaa

SEQ ID NO: 463783 - DNA, 228 bp, Homo Sapiens
gcagtctgaggtggaacattttaattactggcagcacatagacgagttgagttggagccgaatgcataagccccttagaaataaaacactaatctaccaggaatttgggattcttggctctggtagaaatgttacaaattaagctgactcttaatttcgtaaataggctccatgaagttgtccctggaagcagaatttattttccctaacataatttcttaaaaagta

SEQ ID NO: 463784 - DNA, 622 bp, Homo Sapiens
ttaaaaataaaaaagaaattttattaccagataggatttggctgagtctcccagagtcaaatttgggggtgccccacccttggcattgtccttgataactttattccactcttacactcaattcctcagtaattctgtctgctgcctctaaaatctatctagaatccacggggtctgggcttagctggaatctccatcattgttcctgtggctcagtgcagccccccttcaccttctctggttttcaacctcccatggaggccacaagacacctgtgatcacctgaattagggcaagtccctcttctgcttagaagcttctatggctcccacttcactcagagcaaaagcgaagtcctctatatcacccacaaggtccttcgggaactactccttcagctccttgtctcctcccattctccccctccgtccctgctccaggcacaccagcatcgctgcatttcttagaacacatgggcacatttcagcctcagggcctttgcgcatgccattccctcatcctgaaatgcttttcttttggtcttcccaggacagaggtctcagctcacatcacaagtcactacctctgcagagaggtcttccctgaccaccatcaccatctc

SEQ ID NO: 463785 - DNA, 443 bp, Homo Sapiens
  misc_feature (351)..(351): n is a, c, g, or t
ctgcatttttgtgacaagtttatttcacttctacatgttataaaaaaacatagctcactgcaaagacaaacagtagaatcaaatctagaatgacatttcttactctgtaagtttaatgtggtcatcatgcaaaggagagaatctgaatggattatttctatccttcatctattgtttcctatgtactcaaatttttctgaggtccgcaaatacgcatctgacttattgcctcattctttctcctcagagacttctttcccaagctctctgctctctcgccccatctgccccaggtgatgtttaggcctcctacttagctgctgtcctgtggatttgttcactgctctcttngggttggagtcactgtttcttggatccccatgcattgttgtttatgccttcatttggaggaggtgtttcatcacctaaccacctaaaaatat

SEQ ID NO: 463786 - DNA, 268 bp, Homo Sapiens
  misc_feature (175)..(175): n is a, c, g, or t
  misc_feature (177)..(177): n is a, c, g, or t
  misc_feature (179)..(179): n is a, c, g, or t
aacatgtcaaaaataactatattttataacaaaacatttagttaaaagattggcaaatttctttaatacttgggttaggaggacacagctatactcatgtcttctgcatttaattcctcatggggtttttgaagtacatgaagaaatctagcctcatacaaatatgtagcaaaanananagacaagattatcttaatagccttttcagataagtgtggatagtcttctttgatgacttaccaaaattttgaaaaatgggcaatttctg

SEQ ID NO: 463787 - DNA, 536 bp, Homo Sapiens
gttttgttttttcaaacaactggaacaatgacaggctggcataggagagcattaacaataaacaacaaaagaacaaaatcccttcccacccccaccaaagaccgcggcagttaaattaagtacaaaaaactcattacaaaaatagcctcacagagaagcaggttccaatcaagtcagaaaaatattggaacttaacatattataacccgtttgtgactctaatcaatggaattagagagatttagtccaagtgacgcatggagacattacagtagcacaaccctgtggcaggttcaacccttcttggaaaaccatgtatttaaatgatctttatttttagcccaaagaacatttgttagtgttggattttcatcctcagtggcaacagacataggttttgagaagggtacacagggttactggacgatgactctccaatggaatatcacatccaacagaagcataggggagacagaaaagggagacaatgttacacagtttcagtggtatcaactacacctaatggtcagaagttc

SEQ ID NO: 463788 - DNA, 528 bp, Homo Sapiens
  misc_feature (453)..(453): n is a, c, g, or t
  misc_feature (489)..(489): n is a, c, g, or t
  misc_feature (505)..(505): n is a, c, g, or t
  misc_feature (515)..(515): n is a, c, g, or t
tttagcatatatttttattagggtgacaatggttttgacaactgtattctcctaaatttttacttggtggttgaataccatggaaactttagaaaacctgtactgataagctgtggaggtaccccatttcaaataccagggcaagaaaattgatggtatcttaagggttgatgccttttgaaaattagttaggctagagggagagaaagagagagaatcctctaatgctcatatcaattattggaatgatatgcttcaaagtaatacctgcaccgctgttaaccccttctcagcaacttgctttatgtagtccttcttgaatactatgtactatgggaatccaagcttgttacatcatatcttattgtgcagcacacatagaagggtcctttgtgaactaatgctggggatagatcactaaatgcccaattgcccccggtaattagagatganggtttttgggccaatttcaagtgggtcatcctaccngatcctcccttgggancccgaagacnaattggaccaata

SEQ ID NO: 463789 - DNA, 409 bp, Homo Sapiens
  misc_feature (336)..(336): n is a, c, g, or t
aacaaaaaatgaaaatttagtaagatgaatagccttgctttatgtttatacatctcttaatgtttggcttaatagaagactgctggattcttacatatgcttctgcattcattctgttgcaatatgttgttctgactgaagtgtatgaagaaaatgggcattcacacagacacgtattggaaaaggaagacttaaatggctttttcaaataactgtggacatttttctttgatactacaccaaaacttaacaagtggtagttttttaaaggttaactataacatagactcaagccatactaatgaactttttgtggcattatattaacattcactnggtttatcatgcatgtagaatggactttcagccatgcataattttgtaatatcacatataagtcatttgaaaa

SEQ ID NO: 463790 - DNA, 462 bp, Homo Sapiens
  misc_feature (34)..(34): n is a, c, g, or t
  misc_feature (339)..(339): n is a, c, g, or t
  misc_feature (384)..(384): n is a, c, g, or t
  misc_feature (408)..(408): n is a, c, g, or t
  misc_feature (416)..(416): n is a, c, g, or t
  misc_feature (434)..(434): n is a, c, g, or t
  misc_feature (451)..(451): n is a, c, g, or t
acctcccaaagtgctgggattacaggcgtgcacncccgcctggcccatagcaaagctttattcacttaacgagtcatggccaacagcgtctggttagctcacagaggccacagttttatctgtggagtctggtaaccacgccactcacgaccctgtacattgattagatgcagcaggtcatctcaaacacacagctctctccaacaccccttagaatacaacacttgggtggtgattttacttaacattctggtacttcatcccaaaaagacatcgggtagagattagtgtaactccaacaacaggcagaaaacatacaagaaagtttaagacggatgntagcagtgctgactgttaagaacaacgtgagtaaatgcttagttnaatagaaaagaagtcacagtgggnctcagaanagagctgtgagatacttnaagattggaggagattnagtagtgtgac

SEQ ID NO: 463791 - DNA, 409 bp, Homo Sapiens
agttttttttgaatatatttacaatataaatactaatttgtttccaaagtacatattcttttaacaatttgagaaaattatctagcatacgacagtaatttaatgtaaagactctatagtagtgattaaggaaaaatagaactgttttggggataaggaatcctggctatgaatgggcatgatgatctgaacttgcaaagggaaagtgaagcagcttagtccacattgcactgctaataccatatgttaaaggactactatgtgagatagcaacctggatatggtgttataaaaactaaacatgagagatataaaaagtacacatgcttgcatagtgtgttacttttaaagaagctcaacattttattctcattttccaataacttaaatgaacagcacttaacacatt

SEQ ID NO: 463792 - DNA, 749 bp, Homo Sapiens
  misc_feature (29)..(29): n is a, c, g, or t
cgtgagaacaggaccgaaaaatgggtggnttatgaatgtagaacatatggaaaaaaatgaagagagggtattttgatttccgaatagaagaaaacaatgagataattttgtgtcgttggtatggggatggcattatcagtctgtgctccaatgctgtgggcatagaaccagtcaatgaggtaagctgttgtgatgctgataacgaagaaatccctcagataagtcaaccatccatagtaaaagtgtatgatgaatgcaaggaaggtgtagctaaaatggatccaaattatttcgaaataccgggtgaggataagaagcaagaaatggtactcaattttggtgagctacatgattgatgtagccatgaacaatgcatggcaactacacagagcctgtaacccaggtgcttctctagaccccttggattttccggagatttgttgcacatttctacttgggaacacaatgctcatctgtcagattagggtacataaaatggacatagtgcagacattaataagacatagaaaaataataattatacatgctgttgtaccctcccaaagtaaatctgatatatgtaatgaagttattaaataatacttttaaaaatcagacatttatatagagtttcaaagactattgtaacaagtaatgttaaaaattgtctgtgagaatgttgaactgtagtacctttctctatgtcaagttttgtgtcagacatgggaaatcatgtatttgttcaattg

SEQ ID NO: 463793 - DNA, 293 bp, Homo Sapiens
  misc_feature (46)..(46): n is a, c, g, or t
  misc_feature (54)..(54): n is a, c, g, or t
  misc_feature (250)..(250): n is a, c, g, or t
  misc_feature (252)..(253): n is a, c, g, or t
tggttttgggatgccagttatgttacttggaaactgtttaatcctntgggtttngctttttaaagtttgttaggtgggaccagagtgttgcattgtctatgccaaattattctccacttctgaggcaagacccttctgagtgttcttaccaatgccatgtgaattttgaggttttccagtctggctggtgggaacaagcaatgttcctggccttacatgagtgctgggtactactctctttaatcctttntnnacgattctttccctggctttagattattttctaacacgaa

SEQ ID NO: 463794 - DNA, 535 bp, Homo Sapiens
  misc_feature (489)..(489): n is a, c, g, or t
  misc_feature (502)..(502): n is a, c, g, or t
tacagtgtctttttctgatcctaatagtcatatctaggataccaaatcacattcagcagtcacatgaccttaggctgtttttggctatgacagtttctcagacttttcctgtttttgatgaccttgataggtttgaggagtacaagtcaggtattttgtagaatgtccctcaactgacatttttctgatgtttttctcatgattacactgggattttctgtttttgagaggaaaactgctggtgtcatcacatcatatcaaggatacctattactgacatgatttattactattgatgttatccttggatcacctgcctgagataatgcttgtcacatttctccactggtaaagtaaatctttcccctcattttcatactggtgctgttttgaagggaagtcactaatgcataagtccatgtgtaaggagtggggagcaccctccttgaaggtgggaagtgtatacataaataggttttgaaatcctcngggcaggactaanggtttaatgaattccagactggtgaaatttacc

SEQ ID NO: 463795 - DNA, 245 bp, Homo Sapiens
  misc_feature (182)..(201): n is a, c, g, or t
ctggtgatttttgcttttattgttttgtgtggggtgtatatgacatttggcttgtttacagaggctacagatttttacacacacaaaaataaagctatttacgtacacatttagtaaaagacttggaagtataatcactgaaatgtcaacacaggtcatttcttggagaaattacaaatcannnnnnnnnnnnnnnnnnnngcttacatggatgttctacaatagggtgttcactttaaaatcag

SEQ ID NO: 463796 - DNA, 541 bp, Homo Sapiens
  misc_feature (385)..(385): n is a, c, g, or t
  misc_feature (442)..(442): n is a, c, g, or t
  misc_feature (501)..(501): n is a, c, g, or t
  misc_feature (509)..(509): n is a, c, g, or t
  misc_feature (514)..(514): n is a, c, g, or t
tgcattcattcattttccattctgcaacctccatcacattagcagagtaaccagtaaagttgttttctattttctaaagtatttttttctatcactatatgtatcacttctgagtcttacaggtatagagctgagtttagagagttgctaaaattcacctattcggaccaaactaaggttggtacttggctgtttgttccccatctgagcctaagtatccagctcagacacatctctttatgggcacaactgggaacaacaaaatggcaacagttctacagctcataatataaccagtctgaagggttcccctactcacagaccccttcatttactgggagttaagcctcactgctaaataatatattttgaaactggaaaactngggcatgctgcctttccacaatacaccactatactcatggattggcaggaagggtgngcttgggggactaaggggcaatgacaccgggaaggatacaatcattggccctacttaancttgatcntcctnccatcctcacactgaataatcacttgt

SEQ ID NO: 463797 - DNA, 553 bp, Homo Sapiens
  misc_feature (74)..(209): n is a, c, g, or t
gttcaggcaatcctcccgcctcagccccacaagtagctgggactacagatgcacactactatgcccagctaaannnnnnnnnnnnnnnnnnnnnnnnnnnnnnnnnnnnnnnnnnnnnnnnnnnnnnnnnnnnnnnnnnnnnnnnnnnnnnnnnnnnnnnnnnnnnnnnnnnnnnnnnnnnnnnnnnnnnnnnnnnnnnnnnnnnnnnngtgtgagccaccacgcccagccagccttttgatatgtcgaggaaggccctcccaagcagcaagcacccttcaacttcctgaaactgcagaaatcagtaatgataaagatgtgcctggttagttcccaaagtcaaagagccaaatgggcctgccatgagagtgccttccgacataacaggtatggaacacacacccacacactccatgagacgacgtcatcagcactgtagggccctagattatttcagtacaataactacttacacttcacagacagtactaagtccaaacatgcttactaaaatcataccagacccacccttaaacccacttacacaataatg

SEQ ID NO: 463798 - DNA, 587 bp, Homo Sapiens
  misc_feature (440)..(440): n is a, c, g, or t
ggggtttttatcagtgaattacattttttgccccgagaattactatattttacaaagaaaagtatatctcaagtcatttgcatcttgaatattttaggaactctttattttggctatcatcaacctaagaaactgatctgtgctcatttgagatgtaatttatcaatttctagtataattttctaaggtttatgtaactgttactgtttgccctatgaaagggtaagtttctttattgctgcagaaaatctgtaagaaaaaaatgtactaattaaattcagctattgcccattttcctaaccacaagctatccatatcactatgtattacaagtaaatcctttccaaatgaaacttaaaagacaacttactccataaacgataccttaggcaagaatatagaattcatccagggtgagtttgcccttggcctaggcttgnaaaatagcatgggtgcgatctggagcttatataaagtcttaaacctaagatgtttgtcatcatgggttttcaagaaatacaaccatgatcttagtggtctggaaggaagttcctaataacaactagctaaatataacatatgacact

SEQ ID NO: 463799 - DNA, 464 bp, Homo Sapiens
  misc_feature (267)..(267): n is a, c, g, or t
  misc_feature (321)..(321): n is a, c, g, or t
  misc_feature (396)..(396): n is a, c, g, or t
ttttcgttttaacaaaagttgttttattgcattcccagtttaacaaataatgcaaattacaaaacaaaaacatcatgacagggattaaatacttagtatagaaattacagtgctgcatttatcctttcctcattaagaacaaaagaacaccttctcgtagaagtgatgactatttaaaataaaagggaacaagcaagaatacaaaatatgtcaagactaaacctaagattatttttctaactgcctatatcagttgttcaaatcaangtccagattatactataaaaggcattttaattacgggctctacattttgtaatnttaaaatacttcacatgactacaataaaccaaagaatacagcagttttacaacctgctttgggtgtcccaacttngcttaggattgtaagggcattcactttctcataggcgccttctacaaaggcagcccgaagaaatggca

SEQ ID NO: 463800 - DNA, 393 bp, Homo Sapiens
  misc_feature (351)..(351): n is a, c, g, or t
taggttttcaatacactttaataaaatagtgaaaaataggtatctctaggatagtgaactatgggactacaaagggcaggacgatacattttacttggtgaaattcgcttaacgcttactcctttctcaaagcgccaaccaagaatttggctactaaataaagaaaaaagctgttagtggctctttatccgccacgatagggtgctctgaaacccggtcctgcagacattcccttggcccacattttatagcttccttctcagtctcaaggcctgtagtctactgttcacactcgagcctctcgcaaaatacacaagctcaaaagctcatggcgttctccccatctggcantctcggggcttaagcctcggtgccgaattttttgggctcgga

SEQ ID NO: 463801 - DNA, 565 bp, Homo Sapiens
  misc_feature (14)..(14): n is a, c, g, or t
  misc_feature (36)..(36): n is a, c, g, or t
  misc_feature (43)..(43): n is a, c, g, or t
  misc_feature (49)..(49): n is a, c, g, or t
  misc_feature (86)..(86): n is a, c, g, or t
  misc_feature (93)..(93): n is a, c, g, or t
  misc_feature (98)..(98): n is a, c, g, or t
  misc_feature (106)..(106): n is a, c, g, or t
  misc_feature (125)..(125): n is a, c, g, or t
  misc_feature (159)..(159): n is a, c, g, or t
  misc_feature (515)..(515): n is a, c, g, or t
gtttttcccaggtnacggacgttgttaaaacgacgnccaagtncaaagnttaaaatttaccctcacttaaagggaaataagctttncggccgnagccncaaggttnccttcgacggatggccctntgcccacaggaactcgggtaccctgccctttggnagatgggcactggtgggtaggcagatactgggcttgctttctttctggcaacggagaaagtgttttggaatgtggggccctgtctgagcagggctgagttattcgggagcagaggagaagggatatccgggggactctgagatggcctgcctgcccccacgcccaccccagcggacagctgtgctgcacgaagctgcgccacatcccctggctcctcacaggcacccacggtggccgccttcacgggctaaggcaaggggctcctcctcgtccaccaggtcagcagtggcagagggagcggagaccaagaagggtcttcccttcagaggtcttggatgttggctgtgtccccgggnagccttccagaccagccttggccttgccttgtgaagggggggaagggaaa

SEQ ID NO: 463802 - DNA, 449 bp, Homo Sapiens
ccctgaattacctgggtaattttctcagttctccagtctactttctagatatagcttaaatgttatgatgaagcattaatttttcagttaagttataaaccccccaaaagtggctttaagtttgaaattctccctctcaaatcttttagtgtctcaaaaacacccacattactataacttgggcagtactttttattatataattgctgcataataggaacttaatggtataataggacttatgtttcaaatgcgatcattgaaaaacatagttacaccacttgcagttaaactaagaatgcaaatgtgtaagttaactaccctaatactctgattcttccttccctctcatcctttctttcttcctaccttctccccgtccctcccgtccttccttcaatggggtcccatccttccttttttttccctctttactggctttccctttc

SEQ ID NO: 463803 - DNA, 429 bp, Homo Sapiens
  misc_feature (348)..(348): n is a, c, g, or t
aaatattaaaacaataaatctttattaaacagttttcacggcattttaaaataaatttaaaaaataaatatttgcattatagcagaaagtcacatgtattgcatcaactcacttttacaatttaatggcatgagacaactaagcatcagcaccataaaactgttaagatttgtttcttaaattcaaggaaatagctctaaagcactgcagcatcaataattttgaaagctataacccagtgattggtgctcatagtagccaatgtttctttttattactggcaactgtggagacagagttcttccagtactaaatattaataagttctctgatcgacaatcccccatnctatcagtgtgtcaggattcacaaagaaaagaaactgcaggttatgtagtataattccctatctggtgatttaggtttgca

SEQ ID NO: 463804 - DNA, 306 bp, Homo Sapiens
  misc_feature (225)..(225): n is a, c, g, or t
atgagcaccctcctctagtatttctgtagcttgagtgaacttctgctgttctaggtacccacagttcaccatctgcctccccacctgtctgcgagacccttgaaggcagggacgtgactttcctctatcttccccaggctcagttatagagccagctataggcagctgcttgggaggcgctggttaagctgaattggaggaaccagtggagctgagatgcccgtngcccgcagccaccagaccctgggcttgaagctctctccaaggttattacctggaaggccatggaagtggaacttccagatg

SEQ ID NO: 463805 - DNA, 584 bp, Homo Sapiens
  misc_feature (213)..(252): n is a, c, g, or t
  misc_feature (512)..(512): n is a, c, g, or t
  misc_feature (522)..(522): n is a, c, g, or t
  misc_feature (540)..(540): n is a, c, g, or t
  misc_feature (556)..(556): n is a, c, g, or t
cggttttctagtagccacatttagaaaacatggaattaattttagtaacatctattccaatacgtccaaaatattgtatcactttaaaatgtcaatataaaaacaattagatgtttttacattcttttggggggtactaagtctttgaaatccagtgtatattgtgtacttacagcacatctcagtttggactagtcatatctcaggcacccnnnnnnnnnnnnnnnnnnnnnnnnnnnnnnnnnnnnnnnntgggtatagaggtctgagggtagtagaggaatatggtcagctggtcactctcgtgagatggccataccttggcctatatttaatgtgtacagaaagtctgataactcagatcccttaaaaatttcaggcccactgtttcagtacatagagagtgggactatcatgggcaaacccacattaacccagctccccggtaactatttttttaaaacactatccatattttaatttacagtgagaaatgtaccaacaattaatcnccccccttanggcaatcttcccgggagnccaattttgagccgcnggtgagcatggatcttagccaggggagc

SEQ ID NO: 463806 - DNA, 597 bp, Homo Sapiens
  misc_feature (144)..(144): n is a, c, g, or t
  misc_feature (154)..(154): n is a, c, g, or t
  misc_feature (409)..(409): n is a, c, g, or t
  misc_feature (548)..(548): n is a, c, g, or t
  misc_feature (563)..(563): n is a, c, g, or t
  misc_feature (579)..(579): n is a, c, g, or t
taatcaatgatgaaattatgatgaaaatagtcaatgaaagcagaaaccaactttactactagcattaaaagtctcttagaccagataagcaaagaataaactataatgtagtactcaagtaaactgaggtagtagaaagtattngaaaactttnatccacccacctttctatttaccattacttacaagagtttggttccatattagcctttcttacaagcaacactctatagtatgtacaaaggcaacaattgagaagtgaaaatctttgaaaaaaatacacttttggaagggaggggctcttagaaaaaaagagaataattttaagagttatgaatagtgtaaattgaggattattaagcagtgaaacaaatattcagctcctatgggttcatgagggttgataccnaaagccagggccctggctacctggagcacttttaaagaatatagtattggttttgccgatgccttgggtgccatttttaatcccaattttccattatggttaattaggggaatatggtaatattaatatttataagacnggtccataccttttnaccatggggataagtngtatccccatttggggat

SEQ ID NO: 463807 - DNA, 480 bp, Homo Sapiens
tttcactcggaattattttgtatttattatataattaggtatacaacccagttagaacattagaatattgtactttttctaattacactatacagattcctctgatcatctcccttattgtggtcttaattctatacataattacattaattaccatgagagaaatgaagctagataaggaaaaaccttgtgagaaagtatacatatttttaaagctaagagaattataaggtatctgatatcaggtgcagagccttattgctttccaaattaaaacattccaaatagcatgttgattattgaactgccttcagtactctaaggacagaataaaattataacaatgggtcaagcagagaacagggcagcgtttcactttgagtacatccatattggtaggctcagacttatgtgaggaaagagatcagtatttcatcacctccttggctcctagttccggtgtggatagatcagagaacc

SEQ ID NO: 463808 - DNA, 183 bp, Homo Sapiens
gataccagagggaattaactatgatcacatcgtgctctctctgttcagcatcacacgcccacatactgcagtgtgggagtagattggtacttactgagcacttagaaacatcacgcatcaggaaccgggtcagggtgacagcgatctacggtcatatcatgaaggaagcctcccttacaaacc

SEQ ID NO: 463809 - DNA, 479 bp, Homo Sapiens
  misc_feature (233)..(233): n is a, c, g, or t
aatgggagccaaaatgtttagagaaagcttctgggtgtgcctttcagattttgaacaagctgccttgtctaaacatcaatttctactactctgtagccttaaaatgtgctctatttagatccacaggacccttctactggtgatatgaaaaacagaatacagaaattaagagaatcactttttactcaacaattaggggaagtaagtcaaagccctcctcttgcgacacagantttcctgcgggccacctgttcagcgccttgataggggatagggtgatcaaagcactcacgaaaacagttcattcaggtatcggaatgtcagaattcctttggccattttctcctgactctttgctaggtcccctgggtttccttggcagcacttcttggatggaggacagggtccaccaacttctcaagacattgagtcttgagacacaagaaaccacagacttcaaccctgaagggcctaactct

SEQ ID NO: 463810 - DNA, 268 bp, Homo Sapiens
  misc_feature (258)..(258): n is a, c, g, or t
gctttctcactgaaatttaaattggggaaaatgctgcttttacttattttgcattttatagcaacattaacagtcttttcccagtcaggtgctgtccagggaacatgtttcccttgggaggtctgaacagagtgacctggcttgatgtatttcctgagctctagtaccatatcatagaattagttaaatgtagtcaacagcaatgtcagaacaattgacattgtctttccaagagtgaatgcattggctttcggaacngctactagag

SEQ ID NO: 463811 - DNA, 400 bp, Homo Sapiens
  misc_feature (309)..(309): n is a, c, g, or t
  misc_feature (328)..(328): n is a, c, g, or t
gaaattaaatctctattgttaacttttaagcatttcacaaacaacattgtaaatgtgcgatgttcacgttttaaatcggaccacagtggtccccaaatattatgtacatatggcaaatgtcagtgtaactttttgttacactggcaatttcataggtaatcgaacctatgctccaatgttaaattatttgtgtatatgtaaaatacacaagctttaagctatgtgtgtatgaatatgaaagttaatgcaaccatatcaattggtaaaaatggattataattatttttgatggtattaggttatgtagtntcaaactctttgctgtatnttgttttgcacctgccattcatttgctaatttttgtggcgtggagattcttttttattaatttgagctcaca

SEQ ID NO: 463812 - DNA, 336 bp, Homo Sapiens
  misc_feature (16)..(16): n is a, c, g, or t
  misc_feature (320)..(320): n is a, c, g, or t
acctttttgggaatantttgcctagggaaaagaacggtcacttacctggacactatggccatagtcttgagtttttctagtcagcatgtgattggttgtaccttaagtttatgccaaagcatttaaaaaataaccccaaaagtatatctagcagtgaagcttggtagataaaggtgaactgctaaacagacactgggcgtgccacactcctgccagggcagtctcattgtgtgtgacggtgctgcaacactgccagtattacttgagatgcagtctctctcccctgttctcagttcctgggctcagcctcctccaaggcntgccagtgtgtagcag

SEQ ID NO: 463813 - DNA, 251 bp, Homo Sapiens
gtatgtcttaatttattttaaatatttattttgaatgagttggatagaaagctagtagaaaagtacagaaaatttgactattatttatagatttcaggtatatttatatgtgtaaaagaaattgacaaagaaatatttcatctggcctttactgactcctgttaaatgcagttttaaatttatatcgtaacacctacttaagtgcctgacacagtaggtattcaataaaaatttactgaattaaaggatta

SEQ ID NO: 463814 - DNA, 297 bp, Homo Sapiens
taaggggatttttaatctttaattttcaagatggttaaaatattgaaatgtttaagtggataactatattattcataaaatgactgagtgaaaactaatatactatgagatgaaaagtacttgtcagggattttcaagcttttgctcaagtaattaccatgaagtaacaatttctagaaatgaagaacaatctgtgaagataaattaccattggtgtggggaaaaaaagccaaacagaagtagaaaaaggtgtagctggcatacaaatgttatctacagtgtatttatatatatata

SEQ ID NO: 463815 - DNA, 501 bp, Homo Sapiens
  misc_feature (84)..(84): n is a, c, g, or t
  misc_feature (99)..(99): n is a, c, g, or t
  misc_feature (112)..(112): n is a, c, g, or t
  misc_feature (271)..(271): n is a, c, g, or t
  misc_feature (303)..(303): n is a, c, g, or t
cacacccagtatttctaggccaatttcaggataaagttgactgtggatacctattcaattttgctgttttggagggtttctttnttatggatagccatngtaacaaacattnttatatacctttattctttgcatcatatgagtgagaaggaggtcattctaggccattaataatttttgtgtactagaatattcttttttacatgcttcatttaaatggtggctttagagtccatgttatgaccaatactaatctcttttggacgacacnttaaattctaaggttgcggcaccctatacccnaaaatctaagaatttcttaattatctctatcagtttcaaatgacttgtttttttaatgcccacatactgataatagaacactaaatatttaaactgaggaacattcatacaagaagctgttgttttttgtacagctctactagccttaacatctaaaattcagtatttgatagaagacttttaagatcttaaaattgt

SEQ ID NO: 463816 - DNA, 435 bp, Homo Sapiens
ctttttaaattatatagtcccatggattttcaaatattttatactagttatataataacactattttaaaaactatatagaataaacagcactgaggagagatgaagcaatagaaaggtcaaagttcaaacttgttaaaatatgtttggctttgtttccctaaggttggaattattaaactggtgtgactttagaaggttttcgaggaattggtgtgtgttactgcagaatcactagctcttaatttgtaatttgatggctaaaaacggacaagtcacttaaaggaatatatcgtattaaaaagttactttccttgacatttggccaccagtcagccctgtctcccctagcctctgtctgaaagtatgggaagacatttagcctgcaggtccatgcctatgcagtaccagagggaatgtggagggcgcttgccat

SEQ ID NO: 463817 - DNA, 495 bp, Homo Sapiens
  misc_feature (395)..(395): n is a, c, g, or t
  misc_feature (475)..(475): n is a, c, g, or t
gcagactcatccatttgaaatgggagctggggcaccctccccacggccaccgcaggctccccatgcatgggttgaactccctgcccggcgccaggtcatgcagcctcccctgagactcaggtcccaggaccaacccggtcaggaaggccctggggacaccgaggccagccagacagagcctggcagctcggctgtgactctgcagtgagcagccctccctgtcccagaattagtcggatgtcttcagctgggtgatccgccgcgagttccaggagctgcgccacccggtggacgaggagaaggcccgctgcctggaggggatagggggtcacacccgtggcctggtggcttccctggacatgcagctggagcaggcccagggaaacccgggagcngcttggcccaagccgaagtgtgtgctggaacagttcggaaatgaaggaaccaccatgaagtttcatcttggaagtttcantccatggccttcaaggtaat

SEQ ID NO: 463818 - DNA, 382 bp, Homo Sapiens
cattttttaaaacacaaaagctttattttatcaaaacaaatcaacagtctacctctaacaataatcttcaagagtaactgcattgtaaataaccataaacgatccgatcagaatacattcaacatagcatcgctatagaatgcaattaaatgtataatgtaaataaacaacttaaattatgcaactcgcaagatgtaaatgtcatgtggacacagaaaagggacagagacaagacaaactattgcctggcgctgaagagacgagccctcactcaacacagcccagctgcggggacctctctctagccccaccattgacgtagacacaggagccccttcttttggagattggagtctcgctctggtcacccaaggctggcagt

SEQ ID NO: 463819 - DNA, 205 bp, Homo Sapiens
  misc_feature (75)..(83): n is a, c, g, or t
tacacccaatgaattcatctctttattgcatattgctatttttaaaaaaacatgtacagtctcataacacatacnnnnnnnnnctcagtactatctaacaacagtcttgcacctaaagactaagtggttccaactactaagctaataagatataagacatataattaagtttacaaattatgcattttctttttggcattaattt

SEQ ID NO: 463820 - DNA, 456 bp, Homo Sapiens
  misc_feature (21)..(21): n is a, c, g, or t
  misc_feature (60)..(60): n is a, c, g, or t
actgggatttgcctttggggnaatttttttccttccaaaaagcccacatcccaaggaagntgcccttaagtatcaatgagctatatttgaagtaccatcaactctgtttaaagctgtccaacaataaggacacaagcagtaaaatatctgaagcatgaaacatgtaatgttgatgactaatgttctagatcatcaggaataagattaacgaagagcaaagtaaatctaaaacaaggaaagggaagatacatttattaaaaataaaaatagtacacaatctctgataacaaaaaaagcatttagggtcaaaagacatccaacatacattgtaacaatgcacacatattaattaaaaaaaagacccatgaaataatttttaaaaaactttcaaaaggaaaaaactattttggcttccttctgctgaaattcgcctataaatcataccacgccagctag

SEQ ID NO: 463821 - DNA, 425 bp, Homo Sapiens
tttttaccatttttgccaagtctccattttctacccctaagactgctgaattctcatatctgcttctggtgggacgtgttgttttggttgaagtgtatgaagaaaatccagccccacatagatagtaattgggaaaggcgggaatattctagtagccattgcagatcattgtggataattctgctttgatagctcaccaaaatttgaaaatggtcattttttaaagggtagttgcaatgtggaatctgaaattatgtcagttaactttccatactctgttacattagaaacccattggtctgtcttgcactttcaatggatcttttttgccaacacacataattttgtagcattatgcatggttcatttggaaaatctttacctcattgagttatgtatatcttccaaacattgacatatttcat

SEQ ID NO: 463822 - DNA, 351 bp, Homo Sapiens
  misc_feature (31)..(31): n is a, c, g, or t
  misc_feature (50)..(50): n is a, c, g, or t
ggcttagtgaggaaggctcctcccaatattngtcttggcatcagactttnactccattcagaacaggggagagagaacccctagtcagtgaagtataaaatttaccctacttttgcttcttaaggagccagtagagtggaaagccttccttactaggacatactgagtataccaaggaatggaaattggagcagacagaagtacccttcaattatcataaacaatgtaaaatgcgcattctacaacctgaacaatcacccaggccaacacagccagcttcactcacccaggctagaggcatggacacatacaccaggaatgtttcattttaaagggaatgaatacagtttt

SEQ ID NO: 463823 - DNA, 193 bp, Homo Sapiens
  misc_feature (171)..(171): n is a, c, g, or t
taaaagatgcatattctcagcagcactgctttggagaatgagaaggctttgaacataccttcatttatcaaatatttttaggctgtaaacaactttgatagggcaagattctttgaaccatctgatcctcttaattccatgagtcatcttccaacatcagtcccccaaagntcagtgagaatattggcattga

SEQ ID NO: 463824 - DNA, 311 bp, Homo Sapiens
  misc_feature (261)..(261): n is a, c, g, or t
aagaaaaggggttgaagagcccaaagaatgttcatcagctgtctgtccccatctgatgaaatctccagcactgttaagaaccttacatctagagacagaaaaaaataatggtttggaataggggaggaatacaatttacatataaagaaagcttcatgcaagatagagagatcaccagagtaagactcaaactattttatttttatttgctttcttactgagtgggtatatctaccagttcaaggagtagcatagggaaancgggataagcagattaaatagcataaagagtatagttaatgataatattg

SEQ ID NO: 463825 - DNA, 243 bp, Homo Sapiens
  misc_feature (60)..(60): n is a, c, g, or t
ttcggcacagcgaaagtttctcgtgtattttctaatccccacaaagaaactgtaagctcncttgagagaaggaggtgggcctgtgattcctctgtcgctcccttagggctccaggtggacttgactggctgcttttgggagatgggctgggcacgacttctctgcctgggagtattgaaaaagataggactcctgggctcatgggggttggcgcaggcagctgggagagctgaggcagccagg

SEQ ID NO: 463826 - DNA, 200 bp, Homo Sapiens
  misc_feature (47)..(47): n is a, c, g, or t
ttaattttttaatagtaaaaggaatacataaaacgacaaaagtgaanagtttcattggttgtttctcagacaagagaagaaatctgcagctagatttgtaggaaaaagctggaccatatgaggagaaatccaggggttcaattgatacataataaatatagtgacagggtctgaaatatttaggaggtccttaaaagatg

SEQ ID NO: 463827 - DNA, 239 bp, Homo Sapiens
  misc_feature (112)..(112): n is a, c, g, or t
tgtgaaccaccgtgcctggccaatttttctatagacctttgtataccaaatttgtgaaactccacttgcaatctgattggcaatgagcattcgtttgcacgtgatgattacntctggaaagtggtaagctctaccccctacatttgtaaatgaaaaagacacaaaaggagagaaacacttctacacgacctccttccttagatacagtatcagggttctaacattaacttcttacattt

SEQ ID NO: 463828 - DNA, 636 bp, Homo Sapiens
  misc_feature (559)..(559): n is a, c, g, or t
  misc_feature (596)..(596): n is a, c, g, or t
  misc_feature (606)..(606): n is a, c, g, or t
  misc_feature (618)..(618): n is a, c, g, or t
tgaacagcgaaagtgagacttttaatgacggtcttgcaagatcgggtgtctggcatgcaggcacacccagcacagtttcaacaagcaatttacgccctagtgcacaggtccctccctcagttcctcataggctgagtactagccttccacaatcttcctagacatcacctattgattgttcttcaagtacattctttagggtctttctgctgcattttattgcagcatacaatgcattatgactctcaggatttttcaaacatttgacttacggctctagtggctgcacttagctgataagaaagggtacaattatctatgttgcaagctagcttaaactaaatttctctgtggagtggggaaggggtagatgagggggcccccaccgataagatgcctgggccactgggtgaaagggaaagaaggaaggtggagggggtggctcagtacattctgcttctttatttctttatttccaggtagcctgcctaaacctataccaagccacttagaattgaaaataaggtaatcacatataggttaattcctacaattcccncccttttccttttacccttttcctcgtgccgaattcntggcctcganggcaattcccanagtgagtcggataaatcg

SEQ ID NO: 463829 - DNA, 460 bp, Homo Sapiens
gcttcaatacttctgccgctttggaaattgtaacagttaattactttgaatgttgctaaaaggacattttgtgtagggtcaagttatttttatatgagttaatgtgaaattgtaaatggaaatttttccttaaaatacaacacaatgatgtctgtataaatctgtctgtttagaatctgtgctgtgtaagggcattcgtactcatgctgttactgtacttatgcaccattcagacttgttagagtagatgtgggtttatgactgccaagtttgcccagtacagtagttttttatcactaaaagttggactcattgatggagtcctgtagtagtttcagtgttagatacagttttttccacccatacatctgtgcattttctctttaggtgactgtttaagaaatttgtgtgcatagttactcagtttttatgaactgttgtatcctgttaatgcatattg

SEQ ID NO: 463830 - DNA, 144 bp, Homo Sapiens
gagatggggtctggctctgtgagtatagtctttttctcttgtaggaagcccagccggttgttaccaatccatagtactttccctgacctccccaggtctaggcagagaccctttttctgccccttctgcaaatgaccatgttag

SEQ ID NO: 463831 - DNA, 755 bp, Homo Sapiens
  misc_feature (715)..(715): n is a, c, g, or t
  misc_feature (720)..(720): n is a, c, g, or t
  misc_feature (730)..(730): n is a, c, g, or t
ggaacatgtgtctttaatatcaaatatggctttatttgcagtgaaatctaaattccttattctacagtagtattttcttgccctgtgttgtatattttcctaaatacatttttcctgacagtggctttaggccagttgaacacacttagactgaaagtgtttaacttaaagagatcagtccagaaaccatgataaattagaatctttatctggaattaccaaattaaaatttaaaatcatggtccagaagagaacaaacattcatggttttttttatcctactgctcatttttaggtctgtgtttacatctagtctctactatttgtgaagtatgtcattattttttccaagttcttctttgacttaactgaaaaataatattccaaattcttaatgtaccatgaaaagagaaatacaatttttgcttaaaagccattttttaaaaagcgttcaattcagtaatcatttctgttaatacaggaagtttttttggcttgcagttatatactgtgggtattttttaaaatgtgctacccttgggttgtctcatatcaccttgcgtaatcatgtattacaaaggttgataattgtcatttctcagatgtctgtatgttacattggcagcagtaaaatgttttaatggttgttaccttttaaataattgtgttgtattaacatgcctcatattttccgggggaaacttgaaatatatcnaaacnaaaaaggtcnggtataaatagggaattggcatttc

SEQ ID NO: 463832 - DNA, 483 bp, Homo Sapiens
tgacttatttaggctgttgaaggtaaaaggatcaaggaggaattctatattcccataaaactatccttcaaggatgaatgaggaattaagacattcccagataaacaaaagctgaggggatttattgccagtagacctgcccacaagaaatgctaaagggagtcctttaggctgaaatgaaaggaaactagacagtaactagaagccatatgaaaaaataacaccaatggaggtaactacatatgctgatgtcaaagccagtattattgtatttttggtttgtatctcccatttttcctatatgacttaaaagacaaatgtataaaacgaatgattataaatatatgctagtgtgcacatactgtataaagatgtaacttgtgacaataataacataaagggggaggacagagttatatattatttatatactgtatgtatattttgcatactattaaagctaagttgctattaatttgaact

SEQ ID NO: 463833 - DNA, 555 bp, Homo Sapiens
  misc_feature (441)..(441): n is a, c, g, or t
  misc_feature (521)..(521): n is a, c, g, or t
ccatgtaagatttattaaacatgtaacttcgttggaaccaacaaagctactttcatgtttttatgttgttctttttagatatttagattaaccagataatcttaaattatcttagaaattagaaagtttctgcagtattgttacatttgttccaagtatacaagttgtttctatgcactaccttctcaatcctgtgaaagaagtctattaccaaagcaatttctaacacattgctcaaaagacacagtaacgttgtgaaaggcattttgttggatttagtcccattttagtatccccttaaaaagtttgactgatcgactctggatattcagccaacagtgttgtgtcaaaaacttggcttgaatttatctaaaaattcatagtcggtgctgaacctgaatttgtttgcccaaagcagcaccgtccctgggctggggaaanggtacaccatgggtgggtgagcagcctggtccaggaagtagtgatgggtagaccacatctgagggctaggaccgtaatcntagtaaaaagctgacctggggaagttttggtcca

SEQ ID NO: 463834 - DNA, 286 bp, Homo Sapiens
  misc_feature (262)..(262): n is a, c, g, or t
ctgagccactctgctcagctgacattttcaatcttgttattagatcactcttcctcttttctctgagctctgataactttccaaattgtactcatatccacagaggcaacaactttgggagttagattaatatccaatcttccggactacactggggtcaaaatacagcctgacaagtttttgaattgtttttgaacttaagcagtaagggaccagggtccaatctctaagtgaattcctgggtgggattcaaataaagttncagacaacttagccatctttggag

SEQ ID NO: 463835 - DNA, 478 bp, Homo Sapiens
  misc_feature (46)..(46): n is a, c, g, or t
  misc_feature (151)..(151): n is a, c, g, or t
  misc_feature (340)..(348): n is a, c, g, or t
  misc_feature (362)..(432): n is a, c, g, or t
tcaacatgtcaaacctatgaagggagataggaaacaatgagaaacncccctttgctcctttatacagaattattaactatattttactaactaaaaaactctagtattctttacctaaagtcaattggctggtaagagggagagatgcaanaattctccagctctgaacttggagctacttccacactctactcttaatggaaacttgaactaaatggtagatagtatttttttcctctatttaaaatttttgtcttgattaggagatttttcagttctccatataataattttctacaatcagatctatgctgtggcatattttgctttatttaaaaannnnnnnnnagagatgagttctnnnnnnnnnnnnnnnnnnnnnnnnnnnnnnnnnnnnnnnnnnnnnnnnnnnnnnnnnnnnnnnnnnnnnnnaagtagctgggattacagacaggcatgtgctattacacctggctaa

SEQ ID NO: 463836 - DNA, 297 bp, Homo Sapiens
  misc_feature (18)..(18): n is a, c, g, or t
ttgtccaggctgagcatntagccaagagaccaggctatgctgctattccccacttctttttcaaagtgtatttggggccaagtctcctctgtgaatttgtaaccgttcacaaacaagtggtagatgtagttggctgagaagcagtaagagcgggcatatacctcatcaaatttggggagcagcagtgggagctgactccaattctgtgagcagaaattccaggtgctggagttgaagttgtccagggaaaagctacctgaaagatttaaagcactggcatgtgtagtagaatcctgc

SEQ ID NO: 463837 - DNA, 271 bp, Homo Sapiens
ggctccttctactgcaggccagacctggggctcgacgtgaaagagtaatgaattgatttaagcctacggcctggcatacttcttctgaagtcacaggggaattcacatcactctgtgtgacctctgtcctaccccttttatgtgagggtggtgaaaagcaagttgaaatgcaaagggtaggtagtctgggagactgacagaaaatgctgtgcacatgtggtttttataatgagatatacagcttgtacccgaagccaagaacatttcacat

SEQ ID NO: 463838 - DNA, 324 bp, Homo Sapiens
tattttttataacagctttattgaggtattattcacataccatgctttaaaaatatacaattcagtggttcttagtacattcacagagttgtgcaaacatcacatctaattccagaacattttgatcactcctcccaaactccataggcattgactttaatgtaatggcatatacatatatagaaatacatatagaaaccaattattctagcaccatttccattctttccccagggactgcaacatcatctgtcataaatcaacttttcatgtctgtgtgaatttggttttgatctccctattgagagactggtgtacagtatt

SEQ ID NO: 463839 - DNA, 546 bp, Homo Sapiens
  misc_feature (305)..(305): n is a, c, g, or t
  misc_feature (356)..(356): n is a, c, g, or t
  misc_feature (446)..(446): n is a, c, g, or t
  misc_feature (481)..(481): n is a, c, g, or t
  misc_feature (486)..(486): n is a, c, g, or t
tctctgattttgtttaattatatacataaaggtaagaggccttttcacaggtattaattaagtttaaaaataaccgccatccaacacaaaatagtatttcttgttatatttcataaacagtctaacaaaacactaacaaagttattttgcttattattctgatgctggaataatttggtcaaatattcataaatagttatcaactttaccaaggcacaaaaatcaagaatacatgctttctataaactcatttactactttaaagtttttaactgtttagcagttataggaaatttttttaatcngaaaagaaaactatttacatttcaaatacaaaaggaaattaaaattattcntgattgatctctaaaacccaaccacttagatgctcattattattattttctttcaccaatccagtatactctattcaacatgtgcatccnggggtacttactaagcatttatttggcacaagggntttcngtggcagggtaactttggcggtgtagatccggggagccacccgaatcggcccagaaaagt

SEQ ID NO: 463840 - DNA, 653 bp, Homo Sapiens
caacttaacataaaatgcatatttcagaaatctaaacctcgggtctgaggctgtttgtgttaagcagcccccttggtgagcaattaggaccttcagtcccatagttgactggagcccatgtatggttgcatttctctccttgcaggtcactttcgtccttcccgagagcagcattagagagagagtcacagcctaaataaactaccagcatgagaagtatatttcaagtcctctaggggccttgtcccagtatgattggttggtgtccaaatgttgtcccagctcccaaatggtattaggaagacaggcatgtcccagatggctgtacatgtcattggctgtctcttgggtggcagcaggaataccttgggtaaaaccaacaaagaaaatgtgttactgagagttctgctggccccgaacaatgactagtttctttttgaactaaggtttctgtgtgcccttcccaacaagtccctggatttctcctccatagtttcctttgcaggattgggtaaatttaccaggattgactaaaccagaagccagtctttcgttcatgttttgatgtggtttacacagaaaaagccccagaagagatctggtttaactctggtcttttgactaaatataggattaaatactattttgtcatt

SEQ ID NO: 463841 - DNA, 570 bp, Homo Sapiens
  misc_feature (18)..(18): n is a, c, g, or t
  misc_feature (431)..(462): n is a, c, g, or t
gtattttctagaattganaaataattcttttagatgatagataagatgtttacatcaacctgcaaaaagtcaatgttgaagaggtctcattgtatctcacagaattttgatttgcctactcacccacaggagacatttctgggacagtagcaacataaggtccatcccaaaactttggctcattatcattaaatatcctgcactttgatgatggaattctgattcaggctccaggggctttctggtttctatgtccacagcctgagcaccgaagagtgttgaaaggtttttcttctctatctaggctccttattgcatgaatgtcccctgtggtttcatcaatggtaaaaacggtgccagcgccatctcctgagagggtgtatttcgcagtgccctctcccttgtctaagtcggaatggagctttagggannnnnnnnnnnnnnnnnnnnnnnnnnnnnnnnggacaaagaaagaacaccattaaaaggatgttgccaaattaaaaagtcataatttgcaatacaattcctttaatcaaaaatgttaaataaaaatcttatggttctgtt

SEQ ID NO: 463842 - DNA, 395 bp, Homo Sapiens
  misc_feature (26)..(26): n is a, c, g, or t
  misc_feature (32)..(32): n is a, c, g, or t
  misc_feature (87)..(87): n is a, c, g, or t
  misc_feature (153)..(153): n is a, c, g, or t
  misc_feature (161)..(161): n is a, c, g, or t
ccttctgggcattattttttgacccnttaaangggaatttggaaccttaaaaaaattaaaatcccttaagccttcccggaccaggantggaatgggaccccgctttttggcccaaacggggattccccaaaaaccccttgaaaatcttatcangggtatgnccaggaagtgggcatttggacacaccctcatttgtgccccacccccccggcccttttggaattttaggcacaagtgaccaccacttaacattaaaatagagattataagaccgacaaaaccgactcttgtaacaacaaaataccaaattataaacaggacctaagaccatgcaggcaggggttaagtgatacatgcctacacttaaagagtaagctggccgggtgctggtgtca

SEQ ID NO: 463843 - DNA, 442 bp, Homo Sapiens
  misc_feature (390)..(390): n is a, c, g, or t
aaaactttatttcaacataactatgcttacagaaatacactcatattggttaatagaatgcaatttaagtttaacttatcctacataatttggaccaaaaacttggtacatggtttaggattttaaaaaaggatttgcaatctggtttatttttatctattacaaatgtataaaagatcttccctcaaatgctgctaaagaaggcagcaagaaccttgagaaatttacctttggtttgcctcagaaaagtaacacgtattgcactgcttaagtttataaaattggtgcaacaaaacactgttgtaatgtttcaatggcagtttagaaagttcaataactaatgggatatgggaagggactgggagggaacctatgtacacatgtgaaacnggtaaaaagccatccggatttagtttaatatttgcctggaagattggtaaat

SEQ ID NO: 463844 - DNA, 525 bp, Homo Sapiens
cccattgggtgacagcgtttattgaaaggaaatcttgctttatccaggaattcactcacatggaggtagctgcaaggagaatgtctctttctcatgacaaccaaagcgaccaaaccataccctaaagcagagacgcaatggaataagtcaacgggcattgtagaacgacactcagaagcaggaaaaaccataaaagatacaggatgattgtctcttcagtattgcatttggccatgtatgtgtttttacataaaatatatgttttctttttaagctagctaaagaaaatactcttgatcggggttagttcttaaagcaaaaaacagaagaaaagtatgtatatataataaaattaaagaacgatagcctgttataccctggaaaggaccgtgggcactaatctgcactttggttccaggtaatccatggctctgagagtgagcacactgtcaaagtcactggggtgagatgagccgggacttggaaaaccctctcttaactttcagtctcaactcctcccactcc

SEQ ID NO: 463845 - DNA, 459 bp, Homo Sapiens
  misc_feature (46)..(46): n is a, c, g, or t
  misc_feature (380)..(380): n is a, c, g, or t
aaatccatcaagaaggccatcaaggacaagactgccttcctgaagntggctcagacccagactggatgagcgcacaagacggccggaacattgagttgtgccggagacatggcttcaggtacgccttgttaacggaggtacacgaggttgacgacaccatccagaccctgcagcagcgcctgagggatgcagaggacaccctgcagtcgctggtccacatcaaagccacactcgagtatgacctggctgtcaaagccaattccctgtacatcgaccaggaaaaatgcatgagcatgcgcaagagctaccccaacacctccggctggtaggcttctgctagggaccccaccgggtgtggttttgatacccctaagttaagntgagccagagcactgtctcagcatttgaaccgaatgctaatatagtcacttattaaaggattatgctgatggaaatgta

SEQ ID NO: 463846 - DNA, 445 bp, Homo Sapiens
  misc_feature (394)..(394): n is a, c, g, or t
  misc_feature (403)..(403): n is a, c, g, or t
  misc_feature (422)..(422): n is a, c, g, or t
tttttctattaatagtctttattccatatggaaaagtacagtagttgtgcagaaacaaaactaacaaaggagtaagactttcacaaatattaaagaaaataaataagccatagtagttacagcaaaactcatggaaagcctataaaaatgataaagctgttcatacaaagtacaattgtacacacaggaacaaacgttgaagaatgacatcagaggttcctatttgtacaaaaccataatgatgttcacaggaacttcattacaacaattcactttaaaacattctgcaaatgtataacttccttctcctcaattttagaaaataaatttcacatcccaacatataacacagatacactcctacttctctcaaattagcattttaacatcttcnaattaacanaccattttcatattaaagntaccttttaaaccaagggttcca

SEQ ID NO: 463847 - DNA, 490 bp, Homo Sapiens
  misc_feature (433)..(433): n is a, c, g, or t
tttttttaaataaaagacttaaaaagtaaagaaggatcctaccatatttttaaaaacttttaatcctggtttacttttctaacaaatttatctatggcttcaaagtttaagcggcacttgaattctggatgttttcatgatttaacaagcggccatctcattagaaagagagaaggtaaaatgtttcattttatacgtgggacggcttataaacagctttaaaaatcaatacattatatctttcaccccatctatattttccactatagacttcaaaagtggctttggaattagcatgttttgaaacagtcgaacaagcaagtaacatttacacctaaccacgaaccagtcggctacatacccaggtaactccagtaatgggcaaaacccttaaagggcttctggggcctctcttaccctcttaggtccaaangctaaggtggattatcccttcccggcccctggtaattggcacctggtgcaggtttaa

SEQ ID NO: 463848 - DNA, 476 bp, Homo Sapiens
  misc_feature (316)..(316): n is a, c, g, or t
cggcttaaaacaacaaccattttattatatctcatgtttttgtgggtcagaaatttgggcaggggctcagctggtcaattcttccattctacatggcatcagttcaggttaccaagtcgctcactggcatttagctggtggctggtctggtggatccaaaatttcactcaaatgtctggtatcttggtggatgtcaagaagacagggttcagcaggtgcctctccctctctacgtagtttcagggcctcttcatgtggtctcttcagcaaagtagccagactttgtaacaagacagttctgtcatttcatgagatngaagtaaccctaccagtaaagtctgagtcaagaaaccagcacagcagttacgtctaccatattctactgggcgacagttcacagagggatgtagattccacctcttgattgaaagtgtgtcaaactgctgcactcctatatgaccatgtcataaattaaa

SEQ ID NO: 463849 - DNA, 271 bp, Homo Sapiens
  misc_feature (24)..(24): n is a, c, g, or t
  misc_feature (85)..(85): n is a, c, g, or t
actgtctgatgaccctgcaaatgnactggccttttatgggatcaccacagtgcctgcactggcccggtggtgtggggctcccagncagccagtgggggccttttctagtgcccaacctgcaacggacaagtgactgtgccctggagctgagcccggtgggtgggtggagggactggaacacgggcctacagcttgagggcgacacgctgcagagcttgggctccagtctccgcaccacagtcacggaaattcctgtccgtgtgtgtgcagg

SEQ ID NO: 463850 - DNA, 423 bp, Homo Sapiens
  misc_feature (364)..(364): n is a, c, g, or t
  misc_feature (392)..(392): n is a, c, g, or t
gacaggtggaatccatacccttacacgggattatccctaagttacctagagtccatggattatgctttgcaaatcccctttaaataatgcacaaagtacacagtgtttcttatggacatccaaggaaagtagcagatgttacagcggcaatggcataccaaaaatatttcctttaaacactagattcatccttgatgcagccaaatgcccacaagagaggaaaactggaactaaaactgacagaaaaacagatttgtttcccactctcacactatgccagggcacatattcattgagtgggctctctctctccattatggacggggagggtcttgttttactttattcctgtgtgcatatgctncaggtcatacaagtatacatcagcaatngaactctactgtatatatttcttgaggtagc

SEQ ID NO: 463851 - DNA, 314 bp, Homo Sapiens
  misc_feature (20)..(20): n is a, c, g, or t
  misc_feature (24)..(24): n is a, c, g, or t
  misc_feature (256)..(256): n is a, c, g, or t
  misc_feature (272)..(272): n is a, c, g, or t
  misc_feature (304)..(304): n is a, c, g, or t
gtgaatggtcagagatatgncggnattgcttatttcttatttgtctataacagtattacagtttttgctatttccattaaaaattacagatgtatttgcagttaacataacaaaagattgtcagtgttaaggttcaatatgtctatcttcatataggatactcattaacccacctgaaaacatggaagaaaccagctctaagtttcctgtttttatcaaatttgttcctcgccctttatactggtttagttcatcnacgaggtactcttgangtcatgagtcatattcaaaaagtttgttacancaatcccaat

SEQ ID NO: 463852 - DNA, 297 bp, Homo Sapiens
aatgattcagatgctttcagtctgttaacagtatttataaaacatgtttcagtgatacaacataggtgaactaaaccaaagatgcaaatgccttggaggaaaagaaattgtattatagagaatcctgagatatatccttttgggttgtttaatttaaagcctatcacaaaacaaagagaattgtcgcactttaattccaacctcctgcagtacttcacaacccttagcataagattctgaaatttgtaataggtggtacctagtttgatgcagggttttgcagcagttgtgcaaatg

SEQ ID NO: 463853 - DNA, 366 bp, Homo Sapiens
caggcctgactccatgaaagaaagggggctcgggtctgcagtgaccccggactctccccaacgccttggggcctgcaatccacaggctctgtgcaggcagcactgtacatggagggctgccctgagccgcgggacaggcagccatgggaaaggggcctggggtggggcgcacaaccggggaacccgggaacaccagcagggcctgctccttgctggacggcagacaagggctgtggtcggaggtggaagaccctaggaatccgggtggtgggcgtgccacccgcctgtggggaggcctcttgggtgtctgggatcgcacactgccagagctcttggctgcccgcagtgctgggaccctcaccaagg

SEQ ID NO: 463854 - DNA, 487 bp, Homo Sapiens
  misc_feature (404)..(404): n is a, c, g, or t
  misc_feature (409)..(409): n is a, c, g, or t
  misc_feature (434)..(434): n is a, c, g, or t
  misc_feature (455)..(455): n is a, c, g, or t
  misc_feature (461)..(461): n is a, c, g, or t
gtatttaaagtatcaattttatttgagttaaaattatttacaaaaacccaaagacatacttcatgaaactggtacaaactattttttcctgccgttggttttgctccaaagatcacagctgagaaatactgtataaaataaaaataggattggattcagaaaagtattctactgttctaatttccaattggtagtatttacagaagtatttacaatggaaaaaaggttactttaaaacttttagttaagtcagcctcaagtaccctaaaatgcagagttctctgagggttaaaaacacacaaatgcactgcagttggtgaagtgattatctcccccaccacctccccccaccaaaatctgcatctctatcagtgctccgacaattagttattatttaaaaaacnaaacnaaaccaaaaactggttaaacactgngggaaatccattttccaatgnttaccngtgtaacaggaaaatgcagttcgccc

SEQ ID NO: 463855 - DNA, 500 bp, Homo Sapiens
  misc_feature (158)..(158): n is a, c, g, or t
caatttttccatgcacggttggttgaatctgaaatggggaacctctgggtatggagggcagctgtgtatgacttttctcatagttttatgatttcctcatggatgctcagagtggattcaccaggtcaggtgtgaatacttctgtggctcctgatacnccggcgtctgcctcattgctctctaaaagcgttgtttcggttgacagaacccttcactgctcacggggttcacggctcctcatgagcagttggagtccctctccccaccatttttcttaggtttggggagctaatttagtagctaaagatgttactacctcacaattattttcattatttaacaactgccattgttgagcttttttgttgtatgtttgtttactggcaacgtttcctctttgttaggtctgtttaagacctgttctctttaactgttggaatcacttagccttttcttattgaattacatgggttctttaataaagagataaatcctttgtc

SEQ ID NO: 463856 - DNA, 477 bp, Homo Sapiens
  misc_feature (391)..(391): n is a, c, g, or t
  misc_feature (413)..(413): n is a, c, g, or t
  misc_feature (459)..(459): n is a, c, g, or t
caaaataaaataatagttctttattccatattcagctaagaaacagcaatatgaaataatgctgatttttagtttgtagccattggatttgctggagttctttctcattcgactttggagataaatattcctgcagcttccttttctttccccaaagtcaagacctatgactactatgcagagaggtctatgatctgggaaagtaattggttagtaaatcatagagtaggatgttcgttctatgacaacatcaagtatacttgtgggaatggtgacaaaaatatatacaccatgataacaatggaaagtcagccctttgctaagcaaaagcctagcaaaggcagtaaaatctggaatgccaataatcttgctaggggatcaatggtggttnttatggggaggggcatagccantaccaatgggtgagatgagggatgatggaccaaaccaccccagggntggcaatcctaggtggac

SEQ ID NO: 463857 - DNA, 463 bp, Homo Sapiens
  misc_feature (29)..(29): n is a, c, g, or t
  misc_feature (44)..(44): n is a, c, g, or t
  misc_feature (359)..(376): n is a, c, g, or t
aagggaaatccctaattggaaaattttcngaaccctcccccccngccccttttattctctctcttctgctgatgaaagacctttcatccagttcaaagcttttcttaagctcttttttaagttaattgaactttttctttatttatttttcaaaaaaatgtttatatcacatagacatattacatcggctaaagcaagacttggcccacaaatacctatttgttgctgaatgaatacaatggataaagcaaggctgttgtagctgaagttacatagggaatcccaaactctgccctcttagcgatcttattctacatgacaactctcaaggtactcacagatctgtttaacccacttgnnnnnnnnnnnnnnnnnntgaagaaatgctataagtataaactatgattttatttataaattctgtattaaaatggaattatatgcaacattctttcattctgta

SEQ ID NO: 463858 - DNA, 513 bp, Homo Sapiens
aattcggcacgagggttttaagaaagtttacgaatttgtgttgggccgcattcaaagccatcctgggctgcatgcggcctgtgggctttgggttggacaagcttgcatgtgactgagtttgttcttaaactggtaaggaaactttgtcaggcagtatttatttccataagtggtgttttcctacgaatcagcacatggtgaaaaatgaggggctatgtatatttaaggtgcagaattaaattggtttaaatatcttttctattttgagctttgattttgataccttaaaggaaatatcaacagtactatttccaacctgaagcctcctcagctgttctgtcctagacttatggcgtcctctagtggccactatgggcagctatgatcctgttaccttccccagcagttcccttcctgccctgttccccactgctctggcttgggtcaagccaggcctgcctcccgccaacatattcttcagaattttacctcatgtaatagctgatgagctta

SEQ ID NO: 463859 - DNA, 379 bp, Homo Sapiens
atagacagcagaaatttatttctcacagtttggatgcttgaaaatccaagatcaaggcaccctcaaattcagtgtctagtaaggactcagtttctgtttcatagatagttgtcttttcactgtaacttcatatggcagctttaattggtgaggagtttcagactctttaataaggacactaatctcattcatgaaggatttgccctcatcagctcatcacctcacaaaggcttcatttcttaatgccatcaccttggaggttagggtttgaacatatgaattttaaggggatatatttagaccatttcattctggcccatcccccaaaaaggcatgtccttctcaaatgtaaaatgcattcatttcaattaccccaaaa

SEQ ID NO: 463860 - DNA, 489 bp, Homo Sapiens
tagcaaaatttctggcaggaaaccattatatctttttttccatgggtttagcacttagttttagaagaatttgtgattgtttagtctgtgattctgattcagagggaaacctgtctaaaccctgagcaaagaaagaactgtatttgagcatagttctttacatgttttattctgtagccaaagtatatcaggatatcttagccatgatattcatcaatagaattaactcctatgttgtgttagtggtataccagatttgtatgtatatagttgtagaatacattatttgatctctaaaacatagttctgaatgcctttgattcacgagaaagaagtctgtgatgaaataaacttgttttgatttttctgtactctaaatcttttaagtaagtcttctatatttgctgttttattttaatgcaaataaagctttcctttgacagtgaccttggctcagtttagggattgattctgaatataggagacggt

SEQ ID NO: 463861 - DNA, 445 bp, Homo Sapiens
  misc_feature (93)..(93): n is a, c, g, or t
actgtgcaagcgggtgatgggccattgcagccactgctgctgtttccccagccaacgctgccagctcagctgactgtgcgtgcaatggccttncagctgatgagctgcttgaacatcggggcagaaagggaggccggcaggtcccggtaaggggcagctgtgagcaggaagggcaaggggcatatgaccaacggataacaagtacctgctctggaccaggggatagccagctcctttacatacaaaggtaatgaactaaaaagtgaggtaacacacccagttctgtaagttgccagtggtagggtggaattgggattcgaacctcttaggctgacactaaaactcgtgcttctcttgggcagagctccagctctcctattcccatgcccagctcctctaggcacctcctcatccctccccaagcccaactaggcccatcccactt

SEQ ID NO: 463862 - DNA, 272 bp, Homo Sapiens
cagtttttaatcggtgtttattcttagttatatgacatttaattaacatgttaaatgaactactgatttaaaataagaggcaaaaggaaaataccattaaaatgctagctaatgaaaagcattaaaaatataattctgcatttttgccagagtcatcttcacccatccatatgtttcacctactacatcacatagaatattacaaggataaatatatcgatgatttacacccaatttcgctcttcatttattgggaataaaaacgagcataa

SEQ ID NO: 463863 - DNA, 492 bp, Homo Sapiens
cggcaatgtgtattctataggccaggaggaaaaaataagtggtagaaatttcttcctccagcgaagtgcaaaggaggagactctattccccaccaggtgctcattaggaaaggcatccttctctcatcgcctagatagaacaccaaccaccaactccaggacgtgaacattctttcctaggacaccaagaccctcctccctagctgagagacagccattctccatgtcattttccacagcatcgcattcaccatgagacctgtttgcacgtcctgtctggctatgggtttatccctcgggatgggtcaagtcgcccagcactagtgttgccacttagtgggacctggtgacactgcccacagtcagagctcttctgcactggtaccttctctgcccttgtaactgacactcatcagacgaatccatttcaaattaaagcacttgtctattttacctgggaatacactttattttagctgttgttgagtttta

SEQ ID NO: 463864 - DNA, 490 bp, Homo Sapiens
  misc_feature (370)..(370): n is a, c, g, or t
  misc_feature (480)..(480): n is a, c, g, or t
aaatgttagccgctatttattatcatcattattatactgacactcaccattttataccaacaaacaatttaacagccatacatatacatctatacaaatcaatctgtatgatactgagagaagaaatagctctttttgtaggaaatttatagtgatacattttgaagaatgaaagacagaaagttacattgttacagaaaaaaatactccgtttctttgaggaaatgttctttgctagttcggttggagctctgcatcgaacgttcagaaaaagtttatggtctatggttttccaaacaagttaaaaacagaaataaccatacctggcaccaattatacagtaataatttattggcttttcaacaattcntggtgtggataaaatttaactggaccaaactcccccatggtattttgaatgtggagaatccagcttcccagggaagtcagatacttgagacaggacctataaagtatccncccttttaaa

SEQ ID NO: 463865 - DNA, 725 bp, Homo Sapiens
  misc_feature (239)..(239): n is a, c, g, or t
  misc_feature (709)..(709): n is a, c, g, or t
ataaggagaagggtaacagcatttctattatttcttctgccttgaaatagcttcctgtcttagtcacagtaaacagtgttaaaataatctatcaggaagccattaggtgagatggttccagcactttggattcctacataagcaaaccaaaacccaagtcaatgtaagcagtaaaatgaaacttaagcttaaccaacaagaaaccactaactaacttctaactgggactttccactttnaccaatcaaataatttctttgtcttggcttccacaaacaccttataaaaaatattccctcacaccctcttggtggagccctgaaccacgtgcaatctagtgctgcctgattcatggaatcaccatctgctcaaataaattctttaaaattttaatgctcctgggtttaacatttaacaatgggctacaagttctagcccctgggtattgttctgggcttcatctaccactctccccctagattactaactccagccacactgacctcttggttgtgcttcatgtatgccaggagcacgctcccacctcagggccttgcacttgctccttcctcagcctggaccacttttctctcagacattctcagggttccatgcctcacctccccaggtctttactccaccatcatcttctcagtggtgacttctctggctgtcagatcttaaattgccaacacatactctctcaatncccttgatctgctgtc

SEQ ID NO: 463866 - DNA, 471 bp, Homo Sapiens
ttatgcaattcctggcctggagcatttttgaaattcaaattgtctgtcctgtgggagccaggccagtgattttgttcccaaaactttgtatacaccatttggagaaaagtaactttatattttccagtgttttgtctgattttaatgtccgttcttagccaagctgctagcaggtgttaattggatccctttccttcgactgaaatggaagagtttataagcttacgttagtattgtaatatgtaaagtaagcccaacaaaaatttttaaaaatttgatgatccccaatatatctaccattgtatgttaaataaatcaccatttttgtagaaaaaattctacctgagagtaattgtcaatgagtacatgtgtataagttgtatcccactctccccacttttatcttttccagtggtcttctgttaatgtagtgtcttttacaagttaatcgattaaatttgttagatcttg

SEQ ID NO: 463867 - DNA, 411 bp, Homo Sapiens
  misc_feature (20)..(20): n is a, c, g, or t
  misc_feature (346)..(346): n is a, c, g, or t
tttttttcccggcttgtacnaatttattccagtgcaacattatttaccagaaaataaatgtatgggggtggacacggaacccccgcagccccaccccttagctggctctccggttctgcagggggcagaagctgccggacccgcacttggtaccttgcacaagaaaccactcgcagaggccagcagaatccttccccctcaagtgccttggggatcctgggtggcagactccactcgctcagggccatggggaagtagagccagctgtacagtaccatttcccacagcagccacggcctcttgcttgctttgggaaggaaaagaggaaggaggcatctgtcctgangggctgagcacaggagggcagcctcttaggccacaatgggctccttcgtggggttcacagtctga

SEQ ID NO: 463868 - DNA, 660 bp, Homo Sapiens
ctttgttggattgagttaattagaagaacttatcttcgagctctgaatttccttcttctacttgttcagctctattactgagactttccggagcattttgcatttctaaaagcgtgtccaaaatttcctgaatttttgatggttttttctttattcccttgactatttcccccttcacttcttgtatcatattttggatttccttgcattgggctttgtctttctctggtccctccctgattagcttaataactaacttcgtgaactctttttcaggtaaatcagggatttcttcttggtttggatccattactggtgaactagtgcgattttcctaccaagctttatgtaatactattcactttcagaatctgtcctgtacccaggttctaatattaatttctggcttccctcatataccatctcaagactgctatctttgggcctcctgtatttccaagcttctttcttttaatctccccagaggttaaggctttcatccatcagctctctgacttgttcttagtatttccctacacagcaaggggactctcttcttatgggtaaactctcattgatattatccatgttctgtattataaagatatttccttattctttcttctatgaaattgccacctgagtttcctctttgttttg

SEQ ID NO: 463869 - DNA, 594 bp, Homo Sapiens
  misc_feature (568)..(568): n is a, c, g, or t
atgtctttacaacaaaatcaagcagagaaacctcaaggattcctggcagtcctgcagtaacagctgcatcttctaatactgacatgacttatggagggctggcatcaccaaagctagatgtttcatatgaaccaatgatagtgaaggaagctcgatatattgccataacaatgatgaaggtttatgaaaattattcatttgaagaactacgttgttgcatcaccaactcctaagagacccagtgagaatatgctgatccgtgtcaataatgatgggacttattgtgcaaattggactccaggggctattggactctacactcttcatgttaccattgatggcattgaaatcgatgctggtctggaagtaaaagtaaaagacccaccaaaagggatgataccaccaggaactcagttggtcaaaccaaagtctgaacctcagcctaataaggttcgaaaatttgtggccaaggacagtgcggggcttcgcatcccgtagccacccttcccttcagaagtgagcagataggcactagtgaaaagtcaatggaaactatcacttttattgnatgagatccataatgatgatgggtgt

SEQ ID NO: 463870 - DNA, 502 bp, Homo Sapiens
  misc_feature (322)..(322): n is a, c, g, or t
  misc_feature (482)..(482): n is a, c, g, or t
ggttcaatcttgatttctttattcttgcgtttatatacattaggggtggcatgaaaagctggaaaacaaaaactgtcttgttgccagtggtctatccacttgacaagatggggagaaacaaaagtgaattagagagctattgtaggagttagaattcgatataaacggctaccatcagggtgcacaaaattcagtcatttctgacatcaacacaatgctttcaaagctaagaggtactgagggacagataagttgctagttagtctgtccctatcatgcaaagcatgtttgcactataattgagcaagggaaaatagaactnggccctttgtaaaaccgttagaacagaagccaggaactctataccgagaaaccagaacaaagagaaggaaatgggtggctggggatggaagagaggagagcatttccaacagagtagccccactcacggtgaaaggaagcagtcgtttttaaagcagccnggcaaaaaagtgtttgaaag

SEQ ID NO: 463871 - DNA, 457 bp, Homo Sapiens
ccaatctgatgcgtacagaactttattgagggtaaatcagactctgattagagtctgagcaactgctggtacaatgacaacactgctgcaatccagaggttcaggcatgtaacaagctgacacaaaaatactaccactctatgaaagccaatatggatcaccagttggctcccctgtatttctctcggccctcacaggttgtcacagcctacagtgctttcttctggttatcacaaatcctcaaaaattaatcttattctttggttgactcatattgcttttaagaaaagttatcaagggtcactcacaggactgatcaggagaaaaaggaagttgcagagatggttatttattcatctgaagtatttccaaatttactcctttaatatgccctctttgttttaaaaaataaattacaagtctaaactcagctgatccaatttattagaaggtttta

SEQ ID NO: 463872 - DNA, 421 bp, Homo Sapiens
tttaccgtagcagtgggaagttttattgttcctctttcagaagcagatcaagtagacaaaaatcaagattttgcatatagatttacacaaaacagtcaacaaacttgatcccatgaacatacaaagggcattgcatccaacaatgggagaatacatatttataagagtacatgaactattaaatttgaccatatatttgattataaacccatttcagcaaattttaagctatttgaataatacagaacaccttctctcaccacaattcaattaaattaggagaaaagctaatatccacacatctgtaattttgaaaatctctctagagacttccacttctaaataggatatagtaggtcatggcagcctaaaactttgcctggcaacaactagaaaaagatggggaaaattataaaggatc

SEQ ID NO: 463873 - DNA, 427 bp, Homo Sapiens
  misc_feature (390)..(390): n is a, c, g, or t
taaccattgtaaagattttgctttatttctcttccaataaatgaagggcttcactcatgtgatttaatcctaaatttgccatacagcacggactctcaaagatcgctccatgaaggcatgcagagtggcataaataaagactttgggaaaattgtcgaaatttgaaatccttacctctttccctcggagtccagttcccaacaagtaaacttgactttccttctgataacggatctggatgttgtaaactttatctttgtacaacaccatgaggacatatggattggttgttgtttttttagagctgtctctgaccagaaatgtgccatcccaaaaagacaaattcctggttattatgggagcagtaaaagtccaatatttttggttgcnttgtaagagtaagtagacaagcctctaggggatctgg

SEQ ID NO: 463874 - DNA, 479 bp, Homo Sapiens
  misc_feature (264)..(264): n is a, c, g, or t
  misc_feature (355)..(355): n is a, c, g, or t
  misc_feature (386)..(386): n is a, c, g, or t
  misc_feature (394)..(394): n is a, c, g, or t
  misc_feature (399)..(399): n is a, c, g, or t
  misc_feature (453)..(453): n is a, c, g, or t
agtttaaagaacagaaatttattttctcacacttctagaagtccaagatcaaggtgtcagcagtgttggtttcttctaaagcctgtagatctctttggcttgtagatggccatcttcctccagtgtcttcacatggtcttacctttctgtgtgtctgtgtcctaatctcttcttaatggaaaccactcatatggaattggagtccacccatatgacttcattttatcttcattacctttttaaaggccccatctccaaatacangttacattctaggttctacagttagaattttaatcttcagtgtatcagttgggtgtctgtgtgtgggagtgggggggtggggatggataantcatccccataacaaacccaaacttactcanattcactnattgnatgaatattgaatactaatctttcccagccaccatgctagctgatgaccaagcnacagtgaggcaaaacagggtgtaata

SEQ ID NO: 463875 - DNA, 334 bp, Homo Sapiens
  misc_feature (295)..(295): n is a, c, g, or t
taggggaaaagaatgcctgaccctgggaaggctccctggtagaatacaccacacttttcaggttgttgcaacacaggtcctgagttgacctctggttcagccaaggaccaaagaaggtgtgtaagtgaagtggttctcagtccccagacatgtgcccctttgctgctggctaccactcttccccagagcagcaggccccgagccccttcaggcccagcactgccccagactcgctggcactcagttccctcatctgtaaaggtgaagggtgattcaggatatgcctgacaggaanagtctgtggatggacatgatcagtgctaaggaaagcagc

SEQ ID NO: 463876 - DNA, 212 bp, Homo Sapiens
  misc_feature (125)..(125): n is a, c, g, or t
  misc_feature (127)..(127): n is a, c, g, or t
  misc_feature (163)..(164): n is a, c, g, or t
  misc_feature (190)..(191): n is a, c, g, or t
tgggagaaggacagagagtctcggtctctgaggataagtccagtcaaaagtacagtactttgtttttgccgtacacaagagccagttcagaaccaacgcgctgtcccgaaggagtagcaacggtnanacgcccagggccctaaacccaagctgtgccctaccnnggaggcactatcccctattctacgannatatacgactcactatagggc

SEQ ID NO: 463877 - DNA, 195 bp, Homo Sapiens
aaaacactatctgcaaactcaggacactttaacagggcagaatactctaaaaacttgataaaattaaatatagatttaatttatgaaccttccatcatgatgtttgtgtattgcttctttttggatcctcattctcacccatttggctaatccaggaatattgttatcccttcccattatattgaagttgaggaa

SEQ ID NO: 463878 - DNA, 480 bp, Homo Sapiens
ttccagtaaagatggacacttattctcgagaaccttttctttatgtactgttaaagtggcgaaaattacaaagctaaaaactcattcccacttgctgcatgctctttatatgggaatggagtgaaataatagaaaaaataattgatgcccaattatttttttcttcttttcatctgaaaggtagaaagacataattcatccacttagcaaccttgggtaatttgtttctgttaccattttacgagccaggggccaaatgtgttttttaaaaatgtgaatgctcttagtctcattggaaataagttgtaaatgcttaccattttcatctcttgtcataataatgccagaagactgtgagggcgggcttatagttccaacagcatttcttgcaattattctgaactcatagcgatccccaggactgagtcctgtaactgtgtactgacattcactgacgtcagtaaagttgcatctcacccg

SEQ ID NO: 463879 - DNA, 411 bp, Homo Sapiens
  misc_feature (24)..(24): n is a, c, g, or t
atcctccctttttaaaattttttncccaggatgaaggtaggaatgccaagagaggctgagaaaaaccaaattaaccagctgcctacagacctgccttcataggaatggcctttgccttcatctatgtgtgcctccatttctgaatgccttatttctggataccttccagtctataaaaacaaagggaggatacataaaaaaagaactgtactacacttgtactggacaatcaagaggtgaaaaatgttctttagtgagttaaaatcgttttgcaatctctttgaaagaagtaggcaaaaatcttgaaaaagtccaaattagtagagattgtcttagaaaggttaacttttcacgttggcaggaagtaatacccaaacactaacacaaaatttaaacttatctccaatatgt

SEQ ID NO: 463880 - DNA, 359 bp, Homo Sapiens
  misc_feature (29)..(29): n is a, c, g, or t
aattgggagcccccaggtaaatccctgantgacctggttcattccgctgtacccccttgatctggcaactaaagggttaacagctggaggcttctgggagtccagcttgagctggtggttaagtacactgaacatcagccctggacctctgcagtgccacttattgttcctaaaattctagattaaggcaaaccctttttggttgtcaagaacatagtgctgtctccaaggaacagcttagtcggtcccaccagaagcatctgttgggagcgaggttgggcaccaacccatgcaggactttgggatttgggacaatgtagatttgtgtgagtgcacattaagtctcattgcaaaataga

SEQ ID NO: 463881 - DNA, 396 bp, Homo Sapiens
  misc_feature (56)..(56): n is a, c, g, or t
tatgacatgaatcattcacaataacaagtttcgtgtttcagggaacttttgttaanacaacacagttggtcacacaaaatacaaatgcttctgttgatttgtcttggcaactcagatacatcaacagtgctaacagtttaacagctttgttctcatctgacagaaaataatggcagttctgcaaggcaaatgttaaacctgaccgtatgtatttattagttccacagtgttttgacagattataggagatggaactcagaggatgctgacacgctcaccgagggctttcatttctgtttcttcagtctcaggagtgtcactgtggctagcacttggattgatcaggtgtgtggggtactgcagcccctgctcgcctgcatacttctcccaccacag

SEQ ID NO: 463882 - DNA, 516 bp, Homo Sapiens
  misc_feature (367)..(367): n is a, c, g, or t
  misc_feature (375)..(375): n is a, c, g, or t
  misc_feature (382)..(382): n is a, c, g, or t
  misc_feature (387)..(387): n is a, c, g, or t
  misc_feature (395)..(395): n is a, c, g, or t
  misc_feature (407)..(407): n is a, c, g, or t
  misc_feature (413)..(413): n is a, c, g, or t
  misc_feature (452)..(452): n is a, c, g, or t
  misc_feature (458)..(458): n is a, c, g, or t
  misc_feature (480)..(480): n is a, c, g, or t
ggaaagcagagcagccttgtgtttgctccaaatcccagcttctcatccatgatgtcgttaaccccagaatccacatgtacccccagtgctctttcctctcagcaggctccggctatggacgtgtgtctgagctccgcgcagagcctgggcgccggcgggaaggactcagctccccgggtggctggttagaggctgagaagaagggggctccgcagaaagacagcaccgggggagtcctagaagaatccaacaagatagaaccatctcttcatagcctccagaaatttgttcctacagattacgccagctacactcaggagcattatgggtttgcaggaaaggagattgtcatccaggaatccatagngagttcgnagcggtngtgtngccagggntatggtttgtgncaatanttggaggaacatgccgaggaattgaatttccaagatgcnaaaatnttgaaattggtgccggaccaancttgtttcattgtggcagtaatttaggagctaagtt

SEQ ID NO: 463883 - DNA, 432 bp, Homo Sapiens
  misc_feature (23)..(23): n is a, c, g, or t
  misc_feature (68)..(68): n is a, c, g, or t
  misc_feature (123)..(123): n is a, c, g, or t
tcctcccctcctgccaggcaaantaaccctggcccaaccagccctgaattccgggaactaattccagnagactttacagaaagcatacagaactgctgtcaatgtaatactttcgttcagttntgagatgaggaagtttttgtacttcaatcactggaagttgattaggttcctgggtgtgaaaaagaaatgttgccttatgccagctgccatcttgaatcttgcagtcatctgaaagcactttaggttcaagtagagtgtttactttaaaaatctggccattccatcccttgaaaccaataggcaatcctgggccacttgtttgtgtgcttgtccaccttggggtgtttagacagtgaatggtgatgatatgggtggcttccgaactcagtaaatgaaggaagttcatctggactttcccaactccaaacc

SEQ ID NO: 463884 - DNA, 196 bp, Homo Sapiens
cattggaaagcatatgtgattaactagcatggattgcttcttgacctgcttgttttgtgtttgtctttttcttctaatataataaccagggattaatgaaaatcaagttccatcctcagacaagaggtaaagttcacacattcttcccatgtctgttcagaaaagaaacctattcagatataagttaagctaattt

SEQ ID NO: 463885 - DNA, 474 bp, Homo Sapiens
ccaaaaccacacagcttccctttttattgatgctcaagaagtgaactttaaatgacatttcataggcaaaacacaaatgaaaacacctaatgtgcatgtatagtatatgtaaacatacatagtatatggactcaatcatcctcatctaaatataaagagaacaactggttctttgacctcaaaaataaattcaatgttggcattactgtttttaacttacagtgttttatatttaacaggaaaaattatgaataaccaagtttggtgtggtcatggatttcatgttaaggtataaatagagtttttaagaaataatctgtataataaaataagtttacttttgaatcgcagtacagtcatttccttcaatcaataaaaatattccctgattacaaagcagccttattttggcaaatggtatttcaggaaaatagctctagcaatatttgaaataccacactattttaaaaaggc

SEQ ID NO: 463886 - DNA, 441 bp, Homo Sapiens
  misc_feature (36)..(36): n is a, c, g, or t
  misc_feature (83)..(83): n is a, c, g, or t
  misc_feature (428)..(428): n is a, c, g, or t
tcccttggtgggtgagcttctcccccccagacttcntgagtttttgcccgcaggtcggacgccatgacgtaacctttcttctnccttgtccaccattcaacatggctagaagaatttctttctttgggtcttcttgttttatttgcatgtgcataatggtcagaaaagtggagaaatccagctctccatttccgtctaggaaacccgcaaacacagcagagtgagcagagggaaaaagactcctaggaagccagctggcctcctgctggacctgcacagccggttcaaggtcaactgaccagggaatgccaggatgtggcagtggtcacagtgaagaggatgcatcccctcccaccgagttcccacgacaggcccctcactggactggacattcttcatttcagcaacgtcctcagtgacgatttttntcatcaccccaaa

SEQ ID NO: 463887 - DNA, 420 bp, Homo Sapiens
  misc_feature (388)..(388): n is a, c, g, or t
aaggagaactggcctttattgaccacttactaaaagccagacacagtgccaaacatttacatcatcatattcttaagtctggacctctctataaggcaggtaatagtacaaacgttttgtaggtaaggaaactgaggtttacagagatcaagtaattaaggttgcatcattacaggtaagtaagtagcaaggcttagattcaatttgactccaaaaatccatgtcctttccacatgctgtggaatgtttacaatgtttacaacccattggcttatttattgaacaaataaatgggataaacagtcaattctcaatgcacgattaggtcaattaaatatcttttactccttccagatccattttcagggggaaaattccttacattttnccgctccctactacttatttgcatctatatta

SEQ ID NO: 463888 - DNA, 509 bp, Homo Sapiens
gggggcatgcctctaggaagctttattctttgactccttcatccaggaaggggctgttagttgcatctcacccaaatggaatgcgatgggaattgggggcttgagttgtttggagaaggagctgttgatcttggcaaatgaatatagctggtcgtgtggtgtccatcaatccttgagtgcttggccatggagactagggaatggtcagaacagacccagaggtccccagatctttacaataccaaggttcaggaggtatagacagtaaggaaaaagtccatttcctatttctgtccattttcagtaaagtttttgttttgactggcttttaaaaaatttacctaggaaatggaaagcttataaacattcgtaagtgaattgttgaactgctaccccaagtggtttccttacccagtcaccacttaaccagaaatattagaatacacggttcaaccagaattcagaccagcagataacctgcctgttgctcaagcaatcatcagagtttt

SEQ ID NO: 463889 - DNA, 667 bp, Homo Sapiens
  misc_feature (67)..(67): n is a, c, g, or t
  misc_feature (529)..(529): n is a, c, g, or t
caagtgcaaagtttatttaggcgaattaatagaaaatatcactttgtgtaataaaaggtgacatggnggaaggtgaaataattttaaattggtatgcacttaatacaattgccataaggatatgaaagaaaaatgagagagcaacaaaagaaagtacaactcaaaatccgtacatctctcagtaattaatgaagcaagcagacaaataccaggaaatatgtagaaattttgaagtactgaaaatacatatatgtttgtgtgtattgtgtgtatactatatccccaaattgtcaaattaatatttttccaatcacatatggaaaaatatgaaaacctgtacttgcaaattaagcaagtctcaatgtatttcaaaggattgctacaaaacacacagtattctctgaccacaatggatttcagatagaaatcagtataaaaggcatctttaggaaagctccatgtatttgagaattaataaacatttctaattagtcatgggaaaaagtcatggaaattaaaactgtcaaantcctattaaaatatgtggaatgcagctagagcagtatttagagagcatataggcagacctgcttagaaatgtgcatattagaaaagagagactaaaaatgagtcattcaatacacaaagttaaacaataacaaaatgg

SEQ ID NO: 463890 - DNA, 396 bp, Homo Sapiens
  misc_feature (14)..(14): n is a, c, g, or t
gactttttttgttngttttttcccacttctctagggttcttttccccagtcctttgtaaacatagattttaactactgttttcttcaaaatcgtataacttctcaatgaaaaactgtacttgaagacaaatcccacgaaatagtgtgatttgaagaaatgagtgtacttttaacctaaagagaaatgcaatgaaatattttcttgaaaaaaaacttgtaatattagtattaattttacaaaaaaagaaaactctgaataattccaaaaactatttgtagaatggatgaagcaatgcctgagattatagatgggcttggggacaatggagttttataaaaggccctcctgtaaagtaatttactaaattacttttagtacaaagtatctgttgatgt

SEQ ID NO: 463891 - DNA, 686 bp, Homo Sapiens
  misc_feature (527)..(527): n is a, c, g, or t
  misc_feature (529)..(529): n is a, c, g, or t
gaaaaatgttaagttgtaaaatacatataacaaaatttaccatcataaccatttttaagtgtaacgttcagtagtgttaaatacattcatactgttgtgcaaccaatctccagaattattttcatcttgcaaaaactgaaagtctatacatattaaaaaatgccccattccccccaccccagtcagatttttaatttaaaaatacaagtggaagttctaatattttctatctatccctctatctataaacgttgggggccactgaattccagattgctgcttgcatctttttacttctgagcatcatggcctctgggagtccgttaagcaactgggagccgggttagtgtgacaggcttgaccccaaagctgtgtgtcagcgtcaccggactggttgatgttgcagcctcacctactgccctgagtcagtcagggttctggcaaggaaaggagaatgcctgaccagcagctgcaaacccttctcccttttggcagcaatcaaaagattttgaggaaatctaaaattngntcctcatcaggaaaatgtggaagcccctccagctgggatcttccctggtgggcttgtgagcctggccatctgggaatagagacactagatagcactcatacactcttcacaaacacattatcacatggaatgttttgaacatctgggtaaaccaccc

SEQ ID NO: 463892 - DNA, 346 bp, Homo Sapiens
  misc_feature (321)..(321): n is a, c, g, or t
cccagtcaagtggtttattttaacctgtaaaacaaaataatgaagactacaagcttctgaatcttagtagttcctttaccagccaacacacccacccccttgattgcttattaggaacaaagatgataccgaaaaggggaccctgcttggccaggcctgtattttccttcctcgtgcttaaaaatcttcctgagatgtaactcagtaacatgtgcaaaaagcagcggagcctcttcttggattctcagtgctacttcaaggagatgatggagtcccaagggccagggttatccgggaggtggatatagccctgagccattngggcaggtaggcttctcttcacccc

SEQ ID NO: 463893 - DNA, 193 bp, Homo Sapiens
gcctctgcttaacactaaggcagagatagacttttcccgagttttaggccatcagaaacctcatgggcaactttcccctttcactgtctttctagtttgttttccttgttggtcagacctgtttgagtaaattctcatagtaagttcttctcttccgataacaaatagaacttaagctaaacgactttttcag

SEQ ID NO: 463894 - DNA, 467 bp, Homo Sapiens
  misc_feature (20)..(20): n is a, c, g, or t
  misc_feature (26)..(26): n is a, c, g, or t
  misc_feature (34)..(34): n is a, c, g, or t
atattgatccctgaaagaanggaaanccaaatgnggattggccctaagagcactcccaccttactgcctggatggaatttccaggctgcacacaagaggctggagatgttgttgagttgaagaaacaaagttcatctttcaaggaggctgagatggcgataattttgcaggtcagagtactggagaggaaagatctgcacagagagaactctctggggagctgcatagacttgctcatgagtcagcagctgagcgttgatcagcccttttgtgtgaggagactactggaagtcagggaaaaaatcactggaaagcagcagacagaacagtttccagagctcacacagagaacattcatgttctcaccagtctgtatggaaatacctcttaacatgacaggcattgaatagagtccacagtaatgggatcaaattaattctatcacaagaactggaaccagaggcaaa

SEQ ID NO: 463895 - DNA, 473 bp, Homo Sapiens
  misc_feature (244)..(255): n is a, c, g, or t
  misc_feature (350)..(350): n is a, c, g, or t
  misc_feature (357)..(357): n is a, c, g, or t
  misc_feature (382)..(382): n is a, c, g, or t
  misc_feature (397)..(397): n is a, c, g, or t
  misc_feature (405)..(405): n is a, c, g, or t
  misc_feature (421)..(421): n is a, c, g, or t
  misc_feature (452)..(452): n is a, c, g, or t
  misc_feature (461)..(461): n is a, c, g, or t
acctataaatatattttattcatacttttaaatattttacaattcaaataaaaaccttatatgtagacaatctgggctaaatttccatgtatgttttgaaaaataatgttagcatgaatagattcatatttaaatatgattttaaatactcttaatagaggagacataagaaatatttacataaaagctaagtagcatgatacagctcatggttattttcctcataggaaaacaattacttgannnnnnnnnnnngcataggattaagactgagtatcttttctacattcttttaactttctaaggggcacttctcaaaacacagaccaggtagcaaatctccactggcnctaaggntctcaccaccacttttctcacaccnaagcaataggtaggnatccaggncccaccttctgagggnccggaaggaatgggttccggaaaataatggnttttaaaanattaccattaag

SEQ ID NO: 463896 - DNA, 320 bp, Homo Sapiens
gacaatcgcagaagtgatggcatcagaacttcaacagccttcttaaattggatgtcattaaataaagcaggccatcgcgcttttttagtttgacttctgtaatagattttcagttcctagcctgcgtgaaaaaacactgtaagtttaatagatgtggctataacatgcagacaataaggaatgttgtgaaaatgcaaagttagttacttcttgaggatcaatgtgtagatttagcacgttaacttgtatttcgcaaccatgttctgacaccgtataataatgatttctaattagaaatagatgtgcttatgttaacatgc

SEQ ID NO: 463897 - DNA, 380 bp, Homo Sapiens
  misc_feature (214)..(214): n is a, c, g, or t
  misc_feature (283)..(283): n is a, c, g, or t
  misc_feature (292)..(292): n is a, c, g, or t
  misc_feature (301)..(301): n is a, c, g, or t
  misc_feature (323)..(323): n is a, c, g, or t
  misc_feature (345)..(345): n is a, c, g, or t
  misc_feature (354)..(354): n is a, c, g, or t
  misc_feature (368)..(368): n is a, c, g, or t
gctgttggcagtttaaaatatatataattaataaaacctgtgcttgatctgacatttgtatacataaaagtttacatgaattttacaacaaactagtgcatgattcaccaagcagtactacagaacaaaggcaaattaaaagcagctttgtgaacttttatgtgtgcaaaggatcaagttcacatgttccaactttcaggtttgataataatangtagtaaccacctacaatagctttcaatttcaattaactcccttggctataagcatctaaactcatctnctttcaatntaattgatngctatctcctaattacttgggnggctaataaatgtttacattcntgggttacntgaatgcattatanaaactcctatgt

SEQ ID NO: 463898 - DNA, 402 bp, Homo Sapiens
gcctaaaagtatttaactcccccattacaccactgatttcaaagaaaaaaagctgaaatgtaagatcatatgatttgtttttaaactgaacactgtatactgtctttttatttttgcaaaattaatgtagtatccagtgtgtctttagataaccctgtccttaatgatattttcaatagccactaacccttgcctggtactgtttccggggtttaaactaagaacagaaatctaaggcaggctttattagtgcatagtacaaatcaattacatatatatggagatattatttttccctcttcaattgtttttcatgcagcttacccaatataattggttctgttagttgtacactactctgtgatagcaaataataataataaaataattatgatgaaaaaa

SEQ ID NO: 463899 - DNA, 432 bp, Homo Sapiens
  misc_feature (321)..(321): n is a, c, g, or t
cttatcatgacttttactgaatcattgctgacaatttggctaatcctggacctaactacactactgaatgaattggcttgtggttgacggccttcattttggactctgcagacccatccaggatgtagagttcatgtttgtcttctcagaaattgggtgactttgaagccaagttcatttgagctttgaatgccaagtcccctaacctgtgcaagcttccagaatgacagcttggcacggatctgactttcaggggaagaatgctttgcatttctgaatagtgatgtccctacagtttactcagaagggcagaggcagctngtcctgaggtagcctctttcagttttgagtgtaatggcatgatgtgaggcctctctcggtggggtttgaagctttgtgtaaagctgagtgaaccgtgagaggtcagggaca

SEQ ID NO: 463900 - DNA, 507 bp, Homo Sapiens
gacaaaagccataaaattacttcttattaagtagtcacaaaaacttcatactagaattggtcacttgttttgaatcaagtaataagacttgatattgaaaagtatatatgcacatgattaattaaatataagcttagtcaaaattctttctgaatgcagacaggttcctagagtgatctcattttaatacatttacatattcactatttccatgttggtacagagcaccagacgaacttaaggttctgccttgtataattcagtatcttcatttgcagccaaacataatagattgcaaagaattatctggccagaaataaatatcttagatcattactctgcagatacgaagctgtggatggtaatcattgtagcaataacttattgatataaaaggaaaaagggaaatttattatatttacaggtggaggacacaaatgaggattactgattaaaaccaataccacagaatagttactaaattttgttctggcctcatgccgaatt

SEQ ID NO: 463901 - DNA, 465 bp, Homo Sapiens
  misc_feature (30)..(30): n is a, c, g, or t
  misc_feature (76)..(91): n is a, c, g, or t
cggggtcgtgcccattggactccagcctgngcccatgtactcccagcctgagccaagagagtgagactctctttcnnnnnnnnnnnnnnnnggtcctattctatggattaatggacatgcctaaacatgtttactaaattgaactctttatcaaatgaagatggtgcaagtgatcctagatagcttattttaaatttgttcacatgttgatcatatatgttgatatgttgttcacatatattgataaaacgatgttacttagcctttatttgcaattttgattcagaagatatatctagaaccaaagttatacattttcgcattcttcctaggtgtatactactttttgtcttctttgtttctaaaatagttttggcaattaaacactaacattaatactgactttgtggcagccatttctgtagctgccatgagaattagttttaagatccgacaaagatcacg

SEQ ID NO: 463902 - DNA, 460 bp, Homo Sapiens
  misc_feature (19)..(19): n is a, c, g, or t
  misc_feature (36)..(36): n is a, c, g, or t
  misc_feature (53)..(53): n is a, c, g, or t
  misc_feature (72)..(87): n is a, c, g, or t
ccggcccattgtacccccngcctgggccattgtacncccagcctgagccaggngagtgggactctctttccnnnnnnnnnnnnnnnnggtcctattctatggattaatagacatgcctaaacatgtttactaaattgaactctttatcaaatgaagatggtgcaagtgatcctagatagcttattttaaatttgttcacatgttgatcatatatgttgatatgttgttcacatatattgataaaacgatgttacttagcctttatttgcaattttgattcagaagatatatctagaaccaaagttatacattttcgcattcttcctaggtgtatactactttttgtcttctttgtttctaaaatagttttggcaattaaacactaacattaatactgactttgtggcagccatttctgtagctgccgatgagaattagttttaagatccacaaagatcac

SEQ ID NO: 463903 - DNA, 384 bp, Homo Sapiens
  misc_feature (338)..(338): n is a, c, g, or t
gttttttaaatacattttattgtgtatatttgaggtttacaacatggtagtttgggatgcatagaaataataaaatggttactgtagggaagcagatttacatatctatcattctcacacaactactttttgtgacaaaagcagctaaaatctacttagttaacaaaatccctaatacaattttattaaccttagtcctcatgttatacattaactctctacacttgttcattctgcatatctgctattttgtatcctttgacctatatctctgtttcctcctcctgttccctaccatggtcgccatgttttattctctgtgtttttgagctttttcntttatatatattctacatataagtggaatcacttttccttccgggg

SEQ ID NO: 463904 - DNA, 125 bp, Homo Sapiens
  misc_feature (76)..(76): n is a, c, g, or t
acagagcaacattcgtttatttaataagatggaaatagcacttacacaatgcatttctcagacagcacacagtgtnattggcagtatgtattggcagcttaattaagaagtctgttgatgatgtt

SEQ ID NO: 463905 - DNA, 571 bp, Homo Sapiens
  misc_feature (22)..(22): n is a, c, g, or t
  misc_feature (31)..(31): n is a, c, g, or t
  misc_feature (64)..(64): n is a, c, g, or t
  misc_feature (89)..(89): n is a, c, g, or t
  misc_feature (303)..(303): n is a, c, g, or t
  misc_feature (307)..(323): n is a, c, g, or t
ttatatggccgcatcttcacantccgtcttncgggcaacattccttgaattggatgaaaatagncagagattattgccagaaatgccanggaacttatgaaaagagctaggccaagtatgtaacctgggtgcagagcagactcttcctcaagaatacccagacagtaagtataaaaagtatataatgctaccaattgcccatatttaacatttttaagattatggaatcttagcccattgtaacaggccgtgaaaaacatgatgtgtcgtaaaaaatagggagtttttccacatttttaaacntgannnnnnnnnnnnnnnnnaaataatgttgcttaagagatcaatggtattggtactataacatttattcttccaatacaaatgccttttaatgggtacagttggaacatatatagtttttcatggaaacattgtaccagtaattggtatatcagaaataataaatagaatattttaaaaataaagggaaaatgaaaatgtttccctggaaattggggtgtttaattagggttcaatgagagctgaatatttaaggctaacatctgcc

SEQ ID NO: 463906 - DNA, 493 bp, Homo Sapiens
  misc_feature (17)..(17): n is a, c, g, or t
  misc_feature (55)..(55): n is a, c, g, or t
  misc_feature (453)..(453): n is a, c, g, or t
  misc_feature (458)..(458): n is a, c, g, or t
actccatcaacaggcanggaaaccatccacttgtgtctgccccaagggggaacangaaatgttctctacagagttggcaacaactgctccaccaatccatcccacgagcccacagatttacactgcccaagttgagagatgaactggagctgcctgtaccttgaggaaaatagcaagtcgtcccatgaggaacagtgtagccagccttctctatttccattacagcatggaagaaaggaccacatccgtcattgcctagctctggctcagcagaagactaaacaactgtacccaaatagacctctacccccagaggatcaaaagcagcagccaagataaattgaaaggaaattcttcctacagaatctctataactaaagaaaggggatcaagctaaaaaggacattaaagcattctgggtctttacatttcaaggtcactgtgacatgatcnaaacngcttttcggcctccttaaagactctcttacctttc

SEQ ID NO: 463907 - DNA, 545 bp, Homo Sapiens
ccctcgagcccaggaattcggcacgaggagaggagtactgtatacctgtgtgtttgcttttatatgtatacttttatttccagtattatcacttaattgctatgtagatatataactgacatttataaataacactttcctatttatagtatgttattaataggtcataattatactaatggagtaaatctcactaaagctgacgtacatagaagaaattttggattgatcataatctgcttaagtgagaccttcctgtgacttagttaattttatgtgtcttttatcatggtacagtatagcattctgattgtgggtgaagtgatacaccctctaaatactgcatctaaaaacaacctcaccttaattgcaggctgaacagaattttggaagggtttcattcacaaacctgcatgtatgcctttaagaaagttcctatattcttctgagggtcatagtttggtgtcttacctcttggttcaatacagcaaggacacaaactgaccaaaaacgatgataaagggtcaagagtcactgacattgtc

SEQ ID NO: 463908 - DNA, 440 bp, Homo Sapiens
tagttttgtaaggtggaggcttagatgattgattttagaaccttctcgttttctaatacatgcatccaatgctataaaaattctctctaatcactgctttaactgtatcccacaaattctgataagttgtgtttgcacttttatttagttcaaaatattaaaaaatttatcttgagatttcttctttgacccagagttatttagaagtgtgctgtttaatctccaagtatcggggattttccagctttcgttagtgacttctagttgaattccaaagcacacaccatatgatttctagtcttttaaattggttaaggtgtgttctattcgccagaatataatttatcttggtgagtgttccatgtgagcttgagaagaatgtgtattctgctgctgttacatgtagcagtctactgatgttcatcatatccagttgattc

SEQ ID NO: 463909 - DNA, 698 bp, Homo Sapiens
  misc_feature (17)..(17): n is a, c, g, or t
  misc_feature (41)..(41): n is a, c, g, or t
  misc_feature (59)..(59): n is a, c, g, or t
  misc_feature (256)..(256): n is a, c, g, or t
  misc_feature (296)..(296): n is a, c, g, or t
gaggcaccagacccatncactcaagcagcagccgtggtggnaagcagactttctcaagnttctgctacagtggaagagagcccggggaagctgccagctacttggtttcgtcccactgcttccaaaaggaattgttcagctgctcctggagtgatgcagaagatgggctctttctggtccacgcatggtctgggtgaccgcgcctggactgctgcagctacgatgcagctgatgggcttagcaactggcctccacntgtcagcagggcccccaagaaggagctgcggatatctccnagctattttaggacccaatgcagaagattgcccacggtgtctgaggaacagtacatcacagtacataaggtacataaagtgtgttggagatggcccagatcaaattcatcaaactgaaacttgatttctttcaggctgaagatctctgtgtacaatcacaatcttggtgcagcttctgcagaccctggtgcatccagtcataccaattccacatccgacagcacatgctactagccacttccaggatcattaaaatacatttctggccatttctggacccagtccaaagataaagactgactatgcaacaaacaaatgacagattaaaggagacaaaaattactttcacaatgtataattacccaacaatgtaacattttattaaatgtgtctgtagtctgc

SEQ ID NO: 463910 - DNA, 572 bp, Homo Sapiens
  misc_feature (136)..(136): n is a, c, g, or t
gcatgttttaatttattaacacaaacatttaaagtacgctttttaaaaaaataatcatgtcttggcatttttccaggtactatattcatagcctcaaaaaatagaagtggttgggtctcttctgcccctgggctgnggtgagctgcagccgcaccggggccatgtccctccctagagggcgctcctcccttccagccagcaatgttgcccaacgcgggaggccagctgtgcagaacccagcatgcaggcatctcactcccaattcagcctgggaaatcggaactgagaagccccacgatgaagccctgagctgaatgctgacatgacactaattcactggaaaccgaagggtgatgggggcacagagcctctcatgctgtgcgccctgaagcccacctctgggatggaaggggacttctcacgcgaagctggagagttcagacattgtcctgagggtaatggggagctgttgaagacaggtggggatgagcagcatattcagaactgtattttagaaagatcgggccgggcgaggtggcgtgtgcctgtagtcccagctactcaggaggctg

SEQ ID NO: 463911 - DNA, 707 bp, Homo Sapiens
  misc_feature (20)..(20): n is a, c, g, or t
  misc_feature (42)..(42): n is a, c, g, or t
  misc_feature (162)..(162): n is a, c, g, or t
  misc_feature (164)..(164): n is a, c, g, or t
ggcgtgggagcggccatgtncatgtctgtccagcattccatnctgaaacatgaacatggccagcttctcggtgtaatcccactgccggattgccacctctacatcatggggcaagggcctatccgtggaaccacagcccccacttcctgcaggccctggcgntnagtattcagccatcttctgtaactgctcccataagtacttggtgatgatctgagtccattccatgaaagggtcaacatgtctcttcttaaccttggtctcagagattgctgcatagtaggcacaggtcatcttaatgagccaggcaagcccgcatccacaggcactgtgtaatttggctaagtacccaaacacctcttccttcttactgaaaatggggacctttttgggctagttgcgtgagtggcttggtgccagccaagtcagtgaaccaagtgttaatggcactctgggatcgtgcagtcaccagccagaagttatccttctggttcacttggggcttcctgcgaccagtgtcaggaagggtattacaacgtaatttctctgcaataatgctgctgaagttggaactgatcttggcaggattgaagctgacgttcttggcactgccatgctcatccccagagacagcaggctggttattgaaaccttgttttacattcaaggccgtcagttcatcctccttctgtttggggtcctgaggg

SEQ ID NO: 463912 - DNA, 301 bp, Homo Sapiens
atttctgtagtttaaattttaaaacattgagataccacctcacaactattaaacactcaaagacaacattagtaactggctgtgttggggagggcctgaggaaaaaggcactctccgcattgtaggagaatacattgacaagagcatcatgaagggccattcagcgtctatcaaaacaacaaatgcatatgcccttagtattctgctatttcacttttgtggaatttttcctacatatataatcacaatcacatgaaatgacatgtgtataaagttattgattgcagcattcctccgtgcc

SEQ ID NO: 463913 - DNA, 416 bp, Homo Sapiens
  misc_feature (36)..(36): n is a, c, g, or t
  misc_feature (165)..(174): n is a, c, g, or t
ggccaggaatgccaggatctatgatcaagtgactgnaaactatgaacaaaataaacaacagaaaaaagaaacaaacccacaagtgcttcaggtattagaattatcagacatgaactttaaagtaattggtaatattatcaaacttaggtttaaataactagtagnnnnnnnnnnatcttggtgctagttacagagattcatttacattgtgataattcatccaccctgtacatttaagatggcacactttctctcaggtatattatacttcaatacaattttacaaaagtagaaaacttgtgggatgtgactaactctggggtgggggaaatctataatccgtaaacacatgtatttgaaaacaaaacaaagtactaaaaaacaatgatatgataggtgtggtggctcacatgtat

SEQ ID NO: 463914 - DNA, 378 bp, Homo Sapiens
tagtttgaaagattgatattttgaggagaaaggcaccaaattattatttttactattttttgcatatggcacaaaggagatatgtgaagttcccactgtagagtttttaaaacctcccatcttggatcagtgtggcttcttcggtgaggtatcctgtcttcagagtttaaagcatttctcattgtatctatgaatagtcacacagccatgataggacactggcctgggcattgcagctacccctgtgatgatacttgttgcaggatcataacagagaatagtgtctgtggcttctccattttcccgtcttccgcccaggatatatattttaccattacacacagacataccacagttttcctgtttaaccaaatatat

SEQ ID NO: 463915 - DNA, 531 bp, Homo Sapiens
  misc_feature (177)..(177): n is a, c, g, or t
atgagccatcatgtccagccttcaaccagatttcttgacagcacctttatatgtgattcttacaccaatcttcattgttaaccccattttaaagaagcagaaaccaaggcccagggaggctacataacttgccagagctctcagagccaaaaagcaacagattgtggaatttcaaancccgggcattcagatggccaagttccctgcactcccactctcccaaactgcctcagcctgagcaagcccaacctgaagccttcctcctggagtccaaagtccagccaggaatgtgacatgggctccccagccctccagatgtgtgtgctcacactttgtctggacttgttcctccttggccttcgaacgttctgccctcagatgtccccattagtcacagtctgtctgagagccctcggattagctggatgggagcagacgcaactttgtggtggtcatcaggttgtcccattcatcagctcaggcctgagcctgctggagtgtggtcgttgccagaaacaataactcttagga

SEQ ID NO: 463916 - DNA, 706 bp, Homo Sapiens
  misc_feature (551)..(551): n is a, c, g, or t
  misc_feature (656)..(656): n is a, c, g, or t
  misc_feature (671)..(671): n is a, c, g, or t
  misc_feature (680)..(680): n is a, c, g, or t
ttaagcagaaagaaatttattacagaatgttacatggctcacagagttgttgggaaagctaaagaaacagactaggtggaatatccaggaatgatttccagagccacacaatgagtgggccaccaaggaggctgatgttcctgctattatcaggaaagctgcctattgagtcaggatgctaccaataaagcttctggcctccagaaccgtgtcttgcattctgcctttcttccgacttaacattgttccctatacaaaactcatgcgaatgtgtttgattgactgataataaatcacgtctggaacctagctcaagggaatctgagaaatgcagtttttaactttgcagcttatgtagtccaggaagatacagtagattgaagataggaataccacgtgtgagtgagccaaatccagtatatgccgtaagtaccaactgctgttagctccagtttactcacctggggggacttggtgacttgctgggtgcagggggtgggagtgaggaactgagagataaatgggtggtctgatactctagtaatccactnaaaagttgagggtgtcctgggctcccctgggagtccgtgggcttgggctggacaggtcgtggggagaatgctgggtaggtgggtgcagctgcagccacagggganccagagtgtgcagcnatgtgtccngcgtgagcctcccgagcttccacccc

SEQ ID NO: 463917 - DNA, 687 bp, Homo Sapiens
  misc_feature (188)..(188): n is a, c, g, or t
acaacaagctgaattttgctttacattggtccatccatctgaaatataaaatacagaccttagtaacattgtaacgtagcaggcattggctttgtagtcattctaaatgggtcatataggtctatgggggagaagcaggggattgctatttttcacctaacatagagaaggtgcaaatcccacttccnttaaattaaaccaggtcctcattttgcacccctataaatcctttcaggatgctgttaagagccaagtggagtctcaccaggggccacttcaaaggatccagttcctcggggttccattagaaccaaatttaaaatggatcatgtgtggaactgctcttagcagtttcactgggcataaatttttgagtgcctgttacatggaacacgcactgccacactttgctcatgattccaaattttgctaagcacattgacatttattggtgctccagaggcccaaatgttttaataactgagctcgtttttattcttagtgacataatattaggattctacaattcctacgatatttgtcatatttataacctcatgcacatgaatattttaaatatagcatttttggtatgttttctcacatcttcctaattgtatatgattgcatgcagaatactatgtgataatagagggctgcaaataataacagcttagttaaataagc

SEQ ID NO: 463918 - DNA, 483 bp, Homo Sapiens
  misc_feature (72)..(118): n is a, c, g, or t
  misc_feature (154)..(163): n is a, c, g, or t
agtaacaagattttcctatgttgcccaagctggtgaggctttttaagcactgacatgtgtgaaggaaatgcnnnnnnnnnnnnnnnnnnnnnnnnnnnnnnnnnnnnnnnnnnnnnnnttggaaagtatatataataaaaatattccaaaatcnnnnnnnnnntcttaaacccgaaatacttccgatccccagcacttcagataagggatactcaacctgtatctataaaactgtgggaggctaacttgttagcttccaaagtagagtaaaatttcagactcttctcagttcttgacggtgtttggtgatgaagattgggatgctaatagaaataatggctttctggaagagagaagacaagggctcccatggggctgggtgaaaggatatgagaactccctggggatctgggtagcaaatgttcttgctcaagtgggtgggcaaggggggaaggaaaatttggcaaatctaatgtatttgcc

SEQ ID NO: 463919 - DNA, 512 bp, Homo Sapiens
  misc_feature (415)..(415): n is a, c, g, or t
  misc_feature (425)..(425): n is a, c, g, or t
  misc_feature (472)..(472): n is a, c, g, or t
  misc_feature (481)..(481): n is a, c, g, or t
  misc_feature (488)..(488): n is a, c, g, or t
  misc_feature (501)..(501): n is a, c, g, or t
atgagttcaacattttattcaagtaatacattttataatattgcaagaagtgacttggaaaatttttgcataccaaagaacttctttttaccaaaggccaactgaataaactgtgtatgtccaatggtactgatctcataccatcaagaaaagtatttcacattaggaaatcgctccacatgtgggtaattagaaaattctgtgacaatcagtctcaaatatattctttatttgtgttgcaaactgaagctaaacgagaattcaagcttttcatgaagaccaaaaatgaaaccatgaacctgtaaggtcagcattttagttgctgtgaaatgatgggcacatgctgtgcccgggcacttcagcaacactggggctgttggccttcacactttacatccggctttccccggaaccncaatctacanggccaagaggtcccgattccccagaatggggtacaaatttggttttnaaattaagnggatggncccccaatcttgntccccaacggg

SEQ ID NO: 463920 - DNA, 593 bp, Homo Sapiens
  misc_feature (21)..(21): n is a, c, g, or t
  misc_feature (47)..(47): n is a, c, g, or t
  misc_feature (62)..(71): n is a, c, g, or t
  misc_feature (418)..(418): n is a, c, g, or t
tcccaagctaaatttaccccntcactaagggaataagctttgggccnccattattccagttnnnnnnnnnnggagggaaaactcttccaaatgcccccaatacttccaaaaccaattccaggtcttatatgctatgtcactcaggattttatttaaacatgaaggagttgagctaaacgttttacgtctctcctttcttttagattactaaggctgaaaactaagctttggccaatgatttgtcttctccgtgaccccatttgggggactggggccattactactctgtcagatctaacactgatccttaaacgggcatagtacttttaacaaatgctctggactcctcttaaggaaactttcaatctgctctaagttactcctcacaagcacttcatgaggtatgtaattagttttngccctccattttgcaggtgagaaagtttgaagttgaaagagttaggttaagtaagttgtagtactgatttttctttcttaaatttgctcatttgctatcagattcaactgacagactcagtggcatgaggggagaagaggtttgagtgcctgcaaactggctcgctgtgcacgaa

SEQ ID NO: 463921 - DNA, 477 bp, Homo Sapiens
ttttttttctcttggggagtacttcttggtgaggtccctgtttccccgtggaaagcgttcacactttctcttcaggctgaagggagcactaggatctctgcatcaactccacagtggtctcccactgtgtactgtgcctcctccatagacacaggccctaatcgatgggctaggaatctaccctgaggtctagctcaagttctggctgttcaagagggttatcatttgcagaaagaaattattaacactcagactgaacatagatatacaaacaataattttgtaaggaagacaagacagattggacctacccaccttatcaaaacagcatcttgctactgggcaatatggaagacaagatcttttcagcagagacacaacaaaagcactacttgaaaaaggcatttagccaagagacctcttattcattcagttttttgggaggcggggttgggagtggtaattaaagctgaaccc

SEQ ID NO: 463922 - DNA, 446 bp, Homo Sapiens
  misc_feature (393)..(393): n is a, c, g, or t
  misc_feature (430)..(430): n is a, c, g, or t
tttagcattatgtttcatttattaatcttttatttttcattacattttagtacagcaaagcaaatacaggtaaacatcagtattcttcatacaatagcagacagaaagggaagccagccacaatttagagtgccttttcagttgttcgttatatttgtttgttagtttatcactttaagctagattattttactggcgaatttttttcaagctttcaaggaaaagcctatatctatacgctatatgctatattcttttctagataatgcaacaagatggaaagatttccaaaacattttatagagctatcaaaactcataccaaaatacaacagagacagcaagtgggtcaatcacatttaccccaatcagacaatatattaaaaccggttgnaacatttcccggacacccacacccaggacctaaattntgaaaagggcctaaat

SEQ ID NO: 463923 - DNA, 243 bp, Homo Sapiens
tcccattcctgttctgtgctggactaacagaaagaaattaggagtgcaagactctctgtgcccgaaaacacagttcatgaggaaacagacaagagggaggctcagagacaggtttatattgctacttcattttggtgactcccccacccccaccaccagtaaatggcccagggaatagctcacaggcccaacacaattctgtctgttagatcagttaagcaacacaattctatctgttagaac

SEQ ID NO: 463924 - DNA, 517 bp, Homo Sapiens
  misc_feature (94)..(128): n is a, c, g, or t
  misc_feature (424)..(424): n is a, c, g, or t
  misc_feature (455)..(455): n is a, c, g, or t
  misc_feature (485)..(485): n is a, c, g, or t
  misc_feature (494)..(494): n is a, c, g, or t
aaaaatgagcataaatcgtaagtatctacctcataagtgagttagtacaagaaaagcacccagcctggccgacagagcgagaccgtgtctcagnnnnnnnnnnnnnnnnnnnnnnnnnnnnnnnnnnncctaaggaggaaagtggcattctatttccagcattttttcccctcatccccattatgggagctacagcttaagaatcaatttcagctctaatcccttagccttacaatcaccagtatctgcctttgacgtcctctgagaccctgctctccttcgtgcagggagtgccatgccctcgtgggtgacagcgtgctgacagagtggactgtgaatattcttcaagtacttgtggtcctgggtcatcaggggttgcattctacccagttacagagggtttcccatcgaggaaagcagcaanatcagagaagttggaaggggggctttcctcngtgtgtaagggccggccttgctaaacccgnaaaattttnctagaaatgtggctggcttgcta

SEQ ID NO: 463925 - DNA, 423 bp, Homo Sapiens
tgaaatgctccttcaaacgttttactcattcatcaaccatattctctatactatgtgtagacgttacttgtagtctatgtgctttataaatccttctttcctgatctctgaccctctataaacataaactttttattgtaatcagaacaaaataatgaatatgtactttgctgcgtagtgatttttgtatccttcagaaaatctttgacaactgtaacatcaaaatgcattttagtatgttttttgctgcaacattattttatatgttacagtagttctatgatgaatctcaaataaattattttgtattttgtgaggaagaatatgagactcatttatttttccatatgggatatgcacttgatctgccatcatttatttcaaagaacattctttccagaatgggccccctttagttaaatc

SEQ ID NO: 463926 - DNA, 446 bp, Homo Sapiens
  misc_feature (63)..(63): n is a, c, g, or t
  misc_feature (393)..(393): n is a, c, g, or t
  misc_feature (417)..(417): n is a, c, g, or t
  misc_feature (428)..(428): n is a, c, g, or t
aatttattaatatacatatcccttaccctttccacctaggaccttacactattaaaactgaangaaatgtaaaagttgatttattttttggcatttatattagtatggaaatgtttaattccaaacaaaaacagtgctgatagaaaattcttattcttctattttggttaatgaaatcttcaaaatacatgcacggtatatatttgtcaacatcattcctttaaatagaggtagacttcattgtatcctagttctttactcgattatacaatataaaaatcatataaatttatcttcaaataaaatgttacctacttacaactttaaaaggaaattctaactacaataattctaaaataagattcagttgaagtatcttgttaaatgtgtgantattttgagttacattcaccctgngacatagcttntttcataacctatctccc

SEQ ID NO: 463927 - DNA, 400 bp, Homo Sapiens
  misc_feature (140)..(140): n is a, c, g, or t
  misc_feature (142)..(142): n is a, c, g, or t
  misc_feature (155)..(157): n is a, c, g, or t
  misc_feature (169)..(169): n is a, c, g, or t
cagatctcctgatttttattttaatgttttgacatgcacttggctattctgaaacttaaatgtgcacaccagtcacctgcagtttttgttgaatgtagattcagactcaggaggtctgggttgcagccctgaggattcgngnatttcctaatagnnntcccaggggggngctgacataccttggtcactggataaccacactgagacgcaacatgctagagcaccctttctaattattagagccagcctgcacctaatatttcagttatttttatttcttttcctttttcttggtaacacactaaaaaggcaatgtaacaactgaactacattaactggattttagaacagaattcccatgggtaagcgtttgttttcataaatgggtacataatcagat

SEQ ID NO: 463928 - DNA, 359 bp, Homo Sapiens
catagtatgtactatagaagagaaaatatgtgtagttaattgaaagtggttaaatgtcctctgggctaaaatgcaaaaaattttatagcaaaccttgaatttaatttgagctcaaagtattaggtcactgtaccattcattttttaaactctgactgagatagataaaatattcagatttctccatttctccaaatttagtacaagaatcttatgaaagcattaaaattgtgtaagtaattgttagattgcttcttatacaaaaaatatttatacattatatgtataatgtatacaatgtaatgtaagcttataataatgtatttgtaatgtaatcttatacatgcaaattgcttgtcc

SEQ ID NO: 463929 - DNA, 431 bp, Homo Sapiens
  misc_feature (59)..(59): n is a, c, g, or t
  misc_feature (95)..(95): n is a, c, g, or t
  misc_feature (142)..(142): n is a, c, g, or t
ctttatatttgcctgtaccgctgtgtaaaaaccagtaccgtgccagtatactgtactcnatagcccttttcataatataggaccctagactctcnatttgtaaacgttcttaaccctagtttataatggggggaaattattnagatatcatttttaaatgaattcctacaaatacaatggttttaaaaattgggtttgctgaatatatatacatcttttccgttctttgtgtatggatagaccacggtatgcatatctatcgacactataaatatatataaatccttagaagaattgttcttttttaaaggtctattattggattcacaatgcactttgagtttgattgtttagatatacaattcagagcagaagttggcagataccacgggaaaaactttctgaaatttctgtaacaaatgttttgcaat

SEQ ID NO: 463930 - DNA, 437 bp, Homo Sapiens
  misc_feature (195)..(195): n is a, c, g, or t
ctcttgcagagtgacctttaatacctgggaaggatgaataagcacaacctacattattgctttattttagaaaagagagccagaaatggtagtacattataatatgagttaccataatctctttagctctttaattctcttctcccatttttgcttttgtaaataagacattatcaagaattagagaaattttanggtctatgtgtgagcatcttaacaaatgatagtaggaggcaaaaaataattagttataaagctgtaaaagggaaccaagaaagggaaaataatccgcaataacttaaaaataatcaaacaagaatatagtataagaggagaaattttcctaccttttggaaaagccaaaagttccgtttctacattggctggttagggctcaggagattggaataacctttaggataatttaaccatgggaa

SEQ ID NO: 463931 - DNA, 732 bp, Homo Sapiens
  misc_feature (368)..(368): n is a, c, g, or t
  misc_feature (404)..(405): n is a, c, g, or t
  misc_feature (553)..(553): n is a, c, g, or t
  misc_feature (595)..(595): n is a, c, g, or t
  misc_feature (663)..(663): n is a, c, g, or t
  misc_feature (678)..(678): n is a, c, g, or t
  misc_feature (712)..(712): n is a, c, g, or t
gttctacctggtactgcttcttgaaaagtgccatccaaactctatctttggggagagtatgatagagattggggctcccttttccctcaagggtctcctagggaatcccatctgttctccggagtactggaagccgagcacatttggcggcgaggtgggctttaacattgtcaagacggccacactgaagaagctggtctgcctcaacaccaagacctgtccctacgtttccttccgtgtgccggatgccagtcaggatgatgggcctgctgtggagcgaccatccacagagctctgaggggcaggaaagcagcattctggaggggagagctttgtgcttgtcattccagagtgctgaggccaaggtntcatggtcttaaatgctcattttctggtttggcatnntgagtgttggggttgacattttagaactttaagtctcacccattatctggaatattgtgattctgtttattcttccagaatgctgaactccttggttagcccttcaagatttgttaaggaagtgggttctcaatttgggtctgccagnaatactgggttcttagttgacaacctagaatgtcagatttcntggttgaatttgtaacacagtcattcctaggatggtggagctactgatgaaatctgctagaaagttangggggtcctaatttngcattcccagaatccttgacctttccgattgggngatcaaagtggttgtgttcc

SEQ ID NO: 463932 - DNA, 449 bp, Homo Sapiens
  misc_feature (20)..(20): n is a, c, g, or t
  misc_feature (29)..(29): n is a, c, g, or t
  misc_feature (48)..(48): n is a, c, g, or t
  misc_feature (63)..(63): n is a, c, g, or t
taacattgattttagaaagnattccactnctacccactctgaatagcnattccttggtttgtnatttttttaatttaatgtaataagcagaaaataatacatagaaatgtaatttgttcatttgtttcccagaagtgtagtggcaagatctccaaaaaatatattatggaagaatatttattgacctgaggacctgtcaacaaagtcaaaatacagattagaaaagggtatagtgtaatagagaagaagtccatggctatctcagtgttcccactggctcctccccctggaaaagcaggtgaacccagccatgctctcataatgatacagaaacacaggagcccaggcccactccgggcctaaaaccaggacatcatcccttccaccttattccctacaccaaagcacgtcacatggcaagctgagagccaaggatggggcaggtcgcc

SEQ ID NO: 463933 - DNA, 180 bp, Homo Sapiens
cacagaatggaggcagaaaaagagtcacattttcagacatacaacagttgaaccaacagttcttcactggtatagatgataaatactttgggcagaaggaaaatggtaacaggtggatacacggatgtatgtaaagaaaataagggcatcagaaatcgtaaatacacgagtaaatatcac

SEQ ID NO: 463934 - DNA, 696 bp, Homo Sapiens
  misc_feature (47)..(296): n is a, c, g, or t
caggtttttattatttattattattgtttgttttgagatgcaatctnnnnnnnnnnnnnnnnnnnnnnnnnnnnnnnnnnnnnnnnnnnnnnnnnnnnnnnnnnnnnnnnnnnnnnnnnnnnnnnnnnnnnnnnnnnnnnnnnnnnnnnnnnnnnnnnnnnnnnnnnnnnnnnnnnnnnnnnnnnnnnnnnnnnnnnnnnnnnnnnnnnnnnnnnnnnnnnnnnnnnnnnnnnnnnnnnnnnnnnnnnnnnnnnnnnnnnnnnnnnnnnnnnnnnnnnnnnnnnnnnnnnnnnnnntgcaacccgcgcctggccccaaatgtcatgtttttaaataaaaacatagaaaatgatataaaaggttcacagcatcatcaagaaaacagttcccccgtgtcgcggaggcggagatgtccatgccattccttaccacctctgggtctcaggtaatttccttcacggtcaagacctcttcgcggtagcctttcccttcctctggggtgaattcctcccagatgatctcgtcttccacctcatggttatcattcagtttgtctttgatctgtggaactggcgggaacagccgctgtatcctaaggaaccttttaaagaggaagccgaggacgatgccacagacaagggttcccacgattaggagcacataaatgtacacagagccgaggttcccgtcgtcagc

SEQ ID NO: 463935 - DNA, 312 bp, Homo Sapiens
gatctatttaacctcaattacctctgttaaaggccttctctccaaatagagtcacattgaggaattagggcttcaccatatgaatttttcagggagcaaaatttagcctgtaacaatgacctcctgaagataggtaggtatgccaagttgctaagatattaaatagaatccacactagatacttcagtaaagaaaatgatgtatagggaatttataaagcagattgctggagaacctgaattgcaaattggaaaattgaagtaacaccaaggtaataacttcctgaatcagctacaaccccatgggctgggg

SEQ ID NO: 463936 - DNA, 441 bp, Homo Sapiens
  misc_feature (15)..(15): n is a, c, g, or t
  misc_feature (28)..(28): n is a, c, g, or t
  misc_feature (152)..(152): n is a, c, g, or t
  misc_feature (168)..(168): n is a, c, g, or t
gagccaaccacttgnatccttcccggtncctttggtgcttgagacaggaaccacccaagtgacttgaaaggccagggccaggaaagtttgaaaaaggtccctttgcttgtggccagctggtattttataagtgttcttcaaacttcacaggncaggtggaatccattngtggagctttttaaattataggttcctgaagtacgctccattacctaccgtcatcccccagagtctggtgtattcagtacattttaaacaagaactatgggggagtctgacacccttggtcttcaccccacacttttataaatcctttcaaaggaagttgggaaacaggcccaaggttcaccagccacggtggcttcaagaagaccatgcctcgtcggactccatgtcacaggcagctacctagaaagtcttgccagttttctaaattactga

SEQ ID NO: 463937 - DNA, 405 bp, Homo Sapiens
  misc_feature (102)..(102): n is a, c, g, or t
atgtgcctcttgttactgagcaatgattcttgggcggggaggggtgggggagggtggatggatcttgcatcagaaccagagattccccttgactccagttgncttgacaaaagagagaggtcctgttgatggcagcgctgaaaagctagggggaaggaaatgagccagtgagacgagctctggagactggtgagagatagggcaggaagagggggagaccccctaaaaaactagcaagaggcacacaaggatgtctggaaggaagagctcccttgactgtatcatttggagatttcctaatggcctcagctcccaaagccctttcctcccctgctccagcacccacctcccagggacagatttctgccttcccagcagtcaagttttcctccacatccaaagggc

SEQ ID NO: 463938 - DNA, 414 bp, Homo Sapiens
cctcggcctgaccctctctggcattctcgggatctacattttgatgggaaatgtaatgctctggaacccctaggcatatatgaaccagaaacatgtatgcagactcttactttaccgacagcaacatagttggaaatacagtaatcacagttggataggaacaaatattttatatctctttcttagagatctggattccactaaaacggattcatggatgtcagggcattaggggtgtggactgataacaaacctctcctttttcagtgccaaaccaacttagaaataaaaagaaaaggtcagatcaatatccaaatacattattcctcctaaagctgatttagaaactatggcttaatgttgaccaaaaaagacttctaatattgccccctagccttgactttagaacctgaa

SEQ ID NO: 463939 - DNA, 549 bp, Homo Sapiens
  misc_feature (342)..(367): n is a, c, g, or t
ctccggagccaggttggtcccagcaggccccattctgtgcagttgtcgtccggggttgcatggccatttcaccaggacacaggtacccagaaaccgccagccttagcatgatctgaggttggaagttttggcccttttcaacatcaaaaaggccacctcggccaacttgggaccaggtccaacttgaagggcagatggtctccaacttggtttcaagcttggacaggagctgccccacattcctgaagcgaccagtcccatggtgacctgtgaatattatctataaagagccagtgaagggtgggcgtcagcattcgagagcacagccttcagcttcatggnnnnnnnnnnnnnnnnnnnnnnnnnngcaatcagggcaggctgacctgatcagtgaacccccttggtttcattagcaccagtgactccattctggttgggtctggtcttctaggacccagcgcaggagcccagttcaaaacagtggcccctgaggatcacctgagcccaggagtctgagacagcagtgaaccatgatcatgccactgc

SEQ ID NO: 463940 - DNA, 705 bp, Homo Sapiens
gggaccgcgctggtgttcgccgccgccggatggcacctgcctcagaggatgaccaggagcccgcgggacctctccggatcagaactttttaggccgcccgcccccatccccgcagtccccgggccgtgctccggtagcgggggccgagggggcgcgcggcgagtccctctcctgccccctcccccagctcggccgcccgccgctttgttccgggtgcggcgagggaaggcgaggctgcggcggatcatgcccatggtgtagccgccaagcggaggcatggctgccggaaggttactgctctacactggcctctcgctagcgctctgcgccctcggcatgctggccgtggcacatctgctcggaccactggtacgagacggacgccaggaagcacagggacaggtgcaaggccttcaacacccgccgggtcgaccccggcttcatttacaacaataacaacaacttgccgctccgggcgagccgctcgcgccttggaccgctgggagggcaaactcctccgggcccggaatcgccggcagctgttcgccatgagccccgcggacgagtgcagccggcagtacaactccaccaacatgggcctctggaggaagtgccaccggcagggcttcgaccccgagatcgccgccctcattcggaaaggagaaattgagcgatgtacgtacatcaaataccactactcctcag

SEQ ID NO: 463941 - DNA, 972 bp, Homo Sapiens
  misc_feature (631)..(670): n is a, c, g, or t
cttgaaatagatatgtatttttaatgaggaatgccctgtcaattttcatgaggaaaaggaaccacagccacatactaatacccattctcacccaagcattccaacactataattcttatttatgcagggtaggtgctgcacaaaatcatcaataagagggaaatagatactctggggttccaccaattttcccgtttcccctgacaattccagttgcatggtaaattgttggaactggaggtgacaaaattaaaaatgtcttttataagttaatgttattggctttggattattccatttctagtttttttgttgatagcgcataccagtttaacaaagtgcatgctttttaaaaaatgtctgaactggcaagctaagatggtttgggtcgtcttgcccacccgcccctaaaaaacattaatataatttagaacctagcatttagaaaatatggccatgacacatcagggataagaactgcttaatgaaacatgcttgatttggcaaaatacgataaatcaaaaaccttgtgggttttgtcttcccgttttgtttggaagcagccaaaagcaggctatgatgtgtgatgggaaagaaaacggaatacctaatacttcccgttttgtcacgnnnnnnnnnnnnnnnnnnnnnnnnnnnnnnnnnnnnnnnngtcactcagtccttaggaaaagagaaaggagttaggtcagagacaccactaagggtaggcgattgaaggctgagcgtgatgtgcagctttggggtgggtatcctctcagctctgtctccgtggtcttggtctcacatctgtcccgggaaaaccactgcagagatgatggggtgggtggggtgagaaatgtaaggcatagtctgctgggaaggaaggaggagatccatgcttcatgctcagatgtgagtttcagaggaggatgggcctgtatttccctttggcctgctctgtctggctggaaa

SEQ ID NO: 463942 - DNA, 501 bp, Homo Sapiens
tctgctgtgactttggggcttagttttcagtagaagtgttgtcctgctctgctgctgttactgcgggactgctaattcaggctaactcaggcggcgggcgctgtgtgctctgaacatcaaaccgcgggtgaggcgtcaacccaggagtttattttgtgatcagagtggaaccactacacttcactttcccctcacctccacctctgagggagcaacgaatacaaaggtagacccccaaaagctttgaatacgtgtcgcctactttcccgcggccctcttcattttttcgtctcccgctgaccctctcgcgctgctgccccgccgcgccggcggaaggagacgcgaatctgggagtccaaaggagtgtttgcggggagggcccgaggtcgctgtgtccggggcagagcggccggttcgtcccgagtctgcgctctttcgggtccgctgctgtgtcccggtccgctctcctcagcatgagcggccggtaggagtgaggtttca

SEQ ID NO: 463943 - DNA, 644 bp, Homo Sapiens
tttactttaacaaaagatttatttgaaacaggtttgcgcagacatacaccagtcaacaggattgatcaaagccacaaatcactaaattctcccaaaacttctaaaaatacaagtagatgccctccgtttgtattcactccaggagggaacccagtgcactgtaatgtgctgctgtaatttaacaaccagaggacattaataggacgtgaaaacggtaacacttctttctttacagaacgagaagggcggtggaagaaggaatttttcgcatctgtatctgagtctgcagtggaacaaggaaaggcgcgggtttgggttggctgcccatcggccgccatgcactgagtggtgtggccagccatgcagcaggtgtgggggtgaggggcgcctggacacggcggcaggactgggccgagtgcacctggagagggtgcggaagactcttccagggcatcagttggtttgccctgctggaaatgtggctaagaggttcaaataaatgttctcaggttgaccaccccgatatagaattttgtgatttcactgcaatcaagaagtttatgccaattttacacacaaaacaggaatcaaagcaggagagcaacctgcctacagtgaagtctgcatgtggcccgttggactta

SEQ ID NO: 463944 - DNA, 248 bp, Homo Sapiens
  misc_feature (46)..(46): n is a, c, g, or t
gagacggattcactctgtcacctaggctggagtgcagtggcacgantcttgggtgacagagtgactctgtctcaaacaacaacaacaaaattctaattaataattagattggaaatcattatttaaaaaattagttatgactcagaaaatattattatataaaaattcaaggagaggacattattagggtcatcttaccattattagccatagcagtactgtgtcttgcacacatctacaaatcatgg

SEQ ID NO: 463945 - DNA, 354 bp, Homo Sapiens
  misc_feature (317)..(317): n is a, c, g, or t
acttctttaacatctttaatgtcttatgatgatcaagcatgtatttaaatagtatttactgatgcctgttagcagtggtaagcacgtgtctgtttctgctcacaccccaagagtgtagagctttgagggttttgcagtcagtggtcccatgatggggcgttgggtgattaatccaatccagcttaggccacccagattcttagtctcaagggcttggtcatgagaaccttccagaggctcctgtgactcagtgactccagtcccctgggtggttcttggtgcaggtcacatgagggaggagaccgggcttttatagnactcacttcacttgtctgttcaaaagaaaagtgttac

SEQ ID NO: 463946 - DNA, 629 bp, Homo Sapiens
  misc_feature (446)..(503): n is a, c, g, or t
gttcaagtgattctcctgcctcagcctccagaggtctgctcttttattgtgttcctgtttttgtcaaagtacctagaaggggcggggcttatttgtcccatttcagaggctggatacatccatgctaaagttaaataaacccctcttcttagagtgacggcatttatgactttggtgatatttgacagaaatttctatcaatgctgctgccttcattaagttccaaaccataacgtggcacctcccaggaccactgctgaggtttcatgacactgactctttcaactgaggcaaatgttttgaacttgtctaaaaaagcctcttcacatttctgttttcaggctaagctttcgcttaacataaagagaaaatttcacttgcagaaacctggttaacacaaaggaaattttgactccactaaagtcttcctgtattgagggaaaaannnnnnnnnnnnnnnnnnnnnnnnnnnnnnnnnnnnnnnnnnnnnnnnnnnnnnnnnngctttggacttgctgcagcaagttctgttagaatacccaccaaaggtggtaattcaatttaaaaaaatatatattttatttatttatttttctgagacagagtctcactcttgtcacccaggctgg

SEQ ID NO: 463947 - DNA, 420 bp, Homo Sapiens
ccttaggagacagagcttgctctgtggcccagggtctctctagatctcatatttcctgttctgttaaaatgaagataataaatggacaggtccacattcctctatcctcatttccaaaacctaaaaagtgctgaaaatgttaagtgtgttttttatgtttgaaacaaactaatatggtagtaaaacctgaaccgatgaagcatcttataatcttcatttagctgttaatgtgattatttgcattctgctgcagaaacactagtggttttaactctgggatgctattagagtcttaaataatgtataatgttcagcatactacactaactttttagtatttaaaaaatactgaattctgaaacacacatggcccttaagggttttggatataggattctggatctattagagggcagtggc

SEQ ID NO: 463948 - DNA, 379 bp, Homo Sapiens
ttttaaccaagagataaaagcaagaaaaagatggcaatttctattgctgttctcaggcttcaaaactggcagatacgggaaaaaaacgttaatacagagagttagacctaccatacccttgactgaaatgaacatcatatagcaggacttacatacagacacaagtaaggaaatactgatggccaacaccatagaagtaatctttgcatactcttttaatgaatagtcttacaattcaaaagaatggaaactcaattactattacagggttttatcattagatattcatggtagcctctaatcttgttttctttcatccctgagattcccaactattacattaaacaaagctcaattacctttctgataatcatttttt

SEQ ID NO: 463949 - DNA, 501 bp, Homo Sapiens
  misc_feature (501)..(501): n is a, c, g, or t
taatattatctttgttaagttcgggtatcaaggtcatactaattttatacatgatgtaagaattccctttttcaataatctgatcagtttaataaaattagaatgttctctcttatttgcaatatttggtagaagtcacctgtaaaactgacagacctgctcttttattagtactgtaggtagtttttaactcattttttccatttctttaatggctgtggcagaggtgatattcagaatatttaaataacaagcaccgcatgaacacttgccagtcagaatagatgcagatggctgtgctggaacagggtcctggaatcgccatattgtgtaagggggacttttgctgctgaatcatgggaaggttttgtgggaggtatctctagaagaggggcctgggtagtcagagggtgtcagagggtaactcagggcagtgcctatttacgaattggtatggaagaagttcaatcttttaacagcacttcagctgaaccagtacan

SEQ ID NO: 463950 - DNA, 701 bp, Homo Sapiens
ataagcagcttactcaggcttgctctatttggtgctaaccaatggaagttcactgctcagtcttgagaattcagctagaataaagaatttcagaaacaaggagaaaacttactccttcacagaagagtagacacttcttgcttcgtagtaaagttctttctgataaagcagtaaattgggaataatcatgaaagtattgatctcggtcggctctccagtgtggaaatttgcatgtaaaatgttttctgattaacaaagaagtctttaaagatgtttgtgtgatcccttcagaagtcatggttaaagctttaaagtgcaacctttaaccttgaaaatgctgctttctaacttgccttatttgctaatttgttgtcctggtaataatatttaagtagtatctgtgattttttttcctgaaaaaataaacacttttaaagttttatttcttggttggccagaaaaacttgatattcgtctcttttcccttcatgcatacagcataaataaatggtatattccttgttcaaagtttgaggagtcttagtcacttatcacacccaaagtcagctaatgggtaagagacacaaaagcatgacacaaactcatctgctacagaatgagagagagtaactattttaaaagacatttaaaaagtgaaaagcatgagacaaactcatctgctagagaacaagacagagtaa

SEQ ID NO: 463951 - DNA, 681 bp, Homo Sapiens
cggccttgggtacttttgagcatattttgcatgcatacaggctgtctcgggatagtttgcacagcacactggtgcactgttgatgacattatgctaccagcatatgacacaagcaccccggatgtcctaggaagaagacacgtgcaagccaagggcaggggctaaagccagaaacattcagaggactggcacattggcaaggttgttaggggacccagtggtctgacacatgccaggacaacccttgtaaaggaaggcacaggcagtggcagctttccttcagctgcactagggaagaggcacagtgctgggtgcaccacctgggacattagaagtagcatacttgctgatacttctcccatacgcctattagacagcttgggagactgccactcggagtggagtctagggcaagaaacggctggccaggaggtctaggctgtgagaggatctgctcttccactcaagctgcacaacccagaggagccaaaagtagcagtcttagagtctcctatgatgaagaaggctgccatgccaaccctctgcaagcttcagtaggagaggtgcagggtaaacctttagcccttgggagtgcggtggtgccttctgctgccgagaactcacctcagtctgagactagctcctgccgtgcagtgggtcctcgcagagactcggagacta

SEQ ID NO: 463952 - DNA, 807 bp, Homo Sapiens
  misc_feature (277)..(579): n is a, c, g, or t
gagtgaagccaccgcacccggcttgccaaatcatttctatcagcactctcaccatagcttccctgctcaatggcctatggtatttcccatggtctgacacagaaacttccaattctgcctgataagactgatccaaccatatttttgacatcaatctaccacacaccctgtgttctcactgggcagagaacatcaatatgtataagagaacccatacaaatataatttgttgtttttaagttatagaaatgtcatgttgttttcttttctcttttcnnnnnnnnnnnnnnnnnnnnnnnnnnnnnnnnnnnnnnnnnnnnnnnnnnnnnnnnnnnnnnnnnnnnnnnnnnnnnnnnnnnnnnnnnnnnnnnnnnnnnnnnnnnnnnnnnnnnnnnnnnnnnnnnnnnnnnnnnnnnnnnnnnnnnnnnnnnnnnnnnnnnnnnnnnnnnnnnnnnnnnnnnnnnnnnnnnnnnnnnnnnnnnnnnnnnnnnnnnnnnnnnnnnnnnnnnnnnnnnnnnnnnnnnnnnnnnnnnnnnnnnnnnnnnnnnnnnnnnnnnnnnnnnnnnnnnnnnnnnnnnnaaagaaaacatatagcagaaagtaaaactgcaaagtgagtctcacctatgtccctgcagctttctccagtacgctctctcctatgagcttcctggactaaaccatctcgcgtgggtccactagcagcgctcagctgactccaggtgcggcccccttcctatggcgactgaaagccacaccccctcttacacctctgttgtgtacccctcagaacagaatgctgcgtgg

SEQ ID NO: 463953 - DNA, 408 bp, Homo Sapiens
  misc_feature (83)..(83): n is a, c, g, or t
  misc_feature (103)..(103): n is a, c, g, or t
  misc_feature (117)..(117): n is a, c, g, or t
gtctttgatagattagtacagaaattttctgatctcagaaatactcaacgttgggcagtccttcctagttagggcttcagtantgagttttagctttttagcncatgagattgcttntaaattagtacagcaaaaagtgaatggatggtaaaaagaaggatgtttgacattatacttatacctatcatcctgctatgctattgtagctgttttcatatatttcaaaattcgatttcttggttcccatatgacagtagactcagcaagaagtccagagagactctctgtgaataacctttttcctgtaatgcaatagtgctgtctctagtccataggctatgtcaccttcaattaaacagtggctcaatcagtgtgaagacagctttcataatgttaccatagcaaagg

SEQ ID NO: 463954 - DNA, 717 bp, Homo Sapiens
  misc_feature (50)..(50): n is a, c, g, or t
ggcctgagctgggcagggggcggaggcgggggctcggctgtctccggggnctgccacgcagagcgggtttcgtggcgtggatgaagaaactgaggcacagagggattaagtagcctgctcaagatcacacagctagtaaggaaccaagattcaaacttgggcagtgtgattcagagactttaaattcaacgctggtgcctcactgcctcacactaaaagtgaatcagaaaaataaagaaccagcatcaaatttgaagtggccacaaattctattaaagcagaagaaatagtggtgaaccataaaagataaccagtttcctctctattctgcaatttagaggaaaaattttcatccaaggacagatcaggtggtggacctagatgggaaacccaaattataatcaagagatttcttggtactgtttttcaaccctactctcttgaccaagaatgaaactatttacaaattaagatgccaacagatcacgaagagccctgtggtcccagtcacaagtcgttttgcctgaatggggggctttgttatgtgatacctactattcccagcccattttgtaggaagtgaactgatgctggcttctctttgtcttattccaagttgggcatgagattttccctgcattagaaggttgttgagacctgaagcctgggaaggtgcgttgaaaactatacaggagctcgttgtgaagaggtttttct

SEQ ID NO: 463955 - DNA, 640 bp, Homo Sapiens
gttgattcattgatttacatttttgaagatttgtctatttctcttttatttcataagtagcaactgttaatctcatccttttatttcaccctttttttggtcatttatattagctgcgtcgatcggttagaatgctttctcctgtaattatcagaaaacctaacccatactaacttaaacaattaagtggatgtagtggctcagttcctgaagtatttggaagtaggggagattcgggcattctttgtctagggctccagctctatttccctacaattccttcagctccacacttgtctcttttttggcttccctacttaggctggctttccctcatgattttgaggtgttcatgatcagccaaacaaggttcctccgagtaaagacagagaaagcttgtttgctgcaaccatcaaatgaagtattcaaagtcacttttattaaaccatatctcaatctaccatgaccaatgggaaaactatgcactaattggcttaggcctgaaccaatcactggcaagaaagataggcccatctatggaagcaagcaaggaaataagcccccaaaacagagttactacacctgagtgagaaagaagttagtttcaattatcagccacgtgaatgagccttcttggatg

SEQ ID NO: 463956 - DNA, 726 bp, Homo Sapiens
  misc_feature (303)..(368): n is a, c, g, or t
  misc_feature (396)..(503): n is a, c, g, or t
cacataattctattaaagtaatgttgaatttggatttgttgtagaaaacttgcaaagctcttctaagagtaactaaaatcagtaaagaataggggaaaaaatccagagaaaatataagcaggaaaaccatagcagacagggtcagatggaatattagcggtttaggtgaagaacccagagaaccgcctgccctgtaaggaatgctgggtatttctcctggagggttttattttaatttttgagacaggatgttgcactgtcacccaggctggagtgtggtgatacagtcatggcgcactgcannnnnnnnnnnnnnnnnnnnnnnnnnnnnnnnnnnnnnnnnnnnnnnnnnnnnnnnnnnnnnnnnncatgccaccacaccctgctaattttatnnnnnnnnnnnnnnnnnnnnnnnnnnnnnnnnnnnnnnnnnnnnnnnnnnnnnnnnnnnnnnnnnnnnnnnnnnnnnnnnnnnnnnnnnnnnnnnnnnnnnnnnnnnnatcagccactgtgcctggctcctggagagttttagaacaataaaatagaattgttactccatggcagaagtgtagagaacatgcctgccagattccagccagatgactcctataaacacaacatacagtcagtgtaaatgaacctaaacagatttaccagtacctgtacattactaaacagatgtaaatgaaaagatacactatgcattgaacttaatgctac

SEQ ID NO: 463957 - DNA, 540 bp, Homo Sapiens
ctacttcaagtaagaaaattacagtttgtttctccactagaatgcgacttttgtgctaagcgttttggaagacaatggagaaaagcaacttttgcttctatggagtgctgtgaacaaatctgagctaaaaataattgtcaatcctgtttaatcactgtggagtgctacacatttgacacagcacagtagatcttaacagtaacttcgcccttcaatagatccttgccattttccttttgtttacaagttctacagggaaggaaaaccatgagctgtaacactgagagtttactatttatttaccaccattaggtctctgaaatagacccagtataaaactgtaaagggaaagaaagagcagggatatggcagtgaatctactatctagttgcatgttgagatgacacacataatttcagattcaaacagcatctgatgctatctatggtttagtttacggaatacatccactcagcagatttacggcttaaggacaagtttattcactcatccaatgtttattgttaaaatgtcaacctc

SEQ ID NO: 463958 - DNA, 251 bp, Homo Sapiens
tgcaagtgttggattgtaatgcattgacaccagcttgatgttcttagagcaaattaattcttaggaggagaaaaagattaatctgatattttcatttataatgtactactaaattgaagttgactagaagattattattaaattaacaagatggaacatatctgacaaacttaatgtctggcctggagacattttggactgtttttggtgggactagacttaaataaaattggaacaaggccagatgtggt

SEQ ID NO: 463959 - DNA, 371 bp, Homo Sapiens
gaggcggaatctcgctcttgtcacccaggctggagtgcagtaaagtggggaaagtgatacaaatacaccaagctaaaatccaccgcttccttcatgtccagggaagaccaatagattagaggagtgtcctcatgttgacattattaatactttaatgattttctaaatttaatgtctcctgtgtctaccagaaatatattcctgagaagttcaatagacttggaagcagaccacctgggttcaaggcccgactgcctttctctgtaaccttgggctggtttctcaaagccttagtttccttatctgcagagtggagatgatagtaacacacttcacagggtgccctgaggattaaatgagacaacgcacag

SEQ ID NO: 463960 - DNA, 766 bp, Homo Sapiens
  misc_feature (127)..(497): n is a, c, g, or t
  misc_feature (591)..(613): n is a, c, g, or t
gcccaagatgtcttgcttaagatttaataagcctgacctgcttgtgtggatactaattccctaccagccagaggtgagcccaaaataagagccttcactactacactgtaagatgaaaccttctttnnnnnnnnnnnnnnnnnnnnnnnnnnnnnnnnnnnnnnnnnnnnnnnnnnnnnnnnnnnnnnnnnnnnnnnnnnnnnnnnnnnnnnnnnnnnnnnnnnnnnnnnnnnnnnnnnnnnnnnnnnnnnnnnnnnnnnnnnnnnnnnnnnnnnnnnnnnnnnnnnnnnnnnnnnnnnnnnnnnnnnnnnnnnnnnnnnnnnnnnnnnnnnnnnnnnnnnnnnnnnnnnnnnnnnnnnnnnnnnnnnnnnnnnnnnnnnnnnnnnnnnnnnnnnnnnnnnnnnnnnnnnnnnnnnnnnnnnnnnnnnnnnnnnnnnnnnnnnnnnnnnnnnnnnnnnnnnnnnnnnnnnnnnnnnnnnnnnnnnnnnnnnnnnnnncttctttacttccctattaaaatgatcttaattgtaatcataattatagagatctactagtcacatggcttacaaactgcatatctgccttccnnnnnnnnnnnnnnnnnnnnnnnagaccagccatgttttttattgaccttatggtacctcctgctttgggcaatgaatgctctatggcataaggactagaccaaactagtaagtagcaacattgttgataatcctgtacttaagaaagtgagagtggtggtgtccccagaaggttc

SEQ ID NO: 463961 - DNA, 393 bp, Homo Sapiens
tcaggtttcagtgtgaggtttaatactatatgcatcaaaacatcaaagctttttttcagagaaatatactctcaagttgaactgtggatatcctagatgtctatcctgaggtcttctatggttccagatacagcaggtagtgaattgggaggagccaataccaccagataccaaagggaaccatggaggggcagtttaattaatcactgttcttaaacttgtcgttgatataagacacccagtccagaatcagctgcccagttgataggcgactacagctccgtggtacccatggtgcctgacatgggaatccagttcttccccaattccaagtagggtgggctgggagcatgctaaacaaagcaatgccacctacagccctctatatttgct

SEQ ID NO: 463962 - DNA, 507 bp, Homo Sapiens
  misc_feature (354)..(380): n is a, c, g, or t
cagggcaaaggccttactaaggatgctagcattatttgctttaacatcaagctagtgacaaggctatgcaacgttttgtaaaaagccaagaggccagtgtgaatccagcccaggggggttgtaatctgtgtttgacatgcaaatattagaaaaccttggcaagactacaaggtttacatgcaagggaagaaagaaaatacatgaggccaatacatttgagaatgctaatatatttctctacagttttctcaaaaggaggaaaataggagagggttatttttcctaaaatccaaattataaggcaaaaggtgaccaattatgactacttagctttaattttcatgtactgaggannnnnnnnnnnnnnnnnnnnnnnnnnncatgcatgcctacatacattgcatgcatgttttgaatgagtgtgcgtagatggaaataaaataaacttgggatagtgaagaggtctacctatgtaaaaatttttgcatgatgaattgaacatttcta

SEQ ID NO: 463963 - DNA, 340 bp, Homo Sapiens
tttttttcaggcttcgagctggtgttgtaagaaggaaatacaggtgctgggttgaaagtgcagcaggagactgcccacagataggggaccagagtttctgaattttgttctgctttcttataaactacccccctttttcctgtacagtgggaagaagatcttgaacttctttgggtcaggtgtggattttgcaatgacctggcacctggcataagcagagatttctggagggatgctttaaaacaaggctttgggctggtcccaccttgaggtgcccccagagctaggtctctgggccccacaaatacttcctctgatcatctctctagccatcgctccc

SEQ ID NO: 463964 - DNA, 553 bp, Homo Sapiens
tttacaaactagaatcacactaatctttttttcttgctctaatgtgtggctgttgaaatcctcagctgtgataaattaagctacttattaatctaattatcgtacattcatcctagaaactttcatgtgacttgaaaaggctattcaaccttttccctcccctcctagaaagggctcaaccttgcaccaattaagatcattctgaagtaagggtttaaaaaagctttctctaatcacccaatggaacatggaccagtggaaaccaaactcagagctctgggaaaaagtttagcattcctttctgtctgccaacttttatggtttcattgcacaagggaggaagactacattttcctatttagttgttccttcactgacctccaaataaagtccatgtaattacagaccaaataaagttgcagcatgtgttttaaaaatcaattgccatccttggactatagaaatgtaacaatgcacagatttgccagaaaatacccagcgcaaaccatacgaactaaaccctgcactgtatctgtacaatgagtagttttga

SEQ ID NO: 463965 - DNA, 608 bp, Homo Sapiens
caattttacagcatcgttttaaaaactagtatttattgagtgctcatcatagaccatatcctgttctaatcactgtatgtgtatgtattaatttcatttttataacaaccctgtgatgcagatacataattattcttattttatcaaatgggagactgagacacaggcagattaaatattttggctataatcacatggtcagtaggaagcgatacctgtatttaaaccaacacagtctgactccacagtctcactcttaagcactacacagctcttagtaagcacctagtggatactcgacgatcaaacgttgaagatccaccaatgaatgtgtgatatttgctctctaggatatgcagttatatagaaggaaaaagcaggcaattttcaagtgtcataagatgtgaactatgttatcatagcagcagatgctctcttaaatggggctacaaaagagagagcagttaattctacctatagaaatggatagtcaaggaaattttaagaggaaagcattgaactaagtcttaacatcggtatgcctttagtaagagaccataacacatattgaatgtgtccttatgccacatgttattctaagcccttca

SEQ ID NO: 463966 - DNA, 730 bp, Homo Sapiens
  misc_feature (142)..(213): n is a, c, g, or t
attgatcttttcaaagaactagctatttgaattatcttctttaaaacattgcattttaacctatatgcaaattattacatccttaatgtataacacttgtgtctttatagcatttttaaattttatcaaagtcttaatagannnnnnnnnnnnnnnnnnnnnnnnnnnnnnnnnnnnnnnnnnnnnnnnnnnnnnnnnnnnnnnnnnnnnnnngtaaatggaattttgttatgctgtccaggcttcattcgagctcctgggctcaacctctcctttcggctggaactatgagcatgtgccactgtgcctggctctagtgttttttgattgcttagttgtgtgtatgtgtgtttgtgtttatggcaaccttaaagatttttattattacccaagtgtgttttgaatttttatatatttcaatttgtgcatatatgagcatgcatatacaaatgtattaatttaatgatttgacgcagcataatttgagttacaattatattgtccccaaacaatgaagaccacaaaattaaagatcacaatgatgaattcttccttttcatatttgtatttctggaaaatacttgatataacatgatttaatatttttcttgtttatacttgtatacatattattcttgccaccatatcatgctctttccttccgttcatcagtcaccactgtcatttaccatttcttagttaacaacatgacactcacgccaaaccactc

SEQ ID NO: 463967 - DNA, 373 bp, Homo Sapiens
tttggaccttctttcccggggtccatttccttctgctctggcactgttccagttggttctgctgcattttgagggtcagggtttgtggtcagatctccagaggaatttttcttggagagtttgtcttgtatgttggtgtgtggctcttcagacgtgactggagttgacttggttttgagagatttctcttcacctttgttttcttcctgtgctgtggtttgctgagactgattacttgggtgagagccttcttcattccgacgagaactttgttcattctcattgttctctcctataggcttcaccttgttgacttttgtcagcgatttaaacatcttctctgaggtggttctgaaaaccctctgtatttatg

SEQ ID NO: 463968 - DNA, 761 bp, Homo Sapiens
tggcactttttgtttatttacaaagcaattcaatttcttggtgttcaggagctccctgagaaacgggcccaggcgacctctggcacaggcagagggcacagcattagcaaaggcccaagggagggaccccacagagcagcctccgagaagagccaggagtccctcgggctggggaagtgagagggcattgaggcctgaaggaagactgggctgatcttcagacttcagtctattggggggcagggtgagtcctggagagacggtgccccacgcagccaaggcagggtgagggaggtcacacctcagcacattctcttctgtgtgacgttggagatcattaacctgtggaccctaacagctgccaccaccaccttcaggaattcaggtcctccctgcctggcacgttgggcagcactcccacggcccagcccagccagacagtggcagaaacggcggcctgcctctacagcgacgctgaggctggctgaaatggcagggctgaagggcagcgtctggacccagaaggtgccaggcggcttctggactccccaaggccttcacaacagccctggatcctttccaccaaccagcctaaccagcagtagcagctccaggacctgtttcaggtggtcacggacagggggcccgcaaggtctccagagcccgagggatctggggaggggacaagcaggcggggctccctggcgctcaccgttttagggtctgcgtgagaaagcctccctcacatcccccagggtctg

SEQ ID NO: 463969 - DNA, 398 bp, Homo Sapiens
gagactgggtttcgccacgttgcctaggctggaactcctaggctcaagcgatcctcttgccttggctcccaaactgctgggattgcaggcaggaaccacagagcccggccctttttatttattaagtgaacatttattaatgccaagagaatgtctttcactgtgtaagaaagaaaatgctggaggacccttttagtccagcagggtgtagtgagtaactgagtagagaaagcacagggtgctggatggggaacaaaggttgatgaattgcactttgatcttagttaatgcgatattgaaattcacttccccagcttgttttcaaaacttttatatttttgacaaacactttaaatcatactaaaaacaataatttgacccacttcagattggtaaca

SEQ ID NO: 463970 - DNA, 488 bp, Homo Sapiens
ggccgcacaagggcagcctaggcgaggtgcggaaggcgtcgcgctggctactctggtacccccaggacggggcaagtgagcagatcggtccccctcgtggagcgtggctctgagtcaaaagggtgcccgggtgccgccagttagggctccggtactggaaggagggggtgggccacgtgcgtctagggagtgcagctggcagccggggtccttgccagagactgagtccggctagagaacagggtggagcccctttggaccttagagctgggcctttgggccttgggtctgggtgggcctttaccttgggtctgggtcagcctttgggccagggctgggtcagcctccagggaacagccgagactcctcttccttggggtgactgcaggttctttttcttgcaaggtctcagtgaggaggcagggtctccacgcactggaatagtgtcaaaccacacacaagagcacagaacccagggacacagggcg

SEQ ID NO: 463971 - DNA, 673 bp, Homo Sapiens
ccttatagcatgcttgctttattttacaatttaaaaagggattttaaaaagactagatctgaatgtgtttatcatttttcaaatcagttaacagggcagagtcacacgctaaagaaaacccacactctaaatatgagcataggatgtaacgttgccacatggatgaatgagcaggtgctatgatgttctgaatcttctgtcggggctcttgcaggaaatgttcaccgaaggctttggtggcccccacagcttcctggagggcccctaaggtttctgcacaggaaagcggtgactctgcaaggctgtgtcttggctgctggcgcagagatacagggccgagtcttctggctgcagggtgtgtaggtgaaggaataagtgagagctgttggggcattcaggtgagaagcgacttggcacactgttgttttcaacccgttcttcaagactgtagacaaacatgagctccagtggcttcttagcactttgcttgtaccaatacatagcgttatgacccagatgttgttcacatttcaaagacttcttatttgtcattcccatgaccaggtgtcttggtgtctgcgtaactcccgtttccatggggactgtggggggaaagggacaaaattcaggcagagcccaggaggaggcttgttgctgaaatcacaaggaaaaa

SEQ ID NO: 463972 - DNA, 577 bp, Homo Sapiens
agtgcaaagttaacagtgtacactttggagatacgttttgaagtagaaaatgattttttgttttctaataagttttcccaagtaatattaaagaagattaaatatgtcatttacttcgagaaaatagaaaaccacgagaaagtttgggaaaatgctatatttcagagcttaatatgctgaaacagtaaataagacaggaattgggtaccttttaaagtaagtgcatttacaaaaaatacaaattgaataggaatgcttttggcaaacaaaaatctgacctgaaacattcaatggccacagcattcaagaacgctatatgagatcctttccctttaaccatccacatactgatatttgcagtcatcctcagtagaatatgtatctttttagtataagtatatgttttaaaatacttattggaaagatttagactaaagactattattatacttcaacttcaaatattttagccacataagttcattttacacacagaagaaatgataccttcattacttaatccacgtattctttcttttagaaaatcgcattggcacacgggaagcctgtgccgaat

SEQ ID NO: 463973 - DNA, 546 bp, Homo Sapiens
tgttgtgcaccagagagttttatttaatatgtcaaatattcactcaaaataaatgttgaacacactaagtttgtgcattcaaaattttccacaatatattcatataataacatgcactctatttttgctatgaagtataacccgaggcagctgaagcatctttcaaagtttttaagaagacaaagcaaacacaaccaaattattttctttagacaaagcaatactatgttagctaaagtgtatccacataacccagaaataatgtaaatacaggagtagaattaggagcaatttaatatctactatatatgcttttgttagattttcatagactgtgtatttatgaggagaaggtaggacatggtctactagtcaagcaagctcagactataacattattttagcataatgacatgaggagcaggacagggcttggttgtcagccatttaacttaagagtttaccctgttccttcaatgttcaacccattgccctaaatcctgggagtgggttcaattgtgtcttctccaaagaggtatgttgaag

SEQ ID NO: 463974 - DNA, 459 bp, Homo Sapiens
tgacagtttgcaagggcattttattcatggtcacagtggagtattacagagcagagaaggccagtgtctccccaccccacttgcctgggtcctggggaaatggagagaggaggaagtgcctgcatgggacaggggtttctagggtctcagaaatcagagggatgggagagaagttgcatggaggggtgagaaagggactggagaccttagcctggaatggggagatgggccccagacaagactcagggaacacaaccacccctgtcctctccccaggctagacccttaattttcccccttatgtgggcaggatggaaattatagaaacttttcttcagggagaaaagttgagattaggaatgtccccttagtctgcttagcaatatggtgaaagaggaggggcacctgtcttggtttttcccatttccacattcacaccttccctgcaatgctccccac

SEQ ID NO: 463975 - DNA, 147 bp, Homo Sapiens
aaaatctacttacagaagcagatacaaaattaaattgttatatcatagccatgaacacagtaactggtaccaggctttctcacctaataaacaactagaaaacaacctttctcattgactgggcaatggtcatttcaggattgtgtt

SEQ ID NO: 463976 - DNA, 850 bp, Homo Sapiens
gggcacatttattacagagcaaatgccctctttagctaatgaaactggctatgtggactatgatagaccaagaaagctacccaagtcctgagggagcctagtcctcctaaatgcagacaatgtacccatgacaagggctacagcttggctttagcaaccaggaggatgaagacagcaaactgattaagagagtaggtataagaaccagggagagtggggtccaaatatctatcctgcctctcacttggctaaaagactttaagaaatttggctcaacctctctgaaatctcagtgtccttatggaaaagatagcattaattataccttctccataagatttatataacatgccagtgcggataaagcacaaagctttacataaatgttcatcttcaaaaacagaagctatgaataacaatgacaacattgttaataatgcagtgttatgcatggaagtggacaacttctaacatatttatgagtaaagagttaagatagccttttcccttctgcatgagaatttgaaccttcatttaaatttccacgctgggtttcccctgttaaaggttggctatgctgctaaccagtgttgtttatggtaacacaaatcccatgattaacactggaaggcctatacataagctgtatatatttgataggaagtcacacttggggtcttcctgagtgtggtgaatttgtaactgccatggcctttgtgaagaccctggaaattatgcctacgttgctgtcaccccaacagataatggctcttgtaggaatgaggcttttaggcacttggctgatgtggatctcatctccttgcacctgggctgtgctgcacagaattcc

SEQ ID NO: 463977 - DNA, 494 bp, Homo Sapiens
ctttataaagaatgtgtccatttattttattattttaaatctgaactttcataaaatgatggttatctgcatttagctccaaacgtttttgtgacgtgaagtggagacaagcccaggtttggacctttgcaccttactatcaggtccagcggctgcaccattcagccttgtaacttaatttgcatctgctgagactgtggcagccccactgcaagtgactcagttttcttgtagtgatagtaagtaggggatgctgtgctcctgactgcatttctcttacagctggtcaaagtcagaaatgatggtgaagtacaagagggtgccccagggtacatgggaatgctcgcggtgcctgagactctggggtggagagaccccagtggggttccaatccctcaaaaggatgcagcttaaaaggggacctaaaagaaacttaagcttgaagtttctgagatgtagcatcatttctcttccttcctacactcattctgtcc

SEQ ID NO: 463978 - DNA, 586 bp, Homo Sapiens
  misc_feature (209)..(243): n is a, c, g, or t
aaataaatgaactggtcattgggtgaactggcttttggttaattgacctagagcccagttctgcttaagcctgacttttctaaagggataattagccaaaatttcatctggagctggctagagcccagccatgctaagcttacaaagaaaatggttctctcatctggcccccattacactgtctcaaataaaatcctcattggtaccannnnnnnnnnnnnnnnnnnnnnnnnnnnnnnnnnntcccactttcctagactaccaccagagacaattcaaaccaactcatcacttaataagcaggattatccttagtgatctctatgagcattggattgggaagacagaaatcagtgcgacaggcaagagtccacatatgggaacggcaagcagtaaggctgaaaacacagccccgaacaaaaatacaaagcaccctgagtgtctgcccaaggaatctggacgatttcacaggccacagctagccatgagggcagtggaataagttcacttgctgatgaggtataaaaaggaatttgagaagcgcaaggccaaacatgaataaaccagtaggagaccactaatccat

SEQ ID NO: 463979 - DNA, 281 bp, Homo Sapiens
gtctgtgccaactgtttaattgtatttagcttacgatgcagaaactgcctgcatgtaacatatcagcagttatcctgaattttgttgaatatagaaataaatttattctttgattacaatttgattcctaaagggaaataaagtcattgtataaatagatactcttatgtggtccaccagtggtacataacatgaacctttatagcaaggggaaaggtctttaaagcctgaaaataaatgtgatgaagatttattctttatcatcagtactagacagattt

SEQ ID NO: 463980 - DNA, 495 bp, Homo Sapiens
acagctcagggtaagggtattacataattgtaaataatgcattcatatttcagatcttgaaaccagtgaaaaacagccatttcagacaagaaaataaatgatgacatgctcccagcaaaattgaatcctgtattggttatgaagagaaaatccaacctacgcttaacaatgcttccatattcactaaaagtttctacagttttaaagtttgaaatgttgcccaagggttttaatgaagctccggttcaaggacagaaaagttgtatggttcggatttgactttggtcaagatgaaatggtttgtgcacacagcttcctactgccccctggtgggatgatgctgaactatgctcagaaaccttccatcaaccttagggtcaatcccagacatgatcttggcttccacagcgacaccttcaaaaaaggctgctgagtttaaagttaaaactctccttgactttctgtcccatttctccaaagcttgacctctggatc

SEQ ID NO: 463981 - DNA, 463 bp, Homo Sapiens
gaggattcactattatttgtaaggtggacctggcagtgactcacacctgtaaccctagcactttggtaggcctaggctggaggattttaatcccaggattttgagactagcgtgaacagcaaagtgagactctgtattattaataaaatgaagaaaagaaaacattatttgtgaagtgttcagaacagtatctggcatatattatatctctatcaatgttagccattattcagtaggtggctggtgaatatggatgaaactagagaaagtacagtgcctggcatatatcaagcattcagtagacatgttttaaattatttatagaaaaataaagaatacaactatggggccaggcacggtcgtcacgcctgtgttaccagcactttgggaggctgaggcgggcagatcacaaggtcaggagatcgagaccatcctggctaacacggtgaaaccacgtgtctac

SEQ ID NO: 463982 - DNA, 667 bp, Homo Sapiens
aaagcagacagtattattgttgggtttgatcctataataagaggaagaagtaaagacagaagttaggagaagtataagggcaaacagaagtttcatgtatcccaagtaacgaaaaaataaaggtcctaaaaagagaagaaaagatctaggctgtatacaggctgggactgggaatgactggtggagaaagaattagccgttgggggcacagacaggaacctcaggggagtaacagtaatactgacatttatggaatgctcagaaaacatcagggactcttctaagtctccttaatgtattaattcattgaattctcacaggaaccctgtgaagtatgtctatcattatccctagtttttaaatttaaaaaatgagataaagtatctgtctgaggaggaaggaattcaatattacatatgaatttatatttgaaaaaatgtgggggagagacctattatttctgtaatataaagctaccaggaagaaaaacaccttcttagggatctctaaaatcatcatggatacattcctaccagtcatgaataagaggcagttgcaacggtggaaatgagatttttaggtttttccaaaagtagaagtttaagttgaaaaacctcagttctgggatacagcatcagagtttattcactgccagtggaagcaattt

SEQ ID NO: 463983 - DNA, 778 bp, Homo Sapiens
aggtactggagatggagagcatggagacggccgccgcggctcggcaggactggccgccgaggtccgaggcagcggcacggtggacttcgggcctgggcgtgggatctctgcaatggaggcgagcgggggcgatccgggcccagaagccgaggatttcgagtgcagctctcactgctcagagctgtcctggcggcagaacgagcagcggcgccagggcctcttctgcgacattaccctgtgcttcggcggggctggaggccgcgagttccgggcccaccgctcggtactggctgccgccaccgagtacttcacgcccctgctctcgggccagttttccgagtcccgctcgggacgggtggagatgcgcaagtggagctccgagccggggcccgaacccgacacagtggaagccgtaatcgagtacatgtacaccgggcgcatccgcgtcagcacgggcagcgtgcacgaggtgctggagttggccgacaggttcctactcattcgtttaaaagaattttgtggagaatttctcaagaaaaaacttcatctctcaaattgtgtggcaattcatagcttagcacacatgtacaccctgagccaacttgctctgaaggctgctgatatgatacggagaaatttccacaaagtgattcaggatgaagaattttatacgttacctttccatctcattagagactggctttcagatttggaaattacagttgattctgaagaggttctctttgaaaccgttttgaaatgggttcagagaaatgct

SEQ ID NO: 463984 - DNA, 644 bp, Homo Sapiens
  misc_feature (333)..(374): n is a, c, g, or t
ttggtggatggattggaggaatgagaaggtagaggcaggtggcccatatagcaagtgaaggaaattatagcacctgaaaaaagccattcaccaacacagcaaaagcctatgacaatacagagtagctgcctgcccgcttcttcagcagcagtgccatacaggggactgcactgcaaagctgccaaaaatatcatcccagatagcaggaattgtgtcccttgattgtgctgggaagattgctgttttggaattctaataggggcacactggaatcaaatttttggaaattctgtttggagactacagcctcaattctagagagagaggtgggtnnnnnnnnnnnnnnnnnnnnnnnnnnnnnnnnnnnnnnnnnncagggatttcatgaaataggaggaagaatactggattgagagtcaggatttaactggggttgaattctaatttgaccaccaaagagggtcctagccctcaacatcactcttaaaatgaggactcaatgacttgtgatgcaaagaaatattaaatctccaaagaaggctcacgtctacccgacgagtcaggtccagtcttttccatgcaatgataagtagaaccaaaattgtggctttaatatttcatttcaactttcgtgaaccatttat

SEQ ID NO: 463985 - DNA, 257 bp, Homo Sapiens
gtctgaagtttataccctgttaaaaacataatatggtaaaatgtcaacacatttgtataaaatcatcaacatcatttaatgagaactacatagggtaaaagagtttgattttaacagttagatgactagcattaacatttcccaaatattcagtagaagacaccatagggtagaaacatctagatgacagaaatagaggaagggagcagggagaagcaagggaagggcaaagaggtggagggagagggaaagtccca

SEQ ID NO: 463986 - DNA, 725 bp, Homo Sapiens
caggtttaataaactttttaatgaatatttcagacataacaaaaaactgcagagcttcgtacacttgatttaaataattcttgaaggattttataaggtcatcttatagacaaaattaagagacaccagtgtggttatcaatgctttcagaatacttgtgtttatgtaaatataccccagagtccaaaactctgatatattcatatatattcacaatgagaggatgtctgtgccaaatctgtcaatcagtacaatagaaaagttaattatataactacaacacgaaacacaaatttttagaagcaaattatgtcctgtaatttacccccctccccgctgctcctctgctaactcattttcctcttttcccactctaaatgtaaggcaacccttggctttggagaagcatctgttccaatattctggtgctatgtgctcagttgtactatatgcaaatgttactagacacagaggaggtcaaagtgttgatacacttattgctaccatttacagaatgatcaatttgatagctatcatacatggctagcaagacactgatttttctaataaaaaaatttttaatgcatacaggtctggtgaacagtttcaatttaacggatgaggccaaggctaaagccagagtaaagtaatcagagccatgcctcaggaacacgatttagctaatagtgtgtgtaaaatgggtaaggtctagaattagggactaa

SEQ ID NO: 463987 - DNA, 426 bp, Homo Sapiens
  misc_feature (11)..(11): n is a, c, g, or t
  misc_feature (51)..(51): n is a, c, g, or t
  misc_feature (60)..(60): n is a, c, g, or t
  misc_feature (75)..(75): n is a, c, g, or t
accataccaanggagctgtatcaaggcattatggaggaataccagatatantaaaaacanggaattaattaattncaggggttttcaaatccagagaagatatcatcattccaaaataactataatacaaagcagtaagaattgcttttgtctaaggctaagaatcactgtggacactgatgctgttaagcctggaatgtggtcggagaaactgttgcagaagctttacataggattctagtgcacatttctggtttaaagtggcccgtagaaagtgatgggaggggtctgtaaggaagaagaggtttctaaattcctctttgaagagaaagcagaatattggtaagtaaaggatcttgaatgccaacctatagactaagcatctcagagttatttcaagtttcagagaagtacagtaatatcgtc

SEQ ID NO: 463988 - DNA, 619 bp, Homo Sapiens
  misc_feature (45)..(53): n is a, c, g, or t
taagtttgattttgctacattgaaaaaatgtttgtgtgtgtgtgnnnnnnnnncctttacaaaactccttccacagacgcccggggcctgtggcgggtcactgtctgggcagatgctcacagcagcacgtggtgcccacagagttcaggaggctctggtaggggctgttttagaaaataactgatttcctgttgaatcaggtacgctccgtgcgaccactcctccctccctgctccctgtccagttcgggtggtcctggctttctggctgtgggcagctgagaggacaaaagaaaggaagaaaaaagggaaaagtaaaccactgccccccagttgagccaggttcctcctggagacctctggggaggaggcttctggatgacagcctccccgccagccttccattccctcctaggcctgttctctcccggtggcccaatctgacaccagctggtggcctggagtagggaaggtgggcaggtgtggcctcgggcagcctgccctcgcaggggactcggtccccggggacctcagagccactggccaggtgtgtgcctgccaggtcaggccctggcccgggcttcgatggcatcatcatctccaggaagggggatgttttg

SEQ ID NO: 463989 - DNA, 935 bp, Homo Sapiens
  misc_feature (529)..(529): n is a, c, g, or t
  misc_feature (907)..(907): n is a, c, g, or t
  misc_feature (915)..(915): n is a, c, g, or t
acattgtcttatttaatatacttttaaggttaattatgtttaaatttatttaaaatttttgaaattttagatgttatctaattccatgtttgtatgtgtctaaagatatattaacaatcacagaaatggtgagttcacaaaaatggatatatttttaatattattattattatgtaccattaaaatattttcccatgtctttagtctgttttaaatcattttaaccgctttatttcttctaaaagatatgggatattctcactttcttactttgctttaaatactgttactcttaataaacattggtaacatttatctgtagacacatatctcataatcatatgttaaggtaataacaagttttgtcctataaactctttcttaaattcaatttccacatgaaaaataaaatagcaattaatattcttattgttctccaaattttaattagtttacccactattcatgcaaggtgactaaaacaaatgcctcaaaaaacttacataccgggtggtagcttcctacattnttctgctgtaaaatatcctgttgcccaacagttcattcctacatagctctgacataagcaacatttacactaagagtagatatgcttttgtgtcgtttatgattttcacaagcataaaaaataaaagtttttaaaactcttcatgcatcacaatataattttaaaaagaaaattaaatcttttcagaaacaatccaacatccaaggaaaatctcaagttttaggattaacccataccaaacacattagtacaatttaataattttagtttttctaatttcttatcaaatttttatattaactgttctaaatcccacattcttaaaatctctaatgttctatttttcatttttaattgccccttagtttagacagaatnctggaagnccttgttctcacaaagtggt

SEQ ID NO: 463990 - DNA, 892 bp, Homo Sapiens
  misc_feature (43)..(98): n is a, c, g, or t
gaacaccttgagtgacagagttttttcttatttatttttgttnnnnnnnnnnnnnnnnnnnnnnnnnnnnnnnnnnnnnnnnnnnnnnnnnnnnnnnngctatgacatttttgaccaggtaccatgaaatagggaattctgaaggccaaaataatctaccaaaccttatgaaaaggagaaattttcaaaaattggaaggcgtttaaatatttgccatattgtgtttgagataaaacacctggatatacattactgctgactatgaatttaatgtgttaaggaaataaatccacatctttagcagtgcactttcattctattttgtctctcagaatacttggaattctatttacaggaagtcagaatatctccaacagctaccagtaaacaaaatctgaaggactgtggcaatgaagatgtagtaatagttttatttagaagtagacaatactcctttttctatttgtatgcaaaagcagtcaattccaagcatgttaaatttaaatgatcttttttccattgtgctttctttgtgaatggctgctacattttgctatcttcataataaacagcccaaactgaaaggcataagctttcttgccctggtccacagcatatggtattttaactagtcttgtttggctgcctttttttccttcacgtagtagtaaggatgtattaataatataagtcagagtttgcacatgcaaagaaaaagattaattttgtgaaagaagaatacaagcgcttttgtggctctaatcaatcacttttgactcctgctgatacctgagactgaaaaagacactggatgatatataggacaccatgtgagatacattttttgtgtctctgtcaagacagtgaactacaaaataaatgcggcacgagg

SEQ ID NO: 463991 - DNA, 568 bp, Homo Sapiens
tggatgggatttcaaatgtcatcggctgcagaagagggtgggccccagtacataaagccaccagaagtggatgggcttctgcgtataaagctattgctcttggcagctctgtctgaaggaggaggacaagagactccagggtatggaaagggattttcatagtggcgggcagcaggaaggagcagaagttggacctgaaggcaggaagccagcttggttctagaaagaaagaaactgggggcacagaaaaaaacaggtaactcaagggatcctcctgcctcagcttctgagattcagattctatctgtattaactgaaaaatgttatatgtggccagacttacaaggtttattgccctgtcctagctttgcgttacgggcactgttttcatcagaaatgttctgggacagactcagtttcaaagatcctgttcagttttcctattatacggaggccttgccctgatgtggactttaaatttaaaatagtcattgcacccctagaaaagtccagagctacagagagttgtacacagtaaaatgctttggaggagggagaataggatgca

SEQ ID NO: 463992 - DNA, 426 bp, Homo Sapiens
catactttgtaaaacacagctatattccctctagctgagtatgtttccagacagtatatgtggttaggagaacaagtacagacagacatggattcacttcctgatcagtgttgccacttgataactgtggccttgtgagtttctaggcctcagtttccctacttaaataatgagattcacaaattccgttgtaaaacgtaatgctaacttttctaaactgccctaaaacatttctgtgtctgtccccattgtgttcacatttataaatagtagttgtatttcattgtttccagattcccttgcaaggcagcttaatgccttggaaagagctctagattgtgttctagcttcagagttgcttctaactctttggttttctaactcattgtccctcttattcactgtaacattgagccagtctctctc

SEQ ID NO: 463993 - DNA, 377 bp, Homo Sapiens
tgctgtttttcatcattccagcctagaaagtgagaagttttatcttcccatagtccttttaaatcttatgttagaactagcaggacgtaggtggaaagatgaagaaataagcttgtctagactaaagaaaggaaagcaggttataaaagccatagtagccagtccagttcattctgcagatggccccataccaatcgctgttagagtttgccacctccactttcccactgagaactgcagcaattttaaaggatatgagaaagccaagactcaagagatgagaagacccccttggcgaaatatagtgtactcttcactgccgctcccacttcagcctcgtgccgaattcttgggcctcgagggcaaattccctatag

SEQ ID NO: 463994 - DNA, 652 bp, Homo Sapiens
  misc_feature (398)..(398): n is a, c, g, or t
tacatttattttttggcttagcctacctatgattgtatgaaggccaacaaatcctggggtattattattagttgtgatgataatagtaattaccacaatgtatagatatacaaccatacgctttattcaatgaaagaagaaacacagtaaaaatggcttttattgaatacctattgtgtgctaagcattggcctgggtatgagaaaatattagcccattgcctcatttttgttcaagaacttcttaagagactaaaagcctcatgtttactgatgagaattgaagggtacagaagtgaaaccacttgtctgcacccggcacacagctgggcatcagaagagatgggttttgagcccaggccagtgaagaccaaagtgtaggttcttgtggggctaccncagagcacatagccccttccaacctcactaattacacgtgagaaagaggcaagcatctcaatggctactttatagatatggtcacctgcatagataggaagtgattttcccgaccttattggatcaaattattcatcagaagccggatgaagaagtgctaattatcatgcaaaacagcccccgagactaagaagcctgccttgcctgcttcccaagctgcccacttccagaaagggtggggctgcggcacgagg

SEQ ID NO: 463995 - DNA, 724 bp, Homo Sapiens
ttgattatctggatgcaggttttattatcattaggatgactgtcatcgacaagggataggggcttagagggttatatacaaaccacaattcctaggcgatgtttcaatattcccacacacatttatcccacagccagacacagcacaacaccacagggtttgcccctacatatgcttctccaagcagtaacacagctgtgggtcagggctctgcccacccacaaagggatgcccagaaaggagaagatcctgggtcctgggggtgaagtttacacatggagaatcctgccaggttggggaggggatggaagctggattttgcacacaacgcttcagtcccaccccaccctcactggctgccctcccaggggctccctgtcccacttggggagtctttgcaagacacagaaggaccatcttagccaaggctaaggaaggagcaggcctgtggtggggggggtgagaggggctctgggatctgcccccttgcctatggtgctaagtggaggaaagtgggttttaaactgctaggctgattttctcacatgcctaaaggaagagggcaagtccaggggctgggatgtgtgtgaatatggggctgggagggaggggctcaggcttatggtcagggatctaactagagaatacagaggtcatgaatggtggggcacacagggcccaagacatccttagaccacaaactcgacttcagggaaaacgtggg

SEQ ID NO: 463996 - DNA, 499 bp, Homo Sapiens
  misc_feature (72)..(87): n is a, c, g, or t
  misc_feature (126)..(137): n is a, c, g, or t
  misc_feature (174)..(274): n is a, c, g, or t
  misc_feature (374)..(382): n is a, c, g, or t
gctcaagcgatcctcctgcctctgtttcccaagtacccgggacacaggcacgcaccaccacacccagtcaannnnnnnnnnnnnnnngtagatatgtggtctccttatgttacccatgctgctttnnnnnnnnnnnnttttttttaacagagatagggtctttgctgtgtggtnnnnnnnnnnnnnnnnnnnnnnnnnnnnnnnnnnnnnnnnnnnnnnnnnnnnnnnnnnnnnnnnnnnnnnnnnnnnnnnnnnnnnnnnnnnnnnnnnnnnnttcagactcagttcatcatctgttttagtctactactgttttatattcattcttgtttgtatttcctgtttccttccactttcatacatactgagttaannnnnnnnnaagtcccataaaatcatactgacttcctcctattcttactgggattatctgtaattatatgaccagattttccttgtcagaacctcacagaacttggctgggcgcggtggctcacac

SEQ ID NO: 463997 - DNA, 549 bp, Homo Sapiens
atttctagtttttcaaatttgccagtctttttgaatagtatctccttcttttctcatgttttatatttaaaacttttttatgtccatcatcactttaaacatacttattttgtcatctataaccaataattccactatcttatcagaaatcaaataccgtttatgtaagttgactcccatgagttctaaattgccattgtgaggtcatcttcggttaggctttaatttgttgcaaagttgtgcagctcagggtcaggaagagtcccctccagaaaggaggatttgttactgtgaatctctttgttaactaacctctttccccactgaaataacttttttcaataacatgattttaacaacataatctctctatgccagaacagatatattttgaatgtaagtcaatattttcttgagcaaaattatgagcactgacttatatataatacttgattataaaggagtaatttttctgccttttcctgagcttcttgtcttgtcagtgtgtgcttttaaagggaatttgcaaaatcaatcattatcgcagtt

SEQ ID NO: 463998 - DNA, 172 bp, Homo Sapiens
aaactacagaaacatgcacataactactgagaaggtatcaagtgttcctacactagtttaaaaaaatcattcaacacccacataaattctgatatgcactaggctgaacagctgttaaccactgagaagctgggcactgcatcctctgccctgggtcaaaactctatatgct

SEQ ID NO: 463999 - DNA, 442 bp, Homo Sapiens
  misc_feature (51)..(262): n is a, c, g, or t
gagacaaggtcttgttctgtcaccctggctagagtgcagtggtagtgcatnnnnnnnnnnnnnnnnnnnnnnnnnnnnnnnnnnnnnnnnnnnnnnnnnnnnnnnnnnnnnnnnnnnnnnnnnnnnnnnnnnnnnnnnnnnnnnnnnnnnnnnnnnnnnnnnnnnnnnnnnnnnnnnnnnnnnnnnnnnnnnnnnnnnnnnnnnnnnnnnnnnnnnnnnnnnnnnnnnnnnnnnnnnnnnnnnnnnnnnnnnnnnnnnnnnngtgtgagccagggcaccaggcttatatttcttgctatgtatctattatctaacatttattaattctgttatttaaatcctgtttcttttgtattttgttcgttcagactgagaatagtttgttaatctttagctcaattttagttttgtcaacaattcttatatttctaccgaaatactc

SEQ ID NO: 464000 - DNA, 755 bp, Homo Sapiens
  misc_feature (233)..(250): n is a, c, g, or t
gactgcttactgtttattaagtacacattaaaacctaagtggtcatttaaataaaaataacaacgtattattaattttattacatatatgaacataaaatgtatgaaaacaactgcataaaattgggactggcaaaaaaggtatataattgtacagttcttacgcatgaagtagtatattacatctcttgaaaataactgtgtcacagcttgccaggagtaaagaataaaatnnnnnnnnnnnnnnnnnnctgtggtaagtcaagatgtacctctgctacccctgacacagcaagaccaacccttcctcctccaatacatttatgatgatccccttttacttaatgagttgtaaaaccctaaagtaatccctcaaataacaaaacaaagagttataattaatacattaacagagggccaggcgtggtggctcagccagtcttttaatttggtcctccaatcagctcaactctgatctaccaattttcactctattattttgtcaaagcttgttttgaatgtgaactcctatatgaagccattcctcaccaaagaatatatgactttatatctaattccaaataaccaacaccagttcactcaaaacgtgttgacctaaagaggtacagaccaggatccttgaagtcaggagtcacgtataagactacacaaccattaagcattatagtgaaggcaagggaaaaacatactataattttattgctagtttgagctcttactagtttttgtaacttc

SEQ ID NO: 464001 - DNA, 333 bp, Homo Sapiens
  misc_feature (55)..(101): n is a, c, g, or t
  misc_feature (227)..(256): n is a, c, g, or t
ctgggacaaagtctcactgcattccagcctgagggacagagaagggccctgtctnnnnnnnnnnnnnnnnnnnnnnnnnnnnnnnnnnnnnnnnnnnnnnnttctctagggacatagtcaaaaactggtccgaaataaatatccttccagtgttcagttttactgaacacatctcatggctttgggtttaactgaataattcctcactgggcacggtggttcatgcnnnnnnnnnnnnnnnnnnnnnnnnnnnnnnagcatcacctgagcccaggagttcgagactagcctgtgcaacatagtgagaccaccccaccaccgccatctctaccg

SEQ ID NO: 464002 - DNA, 896 bp, Homo Sapiens
tgtagaattaggtaatatttattgagagcttcctatgtacaaggcagtattcaaacactttatttgcattaacttatttattccttataataaccttacaaggtaagtcctataattatctctatcttattgaagaggagctgagttgtacagaggttgattcaattgccacagacctcaaaccagaaagaggcagacccaggtttggctcaaggcaatctggtcctggagccgctgtgttaggagccgctacgttataatcactctccagatataggacatgtggctggattctataagaaggcagaatctccttctccttcctcttcccctgcctcttcttcccatcctcctgtcttcctgaaatctgacagatgcaatggacttctgaagagatgcaagttcctatcactggagatagaggctggaggaccactgcagctgcattgttgaggggtcagagcccaaaagaggaactgaaataaagtatcttgaaagtccctctgagcctccctcccagcctgagctggttgtgaatcaggggttgtctggcacagcagtatgaacactctggggagccaggtgggtgtgtgggttacccagagactaaacttggcacaaatctgccagtagccctgttctaatgtgcctcttagatctgctgactccatcagaaaacaaacaagttttcactccggcatacaccacaggagctgtcctggccatgtgagtggagccagcatcacttctacctaacatatgaagctgcaaaattgtcattgaggttctgagcatgagtctttattgaccatgagaaggagggagcagtggaagcaatgcagctggataactgattcctggggaggggcagggaggctaggtagaagagaaatatg

SEQ ID NO: 464003 - DNA, 493 bp, Homo Sapiens
  misc_feature (143)..(151): n is a, c, g, or t
gctttaaaaaccacacagtaggatttttgtgaacataaagaggttcaagggacactcaggagagaaaataagagcttaaagacaaaggccaattccatgtaattgaaaccatatctagacacaagtacatttgaaatgctgcnnnnnnnnntgtttttgcaggtgaataaatgtccagtcctctagtttggaattctgtttaactcactgtcaggcagggcaggaaacaaggtcactctggtttttttctctgtcaacactttgggaggaggatggagaagaatatacttcagtgtttcttctccagtgggagagcccttccctcagtggtttaagaagccctctctcaacggggactcttcattagcacctgctacggcctgagctacgtgcacccttatctcttactgagccagttacacaggggcatgactgaggccatgtgaaaatataattaaacctttgttaaaaaatcacagattgctaaatacac

SEQ ID NO: 464004 - DNA, 660 bp, Homo Sapiens
  misc_feature (432)..(443): n is a, c, g, or t
  misc_feature (526)..(543): n is a, c, g, or t
attgctctgggttagtgtcagagctttattggttttgtttgtttgtttcaaagttttcccaaacgattctaatatgcagacataagtaaaaccactggctgaattatttttattacatctgtttttcagtatacatggaataaaaaatagcacttgaaaagtcgtataccaaagaatagcctaaatcaagtatgagagactttaaaatatatacatttgtaaggaacgcattaggaatgctcttcattgtttattttctgtcagatccctaccagttaaagtgaacagctaatatataatctagattgtttcttgaaattgttgacttttcccatcctcttcttttagaagaaattctatgtagaagggatctcttgctctgattactttgtcctttctctttcctacagatatttttgggcagagaccccnnnnnnnnnnnntcagaaagattaaaacataccagttctaccggtacctttctttaagaataaattggtaaaggatttacttcctcagccgccgnnnnnnnnnnnnnnnnnnaacatgcaagcaagtgactgctgtacctatagtcatgtgatcatattttatgaacaacaacttggaacactgtatatatgtgaacagagtccagtacattttattcctcattttcag

SEQ ID NO: 464005 - DNA, 862 bp, Homo Sapiens
  misc_feature (534)..(534): n is a, c, g, or t
gaaaccatataaagaattagattttgctctggcactgctgaacatagcatagtgacaccttaaggcaccagaaagtactgttcagattggctagctagtagctccagcgtgatccctgtttgccactttaatgtccagccttgttttttcatattcccttgagcttcaggtagccaaggctagaaagatatacctgtcactgatgaagatataccagtcactgatgtgacaagatttttgccttgaagcttggcagggataatgtcagttgacacatctttttgctgttttaaagatatttttaggttttagttttattctttaacattctgtttcatcctatgatctttcttcacctttcacatcaacttctaatttgagtatagactgtttttgcaaaattagctctcatattgatctaataaatattatagagagagaagttttagataaaagaaatgcctaatgacctaaaaagagttcaaattcttatattacatctgttccctaaactttacccttttattccatacnatctggattgttagtgttatgatatatatctttcattctgagcactcacaaagccagtgattaagtaattcagcttgataattagttttaacttttcagtggttttaaagccccactcatataattttttgttggatatagtataaaattatttagtcagtggagaatcctttcaggagttttcagggaatacaagattgttgacatctaaatctgcagctgcattctaataaattgccactttatttacttgaattatattttctcaggaaacccaaacttgcaaatttagtcttttaaatttaagtgtaccagcttaataaactta

SEQ ID NO: 464006 - DNA, 493 bp, Homo Sapiens
  misc_feature (223)..(223): n is a, c, g, or t
  misc_feature (381)..(381): n is a, c, g, or t
  misc_feature (420)..(420): n is a, c, g, or t
gggtttgtttcctgtttaatgaacattttccagaaagaggggagatcccgttagcagtgggtttcagatacaggagaccagacaggagaaaatattgtgagatgggaaagtggatgccagcaacaggaaacagcagagaggggctgaagttctcgaaaggccaagaagagcctggtgggaaaccgctcagcacctcaggactgcctgtgctcagggcacaggnttcgactttttcgccttgggctgctttttgttttctttcttgccttcagtcactgtaggttaatttgcatcttctagagctttgcataatggcctcctgcagtgcgtacgtggtttcctcttgacatcttccactcggtacagtgattcgggggactncacccaggctgtgtgttgtcctttcccccatggccaagncagggtcccagcagtgccgtttagtccatccgcctgcctggcaaggggaagctgggcggccctagttgcgaaa

SEQ ID NO: 464007 - DNA, 475 bp, Homo Sapiens
  misc_feature (354)..(366): n is a, c, g, or t
  misc_feature (387)..(403): n is a, c, g, or t
ctctctttttgcccacactaaattgtaatgtgtttgaacaactctgacttaatattacctctaacaaaaagctggaaactgcacaaatattctttgtaggctctaaaagtaggttggctgaagtatgatacctgaactaattattcatttgtatgcttgttttataagtttgacttccatttcatgatttttttggtagctttatgttatttctgttttcagcaatgggtactttgacatctttctgtctctgaattgaattttcattttgcaacggaagagaagacaacatatttattccataatgaaagagctaatgaagtagaataactattaaattgagatgttttagcnnnnnnnnnnnnncacaaaccccaaacgggttgnnnnnnnnnnnnnnnnnctaaaacatttctaacaattcccagtaggaatgggtggggccagccttcctactgggaattgttagaaatgt

SEQ ID NO: 464008 - DNA, 918 bp, Homo Sapiens
gaagttttgcacattggcaccagacatgatttaattggaaattcttattatttattctattttcaaaacataagtgcttttttaaaaaaagtctaacatgtctttttagtaccacacacttaaaatgaacaaaaaacaagtcgagttttcttaaaagttgctttaaaagttaaataccactgtatggggaccataatgacacaatttcgtaaactcagagaaatgcagcccttcgagtaagttcaggcaaatgagtgtgggaaggagtagatcttttgcctgtggcactacagatatactccctgagattggggtacacttacaaccagtgaaaagacaaatagtttcagaacaggttgtaaactttctttaaaagtgaccagaaaataatgtagtcagaaagctacttactgtgtgtttccatttgctctgagagaagtgctgaaaaggtttgctgtcctctctttgtttctactatctgtattctatcaccctactatatgcttacttattcattatattcataagattgtcactggttctgcaagaattgttcagagagtctctcatccccaccctcaccattcccaatattggggaaaaactttagaaatccaagataaaggagggggttgaagtaggaagttatctaagtgcaaaaagggaagttaacagagtctctgcacaattcagaagaaggagagttagaagaaacatttgtcaagcaaggctacctacatatgggatgaaggaagaggactgaagctattcttccaccaatctgtgtgtgtcaatctgagtccacagtcacatcccttctctcacatgcaacattcttactcagtccatcaaatgtagatacagattgatatacagacacatcaaaactgcttacattcagaaaaattcccatgtatg

SEQ ID NO: 464009 - DNA, 421 bp, Homo Sapiens
tttgactggcagtcctcagtgcagctctcctcgtggtggcagagggctgctgtgccttcagccatcacatcaattttccagtcaggaagaaggaagggctgagagccttgttctagtgaagttttattattttatatgggtgtgggagggacactcttccctgggattctcgttggcagaactgtgtcgcagggccacctctagctgcaaaaggggggctgggatagtgagcagttttacctggacacgtgactgccccaaacaaaatcaggattatgttattaaagaagaggtaagagggactggatgctggtcaggtggcgagggcactttccatagccttgtggcttagcgaagcccagcgtccggactcttttacacctgggctcagatgccccaggtactgtcttttttaccctgg

SEQ ID NO: 464010 - DNA, 992 bp, Homo Sapiens
ttttttttgcaatggtcttgtattttaatatcatttgaataaattacagggtgtaaagggaaagcatattgctcacaagttgaggacttttgtccttttcttttcctattatcagatgcttcagccctattctaccttttgtttctgggtttttaaatcaccctttttatacgcaattcactctttctgcatacaaactcccatttatcaaataaatactatttaacaatttgtccatattcccttaaatcctgaaaaaaccaaccatcctttagtaaaacttgttatattttgtgatactctaacactacatgcaaaaacggtgactctatcaaatgatgcagtttattatagtgattgatttgtacatggtttgctaaatgcatctatgttgtaggctttttggctaatatgatttgttaaaaccctctaagcaaagtgctgttacagtgaccatctttggagacttggaaatagcctcattacacagaacttgatgttatacactaatggcatttattagaatggaattctatatgtattattacttccgacaccagcctggcctttgtagcctcctcacagcatgcaacgtcggtaattatgctaatgctagctaattcatgaggacaacttcctaaagtgcccttaattaacttggagattttgtaaacagctatacatgtaggttccggaaattgtggggatatgtcaatctgacatgtgtagagtctgccttcctaacctcatcactttgttttactaaagcttaattttaaacaagaagttccaatctgatatcttttccagcaagtgcttgaggaagattctgataagtgtcactttagcctgtatcctccagtccaagtcccttgagccagatgagttaggtagattggtgtcttttaagttggttagaagagaaaatattgaagtttatttctttagtaaagggtacaatttttccaatatgttcctgcaatgtgattttg

SEQ ID NO: 464011 - DNA, 689 bp, Homo Sapiens
  misc_feature (125)..(142): n is a, c, g, or t
  misc_feature (424)..(438): n is a, c, g, or t
tttatattttcagactgtttattttgtgtgtcaagcttatggatttttacttgtgacaaaatattcaagttgctctggaatctacactttcattagcagcacttacaagtggatttgtaaaggcnnnnnnnnnnnnnnnnnngaggtacagtgaatgagctgatacgaaattggttgtgagaaattttacttatgtaaagaaataactttaataattgattgcatatacatcaaggttaagggtatggaatttagtgtccagagtggaattattggtctaatttaaagctacttgtggcaatagtgaacagtttcaagagataaatacatagctgaagaaaagggagaaaaacataactgtgctcattttaatggctctctgactttgataactaaaaggacttgcattcctcagataaaaacnnnnnnnnnnnnnnncaattctcgagacctagatttagaatttggagctgcaaattcaggtcctgcatgggtaaagtagcagcaggtggtatctgaatatttgtgggcattatagcatgaggagggagagagaactggattctcacgtctacaggtctactcaatgcacatattttactctgattgggtttctgtgccccatggtcactgaatcagtttcaggtctgaagacaagtcattgaaagaggtaaaatggttaatatctg

SEQ ID NO: 464012 - DNA, 736 bp, Homo Sapiens
  misc_feature (612)..(671): n is a, c, g, or t
  misc_feature (706)..(706): n is a, c, g, or t
  misc_feature (708)..(708): n is a, c, g, or t
cttccccctttcatcatatatgacttgtggttcacagttgttttttatatccttaacttactggtcttactccaagttaaatctgccacttcatctttaactctggtcagtcatgtcatgtgtttgttaaactcgttgtataaaaactgattttaactgagcctataggatgcctgatttttgctttgggtgttaaccccagattggtggttttaattcctggctccaggtcattttcaacacctgggaatcttctgcatactaccagcgccacagggctccctgaaattaattaaatcggaatctggacttaagagccattgctctatattacatttgggtttacaaccattgtctggttttctgtaattagtttagagcatggatatattgattttatatttttcccataattttgttattgagaccagaagtaaaggagaccattcactgtaagtatttgccttaattatttaatcctttgttcccgctatgctaccaaattatattgtgtctattccttaggcccaaaagtctgcttcccttatcactgtggttaaatcattgttagtttctctatttgtaaatataaattcttttggagtacaaatnnnnnnnnnnnnnnnnnnnnnnnnnnnnnnnnnnnnnnnnnnnnnnnnnnnnnnnnnnnnctcccataccatcaagccagcactttgttttactntnaactaggaataaggctattattaataat

SEQ ID NO: 464013 - DNA, 729 bp, Homo Sapiens
  misc_feature (290)..(320): n is a, c, g, or t
gaaaatcactcattgaaaagtcttgcctttgcctcatggtgagtgtgtgggtcaccttgttagcttgatactgcacgatatgtggggtcagggctggcccagtttgacataggcccctctgttgctgccaacttcatagtagttggaggcagaaaagattgttaatacctacatcaaaacagaagagagacaggtgttcacattcactgaagaaaccttcaccctcaatcctatgtggcccaactcaactgcagaagctgctgtttctcctagtgctcatctgggaatcnnnnnnnnnnnnnnnnnnnnnnnnnnnnnnnaaaggcatcaatgctaatagggcaagagttgtgactcaagtcatagaaatttgaattccgatagtttcacaatgtatcttcttcacatttttatcccaagtgaaaatagcaagggtcatagaaaacaccatatttgcttcaacttagaggcaagctgggtctgataaaccaggatggccattacaatgagcaagaagatgagttctgagagctgatgtggtgccttaaagcagttttctacggaatgttgtggctcctcagatggtgtatgaaaaaagttttcacagtcaatacgttgggaaatgctagatactgtatctcttcctgaggatttacagtggtaggaaactaaaggtactcagaagtcctgcaataaagaaacttgtacaatataaccagtggtattagg

SEQ ID NO: 464014 - DNA, 353 bp, Homo Sapiens
  misc_feature (138)..(170): n is a, c, g, or t
cgcgtaaccaactgcgccaggcctaatggtatattcttgcttcataataattatcttctcttacagctctgatagtaataatatatttttaaaacacttcttaaaaacttttgaaaaagttttatttctctgtatagnnnnnnnnnnnnnnnnnnnnnnnnnnnnnnnnnaatcttagtctttattgttagaccagttcctgaaatcatccttgcctggttgctcattgaagagaggagcactaaaaattgaattggaaactgtatagatatggatggaatctgttgactatgaaattctcagtggctcatctggccacttatttaggaatccccaatgtccatatctttcca

SEQ ID NO: 464015 - DNA, 569 bp, Homo Sapiens
  misc_feature (546)..(546): n is a, c, g, or t
tccctgtaggagaaggcagttggtgatgatttattagccagacaagaatcaacaaacaagttctaacatctgttctcaccaaaccattcctcagacaacagcagcattggaccagggcccagactcaaaaggctcagagggccaaggaaattagactccaggaggagaaaccaggacagtgggagctaacagggccctccttgcacacttctttgctgtcttagatcaccaaggactgagccattggattcttgggatcttcttaggagggagcaggctccgcatttgcttctctgacctccaggcttctttgttgggggtcaggccagaccgcctactgaggaggcccaaggggaagccatgcctgtcctctgtcctgaagcacctgtctagaaagattgtgggggagggtgtgtctccaggcgggtgggggctggtggggcaggggagggccttgccaatcacagagttctcagaatgcagctgggagccacctgtattctccttctccccggccccctctttctgcatcgggactggggcttnctgtttgatgattgcctcgtgcc

SEQ ID NO: 464016 - DNA, 179 bp, Homo Sapiens
atgagccaccatgcccagccttcataataagtgtaattcttacaacaaatctactagataggcatcacagtagccattctggagatgagaaagctgaggctcagagaagttgtgactaaagcccgccctcttcccattcaagctcactgcctttctttttcttcgtcaaggggattttg

SEQ ID NO: 464017 - DNA, 394 bp, Homo Sapiens
gctttatatatttgggtgctctgatgtcagatgtatgtatttataattgctaggtcctcctggtgagggtggaacttcttattcaggagagctcatggcctttcttactaaatgtctctgaagtttagaagtaaaataggaatattcttctttctgaaagtagttcaggtatacatttgctttgttcacaggatgatcttttgtgacctcgtcagaaaaataaaaattgtttaattttctactttaagatcttaagatcaaattcttttaaattgaactttttaaaaaaagatataatgcacaggtttatctaaattcaggagagattagaaactttttgataggtccactactcccagctgtagaaatcaatttagttggcagagtacatggg

SEQ ID NO: 464018 - DNA, 680 bp, Homo Sapiens
  misc_feature (616)..(616): n is a, c, g, or t
tggcttagaaacaacagacatttatttatttctcccagttctggaggctggaagtctgagatctgggtgccagcatgcgtagggttctggtgagggcctgcttctcggttcatgggcagctgatttcttgctgcatcctcaagcattgaaggggtgaaggagctctctggggccacctttcatgagggcactaatcccatcatttgggccccatcctcatgatatgatctaaacctaatcacctcccaaaagccccacctccaaataccatcacattggggattaggtttcaacatataaaatctgggggaacataaacattgagtctattgcacacgagtttattagttcccaagtataacatcccaaggttgctgaggcctattatataaggatcaaagttctcgttcttgtggtgaatgatccgaatttgaatctccactgtttgagctgctgtttcttgggaggaaggcagatgtttcatgatctcccagtacaggtcagaaaaagaatggcgtaaaatcatctttgccattgaaagctgccagtcttcacatttcctgggggaggcttttagtcatcagctatgaagcctgactcggtcatcttctccccnaacacacacctcgatctgagaggcaggttatgctccaggaataattccctccatccttcctggg

SEQ ID NO: 464019 - DNA, 412 bp, Homo Sapiens
tacagactgggtcttgttatgttggctaggctgttcccagactcctggactaagcgatctttcggcgtctcaaggtgttgggattacaggcatgagccactatgcctggtctattcattcattttgtaaatggtttttgagctccttatattaaccgttttcaaacactttccatgtgccaggcagtgttctctatgcatgctttaccctgcagggctttttttcagaattatagataaatgttatttttttgcatttgacagatgagaagatttgacagatgagaagtcaggcttagaggttaagacaggagttgaaaactcaaatgccttcagggattaggtgaaacaacccaatgtaagaaagttttaactttgaattttactttaagaaaaagaatgatgaaatagca

SEQ ID NO: 464020 - DNA, 420 bp, Homo Sapiens
aaaggcttaaacacaatggaagtttatttctcactaagggaacatccaaatccatgatactttaagtcagggacccaggttcctcccatctatggttctgccatcactaatctgggtcttccacaattgccgtgctccttggaggtgggaagagcaggcggaggacacgtgggaggttttagggacaagcctggaggcagcatgcgtcactcccatgcagagtccattggccaatgctggctccgatggccacatctcactgcaggggcagctgggaaatacagtctggctgtctacccaggaggaagagcagccagtttctgctgctgatgatcaggaggtggagaaaatgttcagtcaggcagggagtgggaatagacaagaccacaagcagcttggtgcctcttgaaagggagaggg

SEQ ID NO: 464021 - DNA, 449 bp, Homo Sapiens
  misc_feature (79)..(79): n is a, c, g, or t
  misc_feature (411)..(411): n is a, c, g, or t
tgacagccacatctggccaagataaggttttttaatcgttgttgtactactcctctcccccatgtgactttcgccctcnaatgttacaggtttcctaaaatagagggttttagaaatgaaacactacagtgtaaaacactttgtttgctttatagacacacacagagaattctatttatggaagggaaagaacaaggagtcagttcatctgtgagttcacatttattgtctattacattcctgggccctactacatgaatgaacaaggccaaatgttcctcaactgtgtgttggggagaagaggtaaatacacaaattaagtaaattcagatactattaagtataataaagaaaataaaacaggataatgtcatagaatgcctggagaggggcttatttatctaggatgcntcagcaaagcctgccaaggaggcgacagttaaatggaa

SEQ ID NO: 464022 - DNA, 137 bp, Homo Sapiens
ggcaatcataaatcagggccgagcatcatggctcacatgtagaataatcccagggctttgagaggccaaggtgggagaattcttgacgccaggaattcaagactagcctgggcaacatagtgagacccccatcacta

SEQ ID NO: 464023 - DNA, 486 bp, Homo Sapiens
ggacctgaatatgtgttttcgagttggggatcaccattcaacccactaggcctccgggcattacatgataggggatgtagctcctgtaatctgtataaacctaggtctaaatgtattcctttgagcccatcttgagaggccttttttttccctcttcagagttgcttaacttttccttgttaagaaaacttctcaagttaccaacagcaagaaagattttcatcatttctagaaaaccccagaactgaagggaggccaagatgttagaaggaagcaacaccattcctcatcctaaaagccctgattttcttctgcctgcctgggacattctccaccaagcccaaatgtcactctttgaggcttcctgaaaccatcctctcacacacccctactcacaacatcatcagaaacacagtcagctttctgctgactttcactaatcaggtgtgtgacttcagtctgctcttcaagtttctaggcttgttt

SEQ ID NO: 464024 - DNA, 400 bp, Homo Sapiens
  misc_feature (220)..(351): n is a, c, g, or t
  misc_feature (353)..(353): n is a, c, g, or t
  misc_feature (369)..(369): n is a, c, g, or t
atgcaatcatctgttgacactgcttgctattgccacaattagctaaaaactaaactaataattccacactggccactataaccctgacactgtagcttaagaatatatagtcaatcgctaatcaatgttatttctgtaaatgaatgagaattcctggaaaacaactttgtatcagccccactctttttgtatctgtcccccttttaaaaatccacttgtnnnnnnnnnnnnnnnnnnnnnnnnnnnnnnnnnnnnnnnnnnnnnnnnnnnnnnnnnnnnnnnnnnnnnnnnnnnnnnnnnnnnnnnnnnnnnnnnnnnnnnnnnnnnnnnnnnnnnnnnnnnnnnnnnnnnantttagttggggcgtgnatggttggacgcctgtcaattcgcagccacc

SEQ ID NO: 464025 - DNA, 449 bp, Homo Sapiens
tggctcatgtctaataatcccaaccactttgggaggctgaggtgggaggatccgcttgaggcccaggagttccaagaccagcctgagccaacatagtgagactttgtctctatagtcagcagcatcgggggtcaggaaagacttcacgaagccataaatgcatccttctcggggcagcacctggctctcccaggtgagagaggactccattttcacaggcaggcgtgggagcttcagcacccatctctgggcccagaatgacccactggagaccttacagctctcctgtcacccccaattcctgccccctctgcagccttggaggagaatggagctgaagggcctgccctctgtagggtgagaaagggagtaaagcctggtgcccactgccctgtgcttccgcattgcaggaggcgcccttcctttcctggcacagggtccacagccca

SEQ ID NO: 464026 - DNA, 448 bp, Homo Sapiens
ggtgaacaaaaagagacacagtctctaacttcatggagtttatatcctgttcaaaacagagagttaatcaaatacagacacaattgagtatgtatttagaaatctaaattagtgcccctaatgaaacaagttgtagcagaatgcttaacaagggatctgactaaattggtgtattggaagaggcttccctaaagaagggatgctgaagcttcaggtcccaattagacaggtgagtgcggagtagggagggcagcatgtgcaaaggttctgtggcaggaatgatggtgtatggtgactgcccatcttggtctaccccaggtagttccctattgtcttggcttattgattaatagcattctcttcctttctccaaagtggcctggtttggaaggtaaattatatggttgactaactgaataaaaagaagctggctggccacagtgtctca

SEQ ID NO: 464027 - DNA, 222 bp, Homo Sapiens
agctgaaatacagtttatgaattacttatgaattttgatatctctgacttccattacaactggtaattgagagctattcatatttgcctataaaaatatatggctgacttaattatcttttacagaaccatactttgttttcatttttgtttcctctgaagaaagactcagaagcgtatcgtaattgcctgcctatgagttaaactagtgggtagggagtta

SEQ ID NO: 464028 - DNA, 549 bp, Homo Sapiens
  misc_feature (417)..(417): n is a, c, g, or t
  misc_feature (480)..(480): n is a, c, g, or t
  misc_feature (483)..(483): n is a, c, g, or t
  misc_feature (485)..(485): n is a, c, g, or t
  misc_feature (487)..(487): n is a, c, g, or t
  misc_feature (491)..(491): n is a, c, g, or t
  misc_feature (522)..(522): n is a, c, g, or t
attaggccatcgtgcaggggcaggtaaggcccagggcgacgctgggatgggtgacgtcaggctgcccactgactgtcctgtccctgctgggcccgtgtttggaactcctgcctcgggcgagcgtttgggggtcctcagagccctcttcttttaaggtcatccaaggaattacccttccaacgaaagaccttcacgaaaaggctggaggttttcaaggccctcacagacaatgggagacacatcacctacttgggaggaagagctggctgactttgtcctgcagtgggatggatgttgggcttgtcctcggaattccttctgggtgctgggtgaacttgggtcaaatttcaatagctgtttacctcgacgagttacattcgcaaggatgggtttcagatgatctgtctgctgtgcgtncggaccgcgtcctctgtggacatagaggtctccctgcaggtgctggacgccgtggtctgctancanancngtgncgctgagagcctcccgctgttcatcgttacncctctgccgctcccacctagtgccgaa

SEQ ID NO: 464029 - DNA, 404 bp, Homo Sapiens
  misc_feature (80)..(196): n is a, c, g, or t
  misc_feature (375)..(375): n is a, c, g, or t
attcggcacaggaaaatagagaatccagaaatccagtatatgtgcagatttaataaaagataaaggtagtattacagttnnnnnnnnnnnnnnnnnnnnnnnnnnnnnnnnnnnnnnnnnnnnnnnnnnnnnnnnnnnnnnnnnnnnnnnnnnnnnnnnnnnnnnnnnnnnnnnnnnnnnnnnnnnnnnnnnnnnntagaaatacttaaggttattctccaggtttagttatacaagctagggtaaaggaaatgtgaagataagaaactcagaagctattacaagaggcatatttaattttacaaaaattaagaccttttaatggtaaaggataccataagaaagtttaataacagtattgggcattaagtcagncatatttgaccaatgggaatagattaggg

SEQ ID NO: 464030 - DNA, 160 bp, Homo Sapiens
cctatttacaaggggccatatttaattttacaaaaattaagcccttttaatggtaaaggatccccataagaaagttaataacagtattggcattaagacagacatattgacccaatggaatagattaggaataggcttggtgcagtggctcatgccttat

SEQ ID NO: 464031 - DNA, 479 bp, Homo Sapiens
  misc_feature (107)..(107): n is a, c, g, or t
ctttgtgttctacatttcatttgctttttatattacacaatttttatagaaaacaataatagggacttctattctacctagcatagtagatgtacagaaaatttccntcccagtagagaacaccttaagagtgatgaataaaatatcctaataagtcatggctgaaatgaaagtaaagtgatagggaaaatataagagacaagaaataagaaaggaagattctacaatgatgaaagcttgaaatagtgtttgctctcaggtcatttgataattcctaatgactatagctgggtttcaatgatccacaaggctgtgggacacagggataatgcatggggctacagcagcctggaagactgaattagagactcaaatgcagagttgggactcttcaggataataccatcaatggataaactaggaaatgccctgtctaaagaaggaacactgcctgtctcagtcttgactttggatggaag

SEQ ID NO: 464032 - DNA, 503 bp, Homo Sapiens
caaatttactattgtggacatgtaaattacactataagaaagaataaatatcataaaaactaatatttcttattatttctagcagtcaaaatttattgcaaattacagttggcccataaatgatgtagaggttaggggcactagacctcctgtgtagctgaaaattgcatatgacttttgactcctcccaaacttaactactaatagcctactgttggccagaagccttacttgttcatatggatgggtacatatttcatgttatacatgttacatactgcattcttacaataaagcaagccagagaagagaaaatgttattaaaatcataaagaagagaccatatatttactattgcctaagtggaagtggatcatcagaaaggtctgcatccagttgtcctcatgttgagtaggctgaggaggagcaagaagaggagagatcgtgttgctgtctcacagatggcagagaaggaagaaaatccagggatagtggtacccagt

SEQ ID NO: 464033 - DNA, 659 bp, Homo Sapiens
gaccaatctgaagtggggccttcttatgcaccaactagttgcgtctcatgtctggatcacccttttaaacataggataacactgtatattcaggaccaagaccatacttcagatctgaggaaatttttagagggcagtgtttttataaatactttgaatccctcataatgaaggattttagaacttatgaatatagaggtttactcgtctaacaaacagaactgtcatcctttcaaaatgtctgaaaattgaggagggacccctgcttcccagttatatgtgatgtaagacttttcatcaaatgggaacatgggaagaaactttataagcaatttgagtttgtttttatgggcagttagcctatcctcaaagcattttttattgcattattaggcaactggtaaactctcgtgtttaaggaatagcacttgggagaaaagaacactcaaggcatgatggtactgtcggtgaggaaaaacttaaggaatggtccagatgtagattactctaataggtcgtattagtcatgcttttctttgaccacctgctgcaagaagcacttaattgtcaataaggctcattttcctatttcagcaaagtgtttgttttataaagctaaacagacatttccaatgagaatgcagacctctctacaatgt

SEQ ID NO: 464034 - DNA, 472 bp, Homo Sapiens
  misc_feature (166)..(166): n is a, c, g, or t
  misc_feature (373)..(373): n is a, c, g, or t
ggcagaattctgctttctctcttgagggcttctcccaagaacactaagaggttacagagtccagccaggccagtcctgcttccaaatatcttgccaagggagcctgggaaagctgactagttcactggtagatttcggcattttcctgaggctgtggcttttgtgncatgggccccaggtttccactctgtttggccacagttccccaaaagcacatcttccttgtcagagtaagccatgcactctgctggaaccagctctcaataatctagaccttgatattgagcttagggagtctagggccagttcacccttttcttcttgggccagattctccttgcagaccattttcagtcccatatacagaatctgnaaccccaaaagggtaggaattataaatctctacgttttccccaaagcttctagttccccatgcaaatttggccacattctccccaaaacataccactcc

SEQ ID NO: 464035 - DNA, 424 bp, Homo Sapiens
  misc_feature (42)..(42): n is a, c, g, or t
  misc_feature (121)..(132): n is a, c, g, or t
agagtcatgtctgaactttgggtcaatgctggattggagatnaaacaaatcgcccattagttatagcaatgaagtattcccacaaatactagaagaaagtatttgtagaaatgttcagggnnnnnnnnnnnncaacagaacagaacatagaatgggggatggagcaaggcaatcttagaatcaaagagtgggtggcttcttctgacatctagattatagaagattcttcaacagtgttgtcttctttcctcttcattctctcaaagaagtcaataaaagctccctctcactttcccaccacacaagaggcaaaccatgtggaaggttatagaattccaccagattttaattgtgaggttgtagggtaggtaggtgttaatttttctcctaaaattagaatgattttccctgggttgttttattg

SEQ ID NO: 464036 - DNA, 534 bp, Homo Sapiens
  misc_feature (152)..(152): n is a, c, g, or t
cccctaattgttaaaaagccaagagtaagcatcaagttagagacagggaaaaagtacagagtgaaaagcaattttaaaaattgcataatcagtctaagaagagtagaactggccacttttaaaggccaaagtccaaacaaggtctttaagantttgggaacaccaatggcactcaccagatgggttaaggcaacactgcaatgggaaaggtgacaactgctcagtagaaggcagacatcatgtaaacagtcgtactaggctgttttcttgtgtctgaggtctatgcctaggaaggggtttactttttccacaaaaggggaaacatactatgatacccctgaatatacatcctagaactcactgcttaaagaacacatagaaaaaaacaaggtcatgcaaccatccctaggaagttaccaaaattcattcttagttcccatctgggggcaaccctgatgagatactgcaagggaagaaaagaagattaaaggtaaacaggcgtagttcaatatcaacactttaggcaaatctttc

SEQ ID NO: 464037 - DNA, 253 bp, Homo Sapiens
tcaaattgtatgtacatttttattttgagatattttgccaaatgaccctccacagagtcaaagtcatcatatcacccaatttgaagtggttgtcattcacactgtagtctgtataaatttcacccctagagttgggaaacctgtccgtactgacaaaggatgtatcaatttacacttcatcactgaatatgagagtatcggtctgcatactttccaaccatgttatcaaactttgatctttgccattctgagg

SEQ ID NO: 464038 - DNA, 262 bp, Homo Sapiens
gggacagggtctccctgtgtagcccaggttggagtatagtagcataatcacagctcactacactacaacctagacttcctggaccaagtgagccctcccacctgagtagccaggaccacaggtgcatgccaccatgcagtcctagccacttaaaaggctgaaacaagaggatcggttgagtccaggaatttgaggctacaatgagctatgatcataccagtttacttcagcccgggtgacagagtgagaccctgcctctcca

SEQ ID NO: 464039 - DNA, 441 bp, Homo Sapiens
gaaaactgttggtcctgatagatcccttcctgttctttcaaaagtcatatccagtgtagatgagtccccaatgcacaggaaagtgctaggagaaataaaacaaaaaactgctgtcctgtgaaatagtaatatttttcaatagctagggaccacgccttgctgatgagggaagccaggctgaactgagcattgtaaacagactgtgacaatctaccggaagaaaagaagggatgggaggaatcagtaaacaagattcaaggaatgggtaaatctttcattaaatactatggactaaacctcctcagtggagcgactagcaatatttcactgaaacaggtagtgacaatatgcaagcagattgctttttatccaggatggaattcagaaacctttgttttccctgttctctgacatgtggcactttacttaactaggaattta

SEQ ID NO: 464040 - DNA, 518 bp, Homo Sapiens
tggtgctgttgttaatacaattgtttttaaaatgtcatttattaaattgttctttacaagtgcaacacaaattgatttttatgtattgatcttatgtcctgcaacttgctgaattcatttattcattttaatagctttttagtgaattccttaggattttctgtatacaagatcatgtcatctgtgcatagaggtagctttactttttcatttccattctgaatgttttctatttcttttacatctaatgccctggcgaaaaactccagtacaatgttgaatagaagtattgaaagcagaaatccttgtctggttcctgatcttaggggaaagcatactgtctttcaccattaagtatgacattaactgtggatttttgggcagatgccctataacaggttgagggagtttccttccattcttagtctctcgagtgttttttatcatgaaagagtgttggattttgttaagtggatttcctgtgttatttgagaggatcttgtgatttttgtttttta

SEQ ID NO: 464041 - DNA, 484 bp, Homo Sapiens
  misc_feature (305)..(329): n is a, c, g, or t
tgaatggtttttaattgctttatcagaacagcaacaaagagactggaagtgtgcattggttttactgtgtgggaccagctgaattggaaccttggatccaccataactttttgttgtcatagcgtcatgattaaggtatagcggataatcctttcatcctaacgatacaaatttaggtgataagtcagaggcaagactgaaggaatttctgtaatgctttagacaatgtctttgtcgtttgtagtatgaaactcctctgggaagaattagcgtagaaagaggcagcatcctgcagaaatgggttnnnnnnnnnnnnnnnnnnnnnnnnngagaggcagcagcagcaccagtgctgggagtacctagatctgagtctggaaatccaaagcatacttctgacttgttgagatactttgtaactttcgttaagtcattttcttgtgatagagactgtttttgtctaaactttgtaatttggttagat

SEQ ID NO: 464042 - DNA, 462 bp, Homo Sapiens
tctgttaatgaatgtttaattcagatattcagatggaaacttctctatcaataagaagtgactaaatggaatagataagttttcgttcacatttcatttttcaagaaaacctgctttgagattctcttcatacttcatggttagttgctcggcagtccaagctatggagtggtacaatggctttagagttgacagcgggcctcctcaaatgggtccactggattcatgtttttcaaggtattgttcccaagcatctctagcagaatgacctgaagtgcttttccttaattcaggacaaatctgaaaggcaatcacagcttcatagccgagaccatagttgtgactatatcacagtttagtttcttcctctgcttaattttgcttccttccagtaaactttctgttcacaaataactgtcccgaatctgtttaccaggaacttaacgtggaagggttaatcca

SEQ ID NO: 464043 - DNA, 515 bp, Homo Sapiens
ttgttatttgtaagtacttccaaattctgaaacttaaagcaagcataactcagaatgggggaaaaaaagatttaaaacattcttgttaactaatgtggtgccatagtagaaatgataactggcaaattctgggaataacaggaaaacagagggatgactgggggctagggaactaaatgagaaaatgaaaagaagaaatggcttgagaactaactggctaaagtacacacatctcaggcagtttatgagagatgatccttgtagcaaagcataagagaagggatcactgaggaaaacggaagcacaaatgtgaattaggaaggatactactgaaaatactggcaaacttcaagacatccatttatagttagaagacagaaataaattaactactaagaatctgttatcagaacactggatatattttatttgctttaacttattcttaggcttccaaaaggcaaatgtaagagagttaattgtttgtatccactcagaactattaataattaagt

SEQ ID NO: 464044 - DNA, 498 bp, Homo Sapiens
  misc_feature (156)..(202): n is a, c, g, or t
  misc_feature (236)..(452): n is a, c, g, or t
tcaacccagaaagaacccactgttcagccacagcagcctgagtgggcttttctagtgaccccactctgtatggccgctcgagatctaaagggcattagctggtataggccacctgttaactactcgggccagctttaccctggcccaggactggannnnnnnnnnnnnnnnnnnnnnnnnnnnnnnnnnnnnnnnnnnnnnnttcccaacatggaggtctggcgcagtggctcatnnnnnnnnnnnnnnnnnnnnnnnnnnnnnnnnnnnnnnnnnnnnnnnnnnnnnnnnnnnnnnnnnnnnnnnnnnnnnnnnnnnnnnnnnnnnnnnnnnnnnnnnnnnnnnnnnnnnnnnnnnnnnnnnnnnnnnnnnnnnnnnnnnnnnnnnnnnnnnnnnnnnnnnnnnnnnnnnnnnnnnnnnnnnnnnnnnnnnnnnnnnnnnnnnnnnnnnnncatgccaatgcaattcaggctgggttaacggagggggattctatct

SEQ ID NO: 464045 - DNA, 404 bp, Homo Sapiens
  misc_feature (61)..(137): n is a, c, g, or t
catcattattattatttttgaaacaggatctcactatgttacccaacgctggactcaaatnnnnnnnnnnnnnnnnnnnnnnnnnnnnnnnnnnnnnnnnnnnnnnnnnnnnnnnnnnnnnnnnnnnnnnnnnnnnnagaaaatcattagctttgcatggggaaaatatggatatttccctgccaaatcgttgccctttgaagtaacaacttcaaaaatgtaaattcgacaaagcagttgctttgatgatatgttagagctaatataatgtataaggaaatgagccatatataatgaactttttagggtgcttgtgttttattatttcttccaagaaaatattaaagaaggtgaagaaaactaatggaccattacaacattaactttagtctgggaaatatgta

SEQ ID NO: 464046 - DNA, 328 bp, Homo Sapiens
aaagaaactaaaatatcttaacagtatttaatttatcacaagtgtcagatgctaagtagaaaaggttgtacttctaagtacagtatcatcccttggcctgttgtcttggaccctctgtgaaaatctaggtaacacaactctccaggaaataatttcttggacagctagcagcccatctttgcttgtgtgccttatcatcttgatagctttcactgtttttgatttttaacttgtctacagtcttttatcctcactatatagatgataaccaaccacccagtttgccccagacaattcctattctatccttgacagtgctacgtcttta

SEQ ID NO: 464047 - DNA, 325 bp, Homo Sapiens
atcctgatgcattatcatgaggacatggctacttcagttggtcttaactctccgcagtagcctggagatgggtgtgtggtttaagaaagggtaaaacttactgactggtagtatatatttgagaagagaaattgagcccagctctagccaaccaactttgaccttgtttgatcatagacttagccaagggattttacaccccatgcaacctgcccagcattcgtccagctttctggcttccattgaaccgtgatttctcagatctggagacgtgactgcaagtatttgagatccttggatacaatgtgtacgttatataaatccc

SEQ ID NO: 464048 - DNA, 199 bp, Homo Sapiens
  misc_feature (44)..(54): n is a, c, g, or t
gcttaatttttttcccgtaagaaataacattaattgttggcagnnnnnnnnnnnaataaaagccattttgtaaatgttcatgttcccagtggcagtgggaatacaaaatggaggcagaagagaggtatcgtcaatatgatttagtgataattgaatgagaaaggcttgggggacagagagaaatctcagatgatgtaca

SEQ ID NO: 464049 - DNA, 348 bp, Homo Sapiens
aaggtgtgcacttttactgaactggtctcaagtcagtgtacaggtatgccctggatgcctccacacttccacccactcccagggagaccaaaagccttcatacatctcaaggtagggacaaaaatggggaccatgatagctgattattcaaaataaaacaaaaagtattaaggtgaagatttttttaaatgttgcattacataatttacatgaaagcaatcctgtaacctcccctttgtggactcaggagagaactgggccgttctcctgagagaagtggggtggcttttgggagggcaagggacttcctgtaacaatgcatctcacaatatgtggaatgactattta

SEQ ID NO: 464050 - DNA, 468 bp, Homo Sapiens
attttaagttttatatagtaggtgtatttgtctgttttcatactgctataaagaactgcccaagactgggtaatttataaaggaaagaagtttaattggctcacagttcagtacagctcgggaggcctcaggaaatctacaatcatggcggaagacaaaggggaagcaaggcagcttcttcacaaggcagcatgaaggagaagtgccgagcaaaggggaaataatcccttataaaaccatcaaatcttgtgagaactcactatcacaagaagagcacgggggaaactgcccccatgattcaattacctccacctggtctctcccttgacatgtggggattatgggggctatggggattacaattcaagatgagatttaggtggggatacaaagcctaaccatatcagtaggcatgtgttgaattttaaactcagagaaaaatactagtatttttataggatttttact

SEQ ID NO: 464051 - DNA, 214 bp, Homo Sapiens
gggtgagccagtgtgcccggctgtccttagtgtatttaacacatgagacaggatgagattatcttgagggcagttttgtggtgaacgtagatagggaagagatcgaaggactggctttaggatgttcaacattcagagccacacaagaagaggaggaaccagcaaaagagactgagaagaactgatgtagaaggaaaaccagaagagtgtgggt

SEQ ID NO: 464052 - DNA, 181 bp, Homo Sapiens
gtatgagccactgcgcccagctaccttgttttaaaacatccttactttgcaacatgaaaaacagatgatcttacatcaatccccaaaatttcttttaaattttactgacccatgaaatacaagactgggcaaccactgtcctataatcactaagcttttcaatttacccatcagtggttca

SEQ ID NO: 464053 - DNA, 518 bp, Homo Sapiens
tcagtccccaattctgatgtttttatacgcaacactaggggtccttctgaagttatcccggcccctgggaaactcacgtggcatgggcccccttctgccctggtctctttcatcccatctgtcccggccccagagcctgtccagtctggtcctctctgtcctgcttggtttgtcaccatgtgatgttgggatggcttgtctttgccgcctcacttcctaagctgacagacgtgtctgctagggaccatcagctcccaagccgcatgacggtgctttccttcaaggttcagaggcttccctttcagtctggcccatctcccacatcctaatggctctgctgtctcaggggcagctctcctttttaacttattggcagagctgggatgacttataggtccctggctcagtgagtaagcaagttcagagacttggctttggccattttgttctcttaggctcatccttggatgccaacagggaaattacctgccagatttcagtcactactttttagaagt

SEQ ID NO: 464054 - DNA, 130 bp, Homo Sapiens
  misc_feature (130)..(130): n is a, c, g, or t
aattttggccatgagcccaccgcaacctggtggaaccacattgatcttgagcaagttgttttactcctcgatttgtccatattaaagagtaaagtgagttaggccaggtgcggtggctcatgcttgtggn

SEQ ID NO: 464055 - DNA, 197 bp, Homo Sapiens
aacataggcttgcatgagcctaaacatcagccagaggtgagagcttaggatttcttgggtcatttctgagtatgtgtacatctctgggcatgcatgtggacttctagattctccagttattatgcagaaggttttccaaatttttattccctcatgtaccctcttttcccagtttcttctttcctatgcctttcagt

SEQ ID NO: 464056 - DNA, 587 bp, Homo Sapiens
  misc_feature (501)..(501): n is a, c, g, or t
  misc_feature (512)..(512): n is a, c, g, or t
  misc_feature (567)..(567): n is a, c, g, or t
aaatttaagttttaatgtgtttcaaaaattgacagtgtaagatcatgtacaacattaatgttttgaggtatacagacattctggaatgcttacatctagctaacaaatttattacctcacatagttatcattgttgtggtgacaacacttatccactctctctgcagtttttgagactatatcgtcattaactatagccaccttgttgaaggtacaattctggatgaggtccctgtcccctgctttcctctaccaaattcattctgtgacagcttctgccagcatctctgcttaaacctgttcccacatccagtgtcgtaaacaaagaatctagtatctgctctcctgggcatatctctcaccttcaggaaatgctggtacattctgaaatagctgcccccctacccccacttctccatggctctgctcttcacttcttggcatcatttcttcctgctctcagtcacttttagtaacccttaacacattcttttcagaacngggtgaattanatatgcttagattttttttaaatttgagggacgggttttgaaaaggtccaaatgntaccaataaaggtcagttaa

SEQ ID NO: 464057 - DNA, 401 bp, Homo Sapiens
acagcagaagagcagctgcaaaggagctagtctgggccccaggagtagagacagaaagaagtgcacgtctgctcctctctctacaaggccagcaccaagccctgacccatggcatgctgatgccacgtatgacaccctcatccatggacaagcccagagctccaaaagaaagtccaagggactgatgccctccaccctgagatttcatctttccaatcttttcttatcagatacgtgatttctccactcttgtagaaaagacagggacaaggtgaagggaaggatagaagcttccttttgaataattccaggaggtagagggtgtggtgatgaaaaatttatattctttggactaataaaaatattagattagaaaacaagggccaggagtagtggctcat

SEQ ID NO: 464058 - DNA, 411 bp, Homo Sapiens
tacatttttggagttatcttcttagtaacttagcaactgctctagggattataatgtgtcttaatttatcacaatctatatcacaataatacttaatatcagtcaaatagaaactataatttatgtccttttcctaactcctttgtgctattatcatatatatatttcatgtaccatgctataaatccaaaccaaacaatggttgaaaactccctttatatttaccacatatttactattcccagcattcttcaattcttcctatggatacaaactaatatacagtgttacttcctttcagcctgaagatttgctttaatatttcttataagacagtctgacagggagaaattctctcaagttttatctgggaatgccattttttcaccttcactttggaagactagtttt

SEQ ID NO: 464059 - DNA, 454 bp, Homo Sapiens
gtggaaattttcctggatataggtatgaggtttatttccttttacaatgttagtgatgggagccatatctttagattcaccaaaaattttattagaaaaccactctgttcgttttttgatcataaatgtgaagctcaagaggatcagagcttcctgattatctgtcctgtgattaatacaggtactccagtcccacagtttattctggggaaggtaaataaacatgtgaatgcaatcatctatcagaagtttctctgtgcccatagccagagctaagaacttttctgctagatacacatattgtacaaagggatagaagggaaatatcggtcattttgtaaaccatgaacagaaagtaattatattagtttgggggaaaattgcattttccatataaagtgatctgttgcctacaagaaacatacctcacctataaagacacacatgtactgaa

SEQ ID NO: 464060 - DNA, 300 bp, Homo Sapiens
atttctgtgaagtatgtcattggtattttgataggggttgcattgaatctgtagattattttggctagtgtggacattttaacaatatttattctttcaatccatgaagatgaaatatctttccatgtttttggtgccctcttcaatttcttcaatttctcttcaatattttataatttttattatagacatctttcgcttctttggttaattcctagatatttaattttatttgtggctattgtaaatgggattttttagatttctttttcagattgtttactgtatcatgtagaaatg

SEQ ID NO: 464061 - DNA, 464 bp, Homo Sapiens
  misc_feature (110)..(202): n is a, c, g, or t
tttttgttttggggaattccaggaattattatatttgatcttaaagggagaggcctgggtcgggggaaatgagcataagttggaagaggaaagtgcaaaccgaagtaagnnnnnnnnnnnnnnnnnnnnnnnnnnnnnnnnnnnnnnnnnnnnnnnnnnnnnnnnnnnnnnnnnnnnnnnnnnnnnnnnnnnnnnnnnnnnnatatccagagaatgttttagaagggagccatgggcttcacagagtcacgtctccttggccctgtagactcctttcccacagggagaggcatggctagaagagggtcaggatggagtcctctaaaggagcagccacagccatttcaaggtcacttgaagatccccaaaatacggctgtacggattcaacgaggtgaagtgcatgcaagggcttggcacacggtgagtgtcccatgagcgttagttgtgctgcttgaggcccag

SEQ ID NO: 464062 - DNA, 363 bp, Homo Sapiens
gcagaacatacaatcaagtttgctggaaacattgtatcgaaaccgatccaacctagagaccatttttaggatcatagacagtgatcattcaggtaaaggcactcattattctatcacttttgaagcactgcaagtattttaccttaaacccttaatctccttcctgattcatcctcattcatctccactcaggcatttggagagcaaggtaagaagattagtgcttataaatgacagaaactaggaaagtacttgagtagtatcagcagcccatagagaaagaagtggggcagagaagaatgaagacaaactgaatgagagcttcttataggaaggaataattattagaagatgtgatatcct

SEQ ID NO: 464063 - DNA, 293 bp, Homo Sapiens
taacattgaggaaaaactttgaatgtgggttccattcaattgtacaacaactcaatgtatacagcatcaacacttttaaaacattgagataaaatatttttgattttatcaaatttgatgtaatgctagaagaagaattcatactttgaagggactgtgataaatttaaggatttatttagttctgtttgcacttgctacatgctgtttccaatatgaatattttcacaagatttacatgtctaatacatgagttggctcctgaccttgaagcaattggtagtaatagataca

SEQ ID NO: 464064 - DNA, 405 bp, Homo Sapiens
taaaattcatcaatcttccctccattttctatttgtcaccagtcactctagcaacagaaacaaaatgttgtttcctccaaggcccctctagctcttggtgtttattcctcaatatccgtggccataatcctcaggctgatgacatcagttgtatctgaggggccagccgtgacgtagcaaggtgggaacgtggaaactgctaaaggaacttgtgcacatggccttcgataggtggcggaagagaaggggaagcttcccgaggttcctgaggaaggaagccagactggtggggtaaaagcaggccctgaggaacacccggcagtatgactcatttggagaatacagaactaagtaggtggtagaaactgctcagagccgtcctaagcctcaggctcacaatgtgtg

SEQ ID NO: 464065 - DNA, 369 bp, Homo Sapiens
gctgtcaaaagaaaagactttaaatgagtgtagatgttggagttagcagacaaagacttcaaagtagctattacaaatatgatcaaaagctaaaggaaaccatatttaaaagattaaaaggaaaatttatgacaatgactcaacatataaggaatatcactgaagaaatagatactaaagaaccaaattgaaattctagtcaaattctctacccctgagccatacacccagtcatccaaactgaaattctagaggagaaaagtccaataagcaaaatgcaaaattcacaagattaattcaacagaagatttgagaacacagacgaatcaaagaacttaagatatatcaatggaaattatccaatttaaa

SEQ ID NO: 464066 - DNA, 225 bp, Homo Sapiens
aagacaaggtcttactctgttgcccagactggtaccttcatagctcgctgtggccttgacctcctgggctcaagtagtcctcccatctcatcctctcaggtagctgggactgcttagccggaccatgcctggctaatttttaaatatttgtagagacaagccatcactatatggcccaggctggtctcaaattcttggcctcagccttccaaagtgctgcgatta

SEQ ID NO: 464067 - DNA, 303 bp, Homo Sapiens
ccttggtgcactcacaacactttttaggggtggcagcagccacataggtggctgacagggattctagtcctcttttctcaccataacactcccaggcttctttcctttgtcctctctagtttacaatctaaataggtgcttccaaccttgattttttaaaatcaaagccttaaacaacaacaaaaatcaccacacccagttttatgattgcctccataaaatagaccaggcacctttccatgatgccaggccaatgggcagggtgtgctagggtaatatgccactattatgccctcccttaaa

SEQ ID NO: 464068 - DNA, 363 bp, Homo Sapiens
ctggagacgatatcactgtttatttgggtgacacatctgcctgcctgagggctctgacaagaggcttagtggttgaaggtcccccagattatacttttccccttgctggctctgcagaggccccagactccgagtgcaggcctgtggagctgtggctctgttacatttctcttggcctcagtgtcctgggagcagctgcctcgtggctgaaacctccttttcagagatcccagggcggtggcagcctcacttcttgaagttctctctctggagcgacaaggagtacctctgaagccgggcccagtgctcctcctccttctctgggttcttctccagcttccgatagctcttctggaggaaacg

SEQ ID NO: 464069 - DNA, 485 bp, Homo Sapiens
  misc_feature (170)..(262): n is a, c, g, or t
  misc_feature (411)..(440): n is a, c, g, or t
taaccactcaaaatgcacattttctatgacattataaggccccaaccaaacaaatcagtcaggagtaaaagggaacatctcccatattgaagggacatctcccttcaataataccaaattggagccataaatgatacattttagcacaaacttttacccactgtatattnnnnnnnnnnnnnnnnnnnnnnnnnnnnnnnnnnnnnnnnnnnnnnnnnnnnnnnnnnnnnnnnnnnnnnnnnnnnnnnnnnnnnnnnnnnnnctacaaacttgtattatctgatacctactttgagcccaggccagaaaggataaagtaaagcatgagacgttgttagttcatttcaacagattggggagttgtgggttttagtctctgacgcttcattgttaccatgagagcctgcaagnnnnnnnnnnnnnnnnnnnnnnnnnnnnnnaaccctctttggggcatctggggaaggacgtggtgctcttttagc

SEQ ID NO: 464070 - DNA, 421 bp, Homo Sapiens
  misc_feature (328)..(328): n is a, c, g, or t
  misc_feature (371)..(371): n is a, c, g, or t
  misc_feature (386)..(386): n is a, c, g, or t
ttttataactttcagctgtaaaactggggtcaattatttttagctgtttcttcagcctgtctcattagaaaagtacttcgaggtaatgacttgggcatatttatttgatgattcttcattttgaaagatgtcattttaagacttttctggaagtttcaaatttgcctttgggagatctgttttataccaaaatgtcatttcaaattcaggcctacatactgtcttacacttggtccatataaatgtttcacagcacctgcattttttatcatcgctctttcatgcgaacttagatttcgtgtggctcacctctgctctctgtctgaanggggaaaaagtaatatttttaaattggcctttttcccctttgncagaggagataaaanttcccaattatttccccctcatgcatagatattta

SEQ ID NO: 464071 - DNA, 461 bp, Homo Sapiens
tcccccatcactatcatctacctactcaccttaatcatgtatatgaaataattttattagaattgaatagaagagattcttgatcagaggaatctaaagcttttgaagacagctttttcttttaagaaactaagactagcgtgaaccatgacaatgcagcacacctagttatcaaacagggttgaatatactcattaaaacttactagaatgtgaacattaaaataactgctatatttcccgttttctctttcttaggatccatgcaacttaggtgtacataataggtttgagtcgattgggttgccaaaattaaaatattttttgtggaggttagttgttgttattgttactgtttcttctactgaataaagctttctttactaagaataaagccttagagagtttctgaagcttataatttaatgaccataaatactaagctcaatcaaaacaaatgct

SEQ ID NO: 464072 - DNA, 436 bp, Homo Sapiens
attattcagctctctttataactggcttatttttattattttttgtagagaaggggtcttgttatgttatccagcctggtcttaaaatgtgactctgttgttttatacaaaacacaatcattttccatttgaaaacaagttgtattttccagcataaaattccagatttatagactatattatagtccttaggacccataatgtgtttccaaaaaatacttgccaatgtctgtactttcagtgatctgtaacctcttggagtagtggagagtttaagcaacttgtccaagtttacctagctaggatgtggtggagctgaaaacctacctttgcctgtccacttcataagccaatgcttctagcccccacattacagtgactattcttccaagatctgggaacggaagatgaatgaatggaagatgaatggtttctc

SEQ ID NO: 464073 - DNA, 472 bp, Homo Sapiens
  misc_feature (355)..(355): n is a, c, g, or t
  misc_feature (370)..(370): n is a, c, g, or t
tttttctaagaagacatcatacttgaaatgagaaaatattttgaactgaatggcagtgaaaacactacacatcaaaacttagggaaatgtggttagtgtggtacgttgagggaaacttataacctcacacgcttgtttcacaaaacaacagcagacaacagagatttccaactccagcaatgacaggctagggtacctagatgaaccatcacactgaaaacacatgctgcagtaaatactgaatttctccttaagagctgtgggaatctgacaagccaggaaggtagaaacaagggagaagtgagggacccaggggcccagtgaaggtcgtgagctgccaagcacccagttgctngctggccccagggcnttggccagtccaggctttacggggctcaggtcctagggggctgaccagcagggtggggcagacaccaggctccagcccagcctcaggtgagagtgaagggag

SEQ ID NO: 464074 - DNA, 520 bp, Homo Sapiens
tgcactccagcctaggcgacagagcgagactcttgtctcaaaccgaaacaaaaaaacgggctcccagggcacaggccaggccactgaattcaagtcttcagctcagaggccagggaagctgtgcctttagtcttgcatccccatgtgggaaccactgtcatagctgaaggagcaccttatcagttggatttctatcagcttgagagttgggtaaggtaaattattggagaacggtagggggtccttaggaatctcaaaaatctcatcaagtagaatcctccagccactgggcagggaacactatggaagtaaagtcaggaaatgagagttcagaggtacaggtttcccacccagaggtttgatcttgcctaagattctgcaaatgactaaatcatgaccttttctttgaatgagaattgtggagtcagaccatctgaatttgtacctggttcccccagcttctaaactttgtgagcttggacaaattacctaacttctctatgccctggctttcccattt

SEQ ID NO: 464075 - DNA, 343 bp, Homo Sapiens
aagggaccatagaagatgttggccatttgggaggaaataatgaattgcacgctttcctttgatctcgaggtatggaagcatctgagaaacaagacatgagtgaatcagatggtaatgagaacaacaggagaaggaagaggaattggagaccagttgagccatctagtcacatgcagggctgggcaacagcagggcagctcttcctaggagggcagtttcttgccgtagcacgtggagtctcagcccgatggacccaggactccccttgaataatgactaccttataacactccttttactcacctgaaatgaaattcatagattcctacacatgcatgactga

SEQ ID NO: 464076 - DNA, 583 bp, Homo Sapiens
tagtctgggaggtttctactgaggtatcttcaagtttacagattctttttcggctgtgtgcagtctgctaataagccatcagacgcattcttcattctgattacactgcttttgagctctagcatttatttttggttctttcttgggatttccatccctctgcttacattgcccatctgttcttgcatgctgtctactttatccattacagccctaagcatgttaataatagttgttttaaatttccagcctaataattccaccatccctgacatattttaggctggttctcaggctttctctgtctcttcaaactacatttttgcctttcaatatgtcttgtaattttttctttatagctggacatgaggcactggttaaaaggaactgctgttgattagcctttagtaatgtggtggtatggtgttggggtggggaagtgttctataatttcacaattaggtatctgttctttaggtagcctgtgcctctggactgtgaacttcacagatgtgtctcagttcccaccctgcacaggtggactgaatggctagagtgggttggagttgggcatttattttcc

SEQ ID NO: 464077 - DNA, 383 bp, Homo Sapiens
tcatctttttaatgcgaggttcactgtcctgctgatatttttgtcattcttgaaattgtatttatgatttttgtccatcatgcaatgtagaaagttcagtagaagagtagaaagttgaatatctttcttcagacaaattgggattgatgtctggtttaaaactttttgaatgactgtttctgactgttatttctccattttctgtgtgaatgagagtataaccactgagctcattttgctcaccaactcttactgtccttttgttttttcacacattactcattaagagccatttataagattgttatatgggtgccttttcctgtagggttttagtaagatctggggccccaaatggctaaataggattaggtcatgtgaga

SEQ ID NO: 464078 - DNA, 473 bp, Homo Sapiens
caaccacagcagaagcagggagtgggaaaggagctggggtggaaaggaagagcgagattgatttgagataaacctctttctcaccaggtttgccaagagtccaggtttgtatctcaccagaggtacttggccatatgtccctttctgtcacagtcccctggctactggctgagcctggagactgtgtccttccccagaggtctgagtctaggtcactgaatgtctggggggcggggtggctcttcgcaattcaggatgctgccaggaggacagtggtgacagaggctggttcaggaagatgtttcagttcttcacccctgggtaagacacttgggtataaagagtgggtaggtaagttatatagtgaaaggtaaaatcaggaatcaggcttggcaagttagttggagaagatgatttccctgaccaagatcttcctgaacttctcaatagaccccctacctaacttcacagtg

SEQ ID NO: 464079 - DNA, 418 bp, Homo Sapiens
cacttaatattttcagatcatggttgactgggtaactggcaccatggaaagccaaaccacacataaggggagactgctatactccgcatcctgagctctctccactttggctttactaaattcccagtttcatctcctctgttcagggaggtcaccatcatgtgcctgggtttcttctccctatgtcataacctaaaaactttcttcatacagtatgttgtaggagtttgtttgtttcccatcccccagggatcactgtccttcatgagtgatgcccagtgtcttgaaaactgttctttcatatattttgaacagtttttcagttgtttctgacaggaggttaaatctgatccctgatactccatcttgcctggaagcacaaatccattttcctgatatttttagcatcatctttttc

SEQ ID NO: 464080 - DNA, 426 bp, Homo Sapiens
tttttgacatttcaataaaaatttattgtaatttcagtgatgttttaaagtgagggggaaaaatacagaaaaccaaagaacccatcaacaactataacacaaaatataccttcatgaatttgtctttaaaccatctctcagcacctgacttttgaactgtgaatatatctctataggcaggcaccaattcaaaacaccgatactgacaacagtagtaaattccacttcgttttgaggaaatcagagactagcaaatacaaataacaaaagaaaaattaaaaagtcaaaccgcagcctctgccctcccccctccccacagcaatctcagttatattttaaggaatttgaagtggagctggaaagtggcactccttccccaattttggtgaaaataggaaatagcactttcccccacttttggacatt

SEQ ID NO: 464081 - DNA, 560 bp, Homo Sapiens
  misc_feature (476)..(476): n is a, c, g, or t
tgaaattgttaatgattttattcttgaaccaggggttctcttcataggtacttgctatatgtttttaaatatttactggatgaatgtaacggatgaatgagtaaataaatcagagagggcctcacatggaccaaagtgagtgacgctgggaacccagggttgtggtccattctgctcgtcctgcagaactccaggaggcagcattctatgggcttatgagctccagcagtgtttggaggacagggttggccagagactacaggagccacagactaagggcacagccaaggaaggaccccaagaccccgtcctgtgttggtgtgagctgggaaagccgcccaagggaaagggctgtgcagccacccagtgctgctgaaatcagaaatctgccctcaaaacccctggaaccaggaagcccagctctgccctcctcctggggccctcgggtccacgtcagctggaagggagacacctgngatcacagaggggcagctggggtggggctggagcaagaagcagtgatggcagtgaccattcctcagacaggaactgctcgtgcc

SEQ ID NO: 464082 - DNA, 370 bp, Homo Sapiens
  misc_feature (49)..(49): n is a, c, g, or t
  misc_feature (57)..(57): n is a, c, g, or t
  misc_feature (88)..(88): n is a, c, g, or t
  misc_feature (99)..(99): n is a, c, g, or t
  misc_feature (322)..(322): n is a, c, g, or t
  misc_feature (343)..(343): n is a, c, g, or t
  misc_feature (356)..(356): n is a, c, g, or t
tctgtagggcttgctgagggggacccataagccaccaagggtgttctcngcagattnagcttaaggcggctgctgaggcctcaggctntattcagctcngaggtgttctggctgggcggcaggtgggaatccaggttttctttgcacctttccaggtcctggaagtatgggtgagacagggcactgtaggcagatattcttttggctgggttaaatgtcaaacacttcagaagtaggtctttgcctagttcatcgatatctgttacaaacttctcaattggttgggcaggttttgaaatggaaaagcctgcctgggaagggncaacatctctagggccagtcntcttctcctgggngttccaatcacgtc

SEQ ID NO: 464083 - DNA, 454 bp, Homo Sapiens
  misc_feature (368)..(368): n is a, c, g, or t
  misc_feature (380)..(380): n is a, c, g, or t
  misc_feature (426)..(426): n is a, c, g, or t
taaatcacagacattgtttgtcctaaattttggggtacatggtacaatatggacaccatattaaaacttgaactaattaaagtgattttttcccctttgtcaggtaggcattattaatactttttactctctaatatctttgtgtgtatgttttatttcctccactccttatagattctttaaggtctgggcctatatctaattcatctttgtgtctcccatttccagccatttgtgaaacctgcaatagttactcatgatttgtgtggcaggcactggtcacgggggaaacagaagaataagaggctgtccctgccctagtggggcttgtcatgtaatgaggaagccaaccacacgtataatacttnagcccactggcngtgataagcacctcgtgccgaattcctggggcccgagggcaaattncccaaaggggagtcggattaaatcggaa

SEQ ID NO: 464084 - DNA, 374 bp, Homo Sapiens
gcatctaatttatgtttcagttgctttattggctccctgtaaagcaaaatattgacaataaaattgctatttttgtcttaccagctaccacatggtctttgttcctctgtctttaatggttgcatgctcttctcttccaaatgcctccctgttcccttgacagaaagccacggcaatggtggttccagaataatgtctgtaatctttaccagcaaactgtctatcctgctgaccctgtggaaaactaggaacatattgaatatatcacagaacaaattaagggtgtgaggtttaatgcagccaaggaagtgatcataatgccacatgtctgggaactttgagtgattcttagagcttcagcttatagagttact

SEQ ID NO: 464085 - DNA, 456 bp, Homo Sapiens
  misc_feature (23)..(23): n is a, c, g, or t
  misc_feature (35)..(35): n is a, c, g, or t
  misc_feature (57)..(57): n is a, c, g, or t
  misc_feature (75)..(85): n is a, c, g, or t
  misc_feature (91)..(91): n is a, c, g, or t
  misc_feature (159)..(159): n is a, c, g, or t
accaattccaattcacggcgaangttaaccaaggntttaaaccgcccaacttccacnaaaggtctccaagttctnnnnnnnnnnntccacngtgcacagtttaacaatttaattgaaaaaacccaaagctaagcccttccagtctgaatctttttttantgatgggcacaagccatgtattttcttcatctttgttacacgatgcatatttcagtgactaaaagccccttcccattttagtatattaggttatgtcagtacatacttaagagaggcataaattgcctattggtgtaccaatatgatttgtgatgtgttcacatatatgtcataatatttattaatatatagaatgatcagatgagtcacctgtgatttttcttaatgtcttcaaatgtaggaatgttttgttgcatgtataaaatttttcagaatttataggagtgcttatataag

SEQ ID NO: 464086 - DNA, 454 bp, Homo Sapiens
atgggacaattccagtcagcataaatcagctaagcatttagaaactattatcaggagcactagacagcactgcatgatcttctgcaaacccacaagtgttgtcaaagctgcagggctgccgaactgccagggctgaagcaccaataatagatgctaaaattactgctgaagaagcatatttgattacaaagggcccctagagcagtaaagcacttggaagccttccctccgagttttacaagaaataagataagcagcatctccaactgtaatcacaaaatataataaaaaatgctccaggttctcatgagacatacaagtgtattttccttggaatgattttaaaaccattattttcctaacacacaacgagggacaaaggttaccagttaaactggagggcaacctctagttgggtaacacagacaacttccatgaggagtttttggttttg

SEQ ID NO: 464087 - DNA, 486 bp, Homo Sapiens
  misc_feature (188)..(255): n is a, c, g, or t
aatttattttatcttctttattttgtattttggaataatgatagctgcatctgaaaataatgatatatgcacattaatgagtatttaagaaaaagagcaaagtatgaagaaggaaggtaaaaataccaccccaagttctaccacttagaaggaacctttgttaaaatttaggtggttattggaaagcnnnnnnnnnnnnnnnnnnnnnnnnnnnnnnnnnnnnnnnnnnnnnnnnnnnnnnnnnnnnnnnnnnnncacacctccagctgtaacctaaccagagctcagcaggcccctttgctgctcctgggaaccccaggccgggccacctgcaggagtgcccttggtgtgtgtcccagaggttctgtctgccctggggctctgactatggggcccttcccaaaggtggttccgcaggcctgggctccgcttcacccgcagctggttgtgctggagcatctccttggccctgggagagcccttctg

SEQ ID NO: 464088 - DNA, 391 bp, Homo Sapiens
aattcctgatcccatctaaatcatgttaatacctgtcataaacagataactaccagattaataagcagccttatatacaggcttagctacaaatcattccatataatattttacacaaactgttttttcctagttttgtgttgaagtgaatgaagctctagaaagccaaaggacagaaggagccaggacctctgagtcatttggaggagtgctaccctagaaagccacccctatcatgttaaaccacaaatttgggacttgtttgctatagtagatagtgctaattctatgtaatatactctcgtttttacttctcatagcatttattgttctctaccatacataattattcgcgtaaatatattttttcattttagtctattagttgctt

SEQ ID NO: 464089 - DNA, 448 bp, Homo Sapiens
  misc_feature (50)..(50): n is a, c, g, or t
  misc_feature (60)..(60): n is a, c, g, or t
  misc_feature (69)..(69): n is a, c, g, or t
  misc_feature (74)..(74): n is a, c, g, or t
  misc_feature (120)..(120): n is a, c, g, or t
  misc_feature (140)..(140): n is a, c, g, or t
  misc_feature (430)..(430): n is a, c, g, or t
ttcctgaaacaaatggcctatatttgacatcattaggtataaaatttgangtcatcgggnatgaaattnggtcncttttgtaagatgtatcactccattcttggcttcccttcatttctnggcccaccaacgtatctaanaccggctactatttggccccacaaataaagcaccttactaatcattcccaggcagattctcttccataatttatacagattattataaccactaaggacaaacatgaagatacatacaccatgggagaacaactgtttttatctgagatgtgtttatttgataaatgttcctttaaagaagacattaattaataccaactgtagcagtcagatttgactaggttataataacaaagattttattctctttcatgttatacatccactgagcactgactggaggctctgcnccaagtcttcaaggatct

SEQ ID NO: 464090 - DNA, 468 bp, Homo Sapiens
aatgaggaaacatgagagattgaattatttgggcaaagtcatccaataggtgttagattcaggatttgaactagagccatctggctcctcagcccacacttaatcaccacgctttctttatgccttttcacaattcaactattttaagtgtgcttttaaattctgccccctcacccccagcatcagctttaatattttgtagcaagttgtgtcatggtcatcatttggccttcttcccgagtttacaacatctaacttccattctaaagtgaatgcttctggggaatgttttcaagcaatggcactgacagatatcctgtacttcagaatgctggtgggtcacaaaaaactgacaaaagatagctagtgtttctttttaaagctgtatgttctatggcaataggaagttatgtgttttctaatagagaggggtttggattatttcaaattttgcacataaagcaagaa

SEQ ID NO: 464091 - DNA, 331 bp, Homo Sapiens
  misc_feature (13)..(13): n is a, c, g, or t
  misc_feature (288)..(288): n is a, c, g, or t
  misc_feature (290)..(290): n is a, c, g, or t
  misc_feature (315)..(315): n is a, c, g, or t
ccttggcccttcnaaagtgcctgggattaccaggtgtgagcccaccaagcccagccgaagatgacttcttaaaatagacacgaagtatgaaaatacttgtagcccaagtaaattcttattagagggaatccactgaagaggagtaatcgtatgcatacaatgacatgttatataatagatgttagtcagctgatacttgttcaatgggctcatgaacagatgcacataatattaaggatagaaggtattcacgactttacataatcaaatagtatctggaccaatggngnacaactaaggctaatatgacggccntccctcaggggctacc

SEQ ID NO: 464092 - DNA, 386 bp, Homo Sapiens
  misc_feature (222)..(222): n is a, c, g, or t
  misc_feature (228)..(228): n is a, c, g, or t
cctcccttccatgtctctgttcttgcttccttccctcggtctgccgtcgccctttgtcagtgatcagacgtgaccatgggtaacaggcatgaattttagtctctgcatgctcaggtgtgtaagaaacatggcttcctttagttcctataactaaactttattttcagtttgcactgatcttcctccagctgccctcccagcccagcagggctactgcctggncagggnatgggatcagaactcaaagcccctttcatggcaaccgtgtgtggcacagttacacacagatctggtcttaaaatctaactagtagggaagcagtgagaacttgggtgctttggtagagagggctttgtggtttcagataacaggggctaggcttccag

SEQ ID NO: 464093 - DNA, 777 bp, Homo Sapiens
  misc_feature (729)..(729): n is a, c, g, or t
tcatatcttctgtgtctgagtccccacccacactctttttcctacactgaattaaattaatcaattctttgactctatccttatcataatccaaagaatgagatgatctttgctttccagatataatggcttcacctcttgagttatttcgttttccaaatttcatttttgtaccattcatttcttcttcttgaccttcataatctgaaagtggactaaactgctgaagttttctattttcttcaaatagttcttttaatttacaaataggtaactgatacacttcaggccgaaaaatataggcatgcaaacaagtatcaatatgggatttatttctgggagctgagtataagaattttttatcatctaatcgtgaatcatatggaaacataataaactctcgtttacctgaaccaaaacctcgcttaaaaaattcacttacatacttttcaacaacagaatgaaaatttatggcgcttatatttttgaattcctttcgacactgaatcaaagaaaattgtaaaaactgagctatttttaatacatctggcatgctctcatgcctctcctgtggtgctgcattggttgaacctttttgtgaagtaactatggcttctaggttcttgaaatagaaacaaagcatgtaggactcgaggacttgggcagtctggatattcatatgggagggaaccatctggataaggggggaggaggaaggaaaaagggtantcctcgggttctcccaaagggttttaaacaaggaacaagttttttccc

SEQ ID NO: 464094 - DNA, 340 bp, Homo Sapiens
agcactttaaccagattcacaaagtaattagtatgaccctaggaataatgctgtaagataaagcccagaactaataaaacatacccctttggggcaccgaaggccagtccaattcgaggaagtacccatgccagcataggacacacctgttccaactcataattaaaatgaataagcaaaaagcaaaggatttcaacctcttctaggagcctcctgaactcagtagccttttagggttcctgctgcagccctcaggccttggggcttctgtctgagcctctgcctctagccagctgcttaaccaccctcgaattctttctcccaagctctggaccaagta

SEQ ID NO: 464095 - DNA, 444 bp, Homo Sapiens
  misc_feature (210)..(210): n is a, c, g, or t
  misc_feature (247)..(247): n is a, c, g, or t
gcacgagggtgggaaggaaataattttgtatctcagtgacagcggcagtcaggaaaatttctaaaatgtcttaattgccaagacatggcattgttgaaaaactcaggcaaaaagacaagtttcattgtctatatggaaacttgcaactcacaaatacctgggcatagcaatacttgtgaagaaagtaagtaacattatggaaactagacnggaaaaaataattcaaattgacttagcaagattttangtaaaataaccagtgttaaagtgctgccaatttgaggccattgctttaaaaaggccaaacattcccctaatgtttgctggatcaaagggatgtgatcacaaaataaaatgcattcaaaagcatacatggaaatgtaatggcaaaatagagatagctacaaataagattatttttggaaaaaacttcacactctatca

SEQ ID NO: 464096 - DNA, 825 bp, Homo Sapiens
  misc_feature (326)..(326): n is a, c, g, or t
tgttggttttactcaaggccacactggtagcatggctggtaacatctgtgtgaaggaactggattatttaagtgtgaaattcatcccaaaaatccatcccaaaagacagtcctggccaatccttaatagtcacccacctcaagtcagaatttcatttcctgttggtaaataatgtcatcgcatttaagaacagccttgatgcctaaaggaatgcatttcccattgattatctcctcaacactttcagcaagttccttccagcagcagagaacttcagcaacactgctggcttccttctttcaacttgcataatctgattgctcaangcactgatgaaaaatatgaagaagaagtaagtaggcttcgctcaaaggactattttaaaagtcaacaagaatgatcttgggggctattgttcggaattgacatgattttagtgctgcagataaactgaagatgctgtcagctgtgctctttaaggagactcattgggtttttcaatgcagaagaattgaagaacactgaatgccaaaaattctataaaaatccattaatcactcagttcagatcgtgtcaatgctgcaataagaagacaattgcttccgtgtctgtagcaaagggatcagctatcgttttcacagtgtcgtggtcttcgggccggggagccccacttcccacagcgctgtgcttcacttcagccttgaataaacgtcgtctgcacctttacgcatgcatccatcaaaatctgtatttgtgttatttctgccaaaagcaatacaacttttctcattgactcctaactcatcaatagagaatctctgagaa

SEQ ID NO: 464097 - DNA, 662 bp, Homo Sapiens
  misc_feature (71)..(197): n is a, c, g, or t
ctccgtcctcccgttcctcttctatcctcccgcctctatcttttctagtagccgggacctatatgtgttcnnnnnnnnnnnnnnnnnnnnnnnnnnnnnnnnnnnnnnnnnnnnnnnnnnnnnnnnnnnnnnnnnnnnnnnnnnnnnnnnnnnnnnnnnnnnnnnnnnnnnnnnnnnnnnnnnnnnnnnnnnnnnnngtgtaagccactgcacctggccagtgccttacacttttgagtagatagactacttaagcattagttttactaagtaatgcacgtacaaatcagtatggtacagatggtacatgatgggtgaaggaacaaaggaacaaaatttagagaaaaattgttaatgaagtagaaacatatgttggaacatttaagtacaactttattagtgggtggtagacaaagactgtcagggaggaagggcttcgagagagaaaatatcatgaattgcttttgcttttataacacgaggaaggaaattctgttttcttactgaaacttggggtacagaattatcatctaataaattaagattagtgaaataaaatgttttatctttcactatatttattcttctccatgacaccttgagtaacattgtgccaattgcttaggtaagcactgtgaatctagttccccttccctttcaag

SEQ ID NO: 464098 - DNA, 434 bp, Homo Sapiens
cttgaaagtgatgtttattactaatgaaaatagtacagttgtatacataggaaaacatccttatttattcataaagactttaaaatgtttatttctaattatccaataataagactagaacatttcaataaaatagtacagttaacatgaatttatttgattcaaaccctggataaaatgtcattataaacaaggtgaaaaagaaaagtccttcattatccatactcgatattaaacatatattactgtatgtacactattgcttaagtatcatcacatatgtcctgatatatgaaaaattctacctgtattctctggataccacaattattttttctatatataatcttaatctttaaagaagtaattaaacatggagaataaaaacaccaggatgaggaatcatttaacctaggctgtagctataactgtgt

SEQ ID NO: 464099 - DNA, 232 bp, Homo Sapiens
aagtatggtttgtaagctttttcatgggaattttacaaaagaaaagacaacataacttatcttgaaagtgtttcttttgggagaagtatagtgttattctatgaaattcagatattcagagaaaaacaaacaaaaatacttgcctctcctttctcttacatcctttgaacatgatttatttacttaagaaaaaagaggaaatctagaagtcataatatattctcagagtctc

SEQ ID NO: 464100 - DNA, 311 bp, Homo Sapiens
gtagagacagggtttttcgcgtgtttcccaggctggttttgaactccttggctaaagcaatctgcctgcctgagcctcccaaattgctggaattatagtcatgagccaccatgcccagctgggagatattactaatactattaattaagattaatacctgaggattttcaaagattagtaggatgaaatttagggagaaaaccctgctcccctctcttcagcttcagacttactatgagtgatattattgtatgtgaggtgcaaatttttaaatgaatttcctggaaaagaaagaagcagtttccttattc

SEQ ID NO: 464101 - DNA, 599 bp, Homo Sapiens
  misc_feature (153)..(190): n is a, c, g, or t
  misc_feature (319)..(319): n is a, c, g, or t
ccttctacttcttatattgtgtctgtttccattgagttcctttatttcctgtttatcatggtctctgtttttcatgttggagggtttcttcaaatgtctggtgatgcttagctatccagaggagcattagagagttgattggaagtcatatgnnnnnnnnnnnnnnnnnnnnnnnnnnnnnnnnnnnnnngtgggcactcactgaccagtgggccagtgagagcgaaaagtgttctcccagtcctccagtggtaagtgaactgggggcaggggaggggcccaagatgtttcaccaagggaactcaaatgtcagcacctngagtccgtctttcttaaggctggccagattctcctgaggttctccaatttgcagcgtgagtacgtgagcccagcccagcattctggatctgagcagaggatcacctggtaaatacttatccagaggcatgagcattagacttgggaacacaggggactgggggcttatcttccatgggctcagagtgcaatcagtaactcctttctggaatttgggataagaatgtctgtcttatctacctcatagagttgttgagagggtagaaccagataaagcatat

SEQ ID NO: 464102 - DNA, 615 bp, Homo Sapiens
  misc_feature (76)..(92): n is a, c, g, or t
ctgcttgatcaagtctgctgttgaagttctctgttgaatctttcagttctgtaattgtgttttgcagctccagaannnnnnnnnnnnnnnnngaatggtttctatctctttgttaaacttatcattttgtttatttttcccctgatttcatttaattgcctatctgtgttctattttagctcactggacttcttgaagacaattattttaaattctttttcaggaagtttgtagatcttcatttctttagtgttggtttactggtgctttattctgttcctttggaggtgtcacatttcccagattatttgtaatcttgtggtcttgaactgctgtctgcagattttaaaaagtaaggacctcttctagttgttagagacaggttttggcagggagatccctttacagtcagactgggcagagattcttggcagtctgacatgcaaggtccatgacaggtttgctactgaagtcctcaggtgagctggcttgatgcctaagttagcagatgaacaggtctgatgcctaggttcacaaaggtcaacttgatgcataggtccatgggaaagacttgaagcctgggtccattgggcttggcctgaagctgcagccatg

SEQ ID NO: 464103 - DNA, 600 bp, Homo Sapiens
  misc_feature (250)..(259): n is a, c, g, or t
ggtgatttgacagtgtctgagcaatgagatggaaagggcctgggtctccaacattatggatgtcccatatcagcctgggacttctatgctctgctgtgacataagggagaaatgaactgctctcttgtttagaccactgttgctttgacatttgatatgataggaaaacctatattgtaatacatataactgtttatgaaaattaagtcaaatgcattggagagagtaagagtaagttgctaatactacnnnnnnnnnnaagtgtggacaaaaactaaaaaggtttggggggatgagcagaaaaatttagaatgatcctttacttgggtttgacttctgtcattaaatccttgctccttttttaaataaataaaactagaaatcatgcctaatacatcaatttatttgaagccctaaatcaattggcaatttggataaccccctcagtccccgcacctaagtgaagatttattggattgaatcgaataccacaggggtggactgctaggtttgttagtccccagtcagctacttgggaggctgagatgggagaattgtttgaacctgctgcattccagcctgggcaacagagtgggactc

SEQ ID NO: 464104 - DNA, 144 bp, Homo Sapiens
tggggcacagaagacaagctttggaggacatctcataaatcttctaattcaattgcacttaaacaagaatcctctctacatcatatctagataaataattactcagtttttgaagacaggctctctgtggactgcttgaagtaa

SEQ ID NO: 464105 - DNA, 663 bp, Homo Sapiens
  misc_feature (524)..(524): n is a, c, g, or t
agaagagtagatctaaggtactttcttttgtgcacactaatgggaggtgtgaagggaaagcagaattgcaatttccagcctagggaggccaagccagtcggccttgccaaacacgttgtcttggataaaggaggattttcagtcctgctattggctgatggggcctccagtgccttcttcagcctgttggtggggatgatgccctcagagccgcagagtgagcagtctcctcccaagcatcgctgagcacttgggtgtggaagggttgcctgatactgaagggtgggggttcctggaagacaggcgatcaggttcagctcttgccttgccctttatggttaaatgttctttggaaagcttctatatctttcaaatcctgggggcattatgatctctcttctggctatcccaaaccatcttcagccagtactgttgggagaatacaagctccagggcatggtccctggtccgtctggatgacccctacggatctggcattatatggcgctctatggaaccagagntttatgtaaaagcagggacaatggaatgtgaaaacgtttcgcaaactccaaagcgattcataaccagacagaggtccaatcctagggtatacgagctctctcttttaagcacgtatcacagctgctgaccgcactgatg

SEQ ID NO: 464106 - DNA, 256 bp, Homo Sapiens
  misc_feature (171)..(171): n is a, c, g, or t
cagccagaaaacattctaatattatttataattctcaaaatactgtgccaaaaagttaaattaaaagagggagatcattctctgagaacttctactgtggataaaaagtaacaaagccagaaagcattctaaaatacggattatttttaaatccttaaaccttgcttgctntaggaacaaaactaaaattgcagaataaatgcttggggtggggggaacctagaaaaatattcctcaggccaggcatggtgctcat

SEQ ID NO: 464107 - DNA, 227 bp, Homo Sapiens
  misc_feature (11)..(11): n is a, c, g, or t
  misc_feature (88)..(88): n is a, c, g, or t
  misc_feature (150)..(177): n is a, c, g, or t
cctcgtgcacnacaagcagagtgatgtcacctcactttcaggtctgctttcaaagcacatattaaagtttctgattctaccacagccnacacattttctcagtcttcatcttccatccctgccttaagcatttcagtctatccagccaannnnnnnnnnnnnnnnnnnnnnnnnnnngctcatacacacatgctcatatatacactcatactctcattcatcttata

SEQ ID NO: 464108 - DNA, 832 bp, Homo Sapiens
gaagtgggtacttacttcacaatataaataaataatgtcaaccttagtattgtgattacatattactgctttccctgctataatactgtattttattgtacgtgagttacggccagttgactctaaactgtgtcccagtgtagcaaataccatataccaagcaagtacaattttgtttctttcaaaaaaagggaactaagacttagctactaagagcctataccaaaactttgtcccacaaagcagcttcaggaaagagaggacttttattcctttgcagatatatagttctataggttttattttatgaaagcataaatacagggagttttttcttattagcatcttaactcctgagacctcttaaaaaagagcattgatttcttagctgtactgggtaggtaatacgctgagagtcttttagcagcgagaagggcaggtgggtaggatgagatctttagttaaaggatccaggaaaactggctggttttccttctaaatttgttgagtcaatactaggtaagctttaaatatggatcatcaatgttcttctacatgagtcagaaagaaagactgtgtttcatcacgcctgtgatcttcccaggctcttccaaagctggtaaaccagttaacttgaagggacagaagctgatagaaaaaccatgccaggagaattaaactaaattataaataaaacaactcctataatttcctaattctaaaaacagagtctcatttagcttagtgtaaggaactttgtcataaccaggcctcttaaaaccaaaataatcatccattttgtagagttacaaaattataaagtaaacagtta

SEQ ID NO: 464109 - DNA, 216 bp, Homo Sapiens
tcttcttggtccaaactggcctctgccaggaagaaaggagctacttccttatcataattgtggtggcccttcttctggcaattaaaggatatggagaggggtgtgtatatttctactcagcaactaagcatgagcaaccactcaagagcaaatgggggataaatccatcatctgtactttgtattacacaccagttttcccaacctccctgccaac

SEQ ID NO: 464110 - DNA, 559 bp, Homo Sapiens
  misc_feature (218)..(355): n is a, c, g, or t
  misc_feature (369)..(428): n is a, c, g, or t
atagttttcttgccaaatatatttaaacttaacctaattatgacagagcaatcaaacaaatccagaatgttaggcattctacaagacaaatattctggaccccttcaactcttaaaaaatgtcatgaaatacaaaaacaggctgggggaatgctgttctagattaaagaaattaaaagataggcccaccttactgtaatgtgtgaccttaattggttnnnnnnnnnnnnnnnnnnnnnnnnnnnnnnnnnnnnnnnnnnnnnnnnnnnnnnnnnnnnnnnnnnnnnnnnnnnnnnnnnnnnnnnnnnnnnnnnnnnnnnnnnnnnnnnnnnnnnnnnnnnnnnnnnnnnnnnnnngagactctgcctgnnnnnnnnnnnnnnnnnnnnnnnnnnnnnnnnnnnnnnnnnnnnnnnnnnnnnnnnnnnntacctgtgtcaaaaagtaaggaagtgctcaaagacaaatggggacacgggcaccagcgtcaggggttcttacaggccaatttggaacaatttgagcaacacagaggatgataacaggctaaagtactttgg

SEQ ID NO: 464111 - DNA, 540 bp, Homo Sapiens
ggtcttccctctttaaccaacatttccctctctgctgattcttcctttctgccttcaaatgcaagtccctgctacctccaaccaggcaacttctcaaatgaatgaactgaagcaatttctcccctttgtcacacactccctctgccacagaagacttgctttcttactcatagtgcccctttcctgaccggttcaggggctggttcagagttcatcctttctaacattcttgtcactctgcccctattaatgaggtctttgttgcaacgtctgtcctcgtgtagcttctgtggcggccttcttggctccatagccctcctgtgccttctctgcctgaggtacttgtttcatactcctgaactgtgagtgtcttctaaggcttgtttcctgactttttcctcactcgtacatcatcctccttgacagtacagctatgtttatgaccttagctaccacctctccacaaatgagtcctcgacctaaatctcttattctagatccttcaccagtggaaagggatagaaactaggagcaattagt

SEQ ID NO: 464112 - DNA, 553 bp, Homo Sapiens
  misc_feature (524)..(524): n is a, c, g, or t
tggacaacgtgtttaagcttttattgtgaatggtaacagctcggggccttgaatctaaccaacaggtagcctagatataaaaaagcattaattggaagactcttttcgacaattgttcacagcaaacaagtttaaaccagaagatgctgcttgaaaatcacgaatttagtcaaggatgaaagatacagaatagtcaaatattttgcacaaggaaatcttgttgatgatccgtagaactgatgcttgcagaacgcagtctcttaggggttttgtttttctcttttgagagaggccatcattatcattgctggttcagctgggggttccttccttcacgttgagaacctggagcagagagtctaccaactttgccttttgaacctacgtctttgaagttgctgctatcctcttgaatcccacgaaggctgctgatttgcccaggggctttggggttgagggtgggctggtggttttctgttctccttttgctttctatgaggaccaagcaaataccttggaggctncttcccaactagatgtaatctctcagctg

SEQ ID NO: 464113 - DNA, 324 bp, Homo Sapiens
ctatacaaaacccagctgtgatcaaggtcctgaatcccaggcattgaggcagaaggagatgccgtgccaggtggatctggaagatgcagctgcacgtaggactggagagtagctgggggaccgccaaggaagaggctgggatggagcccaaggagtgggttgggggcagtgaggccggagaagagggtccacttggacttctcaatggggatcagattggatgggactgaggctggggtaacgggagaagccaggggccagtctcaagagactaggagatggtggtgcccaaaacttggggaggggagaggatggctgcagctt

SEQ ID NO: 464114 - DNA, 432 bp, Homo Sapiens
  misc_feature (260)..(260): n is a, c, g, or t
  misc_feature (273)..(273): n is a, c, g, or t
  misc_feature (334)..(334): n is a, c, g, or t
  misc_feature (345)..(345): n is a, c, g, or t
  misc_feature (363)..(363): n is a, c, g, or t
  misc_feature (412)..(412): n is a, c, g, or t
  misc_feature (422)..(422): n is a, c, g, or t
tgccagacttttagaaattaagtagagcacattttaaataaagtggtattgctttcatctttaccccatttttgctgaatgcttgtataagagtttaatacttgggcacttaggaccactcttcatgttctataactaaaaggaccagtgtatttgtaaactaactggggcatggcagtcaacccagatttgcagcaaatcttcacccatattgcaaaccagatggagaacttaactattttatggtatctagcagctgncttctttttgtgntcacatgcatagagctaaacccacaggctgctgtgtacccctatgaagtaagaggcttagnaatcatatttntccaggttttcccctggntcacttctaaaatactcttgaaacatttaaccaatttgaggggaaaccnaataagcgancaccaggaag

SEQ ID NO: 464115 - DNA, 383 bp, Homo Sapiens
  misc_feature (297)..(297): n is a, c, g, or t
  misc_feature (350)..(350): n is a, c, g, or t
tactgaattataatctgtgttttaataagatcccccaagtaattcacatacacattaaaatgtgatagtgactggcttgggaaagcagtgggagagaggaagacactgagccttgtccctcgaatgcagtgtagccctcttggatattggtcttgtctcaaccagcagaatcacttctcctagtgaggagtgaggaaccggttgaagcagggggcttgaattgtgcatgccatggactgttacctccttgaaattggagtagaccttttcccattgaagctgtaggaatggaaattntccctcctaacgcacagatttccaaacaggattcaagagaccagggttgtagntccagccattttgccgattttccctgattagga

SEQ ID NO: 464116 - DNA, 302 bp, Homo Sapiens
tgcatatagatatcttgttttcctagcaccattattgagagactgtcttttttccagtgtatgttcttggcacccttgttaaaagtgagtttactgggtgtggatttgtttctttgttctctattgtcttacattggtctgtgtgtctgtttttatgaaagtacactgtattttggttactacagctgtgtagtataatttgaagtcaaataatgtaattcttccagttttgttcttgttgcttaggatagctttggttattctgggcctttccgtggttgcatataaattttagagttttt

SEQ ID NO: 464117 - DNA, 174 bp, Homo Sapiens
tgaacttttgagccagcttgtttagttttaaaaaaattgtactttaatgggtttttagtcactttaaacacagctatggtataatcttgtgcacgttgttctatttttccatcaccgatggggagttcatcttgtttttgtgtctgctggctgctctctcatagtagacttttt

SEQ ID NO: 464118 - DNA, 278 bp, Homo Sapiens
ctctagtttggataattgaaactgctacagatggcccaagacttacaatggttcaacttatcattttttattttatgatagtgcaaaagtgatatgcatttagtagaaaccatacaaccattctgtttttcactttcatgcaagattcaataaattacatgagatatccaacactttattataaaatagcctctatgttagatgatttttcccaactgcaggcttatgtaagtgttctgagcatgtttaaggtacggcaggctaagctatgatgttcg

SEQ ID NO: 464119 - DNA, 114 bp, Homo Sapiens
aggagctttatttgtaataacccaaaactgaaaacaatctagatgttcttcagtaagtgagttgccaaaaacagttaaacaaattttagtacttgcgtatcatgtaatactctc

SEQ ID NO: 464120 - DNA, 153 bp, Homo Sapiens
gaaaaaagtaagttattggtaataaaccctcaataaactagatatacattatcttagatggacatagacaaacagagtgttagtgaattagaagatggttctaaggaagtggcttagagaacagcatacaaattgactaggcacagtgtttca

SEQ ID NO: 464121 - DNA, 597 bp, Homo Sapiens
agttgacagtaaaacttcagcacaccagaggagtaaagaaatctaagattagattcattggaaggggtttaaacagtttcactttacctgcatcaccaacccccaaaagtggcacagctcagttaacaagagcccattatttcttccacaggggaaaaggagagtataataagtaagtgtccagtttctcaagacatacaggcccctgcccaagagatccactttattttcatctcacccagaatattgaggtgatcagcaaggtggagtggttgggagagggtaaaagcaggaaagagagatggggactcaaacagcagcccatacttggaactgccatagatcctaccagttacttcatggactccatcaggaacccacctataagccacaggggatgcatccctcccatcttgccaacaaaaccccgaatgctccaaatgcctcacccactctttggctggctcccaagtgcgctcctgtgaaaagcgagtgagtatctctgcagatggcttgcaagcacatgttgacagctggctccactctgtagaactggaaaaaagctcacatacatgagaatttcaggacactacccta

SEQ ID NO: 464122 - DNA, 582 bp, Homo Sapiens
  misc_feature (201)..(201): n is a, c, g, or t
atcatgcccagcccaataaagtattattttaaaatattttaggagatatccatccaaacatcctatcatatgtaattatttgcaattcatgtttattatagaacctgtgaccaaaagtatctgtaatggaataagatggtaagctttacttatggcaagctaaaatgaggagcataacaactgaaggaaaaacccttatcnatacattatcctagaaatgctacatgttgaatgacacactctagcaaccattcaacatttgcttgcccaaacaaagcagcaatactgtttgtctaggaactaaatttcatctttctgggctcattccaactatgacagagaatgccttcatatgcaaaacacttgtaggtaaggtaaaattaagtcttccattatgagatccagtgtctacagcatttgtgggagggctgaacacatgctcttctggggtagctgctatcatctgcatttgcttgacccagaaaatgcctagacttccaattccacttccctaacacccctgtttcttattgggccagggaacctgatctaagagtgttccactaaactacggccttaact

SEQ ID NO: 464123 - DNA, 924 bp, Homo Sapiens
  misc_feature (424)..(424): n is a, c, g, or t
  misc_feature (567)..(567): n is a, c, g, or t
  misc_feature (646)..(646): n is a, c, g, or t
  misc_feature (746)..(849): n is a, c, g, or t
aaagttttgcagagtatcgcagtgcctggttcatggttatccgaggaaaacaagtctcagccctggcacaggagcacacatgaaaccattgcagtgagtcgcctgctgcccactttggaatctgtccctcagttggacaccgtgtccccacccctgactcaccttcatgacccaacccgcgagccctgagggtggtactccacatcccccacgctgggctgcgggtgcctgtttctttctaagaaatagaatgcctcactgccgtggctgtccctcctagttgccagcggttctttctcttgagtaattttacctgttgaggggctgtttgtaccacaaaaagagtgacagacctggttatatgagccttaatttttacactgagtgttaatttctgtgcctatatgttaacctctaattcatnaaactattttgagagttaaaagcacccattaagtccctgacagtaagttctcaataaatgttactttaacaacagcaacaacaaaagtagctgctagaagagtaaactcgaagagcaaatttccaaaagaggaaaataaaatnagaaaataaaacctgaaaaggacaaataggaaaaagacgaaacaagtaatgacataataagccataaaaatgaataaanatatattactaatcagtaaattcattaaattttctagataaaaagcaacagttgtcaaatatttttaagaatgtgtctcagccaggcgcagtggctcatnnnnnnnnnnnnnnnnnnnnnnnnnnnnnnnnnnnnnnnnnnnnnnnnnnnnnnnnnnnnnnnnnnnnnnnnnnnnnnnnnnnnnnnnnnnnnnnnnnnnnnnntacaaaaattagctgggcgtggtggcgcgcacctctaatcccagttactcgggaggctggggcggagagtcgctt

SEQ ID NO: 464124 - DNA, 412 bp, Homo Sapiens
agatattgaataaaaattttcagttcaagaacttgcaaaatgaactaatttatgaccttggttcagaaataaactgctcctgcagagaaaaagcaccccgacagcacaggccagaagcaatggactcagaattggagtcattgactcagacggccacctcagctgtgaaggtgcctttgtcatgttttccaggaactccaactccttaccatgagcaaattatttatgcatgtaatctcactgaatgctcacaactctggagggtggtttattactattactgtttagaggcaaggaagccgaagactggagaggtgaagcaatttgccccaggtcatttgaccactgggtggtagagctgggaatccgaggccaggtctctcaggcctcagagtctctgccccctcgtgcc

SEQ ID NO: 464125 - DNA, 552 bp, Homo Sapiens
  misc_feature (139)..(139): n is a, c, g, or t
  misc_feature (280)..(280): n is a, c, g, or t
  misc_feature (316)..(316): n is a, c, g, or t
  misc_feature (359)..(359): n is a, c, g, or t
  misc_feature (381)..(381): n is a, c, g, or t
cgcaagtgctggcgagccagatgcggaggctggcggccgaggagctgggggtcgtcaccatgcagcggatattcaactcctttgtttacactgagaaaatcctcaaatggagaaagtgaagtacagcagctagccgaanaaaaatccgagagaagttcaaccgttacttggatgtggtcaatcggaacaagcaagttgtagaagcatccttatacggctcacctaacctctccccgtaactcaattcaagactgctgtactatcccaccttccatggatnggaattcgatgggaactttaataccaatcgtgtctnagaacaattagttgtggatcggactttctactactgttaatangccaggccttcaatccaggacngagacttaaattcagttcttgcagacaacctgaaatccaaccctggaattaagtggcaatatttcagttcagaagaaggaattttcactgttttcccagcacacaagttccggtgtaagggcagctacgaacaccgcagtagacccatctacgtctctacagtccggccgc

SEQ ID NO: 464126 - DNA, 176 bp, Homo Sapiens
gtattttcatcaggatgattaaaatcagttatatggagaaatccaaaaatgtggaacaaagtcacccatgaggaaatcattcttgaaaggtagagcacagtgtagtactttgctaataggctttttgaggtgtcatctgccatttgacatctttgtctagaccagcacgagcactc

SEQ ID NO: 464127 - DNA, 437 bp, Homo Sapiens
aacgttttttctccagggctcagcacaggtcctctgcacgtaattggcaccaaaataaatttattaagtgatttgttgaaagtcatttttttgtgtgtccctagttgatgactttacatcacttatatagttactagccaccttaatgatcaagaaatctcacttacatatccacatgctcgacaatgatgcctccttcgtgtcagtgcattgaaaggttctttaccattttcatacacattgtcacttcattatctcggatccatcttggggctcttttccctagctcagcaggtctaaaagggggaggaaagattcaattttaatagaaaaaaactataattcccttttattattattttttgaaagaactttaactacattgctcaaaccatgttctgaactataatccccagcactttcggaagctgaggcgg

SEQ ID NO: 464128 - DNA, 241 bp, Homo Sapiens
agtttaaccagcttaattaatgatttttccggtttgaagcacttattttcccaatgtgaatagagggaaaagatcagcaatttgtccctggcctttttcgaggccatttttagttttctgcccccatttcccagtcctggttataaaatgaattacgggtatccctctaagtccctataaccctttttggggggtcacagatatctttgataatctgatgacagtgtgatggatcctctac

SEQ ID NO: 464129 - DNA, 230 bp, Homo Sapiens
  misc_feature (41)..(41): n is a, c, g, or t
catgattttaagccataccagaaaaaagagagccaacagantttctcaacaatccttaggcaaagaagccctccagtccactactggaaacatatttttgccatattttcctgccctttacttgaaaaattttaactggaaaagacacagtcactttgagtgttgaggtaatgctagaattcagccatgtgccacgatcacaaagtcatacaatattgccaaccttctac

SEQ ID NO: 464130 - DNA, 371 bp, Homo Sapiens
ttttttaaatcttaaggatgctattgaagggttttttgataaagtagccaacagcaccaaaaaataacagaatggatttcctaatgaaatcaggcacaggtctccctcatgtgacccctccaaggcaggcagtcttttccgtcttcctcgctcgcttttcttctttcctggaacagatgcatagtgatgtgctggtggagagcccactcgctcccgtctcctcgttccacctatggttaggaaacaacgtccgccttcagctgccacaaccgcccagagaaacaaaacgggggtgccccggcttcccagatcacaagctcatctggcacacggcagaagacgacagccaaagcaaagccatttcaagtttc

SEQ ID NO: 464131 - DNA, 255 bp, Homo Sapiens
agaatacaaatgtcttagtctgttttctgctgctgtaatagaataccacagactaggtaatctataaagaaaagagatttatttggctaataattctgaaggctgtgaagtccaagatcaagggccacatctggtgagggatttttttactgtgtcataacagggcagaaggcaccacatgcaaaggattgtcccttggtgaaaggcaaaagagtaagctcaagagacagagaaggaagctggactcccccagta

SEQ ID NO: 464132 - DNA, 450 bp, Homo Sapiens
cactttccaaagcacttttatatatcatgttgaattgtgtggtagcatgcatattcgattggttttgtttgataaacacagtaatttcacaagcctttacctattacattatcctctttgatccatgaagaatagagtcacaatttaataaataattagactgagaagaatggagggaaaagtagaagggggaaatgctgcctgagaacctattatgtgctcagattttccattagcatttgatggacatgatttattttgattttcacaatggttattatcataacgacagaagcatcattattccctagtttacatatgcagaacacaggacagagaacagttggaagactcaccagtagttactgtattagtcagggttactctaatgggaccgaatctaacaggatagatgtatatataaaggggagttgattaaggagtattgac

SEQ ID NO: 464133 - DNA, 216 bp, Homo Sapiens
atgagccaccgtgcccggccggatttacggtttttatcaactgtctccaaaattatctcattatgcagaaagtagtttttttcattcatacagtttcagtagtcgcctccctaactgcaaaagcaatctcatttagttggcatagctcctaaaagcagctgagttagaagtatgtgtgttacacccccacataggtgtgatttgtggggcagttca

SEQ ID NO: 464134 - DNA, 486 bp, Homo Sapiens
acaccaaatacatgatgccttttctgataccatgtggtgctccagtagttcagttcaattctgacactatctgtagttagcaaagaccccacagattaaggacccagttccacaagattgcctccatttctgatgctagtggcaagtcccagtacttctgaccatttatagccagtatttataactggctatgaatttaggggtttccaccaccccctcctaagttgcgataattgctagaatgcatcacagaactcagtttctgtgagttacatttaccagtttgttgtaaaggatatggctctggaatagccacatggaagtattatgaagggtaaggtgtgtgggaagaggcacagagctcccataccctctccaggcctggcaccctcccagcacctccctgtgttcttcaaccaagaatctccctgaaccctgtcgtttaggggtttttatggaggtttcattatgtagagatgattgatt

SEQ ID NO: 464135 - DNA, 189 bp, Homo Sapiens
gtctccaatttactttcaaatgattaagaaaaaataatttgcaagtacatagagaaaaagtgtgaaaaatgtaaacaattggtgagtctgaatataggttacatgggtattcctagttccttgggctattcttgaaccttttctgtaactttgaaagtatatcaaaataggccaggcatggtggctcat

SEQ ID NO: 464136 - DNA, 342 bp, Homo Sapiens
  misc_feature (254)..(300): n is a, c, g, or t
gtggttagcctaaaggtttatcaattttattgatcttttcaaagaaccggtcttgcttttattgatttttgcctactgtttctactttcaatttcactgatttctgctctaatttttgttatctattttcttctgctaacttagatttacattgctcttctttcgctattttccccaatgtggaagtttaacttataaactgattgttatttattctttctctattttactaatgtgcaaacttagatgattgnnnnnnnnnnnnnnnnnnnnnnnnnnnnnnnnnnnnnnnnnnnnnnngaggcagagtctcgctctgtcgcctaagctggagtgcagtgg

SEQ ID NO: 464137 - DNA, 395 bp, Homo Sapiens
  misc_feature (225)..(225): n is a, c, g, or t
tagaagccatattctaggtcctgcttcaggaggatttctttatctcagattatgtgtgaatgatggagttgttttaacaagacccttctagagctgcttgaggtgatcagggggcctgagttgacaacgtcgccccccttgattgctttggaatctctaggagcagccttgggtggtattctagggcaagtacaggcaacaacccttcttctagaaacctggttngtcccctgggcaattccaggacccctctccaccccaccaaagttaccacaccagaagtcaggaatagctccctttgcccgtgtcttgtctgcctgtgttaaagcctttgctgtgttgtatgtggctggtttccattcatcaggggcttcttgatcaattgtgatgtgtat

SEQ ID NO: 464138 - DNA, 422 bp, Homo Sapiens
aataaccgacttgacgttgggccttattatctcggattctttcatcttccttgggttgttccttaattctggcatctttgctgcccattacctctctcttcaaaggttggcaaagggacatagcaacaattctggtaaacagagcaaatggaaatggaaatgagccagaggtgtgctcagtagaatgtcatgtcatgtattgatcaaatggcacagagaacccaggctctggagtcaagactgggaagctattgtcataaactattctacattggcccgtaacttgagccttaacaaatcatacaacctcagagacttcatctataaattgaaagtgttaatatcatataccttttaagattttttggccagatgcagtgctcatgcctgtaattccagcacttcgggaggatcacttgagc

SEQ ID NO: 464139 - DNA, 398 bp, Homo Sapiens
  misc_feature (228)..(261): n is a, c, g, or t
gagacagggtctcgctctgtcacccaggctggagtgcagtggtggagatcacaggcccactgcagcctcaacctcctgggccccggtggtccccccaccttccacctcctgagtagctgggaccacaggcatgtgacaccagctaatttatttgtattttttttaagagatgaggtctcaccgtgttgcccaggatggtctcaaactccttgggctcaagtgatcttnnnnnnnnnnnnnnnnnnnnnnnnnnnnnnnnnngcatgagccactgtgcctagcctaggaaatttcaaattatatatgtgtgtcacgttctgtttctcttggacagtgctgatctagaagaagaactgttactaagagtgagttaatggtacttgggaatagctttatga

SEQ ID NO: 464140 - DNA, 499 bp, Homo Sapiens
tgacattttaaaactacttttattttgagtaagttttttggctccttgtcttttgaaagccttggttttgttctcggtgcctgctgctttatttcttcagacctggccaaaggaaattcccctgcgccacaaggtatctgcaaaatctgctgtcttacgtgcttgcaaagggcagagggagatccacggcccacttgccatgtggcctcacatcgagggacgccgtgtgatatggcttggagacatgcacttgacggcagtgacaacagctctcagccatgtctggcagccacttactttccccaagcacatcatatcatcacctgggaacagcagctcgcctccttgggaacacaggtttgaggtctcatggcttcccagggataggggaaaaatgcagcagaaggatttggggccaaaacccatttcttctccccagaaggaccacctggaggtctctcatggtcttcggctcatctttgcagcagcactaaccagt

SEQ ID NO: 464141 - DNA, 423 bp, Homo Sapiens
aaacaaaaaactaaataaatttattccataaagattttaaacttctacaattcattaaaaagacataaattcaaaagtcaaaatggtaaaaatattcacaacatatgacaatcaaatggttaatttccttttatagagagtttataggaataaatgagaaagaagtaaacccaaataaaagtagacaaaggtcatgagcagttcatttaaaaagaaatacaaatatctataaacatacgaaaagataatcaccttaatatcattaataattaatattttctcccacatcagcaaaaatctgcatgtttgttaaagctgagtgttttaagggtgtgatgaaatggacaccattacacaggactgcctttcaggaaggttctctgccactggaaaagggtacctgcccgggcggccgctcaaagg

SEQ ID NO: 464142 - DNA, 222 bp, Homo Sapiens
gtgtgagccaccacgcccggccaagtcatctggattttagctaagcatatgacagtctcttgtgacaaataggggatcatgacaggaatgtctgaaacaaggaccagcaaactacaggccaaatccagcctgcagcctgtttttgtaaatacagttttgctggaacatagcccatgctcattcatttatggctgctttcatgctacaagagcagagaagagt

SEQ ID NO: 464143 - DNA, 435 bp, Homo Sapiens
cacatagtaagcactgtaaaaagttatctattactgttactattagagttcatcattaattatttaaccttttatttccttaacttcatctgagaaatgaaactctgacttaaattctctataagatcctttcttgtgctcaaattctttggtttcagttacatcgctccttgatgatttacatagtttcattcatgtctgcatgttcatgcatgtatgcattcatgtttctagaatgtaactggggcacttcttctgacaaagcatgcagtgtggcatccttttttggttttttgtgtttgaaaggcccatccaaattggagtggagtaggaaaaaagtgggagttctagaccaaaaatagccctgatctttggtctgtgacattttataggaatcccagtgatttttatgaaattcgaagtctgtaagactga

SEQ ID NO: 464144 - DNA, 472 bp, Homo Sapiens
tgcaatcaatttccaaaaaatttatttatactctgtattaaccagtgtttctcttttccatcctcactccctaaggagtctttttacaatcctaatcaaccacccccaaaattttaataccacagatatggtatctgtttaagtactgtgtgtatattcatgctttatacatcaagtttttgtcccccagaacaatcttgacaaggactgcgtggcgctaacaatgaaaagtttatagtattaaaacttttttatttgaataagtggggagaagagaaatatatttcagcacttagatatataaattatttccaaaacagtttaatactcaactagtcggttctatcaaaatcagttttccctgaagtaagcactgttcccagctacaagcgatcctcatttcacatggtactgtgggaccataaaaatggtcctgcaatcttaataatcaatagggaaaatgatgattgtt

SEQ ID NO: 464145 - DNA, 607 bp, Homo Sapiens
ttttttggtctggtcctacagcagtggttctcaaaatatttatttttcaacatttaggtccctttgataggcatggcaaaaagcccccaaaagtacctctctgctgctttcttcataccaatagagaaacagtctgcccatgttatcatttctgtactgctgtaacccacagcgtgagatagactttacattcatgctttgtgagactgccttcctgacccgcttgtaggctgcttttgagaaccactaccccagacaacagggcatgtgtgtttaactggaaaatgtggaacacagtgctgagtacagatggcacttcctaagaaatgatggaaacgtctcccttgcactccccactgatgcaggtttgcctcccttctcctccagttgcaggctcctttagctgcaccatgaagtttacagtccgggactgtgaccctaacactggagttccagatgaggatgggtatgatgatgagtatgtggtgagtcttcccagcatagagactttctttgacaccttcacaacactaagtgacttctgccttgagagaacatttttctaggagcatctgacataaacttaagggatttctattcttctgaa

SEQ ID NO: 464146 - DNA, 390 bp, Homo Sapiens
  misc_feature (170)..(290): n is a, c, g, or t
tgggctcaaaaatcctcctgcttcagcctctggagtagctgggacaacaggcgtgggctaccacacctggctaacaaatgagtttatgtcggctattctgttttctgacatggatcagacacaaggccatcttggttaagagggcagggcttgggatgagacatcccatnnnnnnnnnnnnnnnnnnnnnnnnnnnnnnnnnnnnnnnnnnnnnnnnnnnnnnnnnnnnnnnnnnnnnnnnnnnnnnnnnnnnnnnnnnnnnnnnnnnnnnnnnnnnnnnnnnnnnnnnnctttggaaagtccttagacctgtgtcaggcacacgatttctacaattacaatgtcattgtcagcagcaccctccctggtctagtctggccaccaccaact

SEQ ID NO: 464147 - DNA, 212 bp, Homo Sapiens
caacagtttttggggtacaggtggttttttgttacaaggataagttcttcagtgttgatttctgagattttagtgaacctgtcacccaagcagtgtacactctactcaatatgtagccttttatcccttacccgcctcccagcctttccccgcaagtccccaaagtccattatatcacccatgcttatgcatcctcagagcttagctcccac

SEQ ID NO: 464148 - DNA, 124 bp, Homo Sapiens
taaatttgcattccaaaacaaaagtgaagctaaacttgtgttttcttcatctgggaaatacttacggctctattgttaactttcttggctgtgttagctagtacctcggccgcgaccacgctaa

SEQ ID NO: 464149 - DNA, 430 bp, Homo Sapiens
  misc_feature (29)..(29): n is a, c, g, or t
  misc_feature (56)..(56): n is a, c, g, or t
tagaacctcccctctctagaaccttatcnagggtaacacttgaggtattaattgantcattcagtctctcattttcttatttatttatgcattcaggtatttcttcagcatatctactggaccattcttctgtgctagagaaataccaagctgaggatagagtagtgaacaaggcagatgtattgtctatgccaataagagaggttgaatcaatgtttttaatggtgcaggctaatgtggctgggtgtaatgaatctgaaagtcaaaaatcaaggacagattagcttaaataaatgtctcgaggcacttgcctttcctaatattaaatcatttccccattgtctccttctaccacctcatcaggagctaagatctaagcatgtgatggtaaggttctccagaaagcctagtacctcggccgcgaccacgc

SEQ ID NO: 464150 - DNA, 439 bp, Homo Sapiens
tcttacaaagctgcctatgacatcttatcttgcacatgcactgcagcaagaaggctgatgctcagtatgtggaacgtctggagtgatcatctcaaagcctttgtcacataacttgctgagttttctgatattctgatagtagttataagatgcctgagtaactcatgaaatcttatggatttttatctcactttatagatttaatgacctccaccatctctaagaacaagcagctatttctgtagagaaagatcatctttggataacaatacatgattttaggctctaaaagttaaaacgtgtttgtaacgttgatattatgcagaggtcttgacagaacttggcagtctctgaggctacagagaagtgtgaaaaagagcatagagatttcagaaggaggcagattcagtcaggcgtacctcggccacgaccacgctaa

SEQ ID NO: 464151 - DNA, 378 bp, Homo Sapiens
caatgtaaagtatagactttgggtgctaacgatgcatcaatatgggttcatacagttttatgacataatttaaagaaacataaaaaagtatttggttataatagtgataataacagtaaaagataaaaccagttataatatagaatgttaactgtaagtaaaattgtattaaatataggataatatgaatatatagaacaatatttagaggaaaagagaacatcatttataccgaatttttaagggaaatcagtagaggaaatttcaggacatgagacttctgttgtgcatgctgctttgtcagcttcctttaagaccctgaattacttatctacactgggcaagggatgtcgagtacctcggccgcgaccacgctaa

SEQ ID NO: 464152 - DNA, 382 bp, Homo Sapiens
agagggtaataggagtgagatccttgtgtccttggctagctgtaagctacagactgttcccaaatcctagagtccacccacattccctaggtggtgactgcttatccctcttcaaagctcatgatgccaagttgaacccttttcctgcatccaatctccatggtctgccctcccccggaccccactgcttcatctctcctactctttcatccacatcactctgattcttttccatcctctcctgcttgtttcaggcccatgtaattaccttgtgcccacctggataacctaagaccatcaccttattttaaggtgagctgattggtaacttattttcacctaaagtcttttttacagcagtacctgcccgggcggccgctcg

SEQ ID NO: 464153 - DNA, 390 bp, Homo Sapiens
  misc_feature (105)..(163): n is a, c, g, or t
catgacttgactacagaatcatgttcccttatgaacaaggctggcaattcatattttgttttaaaatatttagttatgaatataaatgctatattacagtgtttnnnnnnnnnnnnnnnnnnnnnnnnnnnnnnnnnnnnnnnnnnnnnnnnnnnnnnnnnnnaaatctttattttaataagcttcactttatgattaaaggtctcccacactgaccacaaaatgagtatttctaagcctgaatggtaagaaagagttcaagataatggccagctctttgggaagctgaatgttttgtttatagggtgttttgtaacatttcccaagcattaccagcatgttcccaactcagggatctccctcctgtacctgagcggccgcccgctcaaa

SEQ ID NO: 464154 - DNA, 151 bp, Homo Sapiens
aactgaagccatctgtgaataagctgtagcctacattactcatccatttttggatagttaccactgggagacctttgaaaagggtccattaaatctagtgtcaataagaacataaaagaaaacacatgtacctcggccgcgaccacgctaa

SEQ ID NO: 464155 - DNA, 136 bp, Homo Sapiens
taaccaaaatatttttctatttaattgttatttaatgggttatgttgctagatttcctgacattaaatagttcatttctagaatagaattatacttgtgactgggcatgcccgcgtacctgcccgggcggccgctc

SEQ ID NO: 464156 - DNA, 246 bp, Homo Sapiens
agactaagattggaggacagtaaaaagaaaggtagcatggtgagcaggggacgtgggattcaaataggtttgaagtgagcctaaaatgactgatctatgcactgaagaaggaatgccaacagaaaggccagtttccaatgttgtctcaggaaaatatgattgaagtttaaaaggtggtgaattaaaagggaggggttatggccactgcttatttcttgttcacaaggatcagcgtcctgggagtgt

SEQ ID NO: 464157 - DNA, 496 bp, Homo Sapiens
gagcggccgcccgggcaggtaccctaattgtaaaagaagtgtggtcctattttttttcagtgacaattttacttctgtttacttctgtctactatagtaaccatgtaacacaatttgttcagggtccttttatagctgctgggaacctttgccaagaaagttgcaccaaaatataagtatagacagggaagctaggtttaggtatattagccattggtttgttatgggttcaaataaggataggtagttgaaaattatttgaatgtctgtattctgtttagaattggagtgcttttgaacatgataatttaatttgaactaggtcatttctgatgttaataataagttgtcttctctaggtttctgcattctccttattaattcttgagcttcttaatttctaggatgtgttttctccctgtgtccttccctaatcttacacctgttgctcctcaatttgtgtgtatgcacatgtacctgcccgggcggccgatcg

SEQ ID NO: 464158 - DNA, 445 bp, Homo Sapiens
  misc_feature (24)..(24): n is a, c, g, or t
tgaattacaggaacagttaaagcngaagtctgcccatgtgaattctcttgcacaagatgaaactaaactgaaagctcatcttgaaaagctagaggttgacttgaataagtctctgaaggaaaatacttttcttcaagagcagctagttgaactgaagatgctggcagaagaagataagcggaaggtttctgagttgactagcaagttgaaaaccacagatgaagaattccagagtttgaaatcttcacatgaaaaaagtaacaaaagcctagaggacaagagcttggaatttaaaaaactgtctgaggaactagtgattcagctagatatttgctgtaagaaaaccgaagccttattagaagctaaaaccaatgagctaatccacattagtagtagtaaaactaatgccattctttctaggatttctcattgtcagcaccgtacc

SEQ ID NO: 464159 - DNA, 164 bp, Homo Sapiens
aatgtatgttttagaatcagtttgtcagtttcttcaaaaaaggctgctggttttttgggattttgttgaatctttggatcattagtgggaccattgatatcctgacaatactgagtctcccagtctatgaatttagtacctcggccgcgaccacgctaagggcg

SEQ ID NO: 464160 - DNA, 229 bp, Homo Sapiens
ttcgagcggccgcccgggcgtgtcgcctcccggctgtgtgactcaggcaagcactgtgcctccctgagccacgtccccatctgtagggtgaggccaggagactgaaatgggaggtagaaaggcccctgcacaccgtgggcattggatgagggtcgctttcctccttccctccacctcccccattggagtcttggttcatccactactctgacatgtgattgtcatcatt

SEQ ID NO: 464161 - DNA, 336 bp, Homo Sapiens
tggcttcaagcatttgcacagcttttatttttcattactttgctttactcatctttgtctgtggtggtcctacttgtctccgagatcgaactcaggcccctcaggattggtggcaagagcctgcacctgctcagtagcccacaacgtttctcttcaatgagtctgaactgctgcatcaggcggttggaggcactggcaacaataagcttgtccacagtgtgtctgctgccttctttactttttctttacattttagtttttatacagcgtctcatttagcccagcctggtctaaacgcccgatcttcgtctccgggtctctggagtgttgggatga

SEQ ID NO: 464162 - DNA, 756 bp, Homo Sapiens
ttaatccaagtccatgaccattaactggagccttttcagccctccttctaacatcaggtctagtaatatgatttcactataattcaattacactattaacccttggcctactcaccaatatcctcacaatatatcaatgatgacgagacgtaattcgtgaaggaacctaccaaggccaccacactcctattgtacaaaaaggactacgatatggtataattctattcatcgtctcggaagtatttttctttgcaggattcttctgagcgttctatcattctagcctcgtaccaacacatgatctaggaggctgctgacctccaacaggaatttcaccacttaaccctctagaagtcccactacttaatacttcagtacttctagcatcaggtgtttcaattacatgagctcatcatagccttatagaaggtaaacgaaaccacataaatcaagccctactaattaccattatactaggactttacttcaccatcctccaagcttcagaatactttgaaacatcattctccatttcagatggtatctatggttctacattcttcatggctactggattccatggactccatgtaattattggatcaacattccttattgtttgcctactacgacaactaaaatttcacttcacatcaaaacatcacttcggatttgaagccgcagcatgatactgacattttgtagacgtagtctgacttttcctatacgtctccatttattgatgaggatcttaaa

SEQ ID NO: 464163 - DNA, 825 bp, Homo Sapiens
gtttattggggttacttataggatcatcagttactcagaggcagttacaacaatgaaatgcctagcccagcaagggaggcaaactcacaaaactctaatctgcatccttggactcctgttggactaaacaaaagctcctccagaaagcacttcatgtttggacccttgtccaaagaccctttggactttgtgatggagaatttcatcagtttcccgagacttataagccttccattccccactaagaacaaatgattgaatccagagggaactcacacaatactatatgaactcaagtcaagcctttaacaaaattaaatttctggatgaaattgtaaagttctccctagcactctgggtaagtataccaatacaatagaaatataataatgcaatgaatattattaatatatatgattaacagttcagtttattaggtgctttaataaagtaactttatagtgaaaaataatataagctttttatgatttgctcacagcatgacagacacgaggaaagacgccctcaagtaacagtaataacatctcgtgagtgcaggggagtgagcaagcacagcaagccgctagcgtcaagcgtcgtcgtcgggctgtctgaaggctgaggagcctctgatgacaccgagatctgagttggcaatcatgccagcccagcttccgagcatcactgaccataagcctaacgagataaaaactccactctatcacctattttgaagccgtggacaggaattcctttggctgtgatatttactccagaatctcgttccctttcggaggcctcttcatccgcgagtagggacttatt

SEQ ID NO: 464164 - DNA, 873 bp, Homo Sapiens
ttttttttaggtaattagttggggggctaggggtagggttattgtgcttatgatagctagggtggaaaatattaggttgggtttagtttttgtttggtgagttattatttttgagttattgttggttggaaatattgttagtgaagtggaataaattaggcgagtataaaagaataggtttagtagagctattattgctatgagtgttgctataattagacagttgttttttataagttctgtgatgataattcattttggtaagaatcctgttagtggtggaaggcctcctagggatagtaatatcagtgagattatagttagtattgctggagttttatttcatagaagtgagattgagttgatggttatagagttatttagtataagtgccatgaatataggggctgtaagaataatatagattatgaggttgagtagagtgagggatgggttgtaaggaagaattgctaatattcatcctatgtgggcaattgatgaataggctataattttttcgtatttgtgtttggttaagtcctcctcatgcccctatgaaaatagaagtaattgctagtattaaaatgatagtagagttgagtagcggggtaaatttgaattaaaattgataggggagcaattttttgtcatgtaagaagaataagtcctatgtgcagtgggatcccttgagttacttctggtaatcagaagtggaattgggcgaggcctagttttatggatagggctattaatgttatgttaaggataagaccgtttgtttgttgttgaaatattcatgttcctagttgtttatagttgagtacgatggccaggaggataattattgaggctgttgcttgtgtgacgaagtat

SEQ ID NO: 464165 - DNA, 579 bp, Homo Sapiens
ttttgcaattcaaatgaacgtttatttcttaaacccacacagagtaagggcagagcttagagatgcctggcacagcatttctcatccaggatcacttcctcgttctttcttctttgctgggagcatcttagatttatatcattttctacaaagacaatatcctgaatggcagtcgcaggtttatttcaaagttggagtcttctcaggaagtaggggagactggattcccagctaatggaattttcactgtgatgtctgtgttctcagtgaattcttccagaaagccggaggagactgtctcaacatcagtagagaactcagaattctgtttgtttgcggctggcgtgaagtccatgatctgctcagagtcagtgcttaaatcatcatctgtataatcctctagaggagcttttgtccctctgtatgatcccagttggtcaaagactgagtttagtaggtcaatgattgaattctgtagttctttattgattgaaactaattctgacagggggaaagccacagtcagaccacagaagacagtgatcaccaggaccttgaaaagcatcatgctttagtagg

SEQ ID NO: 464166 - DNA, 798 bp, Homo Sapiens
gggcgagattacctatttatcttatttcaactaaaagtctcatcacaaacattcccactggcaccttcaccaaaatcactaacaaccataaaagtaaaaaccccttgagaattaaaatgaacgaaaatctatttgcctcattcattaccccaacaataataggattcccaatcgttgtagccatcattatatttccttcaatcctattcccatcctcaaaacgcctaatcaacaaccgtctccattctttccaacactgactagttaaacttattatcaaacaaataatgctaatccacacaccaaaaggacgaacatgaaccctaataattgtttccctaatcatatttattggatcaacaaatctcctaggccttttaccacatacatttacacctactacccaactatccataaatctaagtatagccattccactatgagctggagccgtaattacaggcttccgacacaaactaaaaagctcacttgcccacttccttccacaaggaactccaatttcactaattccaatacttattattattgaaacaattagcctatttattcaaccaatggcattagcagtccggcttacagctaacattactgcaggacacttattaatacacctaatcggaggagctactctagtattaataaatattagcccaccaacagctaccattacatttattattttacttctactcacaattctagaatttgcagtagcattaattcaagcctacgtattcaccctcctagtaagcctatatctacatgataatacataaa

SEQ ID NO: 464167 - DNA, 180 bp, Homo Sapiens
gcccataccccgataacgttggtttaaatccttcccgtactaataaatcctatcacccttgccatcatctacttcacaatcttcttaggtcctgtaatcacaatatccagcaccaacctaatactaatatgagtaggcctggaattcagcctactagcaattatccccatactaatcaac

SEQ ID NO: 464168 - DNA, 425 bp, Homo Sapiens
  misc_feature (363)..(363): n is a, c, g, or t
  misc_feature (396)..(396): n is a, c, g, or t
tgaaggttcatacacgttttatttctttttctgttgctgtgcctcttctataaccaacccctggtaactatgtttattaaaatgcccttctccatcctctgcttctgagttgcttttctcagtcgtggcctgttcttttcttggatgaatgttctggaacatagggaactggaagtgttgagagactattgggtgacatgctcattcttgggtttcaaagctgatttggcttttctcttgtgtttatgattcacatgtgttgtgttttcagaagttcaatcaaatgttatctaatttccagggttgactgagccattcaggtcctccaaaataatttaggagaactggaagcctggctgggtnggtgacagtatctaaatagggtggtaggaggcnggtgaagaagcgactggggtgggcaacag

SEQ ID NO: 464169 - DNA, 610 bp, Homo Sapiens
tttgaaggttcatacacgttttatttctttttctgttgctgtgcctcttctataaccaacccctggtaactatgtttattaaaatgcccttctccatcctctgcttctgagttgcttttctcagtcgtggcctgttcttttcttggatgaatgttctggaacatagggaactggaagtgttgagagactattgggtgacatgctcattcttgggtttcaaagctgatttggcttttctcttgtgtttatgattcacatgtgttgtgttttcagaagttcaatcaaatgttatctaatttccagggttgactgagccattcaggtctccaaaatatttaggagaactggagcctggctggtggtgacagtatctaataggtgtaggaggctgtgaagagcgactgggtggcagcagcacctgaagagcctgtgtgaacgtactgtccttgggccgcctggcagttagccatagcccgcttcatgaaagcttcctgggttcaacttgatgcccaccacaattcccttctccttgagaacgtttctgaacagatttccctggctgtccttctggtagagggtctcgtggaaaaggatcactccgccgatgctc

SEQ ID NO: 464170 - DNA, 591 bp, Homo Sapiens
  misc_feature (26)..(26): n is a, c, g, or t
  misc_feature (34)..(34): n is a, c, g, or t
  misc_feature (50)..(50): n is a, c, g, or t
  misc_feature (77)..(77): n is a, c, g, or t
  misc_feature (84)..(84): n is a, c, g, or t
  misc_feature (91)..(91): n is a, c, g, or t
  misc_feature (125)..(125): n is a, c, g, or t
caagaaaacccctacaatctgcatangaccaganatgcatttctggatanaaggctgaagacactggtcagaatctnaacacanacgcaanttcccaaagtcaactccatctttcttgtactgancacagcgttcagagagccatcaagcccttgaatggtggtttccttgtttgttcctgcaaagcggggcacctccttggtccaacttgatgcccaaccaacaattcccttctccttgagaacgtttctgaacagatttccctggctgtccttctggtagagggtctcgtggaaaaggatcactccgccgatgctctggctaatggaattgtccacactaaagaggagttctcggaactgcttcggttctcttcggtgttctccacctttatcctttgcaggcggtttcccatggtacccacagattcatctgcagccaggatgcccttcccattggcaacaatgcgctgggcaatttcagagagctccttcttctgctctggggtgagggctggaaatcggtgagccatgatgacaggtacagcaaaggggaagagtcctccaaggtatcagaagctgtgtgaggtgg

SEQ ID NO: 464171 - DNA, 601 bp, Homo Sapiens
  misc_feature (95)..(95): n is a, c, g, or t
  misc_feature (106)..(106): n is a, c, g, or t
gttatgatcacagtgtgtgtttcagaagtcaatcaatgttatctaatttccaggttgactgagccattcagtctccaaaatatttggagaactgnagcctggctgntgttacagtatctaataggtgtaggaggctgtgaagagcgactgggtggcagcagcacctgaagagcctgtgtgaacgtactgtccttgagccgcctggcagttagccatagcccgcttcatgaaagctttcctgggttgccttcttgtttgcagccttgccaccccaggcagccaatgcactggcctggagggctcttccatatgaaaagcttagtttccaagggccttggtagagggcaaccggttgatagcattgaggttaagtgtagcatcctcctcactcatacctccagacaaaaagcagataccaggaacagctgcaggaacagttctgtggagagctgtgacattgccatagccacctgctctggtgtatacttcttcgtgcaggcatgtccagcagtcaccatgtttggctttagcaaggtgccttctaggtaaacatgatgatcattgagagccttgtagacagcatgccaggaccttctcagaa

SEQ ID NO: 464172 - DNA, 241 bp, Homo Sapiens
  misc_feature (137)..(137): n is a, c, g, or t
agacacagaagccctgaaattggcaagatagacgtcagtgttagcagaactagcttcactgatttaaaaaaatagaggtgcaacaaatgctttggccactccttgaaacctgtgtgtctgccaaatgttctgaaccnaggtgtgtgcccattgctgcaccttcattagactctttccttgtacccctcccatacccatttcttgaaaatagacattgtttagatctaataagtcccacctc

SEQ ID NO: 464173 - DNA, 538 bp, Homo Sapiens
  misc_feature (364)..(364): n is a, c, g, or t
  misc_feature (392)..(392): n is a, c, g, or t
  misc_feature (497)..(497): n is a, c, g, or t
tttttttacctgaaacttgagtatatttatttattacagacatcctaagacccgtaaactctgctctggatcatatcactccaggatctcagagctgttcatgattgtacaggaaatggggaatatcataggctcacaaaggataactgatagaactcagtgtggtactttggggacatcaaacattgtgcgacatgcaaaagactattcacgaataacacaaaatatacattcattgtgccatccatcacattaacaattgagctgaaaatacattatatccagctaagataactgtggaagggaagaaattggttttgaataatacttttaaggttctgaataaccccagcaccaatttttnaaccagaagggtgggcccgagaagaaanggggtagagattggggaaagaccttggccccaggaagcccgggtttctggagtttgtgctctgcagggcttcttaactggaagaaccaatccagggctacccctntgaggcatctgattggggtttaaatgagggattttttcctt

SEQ ID NO: 464174 - DNA, 897 bp, Homo Sapiens
ccattttgtttttgagactgtatttcccagcatatatctcctaacctttgatgactctgtactttgtttttgagactgtattccccagcatatatctcctgacctttgaagacactgcatttgtttttgggactgtattccccagcacatatctcccgacttttgaagacactgcatttttttgagactatattccccagcatatatctcctaacctttgaagactccatatttcgtttttgagactgtattccccagcacatatctcctaacctttgaagaatctccattttctttttgagactgtattcctcagcatatatctcctaacctttgacgactctgtatttcatttttgagactgtattccccagcatatatcttctaacctttgaagacactacattttgtttttgagactgtattccctagcatatatctcctaacctttgaagactccagcctctgactttgctgactcagaaatcaggatttggaatttttaaaattaagaagagagacctgactccttgccaggaattctcagaatcatgtgattagccttcctcctggagaaggcctttgcagttgataccctgagggagtgaaggaggaatcagagaccttctaacctttgaagacactacattttggtttttgagactgtattccctagcatatatctcctaacctttgaagactccagcctctgactttgctgactcagaaatcaggatttggaatttttaaaattaagaagagagacctgactccttgccaggaattctcagaatcatgtgattagccttcctcctggagaaggcctttgcagttgataccctgagggagtgaaggaggaatcagagaccttagtccctcaggtcgctaataaagctg

SEQ ID NO: 464175 - DNA, 1022 bp, Homo Sapiens
ttttgacttaggcaaatgtttattgagtgaaaggatggatgtatacatgaatggatagacaggtgaagttcatatacattgtgtgtctcatcttagatcacatagcagaacatgcattgagcctagtttcttagagcatctatgaagtccataaagatagagaaaggatctgttttattcccaccatgtaatgcccagcacaacagacagtgctcacagcaactgtgtgttctgtaacgacttgaattaatgagtccaaaagctgatactttaaacttattattttgccacattccttcaggagacaggggcttcatacatatcacatttgaaggaagaacagcactgaaagatgccaacttgtttttgatggtgaggattaaagaaagagtacgtgcaagctggaggcagtgtgagctccctctctcctggctgataaccagcctgcatccccactcctggccagcaggaagtgagctgggagccacaccaggttttctgctttccatcattgaaccatgaagatcaaagtggctgagggaaacaacagcagccagatgctcaggagccttcaagttgctggaagcagccttggacactgaggcctggacaccttgtcgtgttatgggacccaagttcaggacacgggtctgatctatgaagttcccacttcgaaatctagtaccagagcaggtaggtttacactgttcactcgtagagtcacataggtacacctcgcagtgaaggtagacaaggtcgtagtttcctgcaaaccggaacatctgaacagaaaatcgggcctgagatgactcgccattctctgtcacctgaatggttgtatcttctgtactgtggacaactgtcctggataatgaagtatttcacagggtctgtggagttgctactgggtgtggcatagcagttggtcattagcagtacaaaccgggacaagtcacccccatccagcatggtgcccacatacagaaaagcctcagtggacagcatcacagaaggaccttggt

SEQ ID NO: 464176 - DNA, 378 bp, Homo Sapiens
  misc_feature (213)..(213): n is a, c, g, or t
attttatttttccagggtaattttccttccgtccttacaaaacggcctctttacatgggctttggtggaggtcgaggtgcagcgccacaggtctgaatcgtggtgggggtgttcggtccttccgggcctcgcgggatcgattcctaacaaccttgctatggatggcaccagctcacgcaataatgcagcttgacatagagcttgggaagcacngtaggcgtcgaagactcttgcttcagatatgtccctgacagcagcggcttctacaatgttccgaatgacaaacttcttgatggccttatccttgggcacgcaccgggcgcagttcgtgcagcgaatgggctgcaccatgccgcggccctttttggcgcgaccgtt

SEQ ID NO: 464177 - DNA, 581 bp, Homo Sapiens
  misc_feature (240)..(240): n is a, c, g, or t
  misc_feature (275)..(275): n is a, c, g, or t
  misc_feature (367)..(367): n is a, c, g, or t
tcatcatttgtctctgtgtggtttgcatatgcatgaagaagaatgcaggtgggagaggaaggcgtgacacccaagaagcaggcagagacagtccccaagactctagcaagactgttgtggatgatgaggagatgggggtttgcttttggaagattaagtcctgtaaaacttgtctaggccactccccaggaacttcagttggccgagtctttacctgtcaccttgacttggatttaggantcatcttgggagatggcccttttgagtggctgggnctgtgaaggacagcaggccagttctttgcacccctggacagaaacacatctcaccttttctggctcaaggaatctgaacacctgtctcttgnctactcgggcttctagtcaggcattttgtcaccttgtcaagggtcccagggacacaaagctccctcctctcacccacagcactctgggtcctaccctcagtgcttcagggacatttaatcaggtcaaattgggatcaatggctttgatgcagaaaagaactgtggactaatagagatagggtttaattaaaaaatatatctttttaattttaaa

SEQ ID NO: 464178 - DNA, 603 bp, Homo Sapiens
  misc_feature (17)..(17): n is a, c, g, or t
tatctttcctgagctcngaggtctgtacacacaatggaattttcatttgacctctaaatacttggccacaccctgacttacctgggcaacaaaggcaggaccattatctgacactattgcttttggcactccgaaccttggaaaattttctttaacaatcttcttgatgactatctgatcagtctcgttttacaaggaaaagcttttatctatcttgagaacgttcacaaaaatccagaaggtatttatacacatattttttcagtaaagtctatttttcagtagatgtcaggtctgtcttctcatgagaggactagttttctttcttcagtttttactattttatacagggtttcttttaccagtcttaatttgtctataacttgatagtctttagactgtcaggatcattgctctttaggatgcctgggcggttagatttgccatctgatttcttttagccacagcatcttaggtctttctctgcagatgtctatatatatagagcttgtattaaagccacaagtttagctttctgggctgaagtccctttagggaggctgctggcctagatcacttgctttctgtccatcactgcactgc

SEQ ID NO: 464179 - DNA, 595 bp, Homo Sapiens
  misc_feature (496)..(496): n is a, c, g, or t
  misc_feature (537)..(537): n is a, c, g, or t
  misc_feature (569)..(569): n is a, c, g, or t
  misc_feature (583)..(583): n is a, c, g, or t
ttttatgctgcaattgctaactttatttgatcaggagctcctagtgcaaacatcaaacaagcctgggctttgatctgtgagctcatatcacatgtcagggaagaagcaaactgtgacctacatacatggctgaagactaaaggttcatggtcacattggaggtttgtgttctacagcctagagactggcagtcacaggtctttgaggtctttctggatgtcccacagggtgtccgcactcttcctgagctgagcgacctcatcgtccttcagcttctgattgatgacgctggtcagcccccgagcattgaggatgcacgggagactgaggaagacttcattctcaatgccgtacattcccttcaccatggtagacacggggtgaatccgggagaggtttttcagcatggactcgatgaggtcagccacgctcaggccgatggccagttggtgtagcctttgaagcttgatgacttcataggcactgtccacacagncacactggagtctccatgcttcgcccaggaatccattcgtngcagctgctgggatgaatgccagcttctctgncatgaagtaaccgnatcgagcagaat

SEQ ID NO: 464180 - DNA, 1100 bp, Homo Sapiens
tttttatggatataattttagtattttgtcttcgataattcctgagattggtataagaattaagatgattgagaagtatgagatggaggctagttggccaatgataataaatgggtgttctactggttggcccccaattcaggttaagataagtaggttggctactaggattcagtacaaaatttgtgtgattgggcggaatattaggcttcgttgctttgaggtatgaaggaaaggtattagggctaaaattaggatagataagattaaggctaggacacctcctagtttattggggattgagcgtagaatggcgtatcaaataggaaatatcattcgggtttaatatggggtggggtgtttagtggattagctggtatgtagttgtctgggtctcctagtatgtctgggaaaaataatactagggttatgagaattaagaatatgattaggatacctaggatatctttgattgtatagtaggggtgaaatggaattttatctgcatctgagtttaatcctgttgggttgtttgatcctgtttcgtggaggaagaggaggtgaacgattgctagggccgcgataataaatggtaagatgaagtggaaagcgaagaatcgggtcaaggtggctttgtctactgagaagccccctcaaattcattcgactagggttgttccaatatatgggatggctgataggaggtttgtaataactgtggcacctcagaatgatatttgtcctcatggaaggacgtagcctataaatgctgtggctatgacctgcggaacagtagaagtactccaatgtttcaggtttctataaatgtatatgatccataatataagcctcgtccgacatgaaggaataagcaaataaaaaatattgaggctccgtttgcgtgtatatatcggattagtcacccgtaatttacgtctcgacaaatgtgtgttactgatgaaaaggctgttattgtatctgatgtgtagtgtatggctaagaaaagacctgtaatgatttggactattaggcagactcctagaagggacccaaagtttcatcatgatgaaatgttggatggggcaggtaggtcaatgaat

SEQ ID NO: 464181 - DNA, 690 bp, Homo Sapiens
ctgaatcttgaaaactagcaaaaccaattattacctaagaaatttaatctgtacaaattattatatctgtattggaaaactgtcaaacactctaaattctctataaaatcatggggagttgtgcaaagagaaaacacagtcgttggagtgattacaagaagacgttatggacgactaagttctgaacttagtgtctggtccctggataacataatagcaaaggttgtccaagatacatcaaacccaaacaaaaatggagaaaacatgatagaaacaacatctttctcagttttaaaagttccaaagtactttctagggcctgggttcttacacaatctcacttggacaggatttaaaagtgcaggttatatcggaatagtgcttttgttacactaaagtgtacaaagtctcacaagtagcaaatacaaatagcaaaagctagatacaggaaaaactgaaaatgtacatagaaagtcatcatgatacaaattgtcagcggtaattacacattccatccaattatctcataaatcagagccctcaactttcttgattcatatgtgactgtattcttcccagtgtgcattctttcttcctccaagggctgttctataacagctggaatgtttctaccataaagttcacagtgctctagaaactgcacacattcttgaatgacactgtccctta

SEQ ID NO: 464182 - DNA, 654 bp, Homo Sapiens
taaattaaattattgaagcagatcagttttcgaaatattttagtggaaccatttctaggacaatgggcataaagctatggttagatccacaaatttcagagcattggccatagaataaccctggtcggtttgatgttactgttgcttgatttagtcggcctgggatggcatcagttttaagtcctagggaggggactgctcatgagtggaggacgtcttcagatgaaattaatatacggattggaagttctattggcagaacgactcggttatcaacttctagcagtcgtagttcaccaggttttaggtcgtttgttgggattatatatgaatcaaagcataggtcttcatagtcagtatattcgtagcttcagtatcattggtgccctatggttttaacggttaatacggggttgttgatttcgtctattatatatagaatgcgtagagaggggagagcaattatgataaggattacagctggtagaatagttcaaatggtttcaacttcttgtgcatctattgtgcttgtatgtgttagttttgttgttaatattagcgagatgatatagaggactaaggagctaattaggaaaacaattattagtgtgtgatcatggaaatttattagctcttctataataggggatgtgg

SEQ ID NO: 464183 - DNA, 743 bp, Homo Sapiens
  misc_feature (108)..(108): n is a, c, g, or t
  misc_feature (193)..(193): n is a, c, g, or t
  misc_feature (463)..(501): n is a, c, g, or t
  misc_feature (507)..(507): n is a, c, g, or t
  misc_feature (555)..(555): n is a, c, g, or t
  misc_feature (560)..(562): n is a, c, g, or t
gagagatgggcaagagaccctccttctcacgtttcttttgcttcattcggcggttctggaaccagatcttcacttgggtctcgttgagctgcagggatgcagcgatcntcccacctgcgggcgcgcgtcaggtacttgttgaagtggaactccttctccagttccgtgagctgcttggtagtgaagttggtgncaccgcgttgggttgacccatggtagccgtactctccaactttccctgttttgggagggtttcttttgactttcatccagtcaaaagtctgcgctggagaagatgtctccgatgcgggggagcgacaggcttcttggtgggtctgcttcctgatttaacgcgtaggggctgtaaggcgcactgaagttctgtgagccatagcttggaccacaacttgagtgggagtaggacacccccaggttcccggaagtcttggtaggtagccggctnnnnnnnnnnnnnnnnnnnnnnnnnnnnnnnnnnnnnnncgaacngatctgcacccccctgcccactaggaacggtcgtcgccgccgcaactngtttnnntgaccgcgcacgactggaaagttgtaatcctatggtccgaggggtaggctcgggctgagcaggtccccgagtcgccactgctaagtatggggtattccaggaaggagttcattcttgcattgtccatctgtcactgagtgacctggtcctgcgaagcccggcgtgactgtgccaactttct

SEQ ID NO: 464184 - DNA, 268 bp, Homo Sapiens
ggtcccgcggagatgtttcaaacctttgattcaaaaagtcttggttccccatgaaacccttactatacccaggtttaccaggaaatttgggtaggagtggggttaatgagcctcatcgtatataaaatcaggagtgctgataaaagaagtaaagctttgaaaggtcctgcacctgcccatggccatcactaactgctccgaatccacaagatgaagacgtcggctaaacttgagcaagctttgttagatgggaacatggaacatcact

SEQ ID NO: 464185 - DNA, 546 bp, Homo Sapiens
  misc_feature (431)..(431): n is a, c, g, or t
ttaaattgaaaggaaacttttattgagtcatgttttcaaagcaatctagttttaaaaaaagttgaagacaagacagaaaaaagaacatgacacctaagagaatcagacaggacagacagacgggagcaggggggcggggacagcggctccgtggaggtcagatcttctccatcttggagatgaggtcgtcgcagatcctggtcagctcctcgttctctttagtcttctgctccactgtcttctccagcgactggatgcgcatctgctccttcctcaggctggcctggaggcaaccgcttccgcctgggccttgctccggacctgggcgatctcctcgtttgccagctgcagcttctcctccgcgtgggccttcagggcttggtacctctggccctcctggggtgatccttgccaggtaatcctccacgcantttctttcagtgactcttcgttcttgcggtaaccctcgattcacctctttctggtttctcaaaacgcttgaagaaggtcggagaaggacttctccatggagttcagatctgtggt

SEQ ID NO: 464186 - DNA, 206 bp, Homo Sapiens
  misc_feature (99)..(99): n is a, c, g, or t
aaagtatggggaaatcacagttttcagacatgagtaatcaaaaacttgacatttttcttgatatccaaatctagatgtctgtatcaaaccagaggtgantggccttggggatggcagtgaagactgttaggaccattagatcagattgttctgaaatagaaatacaggagtggggccctggggcaccgctttaggccagaaggtca

SEQ ID NO: 464187 - DNA, 252 bp, Homo Sapiens
attaacaaattcggtgaccaagtgaccctggctgttctccagaaccggcaccagcccaaggggattcttctcaaagaaccactcgggcttattcttcaggttgatattgatgacttcgtgccggattcccttggccttcaggaccatcagcgtcctctgagcgaaggggcagaacctcatgctgtagacgcggattctggctccgggaccgggccggggggcgcgcttcccttccccaggctcctggaggat

SEQ ID NO: 464188 - DNA, 848 bp, Homo Sapiens
  misc_feature (741)..(741): n is a, c, g, or t
  misc_feature (757)..(757): n is a, c, g, or t
  misc_feature (779)..(779): n is a, c, g, or t
  misc_feature (784)..(784): n is a, c, g, or t
  misc_feature (801)..(801): n is a, c, g, or t
  misc_feature (807)..(807): n is a, c, g, or t
taaggtttttgaataattttcctgaattcatcttctgtagcacatcattcacgtttaatgactactttatacatggtagtccttgtgcccaccagttctcctgactttctttgcataagatggcaacaaaatcatatgctgttctctgtgagccacaggaagccagcttttcaaaaatcatcacacagagtcttgtaataacatttcctgaatagaatctagggagctttcagggaccacatgaagtcatagaggcagagtctcctataaaaagtgagaaatattaataaatatgtttctcctcatcaaataaaagttcaccaccaaggaccatcttatgacccagagagaaaatatttaatgtctgaaagtccgacaatgaaaatgtggaaagttatgctattttatacctcagatgatgttcagtctgggaaaactcaagataactcgttgtttaaaataaaatgcatgtctaatacacatcaattgctggccatttatcttatgcttttaaaagattataccattaaaatgccatccttcttccttaaaagttttgtgcctaggatgccagccatttccatttatcgctcttacagaagaggaccgtctgggcaggtgatcatacttaaatagacggcagctaaaggagaatgaactttgactcatttaaattaactccaatatttattgttacaagcttgacaatgctcttggaaacgattaggtatgacctctagnataaatgagtttaatnaaagagactaaaaaggagtacnatatnctagttaagggagtcanttttcntcagaaagcagaagggcttgggacgactacttgacacgtag

SEQ ID NO: 464189 - DNA, 592 bp, Homo Sapiens
taccctcttcaggtctcggcaatctcactgcagaatgaagggattccactagttcatctataaagtcccttacgtggctttttcttgatctccctcatcatccagcagcactgagctcaggcactagtgggttattttacaagaggaatctggacagaatgtgatttgttcaggttgaaaagggaaaaattaaggccctggggggattgggaggggacacccctcggagttcactctccctccccaagtctttcccttccccatccaaacggcacttggggtggttggtctggagctctgtggtgcttgctggaggccaccggcagaccggactagaggtgtgtgtcttcctcctcatccaggtcgtccttggtcaggttgtccagagggacgatccagctgtcccccagctccccgttgaggctgaccaccttcttctcctgcatctcagaagaggtctccaatcacttccagtgttgggttgtcatggtaaccattctccactgtctgcagctcctctgttagccgctgctggtccttcctctgggagaggcgctggtggcagcagccatagagggccgccacgaggagc

SEQ ID NO: 464190 - DNA, 493 bp, Homo Sapiens
ctgtatggaggagtcggccagtgctgggcgctcagccctttagtgtgtgcgagcgccttgcatgccgaggagagtcagagctgctgattgtaaggctgagaagttctcacagttaagccacctgccccttagtgggcgagttattaaacgcactgtgctcacgtggcgctgggccagccagctctaccaagagcaactttactctcctttaaaaaccttttagcaacctttgattcacaatggtttttgcaagttaaacagtgaaggtgaattaaattcatactgtcttgcagacttcagggtttcttccccaagacaaaacactaatctgtgtgcatattgacaattccttacaattatcagtcaaagaaatgccatttaaaattacaatttttttaatccctaatggatgaccactatcaagatgtatactttgccctgttaaacagtaaatgaattcttctatatttctaggcacaaggttagttattta

SEQ ID NO: 464191 - DNA, 489 bp, Homo Sapiens
agaaccattaagtcacaaggaggaaaaagcattttgagagttgtcagttcttagacttagtggaattggcaggagatcttcattattgaagctccagcctacttataaacaactgtgctagaagaacatagggagttcaggcatttgtttgaatctatggaatctctcttgtaaagtaaaatgtacaaggatcccaaacaggcagcaaagcaacattgtctgaagacatcttcccattggctgctgtaagtgacctacctaagcaatgtggacatttccacgttctatagaatactgaccaaatgaaaattttaattctttatgtttaatatagtttctactaaatacagtatgtagtcaaaggaccacaagagtgggaaaatgggtcaattcaggatgttttctctggcattaaagttcacctgagagcaaatatacatgcattggactttgaggctatagttgcatatggttaccaccaatactaac

SEQ ID NO: 464192 - DNA, 448 bp, Homo Sapiens
tcagagtaacaaatgtacttttaattgattgtaggtaaaaactacagagggaggaggagcagaggttaacgctggccctaatgtatcacagccatatcatctacattagaaaaaaccaaggcattatgtcctcacaggtcacacgtgtggctggccaccaaatctggtgatttatattccgtatttcttctttagctcgtctaccttttccacataggtcttcatggcactttccttggaagtccctttcagcttgttccacgagtcccacttggctttgcccttgaggtccaagagccccggccgatctgtatttgcatcgcccacagtagcttgtttgaagttgactgtagatgaacagcatctcttcatcagttggctgagtcttgaggcgcttcacctcctcagcggctttgtcaaattcagcctgagacatactggtgaggtg

SEQ ID NO: 464193 - DNA, 1200 bp, Homo Sapiens
  misc_feature (21)..(21): n is a, c, g, or t
  misc_feature (42)..(42): n is a, c, g, or t
  misc_feature (59)..(59): n is a, c, g, or t
  misc_feature (89)..(89): n is a, c, g, or t
  misc_feature (123)..(123): n is a, c, g, or t
  misc_feature (1047)..(1047): n is a, c, g, or t
  misc_feature (1063)..(1063): n is a, c, g, or t
  misc_feature (1075)..(1075): n is a, c, g, or t
  misc_feature (1087)..(1087): n is a, c, g, or t
  misc_feature (1100)..(1100): n is a, c, g, or t
  misc_feature (1132)..(1132): n is a, c, g, or t
  misc_feature (1140)..(1140): n is a, c, g, or t
  misc_feature (1153)..(1153): n is a, c, g, or t
  misc_feature (1166)..(1166): n is a, c, g, or t
  misc_feature (1180)..(1180): n is a, c, g, or t
gctttcttcaacctcaccatngccttctaactatcacttctngggacacttaatatttngctctcaccctaatatccacatttacttangcctggagggcatggtattatccttatttattantaacttcagtaacttccctaaaactccaactcccataggctccataccaatcccccatcaccatcttagtttttcgcagcctgcgaagcagctgtaggactagccctactagtaaaagtttcaaacacgtacggaacagattacggtccaaaatctcaacctactacaatgctaaaaattattcttccctcactaatgctactaccactaacctgactatcaagccctaaaaaaacctgaacaaacgtaacctcatatagttttctaattagtttaaccagcctaacacttctatgacaaaccgacgaaaattataaaaacttttcaaatatattctcctcagaccccctatccacaccattaattattttaacagcctgattactgccactaatattaatagctagccaaaaccacctaaaaaaagataataacggtactacaaaaactctacatctcaatactaatcagcttacaaattctcctaatcataaccttttcagcaactgaactaattatattttatattttatttgaagcaaccttaatcccaacacttattattattacccgatgagggaaccaaactgaacgcctaaacgcagggatttatttcctattttataccctaatcggttctattccactgctaattgccctcatcttaatccaaaaccatgtaggaaccctaaacctcataattttatcattcacaacacacaccttagacgcttcatgatctaacaacttactatggttggcatgcataatagcatttcttattaaaataccattatatggagttcacctatgactaccaaaagcccatgttgaaagctccaattgctgggtcaataattctagcagctaattcttctaaaattagggtagttacggaaataattcgcatctccattattctanggcccactaaccaaantatatagcatanccccttcatccntctctccctatgngggattaattataactagctcatctggcttangccaaccnggttttaaaatcnctaatcggcctantcctcagttagccncatggcccttgttattggat

SEQ ID NO: 464194 - DNA, 821 bp, Homo Sapiens
ttttttgggagaacaaagggtttattggactcaacagggggacattcaggatacatgtgggaacattgcaggaccccagatacttatgtgtggatggtgatagcataataccttggaattctgcctcttcactgtgctggctgtgtgcctccagggtcatgagcagcaatccacaacaaaatgacattctaggaagtacagacttgaaagccctagagaggattagagcacctacctacccagcaggggctataaaggcaaaacatggtatttcacacactactcccaccttggagcttctataactcataattcatcactagagggctccaggaagaattgttgcacatgaggataaaaggacaagggtggaggtcatttgggaggaccatcagagcaaggtctgcaggaggactgagctcaggctgaacagaagcacccctgccatggtccaggtgctgcctccattgggaactgctacattgcagaggtcttcctggcaacaggaagtcttcacgttgaccttagtacccaggatctccatactttcaatattaggagggcagatgggtaagcaaagattgttctttactttccgttgtttgagaatccacaataactgctgcctcctgagtaacacagactccatcagggtaggggcaggtaattgatgggcaagaagtctcaaatgggactccatagcactggtaacactccagtccctgagctctttctgcacacagtagggccacaagaagaatcagcaaacaggactttgtagtgtgagaagtgtccatcctcagagaagggttcctctcaga

SEQ ID NO: 464195 - DNA, 573 bp, Homo Sapiens
gggcaaaaagcccatcaagcctcctcagatatcatagtgaaccacgggctcaggctctttggtaggatcaccaccccgctccaggtacagattattgtaagggtactgcttcggacccacaggctggtaggaagggaacacgtgccctacccagaacatgaaaaccatgaaagccacaaagccgaagagatgtttacacatgacatcccaggacacaggggtaggtgacgtgtccacacgattcctgatgtacatgtctaggtccacagtgtatcggttcaccccagttcatcctgagttctgagtggtcccactgataccacggatccctctcatgctgtgatcggttggggagcatcgggtagtcgccataccccatgccatcatcggggtatggctcgtagtcttccactcgcatgttatacttcttggcggcccggcgcgttcctctggggtcctaggatatgaccccggcaacatgtccttggtcatatggaaggctctccgtgcctccagtggcaccacgccccgggttgtcctctgcagccatcggactcccaggccgcagcccgg

SEQ ID NO: 464196 - DNA, 849 bp, Homo Sapiens
  misc_feature (721)..(721): n is a, c, g, or t
ttcatttgctgcatggtgggctttattgagaacatgggacaatgtgatactcagtcattttcagccatagtttctcttatccaggtgttgaaatttaaaactctggtgtagatacccggcacattgggtttaccgcaaggctagggcccatgatgtgataccttggagaacaccatcacagatcagtgggcctcctgagtcacccgcacaagtgtctttgcctccatccatatctcctgcacacaacatgtcatctgtcaccttctctatgtgggctttggcacagtcctcattaggcaggagcttgaggttcacacactggagctcatctgggtattcatatttgacgggtgtaatgctgccccagcctgaggctaggcatgtgctccccagcttgggctcctcagtgggcaggtcgatgggcttcacaacatctgtgatgtcagcaggctttttgaggcggagcagcatcaggtcattgctgtagtcatcctcaggttgtggggtgtgctcattcaggaggctcatgttgaagtcagggtgagggatggctttgctgacaagccggtgttgggcagagggttcatcctccaaaaagttgtttttgcccagccacacctggtacttgtcattatggcagtgggcagcttgtgagaacccagttggcgttcagcaggatacccccacattgatatttggtgaagcggtacacagccacttncagggctgggaattcttctcacagttaaatcctccaacaattcgagactggacaggaggtgcagcatcaatccctcctagggacagggctaggaacaggatcaggaacctcatggtaacaggagtcca

SEQ ID NO: 464197 - DNA, 598 bp, Homo Sapiens
  misc_feature (92)..(93): n is a, c, g, or t
  misc_feature (277)..(277): n is a, c, g, or t
gatactgcctggcccaagctcctcgggccaagctataacaaacatggggatacaaaaaagggcgatcatcagatttggtcttgaattcgggnngcgggagaggggcaatcctgggaagggaaacagcaggaatccaggtctgaggacagcctggggtgactggactgggagggaaggcacttggcttcagtctcctgatcccacccgtgcaagagccggttgctccccgactttcaagcggcccagaggttgctcctggttgagcctctggaagaangcttttgccaaactcgtaagtgctgatcattgatggcacaggagggtgcagccttgatgatccttggggaggaagcctgcaaagagtcccctggtgccagattcagcccggattctgcgagggaggagccaggtggagtccactctgggcggcttcactctcacagcctccaccgctcccagtgacatctgtcgctgtgtcttcaccacatcgaaggttagggtaagggtggcagccaccattcctgagatccaccggccacgaagctgatgcccaccgatgtctggtcttttggtctcagtccgctcagccagctcttca

SEQ ID NO: 464198 - DNA, 494 bp, Homo Sapiens
ataattacttaaggattttatgcttttaagttatataagtttatttattccgattccaatgtttacaaattaaaagatttcattttagtagagtcaattcataggcacttggtagcacagatttcaccggaagaaacaagaaggacggacagtgatggttaagatctgaatggcctcaaagataggcctttcccccaaaaaacaagctcacaggtatttgcccaccactccaggagtcctggtgtggggtaaagaaagacagaacatttcctgtcaggcccagaatgtaggctaaggctcgaggctgcaggctgcaaatgttcccaggcaggcaagacctcacgtcctactggctgctgcccttgggtgcatctgtaggccccgtggctcctgcccctggggttcaacaccgataaacatagaatactcattttcagaagacctgagggaatgagtctaagcaacgctttttacaaaaagtggcaaggttcagg

SEQ ID NO: 464199 - DNA, 475 bp, Homo Sapiens
ggcaagccagaatgtgagcccaggctgcattgcccacatacactgggttggcgatggagaatgtggcatttttcttaattatgctgttgttcttcagtgctgttttcacagtggttgaagtgacttggcattcttccccatagatgaaagagagtcttaaggcacaagtatgcaaagtgccaccatttttcaggatgctcccattggctgccagcactgccttctcagccatctttttgctgtatgggtatgggttagaccatgtgctttcatgatgctcctcctcatgggcattcaggatgatctccttgtaggaatttggtccagccacaagcactgagctgctgtagatgaatgttggcacgttggcttccacacaagcatccagtaggagctgagtacctgcccataggaagcccacaatcattgctaagaaataagccaaaggtcaccgtggcaatggggtcagactggt

SEQ ID NO: 464200 - DNA, 505 bp, Homo Sapiens
cttaagaaaggaagttgagaaagcttggaggacccagtggtttcagcttgccacccagcttattccagtcctctgccaggaagaaaagccctgtctatttcctgtgcagacccaggcagagctgtctggactggcccaggtgatccagggcctgagtgagagtcaggcacaggttaggggccaccatttccaagtgacctcagaccaactatctcaacacatacattctctgatgtccatgtgtatttgtgcttgtgggtgtgagcctaggcgtagtgtgcatacgtctgatggtcctaaaagagcagaagccacccaacttggtttgaggtggtccagccagaccccaggagcatccccatggctgcttgacaccatggaaaaggggggcacccacttagatgctcatccaagtcctgcccctcacagatccctctgtccacactatgtggaccaacaagtagattggatagatggatagacagacagcagctctttccttcct

SEQ ID NO: 464201 - DNA, 269 bp, Homo Sapiens
  misc_feature (60)..(60): n is a, c, g, or t
  misc_feature (80)..(80): n is a, c, g, or t
  misc_feature (113)..(113): n is a, c, g, or t
gcgcgtgctgtgcccctgcctttgagagtctgcccttgtacgtgcacgcgcgtaggagcntagttgttcctgcttttgtntcttgtactttggctgaccggaaaggagaaaanctggaggcctcttcggataggaatagtcttatctaatgcttggcatttcacagtcgggatgactttgttctcccaaggtctcatgtacacgttagcattgcagtcgagactttgtccaaggtgcttgatctcacaatcttctgtcagctctgtgtt

SEQ ID NO: 464202 - DNA, 173 bp, Homo Sapiens
ttgttattcaactgccatttattgtgtctgtgtgcaaggactgtattaggcgccagaagggtaaggaagacaccacaaccgtgatcagagtggactctgccctctaggagcgcacaatctagtttgcatacaagagatgccacatggaaagtggcgagtacttcccacaggaa

SEQ ID NO: 464203 - DNA, 409 bp, Homo Sapiens
  misc_feature (50)..(50): n is a, c, g, or t
  misc_feature (322)..(322): n is a, c, g, or t
ctcgttcttcagcttcaggttctccacaatggcctccaccaccaggtctngctgtgcaccacggatgccgcatcggtgctggttgaaaggcagctcagggtcttctccacaaactcatctcccagccttagggttttctgtgaacttctttctttgccatcctctttagactctcctcaattcccttcttggattttgccagggatgtcttccgtttggtccaccaatactactgtatggccagttgctgcagctacctgcgcgatgccggcgcccatcagcccgccgccgatgacggtcacatgcttgatcaggatcttcnttgcggccgccgacgcagaggaagaggaggacatggagcgcaagaattgcctggtcacgaacgccatagctcagtgcatgcagccga

SEQ ID NO: 464204 - DNA, 530 bp, Homo Sapiens
  misc_feature (505)..(505): n is a, c, g, or t
tttttaagcattaaaagattttattgttcttttctttgagcttcataaaggtatgggaattttctcagacacgaaatgcgttggcacatggaaaggagatgaggaagccctgatgaaattctaacctacaagaggttccaggcaactcactatcagccacctatccttgggtcacagcagctgaggcacatcttgtgcattgctggacaagtgcttagagctgaagggttgcaactgggccagtgacttgcaaggcttctggtgacccaaagacaagttggacagagtgtaaaatggaattgttaagagttggattgtttctaagtccctttctggaggacctaataacacccagggccatgtcctctccctcttcatatcactgtgactttttgtttccaatctccctgtgctgcatcactagtgttccgatccactctgaggttttctgcttggcttcctcccagctgacaagtgggctcatagcccagatctcgctgagccntcttgtaggagaaggtgaatacaat

SEQ ID NO: 464205 - DNA, 746 bp, Homo Sapiens
  misc_feature (561)..(561): n is a, c, g, or t
  misc_feature (608)..(608): n is a, c, g, or t
  misc_feature (650)..(650): n is a, c, g, or t
  misc_feature (667)..(667): n is a, c, g, or t
  misc_feature (675)..(675): n is a, c, g, or t
  misc_feature (705)..(705): n is a, c, g, or t
  misc_feature (722)..(722): n is a, c, g, or t
  misc_feature (728)..(728): n is a, c, g, or t
tctgctgatacaaactatttcctttatttccatctttccatctagtaagttagcaaagagtgccattcctaatcgaattccagttatgtgtgtttctgagtgggtatttaaggacaattctgatttacaacttagtcttagaaaatagagaatttaaaaggcctaacttgcttgtttctaaaagcattttaatttgcagatcaactataaagaagtgttaaatactctttatttgatatcatacataaaccacagtaaatgcctttcaatagtaaaaggcaacatccttgatgtagggaattctaattaaaactgcactgtcaagaatagacagttgcctcctggtggttagccatgacctgaaagaggccagtgaacacaaactgaaacacatttgagtcttcttgtttctgagacagtgatagaattttcccagtgtttaagcatattcatatgcccagttatataaatctaagtataaaaccatttagtaggtttgaggtgacatgccctatttatggaaagtaaaacattgctaattaagtcccaatccttatcttngagaaaggggagagccgtgggtagcatggtatacaactggggaactngttgctttaataaagacccgtacccacttttatgaccagtcnggttttaccttaaatcnggactggnccaccaaaaccattgccaagccattcatgntccggaattgggggggnggattnattttgggggtccattaa

SEQ ID NO: 464206 - DNA, 309 bp, Homo Sapiens
aagagttgagtgtgtgttattttctgtgttggggaagggagcttgggacttgaggaaactgaaggtctcaggagcttttctgggcagctttgaagaagtctctcttctttctgcttccggatcttctgcttaaattcttctagctccctggcgctgaccctccttctctcttggccacagctccctcttacgctggacaacatagtcctcaaaccactcagcctgattggagatccagaacataaccacggggaaagtgaggtagagggacatccgaaacacctccagcttcacccccatctcgctctt

SEQ ID NO: 464207 - DNA, 454 bp, Homo Sapiens
cgggagtcaccccttacttcctggataggtaggcttttttaagttgtgtgttttgttttggagaccagtgtctccactttgtagctgtggctatcctggaactcaatcagtagatgcccagagatgatgtgcctgcctctgccgtccaatgctgggattgaaggtgtgcacagccacaccagcttaaggttttgttaaagaagacgataggtatggctggattatatagtcttcaggttcacatgaacttggctgtattctgataacattgagaccgttttccaccaagttagcctcatttgttcagtaacacatcttaccgaggaaaggaggcaaggaagtgcccttttgtgtctcctcattgttcacagcctgttggtctcgaacactcaacatatgattgctcgatcactttagatagtaagtaggctatttacataatgagctaacctca

SEQ ID NO: 464208 - DNA, 500 bp, Homo Sapiens
tacattcgttacaagatttattcacacccaacaaaaaaaataatcacaacaaaatatatgctaattataaaactaaaagggtatagtgatatagactgttacagtttctcttttaattctgcttgtttcaagtaaatttgcttgtttctacatacattttattcataaaagaataacaatcattaaaatgcagtggccgtttgcatttcttgtacaggaagaacagaagcaaagtgcagaagcttttggttacaacggtgtttgcatgaaacaacagactaagctaagagcccaaaatattacctctctttctctacatacatatatccactgaactgagaaatgagcagttagtattcctgcttaaccctcactaacactttttcttgtttttactaaatgcaaagtaaggaactgtgtttttgcctcttctttagttgacctcagaagatgaactctctaattcatgagaaattcggaatttcagatacctatcatct

SEQ ID NO: 464209 - DNA, 494 bp, Homo Sapiens
  misc_feature (480)..(480): n is a, c, g, or t
ttttcaaaatcttcctcttgtttttttattgaggtcagcttctgttaacaatggacattaggcaatagatcataatatttctgtaacatgcttgtgacagaaacttgaataattcacatgctgtactatgcttcagaatttgactacatatattgatgttttaaaaatatttcttgcaggagggaatgaataaaatcaggataaccctgtccccatttctttttgaacatatattgatattttaattgatacatagtaattacacataattatggcacagtatgacatttcaattatgtataatgcactactgatcaaatgaaggtaactggtatgtcacatcagatctaactatttcctttcttgctagaacatggctttttgatatagtcaattaattgttaactctagtttccctggtagaacattagatggttatttcttcatccaaatgcaccctctggtagctttagcctatcntttctccatctggg

SEQ ID NO: 464210 - DNA, 564 bp, Homo Sapiens
  misc_feature (434)..(442): n is a, c, g, or t
ttctgttttgaccaaactttattactcatttaatggaactgtaacaaagagcaggaatcaaaacacatggggatcacagaggctgttatgtttattgtgcagaacagacagtgataatacactagagaaatattttcaacaagcaagcgattcaaagtacaatcatagacagcaattctacataaagaacaaagaataaagttagaagacactcaaaggaacagggagaaagtcaactgcagttaaacgtcttgatacttttctcctgcaaacatacctaacttgcagaaatggtagaaaagttaaatgtccagtcttatgtagctgcgaccaacaacagcaaagaacagtcctataaaatttatctcccacaaaaataaactatatatataagaattttatgatgttcttactgttccattgggccacaagcnnnnnnnnncagtatgaaaaatggaggtatactggggacttaagaggtagtagtgtgttttgattgtacaacatacaggaaataaaagtgtaactttaccagagatggaaatcactcggtgcaccatgttt

SEQ ID NO: 464211 - DNA, 470 bp, Homo Sapiens
tttaattggaaagaagcatagctgctgtggcccggtgagcttgtaccctaaccagggcgtcttttgaagaactgcgcctgcgtagtccttctttctgcccggtctgttgaacgagactgagcacgcgccagtcccacgcgcgggccgacgtttttgtccccacggtcaaagacagccacatagggccccaaaaagacgtccccaaggatccagaggggtcccgcaggcttggggatatccaaggcttggaagcccaacaggcagaggccaacatcgctctgaagaatcttgatgacatagtcctggcctgtgaggttaaaccagactccaccaaggtggaaggagacagggggaagcgttggcgtcttggaacactgaatgaagtactggccattcaggaagggattatcccccaatggctttattcaaggcccggatctcctcactaggtcctgtgatgagggatgtgc

SEQ ID NO: 464212 - DNA, 424 bp, Homo Sapiens
ttactcatcaaaccatttgaatttaattgcattcttcaaaattctacagctacagattgcagcagagaataccagggactcagccagagaagaaagtactgtttttaaataaacagctcctggcagctctttattctagtccacattattcagatatcttcttttttcctctctttctttccatgtgtttgggaaaatttttccaggatgttttcagatgagtttgtgaacaatggccctagagtattctgtttttttccccttgaagcttctgtgacctgaagcatagattacttttatgcattggcttggttgctgagtttattcaatggtgcgaagtggtgttttaatgcagtctccacagagacatctccagaacaacctcacagattgaattccaggttcctcacaggaagaggaggga

SEQ ID NO: 464213 - DNA, 522 bp, Homo Sapiens
tgagtttaagttatttatttaaggcatctcctcttacaagcagaagggatggaagatcagagtaatggtcgccatctgaggaaaggagacacgagcttagcatccaaagggttttcgtggtccacacagagtaagggtccaaaaccagtgctgtggtccctttgttgcctgggggaggccaggttctctttactcatcttcatagccggtcggaagtgggttcacatgagggttgtggaagagggtatggttaccgtctccccaggggaagggcttggtcctgatgcgcaggtgagggtaggcaacgaacgggggtctctcgtgctcttcgtgccgcgacttgaggaacacgttgagcatgctcactcccaccccgggcagcgccacgaagtaggtgagggccttccacatccgagctgaaccctcctcgccgtggggcccactcgacatgggccgcctcaacccggggagggcccggccagcgggcgagagacccgagacgctgactcgtgccgctcgtgc

SEQ ID NO: 464214 - DNA, 433 bp, Homo Sapiens
  misc_feature (52)..(52): n is a, c, g, or t
  misc_feature (318)..(318): n is a, c, g, or t
ccccgattagtcagattgtcctggctcaggatttccgctcagccggcccggntcccatactgaatggcaaacttggtcccattgggcctgaaggagctggaggccttgggattaaagcggatggtgaaaccagcatgccaaactgaagaaatgacatctcgtggacggaacccacaagttggaagaacccgtgtcaaagacaacggtgaaattctgaggaggcgttcccaaaccaatagttccaaaatactgggtgttcatgaacttggagagaggcacaaaggaggggtttgcaccagaggtggaggtcctagaaantctgccagctgttcccatccattcagtgggtttaagattctgtgtccaaggtggattcgttgaagagggacacggatcagtttggcctcctcaggctccaaattccccagcagca

SEQ ID NO: 464215 - DNA, 418 bp, Homo Sapiens
  misc_feature (13)..(13): n is a, c, g, or t
  misc_feature (123)..(123): n is a, c, g, or t
  misc_feature (221)..(231): n is a, c, g, or t
  misc_feature (342)..(342): n is a, c, g, or t
  misc_feature (368)..(368): n is a, c, g, or t
ggggtcctgcaantgtgcccagctctcagagaagtccaggctaatgcatgtcaggtggcctccactgtgcaaactggttggtgggcacctctaccatgatttgtcagtgctcatagtgttcanaggggaaagaatcaaggaggccttagtactggaagcactccagcataatttacttaggaaagcaaggatcagagtccttctctaggataaatgatttnnnnnnnnnnntagtgaggtcctcaacactacaccactgacattttccaccaacctgaaagcaatgcaaagtgttttttctcactcacccaaggacaatctacacactcactcaggcctcangttagccacatcactcctaaggtcangaggcccaggggaagttgcagaccctggacagagcattctagaagccagg

SEQ ID NO: 464216 - DNA, 440 bp, Homo Sapiens
  misc_feature (232)..(249): n is a, c, g, or t
cccggcttgtcttctggccgcgtttctgagaggcacgccccccacacacatccatgcacacacgctgtaattggccaacttcctccttctgttcttggaatagcaaccgagacaaaaagcagttagcacgagtggcttgggcttgccaacactacaattcaggacaaaacccttgtaattctccaaatggtggggtttttaaataggttggacttcaactccctgttttctnnnnnnnnnnnnnnnnnngcatcccaaggcatcactcttctcaaaaacgaagtgactgagataagatcgaagggaaatattccagagcagcagattctgaactcaaggcttccaaagattcacattttgaaaactctatggatttaggagggttctccaggtttgcccacaaggcctctttgtgtagggaccattcatcctaaggaaat

SEQ ID NO: 464217 - DNA, 453 bp, Homo Sapiens
  misc_feature (155)..(155): n is a, c, g, or t
  misc_feature (185)..(185): n is a, c, g, or t
  misc_feature (325)..(325): n is a, c, g, or t
ctgccaggattcggccacgagtggaagttgaggatcacttcccagagaagtccaaggtgatcatctccaaagaggtttacaagtgcttggtaggaatggaaaatgaggacaagaaaaagaggagaaccatggagaaggcccaacttggcacggancagcagccagctgccaaagtcacgaactcntgggattcaagaagagtcgtgtagtgctttcaactctcatccgcaggcagctcactgtgtgtggactctgagctgacacgggagttggcttctttgttccatagattttcttatgccacaggcactattattgttcttgngaaagttcattatttttttaaattaccttactctcaagaaagggatttttttgaaggattctgtcatatatctttggaaaacagaaaatcagtaatatgtatatttttatgtatgttcactggcacta

SEQ ID NO: 464218 - DNA, 421 bp, Homo Sapiens
tcttgttcacctgtgatggagtttttattatagagaaaagtaacagaacttggctggataaagaaaggagttggacatgggtgtgtgggtgcctagccccaagcctcagcagcccagccacgggtctgcacggttctttcgcatcaagaagttaatctttcgagccatttccatgttgtagatctccggcatgtttcatagctcttccgctggcggcggcggcaaggcttctcatagtagcgtcgtcgacttatgacttcggtaagcccatccgtggtgaggattctgttcagggtccggtaggcaccttccacgttcccctcctgaaccatcactgtcctggcaatgaacttcagatgtttagccatggcctcgtatttaaatcttcattcttccgggactacagactggggcctctgaa

SEQ ID NO: 464219 - DNA, 493 bp, Homo Sapiens
atgaggtggtcttactgtaggctccctcatgcctaagacctcacctagcatctcggtaaccttttcacctgtcagtctgtccagggattaatattttcctctcttcagatttccacaaagtaagggaataacctttaccacaatctggagtcttaccatttttctgctttgctaggcatttgatggaacttaaagccttgtcaaacatttcttaagtattatagcaggcattgagagttatctttctcctgtctattgaaagggaaccctccttacaggccctgatgaacttcgtattaatatgtcgcctgtataaattgtacctgttaggttgctgagctgatgttagagtatttaattctccagcctaaggagtgcagcaggtgctcgtgggagtggtctgtgcctacctttgagcagcatgaagccacagaaccaagcctgacaccatcacaccccgtgccttagtttttaaccactgtccaataaaatg

SEQ ID NO: 464220 - DNA, 737 bp, Homo Sapiens
ttttagttttgagaaaaatttattggatattataaagcagctatagagctctttacaataaaatttaatgctttgtcagttgcaaattaatcaaagggcaaaagtagatcagaaagctatttggcaatgtgatggatttaaggggactttaaagtggttcagggaaattgctacagatgtttcacaacctggatccatcctgtcaagtcaaacagcaacaaccatttcttctgcaaagtacaggaagtaatttatttaaaaattatgagtccaatgctgagtttgatttcttcataaagactcttttatcagttgggccaatctctggaaggctgtatccatctgtgctggagtagccagagagaaggatgctctgaagaaggaggtaggagctgaaccatcaatgaagaaaccatttccaggaacaagtaagacctctctttcaatagcctttttctttcaatcaagttgttttgtatcgggagattcccttaactttaatccatagaaacatgccagctttgggaacatgccactctgccaagccacgtaaccacttgtctgcagctgccaatatggaatccctctggttcttgtagaaatcaatagttctgtcaatatgagccaggaaaccctcttctccccattggtgtagaagctgtagtatcatgagctgtgagagagtacaggcatgtactgatgagacttgtgtgtggagaacaatattctgtatcaag

SEQ ID NO: 464221 - DNA, 679 bp, Homo Sapiens
  misc_feature (641)..(641): n is a, c, g, or t
tgagagaaaatcatttttatttacataagttgtttgtacatatttgaatcttgttctagtcattgactcgtttccaatatgaaaaccaaatttaaagtaagtttgccagtcttcttcaagttgttcacacatattttccagctccttcctgtcaacagattcacctccactaaattagaggtaaaatctattagtgctaattcagtgaagttgaatctcgtagacagtatgaaaacaggtcaaaactttccaggattcttctatatgtagttttctgtttgcattaatgcactggaacaagatacgtgaaatataggtacatggttattccattctgttcaaacctactaaagatctcccagaagtttcataatttcatcctgcaaattcttggaactggaagattatcctggttcaaaaatgtaatgttgacaaaagcttccagattttaagaaaaacaatcttctaattaaaagttgattggttttccaaaagctgcagccaagtttgcttctctaaaagcctctgataaggtcggatgcgcatggcagactcgagctatatcttcacaggaagcaccatattccaatgccagggccgcctcgttcaccatttctccagcacctggtcctagaatatgngctcccagcactctatctgttgacttatgtccaagaat

SEQ ID NO: 464222 - DNA, 467 bp, Homo Sapiens
ccttaaagggattttccacttcacaaaccctagcttaggttagctgcttatcaaaacccaggaaaatatgaccaattttagaccttggtaacaaactaacatgcagtcaccagccaactggtcgagtagctcccacaggggcacgtgttccctgaatctgtcactgtcaccaggaagcctgactagtgggcagggacatagaaaccaagatctaaagaaggtcagcccgcctcttatgaagcagcaaatggcagatccttgtttatgtagcagagttttaaaggaaacctctggtataagcacaccttagtaatgttcgtggtccagtgcccatctcagaacagttctgaatgacttgaccaatttggaaaccatgtggcatgtcaataccaccgtcttagaaaaggctaagttcttgtgtttggtgatgagtttccaaggcagttccagtcctaggaaatgatcct

SEQ ID NO: 464223 - DNA, 510 bp, Homo Sapiens
tctcttatcatgcttgtggaggtggctgtggcattgctggctatgtgtttagagaccaggtgaagtcagagtttaataaaagcttccagcagcagatgcagaattcccttaaagacaaccaaaaccagccactattttggacaaattgcagaaagaaaataactgctgtggagcttctaactacacagactgggaaaacatcccccggcatggccaaggacagagtccccgattcttgctgcatcaacataactgtgggctgtgggaatgatttcaaggaatccactatccatacccagggctgcgtggagactatagcaatatggctaaggaagaacatactgctggtggctgcagcggccctgggcatttgcttttgtggaggtcttgggaattatcttctcctgcttgtctggtgaagagtattcgaagtggctatgaagtaatgtaggggtggggggcgtttggtcttttcatggagtggattctccaggtttttcaattaaacgg

SEQ ID NO: 464224 - DNA, 505 bp, Homo Sapiens
ttttgcgtaccaataagtctttatttattcattgtattttcccagggaaaggagaagggaagggaagagtcagcttgtgttaaaaaatgattagaaaatgggaaaggaagtacccagtacagcaaaatcaaccatcaaataaacacaccccagtgatggggtcaccaaagcccaaaggggctcacgtctcctgcagttcaggaatgagggaaaaggatcaggaaaaaaacagacaggtacaggctttcctaccctcccgccccataaattcaagattttacacaaagctttggtttttagcagtaaacatggagttacattcgttcgtctccctattaaacaatcttggtggccactttgacataaagtttctagcacctgcattaaaagttcctggagtgacttgggatatacattcatattcccctttcttgggcctcctgaccccactttctacatggaaggcccccaattgcatctctttactttaggattagaaattaaa

SEQ ID NO: 464225 - DNA, 483 bp, Homo Sapiens
  misc_feature (197)..(197): n is a, c, g, or t
  misc_feature (340)..(340): n is a, c, g, or t
  misc_feature (428)..(428): n is a, c, g, or t
  misc_feature (436)..(436): n is a, c, g, or t
tgacagtttgagtaccaataagtctttatttattcattgtattttcccagggaaaggagaagggaagggaagagtcagcttgtgtttaaaaatgattagaaaatgggaaaggaagtacccagtacagcaaaatcaaccatcaaataaacacaccccagtgatggggtcaccaaagcccaaaggggctcgagtctccntgcagttcaggaatgagggaaaaggatcaggaaaaaaacagacaggtacaggctttcctaccctccccgccccataaattcaagattttacacaaagctttggtttctagcagtaaacatggagttacattcgttcgtctccnattaaacaatctttgtggccacttttgacataaagttttctagcaccctgcataaaagttcctgagtgacttgggatatacatttcanattccccnttcttgggcctcctggaccccacttttcctacattggaagggccccc

SEQ ID NO: 464226 - DNA, 430 bp, Homo Sapiens
  misc_feature (322)..(330): n is a, c, g, or t
  misc_feature (420)..(420): n is a, c, g, or t
ttcacaccatcaccctttcttccctctaggtggggggaaagggtgagtcaaaggaactccaaccatgctctgtccaaatgcaagtgaggggttctgggggcaaccaggaggggggaatcaccctacaacctgcatactttgagtctccatccccagaatttccagcttttgaaagtggcctggatagggaagttgttttccttttaaagaaggatatataataattcccatgccagagtgaaatgattaagtataagaccaagattcatggagccaagccactacattctgtggaaggagatctctcaggagtaagcattgnnnnnnnnncacatcttgtatcctcatacccacttttggggaatagggtgctgggcagctggtccccaagcaatggggtaaatgatgatgggcaaaaanggggtgtttt

SEQ ID NO: 464227 - DNA, 391 bp, Homo Sapiens
  misc_feature (347)..(347): n is a, c, g, or t
ctggccacagtgagactagattcacctccccatcacccttgcaggtcaggccatgcttctaggtagtgttcttttcctcaatgacatgagtgttccccagggcaacttctggatagcagcttcagactcagacataacctttcaatgtttcatctgtggggatcctgtttcttttctgttggccttagtctcccaaactcaccatgcttgtgcccttccaagggtctcattaacctgtgcctctggatccagtgtggtaccttgtgcatggctagtatacaacaaggtacagtgggggcaaatggctgggcaggcaggtaactgggagaagtacttgtagtccctcnaaagtgcctggctgcagagccctttgggactgagccttctctag

SEQ ID NO: 464228 - DNA, 558 bp, Homo Sapiens
  misc_feature (16)..(16): n is a, c, g, or t
  misc_feature (35)..(35): n is a, c, g, or t
  misc_feature (38)..(38): n is a, c, g, or t
  misc_feature (44)..(44): n is a, c, g, or t
  misc_feature (52)..(53): n is a, c, g, or t
  misc_feature (71)..(71): n is a, c, g, or t
  misc_feature (93)..(93): n is a, c, g, or t
  misc_feature (158)..(158): n is a, c, g, or t
  misc_feature (174)..(174): n is a, c, g, or t
  misc_feature (183)..(183): n is a, c, g, or t
  misc_feature (196)..(196): n is a, c, g, or t
  misc_feature (230)..(230): n is a, c, g, or t
  misc_feature (234)..(234): n is a, c, g, or t
  misc_feature (242)..(242): n is a, c, g, or t
tccgaaatagaacccncaggttaagccccaacatnggncctttngtatatcnnaggttatcctcttctgcnttcaggaagcttggcaaattgntcgagttctttctgcagagctttgatgtcctgggaacttctccgggttttgctccaagcttctcnttctccagctttcacnggaccaggngttgacggtgcanggctccggggaggccccattcggagttgcttttngacnccgaggtntgcttcaccctcaggctgagaggtctccaagccgccattggcactagccccactccaacctggggcccacagtacgccatccccccacagaactcatacggcggggggcaatggggaatcccccacacctcagagcctggcccaacccccggcccgattccatcgctccaggagggccttggaagcttagccaggtccgaggatcaacccagcccggctccgcccccctggcccatcacctccaccacctggagggggcgagaaggcgaaatctgaagccaggtgtcccgccatggggaaggaaggcgccccaagc

SEQ ID NO: 464229 - DNA, 923 bp, Homo Sapiens
  misc_feature (203)..(203): n is a, c, g, or t
  misc_feature (208)..(208): n is a, c, g, or t
  misc_feature (816)..(816): n is a, c, g, or t
  misc_feature (863)..(863): n is a, c, g, or t
ggtcccactttctccaggatgccaactgcactagctgtgtgcgaatgacgtatcttgtgcattttaactttttttccttaatataaatattctggttttgtatttttgtatattttaatctaaggccctcatttcctgcactgtgttctcaggtacatgagcaatctcagggatagccagcagcagctccaggtctgcgcacngatanttactttttgttgtttttgccaccgtggagagcaactatttggagtgcacagcctattgaactacctcatttttgccaataagagctggcttttctgccatagtgtcctcttgaaaccccctctgccttgaaaatgttttatgggagactaggttttaactgggtggccccatgacttgattgccttctactggaagattgggaattagtctaaacaggaaatggtggtacacagaggctaggagaggctgggcccggtgaaaaggccagagagcaagccaagattaggtgagggttgtctaatcctatggcacaggacgtgctttacatctccagatctgttcttcaccagattaggttaggcctaccatgtgccacagggtgtgtgtgtgtttgtaaaactagagttgctaaggataagtttaaagaccaatacccctgtacttaatcctgtgctgtcgagggatggatatatgaagtaaggtgagatccttaaccctttcaaaattttccgggttccagggagacacacaggccgagggttttgtggtgcctggagcctgtgtcctgccctgctaacagtagtgattaattagtgtcatggtagnctaaaggagaaaaagggggtttctttacacgctgtgagatcaccgcnaacctaccttactgtgttgaaacgggacaaatgccatagaacgcttgggtggtgtgtgtc

SEQ ID NO: 464230 - DNA, 699 bp, Homo Sapiens
taacatgagagtgtaaaagtggtgggggaaatgaaaagaagtctgggccaacggtcacaaaagttgtcactgttgtgacaaccaaaaaagcagttgtggattctgataggaagaaaggtgagctgatggagaatgaccaggatgccatggagtattcttcagaggaggaagaagttgatcttcagacagcccttacagggtatcaaacaaaacagcgaaagcttctagaaccagttgatcatggaaaaattgagtatgagccatttaggaaaaacttctatgttgaagttccagaactagcaaaaatgtctcaagaagaggtaaatgtgtttcgattggaaatggagggcattacagttaaaggaaaaggttgccccaaaccaattaaatcctgggtccagtgtggaatttccatgaagatcttaaattccctcaagaagcatggctatgaaaagcccacgcccatccaaacccaagctattcctgctataatgtctggacgagatttgattggcattgccaaaacaggaagtggaaagaccattgcttttctgttgcccatgtttagacacatcatggatcagaggtcattagaggaaggagaggggccattagctgtcatcatgactcccacttcgagaacttggctttacagattacctaagggtgtaagaagtttccagacttgggacttagagt

SEQ ID NO: 464231 - DNA, 397 bp, Homo Sapiens
  misc_feature (342)..(342): n is a, c, g, or t
acacagggcccccgcgacaacccaccttgtgggcagcctggatctccagccgcaccagctccttgaggggcggctgaccctctccaggaggcttgggtgtaacgagtgcgcccggggtgatgcctttccacgcagagtccactggccagcccatgccgcatggacgggcgccggctgctccgactgcccaggccagtagctcaggctgcccgcgtccacatcggcggtggtggctccctctgccattcccgctgggctcctgcttggccactgtccagtcgtttagtgccgctgccaagccctggacctcatccgcactgaggaagggccacagctcctcgngctgcacgcaggtctggatacgctccgcgcccttgctcaacagagcctccagtgc

SEQ ID NO: 464232 - DNA, 591 bp, Homo Sapiens
  misc_feature (18)..(18): n is a, c, g, or t
  misc_feature (29)..(29): n is a, c, g, or t
  misc_feature (42)..(42): n is a, c, g, or t
  misc_feature (53)..(53): n is a, c, g, or t
  misc_feature (112)..(112): n is a, c, g, or t
  misc_feature (139)..(139): n is a, c, g, or t
  misc_feature (215)..(215): n is a, c, g, or t
ccctttatccttaattgnaataattccanggttaaggtcttnccataaggggnaatctgtaaggagagactgatgcagattttctaaagcagaaaattgttccaacaagacnaggaaatcaatagttctgagagaaccnaggtggattccagactctgtggctcatagagtgaacagtaaaaggaccataaagttaaaaaacagcaggatactantttaaaaacagttgagaatgggatagtaataactgttagaataatgacagctaaaaagttagacagccacagtactatgagctttatttgtattaatctcccatagcaattccatgtagtaattattatataatcaagagaatgagggaactgaaacttagaatgcctactaatatgcccaagaacacactttaagtaaatgatgaggccacaatctcaacctagatttatctgatatttgagcctacattattcttttttatgttgtagatgtaaaaatagtattagaacatttaggtttaatatacacttctgtatattaagtataatgtacaattttgtatataggaatatatgggcatcagactgtggtttc

SEQ ID NO: 464233 - DNA, 322 bp, Homo Sapiens
tcttaagctccactgataagggattgtttttatcaaaagttactatttgtagattggaggcataattttagtgattttcatacttttagctttcttcgcataaaagctaattgaaacccgtatatgtagtaaaattaaaggcagagctgttgcagttgaattggagagttagggcaaagaacacttattagcccacacttcccacctttctacaggtggtcctttcagagctcagcctgaaaacccactactgtgttatcgtgcgtcttttggggttagtggttcttttgagaatctgaaggaagctgtggactcttcctag

SEQ ID NO: 464234 - DNA, 411 bp, Homo Sapiens
  misc_feature (22)..(22): n is a, c, g, or t
  misc_feature (30)..(30): n is a, c, g, or t
  misc_feature (248)..(249): n is a, c, g, or t
cctggctttccccacaggtggncatccggntttttgggaaaaccaccaatccatttccccaatctcttccatgctcttcccataatttctgtctgaaatttctttggaaatttcgtcttgggtaatatgtgatggtatgtatgttttcatctttagactgtcccacatcaagctgttcttcagctggtttagccatgaattttcttctcgtgtttttgttttatagtccttttgcttctagatggttnnttctgcattcttggaatacatttcatattttgtagatctaataattatttactgtttcacctatcaaagcataacttgtatccagtactgttttatcagagggctgagatgtctctactggggtgaggtttatgggaatgtttgtcatttgccaaagtctta

SEQ ID NO: 464235 - DNA, 484 bp, Homo Sapiens
  misc_feature (70)..(70): n is a, c, g, or t
  misc_feature (79)..(79): n is a, c, g, or t
  misc_feature (81)..(82): n is a, c, g, or t
  misc_feature (107)..(107): n is a, c, g, or t
  misc_feature (175)..(175): n is a, c, g, or t
  misc_feature (234)..(234): n is a, c, g, or t
  misc_feature (259)..(259): n is a, c, g, or t
  misc_feature (273)..(273): n is a, c, g, or t
  misc_feature (471)..(471): n is a, c, g, or t
gggattaactcttgcctcctgagtggcccaggtgtagaatctgaccactggggtgccatggttgtaccanaatttttgncnngtttccatgggatacccaaatttanttttttaatcctattgcatttaccatgagtcaaggcatgaagttcttgtgcgttcccatgaatgcagntgatactagcaaaggtcagcttgggtcattttgctttagttaaaggccctgggtaaaantagtgtgtgctcggaatatggggtnatataaaaatgggnaaatttccttttcttacattttgttgtaacaaattaaacagcgggtttaactgatcatccataatgtatttgattagggctctctcaatatcctttgtagcctgtactacatatgcagaatctgatacaatgttaatagactgattaaaatcttgttaacactgtaatgacggcaaccaactctgctctttgagtcanagtggactagcga

SEQ ID NO: 464236 - DNA, 237 bp, Homo Sapiens
tttttttaagaaaaaatgtctattatttattacacaataattctgaccaccaacaaccaacggcgggggcgggcaggagagaagaacatcttgcttctcaacaaactttcctcccttgctttaacatttttgaggattctttcccaaacctattacacctgtattatgatggttacaaattttccaactcttccactccttccagtgcattatttttagtatcttcattaaacgggc

SEQ ID NO: 464237 - DNA, 252 bp, Homo Sapiens
aagagtgtaatcataccacataaattttctttagatgatgtgcagaagaaactgattgagaatgcaagagtaactgtagggagaaacattttgatcactgatatgccttagaactacccaaatgaattacattgagggtagtcaaataaaatagatcatctcaccacagtcactgcatagaaagtggttaagtttaacataagacatgttggatgttataaaaacaaatactgtactgaatttagtctcagg

SEQ ID NO: 464238 - DNA, 365 bp, Homo Sapiens
aaacctaggttagagatttaaccctttaaaaaaatacattttagaacttcgtgacaccctcataaaaggcagcaaactaagggtattaaaacaggtaggtcattatttcagttactgtgcatcaagtctaaaagatccagataaagggaatgttttgtgattcaatttaaataactttaaaattggaaacatttaacaattgataatataattaaaatttaaagaatatacacaaatgatctgaataggttttatattcagtaacttgcatggtttttacactgacacttttatcattaatttaggagaatcagatgcatttccctccatatacctaggcattaagattccaaatttataaatat

SEQ ID NO: 464239 - DNA, 585 bp, Homo Sapiens
  misc_feature (543)..(543): n is a, c, g, or t
  misc_feature (555)..(555): n is a, c, g, or t
  misc_feature (575)..(575): n is a, c, g, or t
ttaggattgctttggctatttggactcttttccgattctatatgaatttcaaaatagttttatctagttctgtgaagagtttcagtgatagttattagaaatagcatttaatttatagattgctttaggcagtatggccattttatgatattggttctttttatccataaacacggaatgattttccatttgcttgtatcatctctgatttctttggcagtgctttgtagttctcattgtagggatctttcacctccctggttaattgtattcctaggtattttattcttttgtggtaattgtgaatggtattgcattcctgatttggctcttgacttggactacttttggtgtatagaaatgttagtgatttttgcatattgattttgtatcctgatattttgcctgaagttgcttatcagcttcagcagcttttgggctgagattatggagttttatagatataggatcatggttgtccggtaaacagtaataggtttgacctcctcccctaataattggaatccccttgtttccaccccngcctgaatgccnggccaggacttcccaaaccnaaggtggaaa

SEQ ID NO: 464240 - DNA, 644 bp, Homo Sapiens
  misc_feature (96)..(112): n is a, c, g, or t
  misc_feature (246)..(246): n is a, c, g, or t
  misc_feature (504)..(504): n is a, c, g, or t
  misc_feature (509)..(509): n is a, c, g, or t
  misc_feature (537)..(537): n is a, c, g, or t
  misc_feature (545)..(545): n is a, c, g, or t
  misc_feature (566)..(566): n is a, c, g, or t
  misc_feature (571)..(571): n is a, c, g, or t
  misc_feature (594)..(594): n is a, c, g, or t
  misc_feature (624)..(624): n is a, c, g, or t
caggatgaaaaaatatttaaattttattttcaatagcaatgtatgcataagaaattttgtgaatggggtaaaccactctggcataaagcaactatnnnnnnnnnnnnnnnnntctgtacatcattttgttttgataaaacccattatccttgtattcaaatgtaaaatatgctgcaatataatccagtgattttatgaacaaggcatgtccttaaaggaatctataatttaagcaaacaactcacntgtaactataatttgacacaaactaggtaaatgtgggtcatatacaacactttcaattgttgatagaatcaaacaaccatacagaaactttattgcatttagctcttcacaacagaacatatgctcatttttattatagaactaccagttatattgttggtatagccatttaaggtgggaattccaataactggtttttccaatagcaatgaagctgctacatattattttgttctggtacaaccaaaactatctccnaacanctaaaactggtggtacctcctaatgggnattaatcncctagatccgatatggtatgnggccncttttatcctaattccaagatgngggtacctccaaggtggcctcctttccccnggaatggagggcctaaataa

SEQ ID NO: 464241 - DNA, 145 bp, Homo Sapiens
  misc_feature (24)..(24): n is a, c, g, or t
aattttggttcatcatcaagccangccagcaggtttaacaacacttgaatcttctatttgggcaggttcacgtgttgttaaacctgctggctggcttgatgattcaagtcatcatggtttttcagcattaggatcagggataaat

SEQ ID NO: 464242 - DNA, 594 bp, Homo Sapiens
atggccagaaggaaggtaaaccacccctgtggtgagatatgagccagactggacctctgttcttcccagtttccttcttaaaaactccatcaccagtaactcatgcgcttctctgtggtcacgtatatttgggcattcggatagataccaactgtctttttcaacatgttgtaaacgatgccattgccatctttcctcatattgcggaaaggtccccaaataacataaatagtagtattcgcttccttgaaaaaataatcagggttttttagcaaaagaggaacgctggtatgggacacaactcgaatcatggtcatgcggccgacatcttcttcataacctttggtgggggcattgttcattctccaaatgcaggaggatcgatctatctcatttcccaccttctggccaaccatctgacctgagtttgacactatggcacaaaggtcacagtccagttgcaaaggctcttgtgtcttcacatttatgtatccatagtgagttcgaaggggccgcctgtatgtgtaggagaatggtatccactttgtaccaggttgtccaaagcagtttagtagcaatgggaaattaacttca

SEQ ID NO: 464243 - DNA, 337 bp, Homo Sapiens
  misc_feature (198)..(198): n is a, c, g, or t
aaagggcgtctcagggaacccccacattctctcacatgaagtttcccaccaggatgaccccacagccagagtcccttggcagcccctcaccccagaccccccttctaaggaaaaagagaggttcagagcgttggaccttcatgaacagtggcctggctggcgtggcagggcaaggccacccactgccatcccccttcntgtgtgtccctctcccccagttatgaggcccagggcttgagctctcttccccaagcattgcccccacccggaaaccccaccttttgggagagttaattgtctgtggtgagggtgcttaacctatcagccctggagaaca

SEQ ID NO: 464244 - DNA, 377 bp, Homo Sapiens
cacgcccatcctatatacctcacccaagtcgtgtaaataaagcctgaaacttgggaagaggaggctggactattgaggtcttattgaggttgctgtgcaaatcaagatgatcccatttctaagaaatgggctagtctggtatagaagctaaggaatttgtttaggaaaagcaggaagctcttgaatatgaatccaagctcagtggaaatgggctgagttgaattacatttagcaggtgctgctgccgttctagagaggagagacttggagggacctctgccctcactaccaggcagacctggcttggcagggtgccttgagcctcactggaacagcagttggttttcccagaactcaccccagaagcctgtgtcctc

SEQ ID NO: 464245 - DNA, 593 bp, Homo Sapiens
  misc_feature (537)..(537): n is a, c, g, or t
  misc_feature (566)..(566): n is a, c, g, or t
tacgacttaaaatatttttctgaaaaagtatatatagcctttgagtttttttactgaagtactgtagatactaagagttgatattttgtttaaaatatatttttattgagcaaataatatttggaaaattttgatgtaagttggactttattatgataagtagttaatcttaactggaaggctatcagtagatgtacaatgtagctaaattagaacctgactcttgttaataaaggaaacgattatatttactttttaaaaagtgacattgttaaattagtgaggatttatttagtgcttactgtgggcccaatacagattgaaaataaatatgtaccataaaaaagagatacctgctaaatataatgtggttaaatagcttaattttaggcattttacagacctgagttccaattctgacccttcactgatttagctgtatgaccctggcaaatgttttaatctacttgagctcaatattttagtaataaggatttttctaaggcctgataactatcagtgaagttagagcaccgntttgaagcagtctgacataccatcacgcncatggtccaattggaaaagtggaaacc

SEQ ID NO: 464246 - DNA, 429 bp, Homo Sapiens
  misc_feature (72)..(72): n is a, c, g, or t
tatgcctgccccagcttggccttccaccatggagtaaaaggcttccccaagtcctcccccagaagcaggatntggcgctatgcttctggtacagcctgaaaaaccttgagccaattaaacctcagtgagctcaagatgtctttgttgaaacagaacctcccgaagttacagtattggttttggggctccacacagagaacacatcacggaagctataattgagggagacaaagctgtcaggaccgacaccaagagagttagaaagcccaagagtggagcattcttcaccatgattccacctgacacttggctgaaagcattttgcactaatttgctttgtgcccgttcagacaatctaaaaagaaaggatggggggacaacaagtgtctattacacagaataaatcagtctggcaaatgaatacatttt

SEQ ID NO: 464247 - DNA, 624 bp, Homo Sapiens
  misc_feature (397)..(398): n is a, c, g, or t
caagtttacccatttttattttttataaaacaagctacaaatactttttcttgctcccgcctccccaagggaaaaccacacagcacagccgtacgcccatctgtgagagagaagttggctggtcagattctaaactcctacataaaggtggcttctctgtgcacatttccttctggccaggaaatgggactggagtctgctgggagggccatccagctccagcctgctgcgtgcggtgtttctgttcaaggctccaagagaaggtgttcttcccaccttaccatgcaggacagggttactggtcatcatgggacagcatgtgtgacttccaccaggacagcgggaaccttctggagctgagacttcatcgaatcaagctccgagaaggctatgttcnncacatgtgggcagcattatgtggtccatgccttccagacccaaaatagagcagggtttaccagggtggatgcatttacaggatactgagatggaaacccagggaaggcaggttgaggagagcaagccagcaaaagaaccagtcctggcctccctcactgccatcatggctgaccatggaagagctgctaagtatcacttgctgctctgactgaaggacctctgaat

SEQ ID NO: 464248 - DNA, 479 bp, Homo Sapiens
  misc_feature (16)..(16): n is a, c, g, or t
  misc_feature (250)..(250): n is a, c, g, or t
  misc_feature (466)..(466): n is a, c, g, or t
tatgagaagacatatnggatatgagatgggctgaaaccaattttagggggttcgattccttcctttcttattttacttttacataggttggttcctcgaatgtgtgatatggtggagggcagccatgaagtcattctaaatttgttgaagcatacgatactgatattacttctcgttttgaagcaaaggcctctcaaattataaagatcatgatgagaacagctgttagtgaaataaatggtcctatagnaagagacagtgtttcatgtggtgtaagcatctgggtagtctgagtagcgtcgtggtattcctgaaaggcccaggaaatgttgagggaagaatgttatgtttactcctacgaatatgatggcgaagtgggcttttgctcatgtgtcatctagggtgaagcctgaaaataatgggaatcagtgaacaaatcctgctatgatagcaaacactgctcccnttgatagaacata

SEQ ID NO: 464249 - DNA, 523 bp, Homo Sapiens
  misc_feature (261)..(261): n is a, c, g, or t
  misc_feature (299)..(299): n is a, c, g, or t
  misc_feature (487)..(487): n is a, c, g, or t
  misc_feature (504)..(504): n is a, c, g, or t
tttaatatggaattagaaacaatttggctttttagagctgaaactagaaacaacacatccaggaacagtagacttctattgtcttcaatccctaatgtcctagtgagtatgtaccctatggagaaggcagaaatgacgtggaccaggactccttacatggagagtgttttaaaggcagtttttaaaaagcccattttgtgaaagaaaccagaaggctcgtaattgctgtctgcactgtggtttctcctgggggtttggganggggagtggatttaataaaaagtttagaaggccatagnataaatatcgaaatagtatgaattttaatatatacttttaaaggggttaggcaatgatgaaaagatatgactgctttcctttcatttctcattaaattaaaattcccacaaaagtgcatggcatctttttgaaacactgctaattttaaagtttgggaaggtttatcttcatagccacaatctttgcnaaagccttggtaccggnaacaaggctccagtctgcc

SEQ ID NO: 464250 - DNA, 206 bp, Homo Sapiens
  misc_feature (40)..(41): n is a, c, g, or t
ttgaggaggtggtgtctgattgcatagagcccaaacaggnnaaacgggattgatttgaccaggtgtgtcattcacatagcaaaaagactggccctccaagcctaaccttttattatacaaatgaggcttcttacctggctgtgccatgacacctgcacatgtggggacaaagaaaagggagcaggaggctgggcgcagtggctcat

SEQ ID NO: 464251 - DNA, 420 bp, Homo Sapiens
  misc_feature (261)..(261): n is a, c, g, or t
tttttttaaagacaagagatacaattcttcattactactgataaatcaatgtagctaattaaaatcatcatcctagtttttgccaggacaacataaaggtcttaattcacccaagatgcttaagacagaaacctaagaagcatcctgaacttgttctctctcacccatcacttttaattaatgaccaagttgtatccattctattgctgaatatctcttgaatccacttttctctatccttccgccccagttagggggccntacacctgaggccaacaaacttattctgtaaagagtcaaagtagtaaatcttttaggtgctgtgacaaaattgaagatgtaatatacgtactttacataattgagagaaagcaaatttccacaaaaaaattttattggaaggaaatggttaaaatatgc

SEQ ID NO: 464252 - DNA, 403 bp, Homo Sapiens
  misc_feature (40)..(40): n is a, c, g, or t
  misc_feature (49)..(49): n is a, c, g, or t
  misc_feature (57)..(57): n is a, c, g, or t
agcctgccttgaatccctttgggttttggaaaggcccaanccccagggntcagggangacttaatggggagacttgacacaggagcttaggatctcttgagggccaccagcctcaggggtgataaaacaaaacacactcagcttgtctgtctcagtcttgcccctcagtgggatggaaaggagtctctctcccctcagtgcctacccacagcttgcacttaggtaggtctggggctggtagtcagtctgtgtaagcccaacagttccaagccaaaaatctgaagtattcatagatggtagtattcctagatgcatggcagaaaaaaatgtaaatatgtaaatcctctctgtaggaatgcattttaaatagaggactcagtttccaaagacatgagatggtcac

SEQ ID NO: 464253 - DNA, 295 bp, Homo Sapiens
ccaacagctgcattttaaggtgattctgcggtatgagtctgtatcattttataacctttcacttcccttcaaagttgtttaaattagagaattcagttagttgttgtacttggagcacagagttttccacacaggccaaattctataaactttcaatgagtctgagtactatgcttgcaggctttttgaaaatacctgtctaatcaatcctatgcataatcaaacaagaaagttgcatggtaaatgctgaagattactgtaaaactcttaaaaaggtcctaggaactataaatta

SEQ ID NO: 464254 - DNA, 365 bp, Homo Sapiens
  misc_feature (283)..(283): n is a, c, g, or t
  misc_feature (342)..(342): n is a, c, g, or t
aggacccctgctgctccccagcattctttcactgcccaactagcatgtttttgatgtttcagctacactccattacttaatattttttcaacgagccatgcctttacctgagctattctttatctttgttttcctccattgcattaatgcgcattattccttcaagagctagtccacacatctcctctgaaaaagcttcccgggcttgtctcttccagagactagttagctgtcaggcaaggcccccaccagtgaagttggtgaacccctcacagagcgggantgggtttcttgttttgcaggtccagaaacggtgtgttgccagtgccctcagtgattatnagtattctcaggactgagatgat

SEQ ID NO: 464255 - DNA, 393 bp, Homo Sapiens
  misc_feature (252)..(252): n is a, c, g, or t
tataatcttttataagtttaccactaagaataggaattattttggaggggagataacagttcatttaattggggttcaaagttagtgttccctatcattaaaactgagagcaactgttcatctataaatgctgatctgcaatgacattttatgtattttaactgaaaacgcttttcacagatgaagaggttgaagactcaaagtagacagaataatctagagtacatatgtaagaagtaatttttcataaangaagagatacctatagatgcagggtagatttatagatctagtagcagaaagctaaaggactatttatttgatactacgtactgtctcagaggaaaagcatccactggagtgagaagggcagaggtaaaaggtgggacaaaa

SEQ ID NO: 464256 - DNA, 417 bp, Homo Sapiens
  misc_feature (215)..(215): n is a, c, g, or t
ctaaggtgaggatatttacaaaggcacttgggtacagtcccctgcaatattgtaagcattccatcaggaataatagctgttactaatactgccatagacacacctttactagcaaacatgaaactcacttgtggtttctaaaatcggttcattacggaatggcatttgttgactaactcttcatccacacaccgccttgtttctgtattccacangccacaggactgtgggacctggtgctttcccaaatcaggaggtgccacccccaaacctcaccagttgttccacacacggagttatccttgaaataatttcagcatcattagaatacataaaagctgtctacgtgcatactttctgatgctcttaaaacagtttcaccactctcagatcggctttggttgtttctcaacagga

SEQ ID NO: 464257 - DNA, 416 bp, Homo Sapiens
  misc_feature (17)..(17): n is a, c, g, or t
ggaagagagtttttacntgtaatccggagaaaatgcaggtcttctttgatgcctttcatattggatgacataaatgagactgtttttaacactttattagcaatatgaagagtttcaaaagaggaaaaatgggtttttattgtaagtttacattatttgggctttataaaagcatggtcttttaaatgttcacacttccctgggcatgaatggactgtgctgtatggccctagatcgggaaaaagagctaatccgccaagcagctctgcagcagaccaaggagatggacctcagccgtggtgcggctcatgtttacagcttttcttccggatagcactggcagcttcacaaggcgcctggaacccgtgggtatcagacgccatctatgacagtagtgagtacttcacttccaacag

SEQ ID NO: 464258 - DNA, 110 bp, Homo Sapiens
agaaaatgaatttgtgttatttaaatgcgtatttgtggtaaattttttaaatgctgtttgtggtaattttttttcctgcagcaatcaacaactagtacagttttcatgga

SEQ ID NO: 464259 - DNA, 419 bp, Homo Sapiens
attattcttccctgtgtatttttctcagatggaatgtgtactcttttaatccttatatttcctgaaataattttcttacacctagagaagtgggtataggattcttgatttcaggcttttctctctgatgtctatacatatttttcaaccatcttggaatttccagtatagcagatacaacgattgttgcaaatgcattaattttattttttatataatttaaactattattttaggtactgagggtacatgtgcagatttatgacatagatatagtgcatgatgctaaggtttggggtacaaatgatcccatcatccagatagtgagcatagtatctaataggtagtttttcagcccttgccctccttcccctctttctcctctagcagtccccagtggcttattgttgtcatcttta

SEQ ID NO: 464260 - DNA, 399 bp, Homo Sapiens
tgaaaactcagtgagagtgcaccgtgtacacagccatttctggaacatttgggggtgactgcgtccccaagggaggtgtgccctccaggttcaggcttgcaagaggggtggagttccactcccccatcctacatgaatatcagtattcctgcagatggaccgaggtgcctatctgatctgaatataaaaaatcctgggatgggggcatgataggaaggtaggtcacttttgtgctggcctcatagtggagctgaggtgactccctccctcccctgtaaagatttcaatgtatttccgcctgggagctcctccagcccgcctcctatcagagctgggactttttgcccactaattgggttttgcatttaccccagctgcttcagccacaggcagttctta

SEQ ID NO: 464261 - DNA, 128 bp, Homo Sapiens
aacgttttcaaataatttattaggaatttaaaactgaaaataaaacctggaaaaagaagttacagatgtggagagaagagacaccggagatggtaacttgctggcttcgaaacaccatgtaacatctt

SEQ ID NO: 464262 - DNA, 432 bp, Homo Sapiens
  misc_feature (371)..(371): n is a, c, g, or t
  misc_feature (391)..(391): n is a, c, g, or t
  misc_feature (416)..(416): n is a, c, g, or t
gaattttatgataaacatttcatttttacaaaaactgcagaaccactttcccatctccccaaaaggtctatttttccaatcaattagacaactatttatagagcaccaatgatatataatgtactatactaagaaatgtaggaaatataaaaataagaaaaccagtaaataccttctaggggttctcagttctatggtggtaaacagatatttacacaagtattttagggatcaagacagttttcacaagaactatacagaagtacaaatatagaatggaaacaagtgaagaaaaaatttaagtaaggatatgtagaaacagggaaggtgaatctaagggacagttacgggtgacaacagggaaaacagcngaattagaccttctaaaggnaagttcagaaggtgcccagggaagnacaacttgggtaaagc

SEQ ID NO: 464263 - DNA, 418 bp, Homo Sapiens
cccattttcttttgctacccaatatatgcagcacttgtggaactcccagtgggctcccagctttaaacacaatgtcttgaacagactaattcttcaagaatctaaaaacagacaaaggtgttttgctgtgaacattctgcagagatgaggtgaggtgggagtttgaggggtggtggctgtttttaaaaaagaatcaatacagtgatggaagggaaagaatgcaagacttcagacattctgtggagggaactctctccagtaaaggtccataaaaggagcaaactgagatccgcaaagggtcagcaggggctgtttgcttccccgccccgggagtaagtttttgctgagtggccactgtagatccccacttgctccctccctttggcctgagacgtcagggcagtacaggggcactgaa

SEQ ID NO: 464264 - DNA, 435 bp, Homo Sapiens
atatatttgttacaaattaggtcacactctccccagaggagttccaaggaggaaaagcagtcaatgtggccctagaagacatatatagcaaggtaacctagggcaagggtcacaggtatggctggtccttggacagctcccacctcttcatgggaggagcaggtgtcactgccttcttctcagtggctgccattgcagaactctcgggcggccttgcctgacaccagggcctttttgtgaggacatgatgattgagggaggcacaacttcccggcggccatcacgagtacagtagtaattgttggacagcttgtgactggggcccacggggagtttcggaggtggctgggtccgcttggcgatctcctggtagtgcatgttgtcttcgcctgcaggtcttgcccagacgcccagttccgcagcttttggataacg

SEQ ID NO: 464265 - DNA, 501 bp, Homo Sapiens
  misc_feature (136)..(136): n is a, c, g, or t
tttttcacaggaacatacagcgtttatttgtcacaggggtttggctcacaccttgggggtagggaacaactcccagccttccagcttgccgatcttgaacagggcggccgcagtgccatgtagacacagcccatgntgcatgtcccatagctgtgagtgcgagctcccaatgtcaggcctcccgcgcagccaccaatgaaagtagttcagggggtcatctggcttctctcggacctgggcactgacacaggtggtaaggccaaacatcgctccaatagcagctgcagtgaatgtgtaccggccgactctggccactgcttccagggtggaatctgcggggttgagtgagacgctgtaagcggagccgaattatgccgcaaatgccgcctaaggccgtggtgatgtaggtcttgcgatgacactggggtgccgtcggggacctcatggtaagattcaaagaaccgcttcaccatcgccatacctagctgggcttgctcggcc

SEQ ID NO: 464266 - DNA, 443 bp, Homo Sapiens
  misc_feature (313)..(313): n is a, c, g, or t
  misc_feature (361)..(361): n is a, c, g, or t
  misc_feature (377)..(377): n is a, c, g, or t
  misc_feature (394)..(394): n is a, c, g, or t
  misc_feature (400)..(400): n is a, c, g, or t
  misc_feature (411)..(411): n is a, c, g, or t
  misc_feature (423)..(423): n is a, c, g, or t
  misc_feature (433)..(433): n is a, c, g, or t
ttccagtaaacattattttattttatgacactctgcattaatacaataaatatacaaaacttccaaaccactgaaaacatgcaacatgagagggccacatggagggcgtttacacagaaccggtgacataccacaggggcagcgcagtagtacacgcacctacacaatacacaaacatccctagagcaatgaaccgagccccaaatcacaaatcaccaagcaatccgtttccagtgatcagacccgagttttaaataaaacagtcaccatttaacatcgccaactaaagaccgtgacatggatgcctggtccntcgtgcaagctcggtctcatgggctggcagtaacattgggagttggantaggagacggtcaacnggctttcaccaaatcanagttgnactgctgacanactgctgctganagggacagcnggtaaagggc

SEQ ID NO: 464267 - DNA, 582 bp, Homo Sapiens
  misc_feature (334)..(334): n is a, c, g, or t
cagagttgtatttataaaagggttttaataaatggatacacttcaccaagggaactgaaaggcagaaagctgccacaagttactatcagtacacacacacaaattttcctcaatcagaggctctgataagcagcgtaagggcgcaatcgttatcctgtaaccagcctttccgttggatcgtgattggggatatttggatgacttcattgctgttcatccacatttccatacacacaattgtgggcatccctccccagtggagatgcagccttcagattctcttgagctataagccctgagtcagagattggcttttaggcttatcactttcaanggattctatctggagtgcagctgaaggatctcttcctgactgaatccatactctctaagcacttctacggtgtgctcccctacagaagggtcccttttggcagatgggacggcaggagttctggaaagcagaggtgcagggcgggggctcgggagctgctccccatcagtgatgaaggaggcccgttctctgttgtgctggtggtggagggcctcctcaaacgtcagcactggggtcacacacgcatc

SEQ ID NO: 464268 - DNA, 283 bp, Homo Sapiens
tcacaaaagcaagtttttatttgaggcaaggagaagtctgacccaaaggattacagttctaagcactcacatttaagtgttagtggcacgggcttggactctaaagcttgcttctctttggttggaaagggtacttgtgttaaagtcctccatggtgggtaagaagaaagaccaaggaaggctggaagaaacaccttggctactggtactgccctccagactctatgtcaaactaactaactctcaccatctggtttgcaaggtgccacctagtgcagagaca

SEQ ID NO: 464269 - DNA, 379 bp, Homo Sapiens
tgcagcgtgccttctgtcgagaatctgttccgacgtcaggccgaggcaaccgtccagaaggatgcagatgctgtggacaaggtaatgaaggaactggatgaaaacggagatggggaagtggacttcaaggagtatgttgtgcctggtggctgctctcacagtggcttgtaacaacttcttctgggagaccagttgagcacagtcctgtgagcagtgccttcctctcccacttgtcaagatttcccctttagcgtgcttgctcctcaccccacctgtacctccctatgtccccatctttgcccagtctcgacgtgcaccaagggcacaagagtggcagtccagatctgccacttgttttaataaagccttctctctcacc

SEQ ID NO: 464270 - DNA, 359 bp, Homo Sapiens
  misc_feature (322)..(322): n is a, c, g, or t
tatgtcattagtttatttacaattttttctagtataagagttcaagagtttaatccaattttcagatcatctcttaaactttcttcattctgttaaagggatgaattaaatatccttattttttaagtagctggtgtcttactataaagaaaggtgcggcaaacccagatccaaagtacacggtcatcatagccagcacccgccttttgttttccactgaaaatggcaaattcttccccggacccctcctcatagtggctgcgacggaccacggaggtcgtgaacctccggatactctgggccaacatgtcgctgctggaangttctgcgagggccgcagacacggaaggcggctcgtg

SEQ ID NO: 464271 - DNA, 678 bp, Homo Sapiens
  misc_feature (411)..(411): n is a, c, g, or t
ggactgaaaaacgtgatgctggctgggataccctgatcttcatagtagctcttcaggctcccttggatcccagggtgtggaactgtctgatagacatgcatgctttccatggggatccctttgtccttgagcatttttggaagagtatctcctttgatagttccacacggaaagagaagaggcagctctgaagatggctttgagcaaatatattcagcaagcttttctgcatttccactgcccgctccttctgcatccagaccaattttattcactagagaagcggtggcacttccaaccacgtacacagacttggcattccatctgtctttcagagacttctccccaggcttcagttttaattgtccttctccaaacacagcttcactgcttccactgccctggggctgngtgaaaatgagtcctccaaagccttcaggatgagacagcttttctgacaaactggggagagacataaactcaaatgacagcacaggaattcatgtgtggcttctaggccacacaatcgcagctcctggatatatggatccaggccgctgtcatcctccttggcgtcttttagtaagagaaccttcattgtgcctggcagtccttctaaaatgacgctgctgcggcagagcgaggaaatggatcttacttagatctcagactgttcct

SEQ ID NO: 464272 - DNA, 316 bp, Homo Sapiens
atgagccaccatgtccagccagatgtgtcatttttttggcccaacatttaaaaatcaggatatgaaatactaaaataagaaagaaaaaaaccagtctacatttctggagcacttgcaaaatcagcaagaaaaccagcatgctgcccatacactaagacatcatactgcctcgccaagagctctgagttcctgtttgctataaggaccagctttttaatttcctgaaaaagatcagggaccacgggcatgttctgatataactgacaattggcaatggggttgaagacagatttgttctgggccctccctttggact

SEQ ID NO: 464273 - DNA, 703 bp, Homo Sapiens
  misc_feature (436)..(436): n is a, c, g, or t
agacaacatctctaaataaataaataaatataatgtaaggcaaggcttttcccttatatctattttagggtttaccttgtgtatacagaaaaattgttccctgtccagcttattatgggctggatagcaggcagaactcctcagtttgggttagcattgcattaacagaactgccacatctttctggataatcttcctttgtgcataagctccaggctcacctttctctgcctcacagctgtgcgcatggtttcccttagctttcttgggttctggatggatactggccttctgggtgagaagggggttctttggcaaaaggtgtttttgacataatttaggaccttcttaagttctacagcagacctaaatttcttcccccaagttctttggtctatatagagtactcagcactcattacccattctcagttctnaaggaaatcttatggagcagttgtagtatttatagggtaagcagagtgcccagtttccatgccccaccccaaaccatttagatttcagtcatgtatgtcaagggaggagtgagtacatttttgtggtcagctgcctcttcttttccctaacattctcactttttcatctttcctgctttcttgaggtcatttatctattgaataggatgtctattgaaaggaaaaacctcccctaatcgcctttaaactaatatttcttactgggca

SEQ ID NO: 464274 - DNA, 620 bp, Homo Sapiens
  misc_feature (162)..(162): n is a, c, g, or t
  misc_feature (468)..(468): n is a, c, g, or t
ttgatcaggcagtttctgttctcagtgtgttagtgcctgagctgttctgtatgtagaaatcgttcccactctaagaactgtcggggctgtgagtcaaagcttcccagtggctctgctaagcccctcctgttaacatgtggtcactccatgacttcacatccntgcttccatttgctgtgtatgtttatggcctatgaggttgtatctgttacttctttctctattgtggttttaccagtgtccatgccaaatgttaactgccaagcttggagtgacctaaagcctttttcagagcatggctagatttaattgaggataaggtttctgcaaaccagaattgaaaagccacagtgtcggttgtcacaaaatgacatgctgccattcctggttgctgctcggatgcaatggaaactatgcttgattacatgtgaaaatcttaataaagtctgtgtctcagtagtataggtntcaatatttattaagaggacagtggtctggacaaaacttgttatattctaaaatcaactggtattctggaagcattttcctagaggactggaactgtagaaatttgtctctagagaaatattgtgattatccaatataatgatttttctacc

SEQ ID NO: 464275 - DNA, 473 bp, Homo Sapiens
  misc_feature (434)..(434): n is a, c, g, or t
ggcacgagcaacatcaaggctgcctgggggaagattggtggccatggtgctgaatatggagctgaagccctggaaaggatgtttgctagcttccccaccaccaagacctacttccctcactttgatgtaagccacggctcatgccaggtcaagggtcacggcaagaaggtcgccgatgctctggccaatgctgcaggccacctcgatgacctgcccggtgccctgtctgctctgagcgacctgcatgcccacaagctgcgtgtggatcccgtcaacttcaagctcctgaagccactgccttgctggtgaccttggctagccaccaaccctgccgatttcacccccggggtgcatgcctctctggacaaattccttgcctctgtgagcaccgtgctgacctccaagtaccgttaagctgccttctgcggggcttncttctgccatgcccttcttctctcccttgcacctgtacc

SEQ ID NO: 464276 - DNA, 552 bp, Homo Sapiens
  misc_feature (419)..(419): n is a, c, g, or t
  misc_feature (500)..(500): n is a, c, g, or t
cttttcccactcatccatttacaaggtcttacgatagacagtgggtttacaatggaaattgtaatttcttcaagtaaaaagaaatgaataagttgcaagtgctgatagaaagctagtacacagttttagaaaagatcagaggagggacactcaacgcagtcttgaggtatcagaaaaggtttctcacagaaattacttttaagctacgacttgaatggtcttatccaacataaggatgaggcaaggccaagggtggtttgctaacggtaggctatcatttcagggagaataaatggcatgcacaaatgcaaaggaggtaaaaagaatcattggtttaatttgttccacttgtcaatcatttttcttgttgcaattgcttttggggacctacccataaattctttaccaaggccaatgtnccagaatggtatttcctaggttttctccgaatttgtatagcttgaggtctacatttaaatcttaatcctctcaagttaatnttcatatactgtgaaaggtaggggtccggtttcattctctgcatatggctaa

SEQ ID NO: 464277 - DNA, 461 bp, Homo Sapiens
  misc_feature (48)..(48): n is a, c, g, or t
ttgcctaccctgacctcccaaagttgctgggattacaggcgtgactantttcttagtcatctttctgtaacttcctcaggccaccttccaagagtcagaaaaggctctgctgaaaacctaattccgttgcacctgaaacatgaatacctgcattattttaactgctatacccttagcactcagcccaaggccgaacacaaaattctagatgttgcatgactgttctcagagccaagaaggactgtttcaggagggagtggttccagagcgtggccctgcactgcctcagctgtttctgacttctgctgcttacccagacaggtcccttaatagctcagcgcctcagcttcctcatctatcaaatggcaatagtaatagtactaccatagagggtgccagagcattccatgaagcactacacttaacatgctgagaagtgagagttcagtgtgtcctccgag

SEQ ID NO: 464278 - DNA, 536 bp, Homo Sapiens
tgaataggagtaaaggttatttttgaaaagatgtgcattctgagctaggggtgacttctaattgggagaaatgtttgattttagacgcttaagggggccaggatggagatgagggaacagaaagcaggtcactagatacttatggatgactaaggtttaagggagagcagtaagtggaatggactatatgtttcttttaatttatgcagtttttaccagagtagaggaggtgggctttaaaattggtttcgatgattcacgcatgtgtagatatttattgagcaccttccctagatacagctatcctacataccaggatttcagcagtgaggaaggcagacaagttaagggctactgtaggaagggtgctcaagggagtcacatctgaagcaagaggagtcagtcatatagccatctggggaaagagtgtgtcaggaaaggaaacaccaagttcaagagcactaaggtattgtttagaaatggaaagaagttcagtgtatctgaaacatagagtgggaggatcatcacacggcaca

SEQ ID NO: 464279 - DNA, 494 bp, Homo Sapiens
tattttgttaaatggcgaaacccgtgaggctgctctcagttacatggcggctgtcgtcaatgccaatatgaagaaagcacagatgcagacagatgatagattggtgtctacagatggatttatgctgaatttcctttgggtactgcagcagctaagtacaaaaatcaagttagaaacagttgatcccacgtatatttttcacccaagatgtcggattactcttcccaatgatgagacgcgtgtgaatgcaacgatggaagatgtgaatgactggctgactgaactctatggcgatcagcctccattttctgagccgaaatctcctacggagtgcttctttctcaccctgcatgctcaccacctctctattctgcctagttgccgtcgctatatccgcagactccgggctatccgggagctcaatagaactgtagaagatttgaaaaataatgaaagccaatggaaagattccccactggcaactagacaccgcc

SEQ ID NO: 464280 - DNA, 502 bp, Homo Sapiens
aggattaaagagtttatcatattacttcccccccattcatacctataccactatttgtacccgaaaatgttacccaactcagtaaccatagtagtagacacatcaattattcaattcaaaaggaataagtaaggttttaaatttttactttctgtatggcaacgtccctcttaccctattctataacttctgttcttgttttcatttcctttcattcaagcagtagaaaaaatttggcactgtcacattccatcgaaaactcactctctgatgacccaactcttttttaaaactatccaaatctaagtgctctgagcatgttcaccagacaggcagcttcacaactgtaggatatttaggcaatctgttttattctattatatcttctccaaacttaattcttcttagttctgcccttctctttataaattttgcataccactaaaaagggatgatatacaagtttgcgggtattttcttgagttctctagtgctcagtcta

SEQ ID NO: 464281 - DNA, 545 bp, Homo Sapiens
acactttgatatctgctccggggacagacgaggtgagccggatgccattggggtagtactggttctcgaagagcaggacctgcatgccgtacaaggagaaggactgtcggaagctgtacgtcaccgagttcttcttcttctggaagatcttggtgaccaccaggaggtcgttgaacaggaagatttctcgctggtgtagtccgagtttctggggcttgtttgggtctggaacctcaaagagccggcagtagcagaccaaccgacggtggggcagagagcacacagccgagcccgggatgcagggatccgatcggctttttccccacaatgagcttctccaccttctgcacctgggacacatggttctcattggtctttagctctcgcttacggatccgttcatagatccccatcagcatctcacggggaatgtcctcaccatcgtccacacctcggaggttcttgatgaagtcctctagcttcattttccgctcgggcttgacattggggctgtacatgtcggtgttcagcaggatgatggcgaa

SEQ ID NO: 464282 - DNA, 431 bp, Homo Sapiens
aaggagattttaatattctcaaaggtctcttttagatcttaaattctattattctatgattcttcattctctgttcctatgtcatagcataatcatttgacatgacatttcataggcaaaaatgtcaaagtaaatacttgcaacactgaattaatgtttcaaaaagtaaaagtcagtcctagcccaagggcatttatttaaaaacaaatgaaaacagtcaattatatcaataagataaatataagttgtatgtagtcatatgtgtttatgtgtgtgtggatttaaatgattttggaaggatatacatcaaaatgttactatttctaggtaatactgttgctaggtgtagctatacaaaattgattctctttgttttaattataatttaagttccgggatacatttttttaaaaaaacaccttctcagatcc

SEQ ID NO: 464283 - DNA, 415 bp, Homo Sapiens
tgagagggaggaacctgaatcctagctgggtcaccttctagctgtgtggccccgggaaagtcatgtcactgtgccaagcctctcactgatctgtcaaacccgagggagccagtctcgatgatctttaagttcttttcctatcacagtattcagtcctgggagatggaactgctaaaggcaggctctgcatttaggaccacagggaaaccgagagagagaatttcgggaactcccagtacaggccattatcttttagagtatattagttttaatctttctcctgaaaactttaagatctctctctttttaactgcaggttgctttatccttgtcatatattagatactgaataaatgtctctgttgaaagtccatatgtttagtggaataagtccactgggccaagagtatctatc

SEQ ID NO: 464284 - DNA, 300 bp, Homo Sapiens
gaaatctttacaaaatacctagtaagactttttacttcctaagtttgttatgttttctgtttactctttacttttaacattgttgtgaaggagtgagtatacttccagaaatctgaacagtaatgaaaaatttcagatttttagatgtttttgcctcaaaaattatactgctgttacaacttgtttattggcttttaataatgtgtctaatatagattattacaattttatactctatattaattaattttgggttatttatatttatggatatttttccatttgtgcaagcgcagtgcc

SEQ ID NO: 464285 - DNA, 408 bp, Homo Sapiens
  misc_feature (223)..(223): n is a, c, g, or t
gatttgggttccctgtcaggaaacctgctgggttaagtgaattatcagtggttaatgttaagttacctctttctagtaagatagcatcatactttaaaatccttgagtcggtgagccatcttcctgccttttaagattgttctaacctgatggggtgtggtcaccaccaagtttcccccaaaggttagcttcctgcttttgttagttaacaaggcggtcgggnactaaattgaacacatttgggccacccacaggttactgggtcaaaaacttttgatacaaaggccacaggttgtcagtggccccatgttcttgagtaagcacccctaaagctacccccttgtttgcgttaatgaacaggtgaaatggtttctctagggaagcgaggcctcacaccggcgctgtgac

SEQ ID NO: 464286 - DNA, 368 bp, Homo Sapiens
gggaaaacgtgtctcctgagtcgacccttcctgtctgggggggccgaaccctggctgtctttgttcccatagcaacgaatagggctcccctatgttccagccccttagatacggtgtgccccaggaggtctctgcaggagctacaggtccttctggtgggaagggaggcgggaggtgggctggggcagccggctggcctgtgtggagacatcacacttcctggttggggacagggtgaagagggttggtccccacctctgccttgagcagagcttctagtgggtgaagcagtggggatctcctgcctgccggaagtatgggtggggcttcacatcgcagcccagtagtgtggactgaccggtcttctg

SEQ ID NO: 464287 - DNA, 413 bp, Homo Sapiens
tctacctagaatcccctgggggagtgggcagaatttcccccacctctctggccaagtacctgtttatatttcctcagtctacagttctctggaacactgttggagaaacactgctctccaaacagagggctatttcgtaatctttatgggacgacactgctttttgatgatgtaattgtggcaaagtagagttcttttaaaaagctgtaaagtgtttcagaagctagagttatgaagtagtagagactttgtagtctttggtatttagttaaacttgactttatagcagtgggttctttagttctttttttagtttctaatacctttgagaatctgatggaacctacagccccccgctctggaaaaatgctcctgtctgtgagagcttgcatatggtttcaggagattcactc

SEQ ID NO: 464288 - DNA, 380 bp, Homo Sapiens
acactccagggtcatttttcaacttctcattgtctcacacctggaacactcttcatccagggagcctacacgtgttcatcatctatctgctcaaaggcaccttaacaaagagctgttcccaccctacaagcacagtgccaactcctaacacttactgttccaccagctgctttaactttccttatagcaatttttactccaagatatgttatttatatatctgcttattactggttatatggttacttctaagagaacaaaagcattgtgaagaataaggacatggtatgttttttctttcttatttgtactgctgatagcgttggaatatagtaggctatcaaaacacaagttttgggtgtgtggtggaggcagggggg

SEQ ID NO: 464289 - DNA, 482 bp, Homo Sapiens
gttaatctttttcccagtcttccccaaagggacctacagccttctaccaggatgactgtgacttagagaaaagaaaattctcagatatttggggaattgtggacgctggctctgatttgacaggaattcccagagaccgagaacatcactgtggtcctccagagtagggacttatggaggttagctggtggatggagtgtgagctcatgtctgtttcgcagtggatccgatgtgtccctgaacccaccctgtggttggaatagacacatactcagctactttcagcatccctacatttgttgtttcacctgcggactgaggtcaagtatgatagtaaatcgcagttatgagccactaggcctggtttcacctagtaaaagagtaaaccaaaagcgagagtgcattgagtgctatgtaaatgctctccgaagggtggccttggcagagtaggatttctatactcaagcagataggatctcgtg

SEQ ID NO: 464290 - DNA, 388 bp, Homo Sapiens
gcttacgatggtttgacttataattttttgactttaggatggtgcaaatgtgatatttacttagtaaaagccatactttgaatttttaattttgattcaaaatgatttataatcactttattagtaaaacaggcttggtgttagatgattttgctgtaggctaatataagcattctgagctagacagagtgctaggctaaggcaggcaaggctaagttatgtttggtaggtccagcgtactgaatgcactttcaaagtaggatgtttttgttttgtggtagatttatccaaatgtgactcctttgtaaatcaaagagcgtctgtaattgtgctgggcctcacgtaagaaaacacctgccccagcgccctcttcagaatctggatgaat

SEQ ID NO: 464291 - DNA, 370 bp, Homo Sapiens
ctttgttccttgggggaggcggttgtgatgagttctaaatataaacatcactgagcatcacattttatgttgaaagtggcttaatgaaaaatgagaaacacggaagtaagagtgagaaaggaaaaagagtaaagtataaatttgtagcctgaataagttataccaaaggctatttataatgttgtctatgtacccatgctatgaaattatacttaaatccactggagctctgaatcacagaaagcaatcttatctgaggtaataatataaatgtccaatttcacagataaaggagggatgggattttttaaagatcactttccttaatgcggcctaattaaggatataaattaaaaaggtttttgagtta

SEQ ID NO: 464292 - DNA, 432 bp, Homo Sapiens
gataaagagggctggggaaggctacaagtaagtatatcctattttctctaatctttaaaggttttcccagcagagaaaagacagtaatcaatgatggcttttacaaagtttgaggaaagctgatcctgcaacttttcagctgcaatttcgtaatgtagacttcagcaacagcaatttcaaaaccactgcagttttaaaaaatctgagttatatactttgaagatttatcttcctaaatttctcttttatcgcaaaagtaaaaattgccatccctaacttgtgtctctgtgatatcacaaatgaatgtaatgtatgcaagggtgtgaaggaatgatatagttgacagtagcaccttgcaaatggattttttaaatttagtaacccaattaaacacaatgggtagaactttcccgagtattttgaatgaatatt

SEQ ID NO: 464293 - DNA, 632 bp, Homo Sapiens
gcaagaaagcaacttgtcccacagctccagtttctccatgtcttttgaaagagaagaaaccagtaagctttctgcacttcctaagcaggatgagtttgggaagcattcagagtttctgactgtccctgctggttcatactcattgtctgtcccagtccatcaccaccagaaagagatgcgacgcttctcatcagagcagatgccttgtcctcacccagcggaagtcccagaagttcggagcaaatcatttgattatgggaatctgtcccatgctcctgtgtcgggagcagcagcctccacggtatcaccgtccagggaggaggaagaaatgctttctggtgcggcaagcttccttcagtggctccccagaaatctcccagggcgaggttggcatggatcagagcgtgaagcaagagcagctggagcacctgcatgctggctccggtccgggtggcaccatggcccgcctgctgtgctgcctcctcttcagcaagaggacccagggaagcaggtggcgggtccttgtcccccgctgagctcggggccactgcacctggcccagccacagatcatgcacatggacagtcaggaatctttgagaaatcccttgatccaaccaacatcctatatga

SEQ ID NO: 464294 - DNA, 393 bp, Homo Sapiens
  misc_feature (269)..(281): n is a, c, g, or t
gagacacatacagttttgattgtcacatgttaaatggaatttcactttattttagcttctagctggcagtatcttattacagaggcatgctgtaacagttagttcacaagctacttatctcaacgtgtttatttgaattctcttcaactctttcgcgatacgggtgtggggttcaggatttctaagggagtcagcgctgactatacagagaaaaatccccaagggagaaagtcaggagctgctaagaaggtcaaaaagaacacaggggnnnnnnnnnnnnntgagttatgccggtgttctttaaaattgaagacagaaaaattcttggctgcactttcattctatttcaccttacaaaaacctcctgctattccaccctcctcaagtatactt

SEQ ID NO: 464295 - DNA, 211 bp, Homo Sapiens
ggaggcacaaaggtgaataaactcatcaaggagcttacagtttaatggggaagacagagacattatcaggtacttaaaaaatatgctgaagaccttagctaaagaaactttagaaatcaataatatggagttttccccaaaactaaaaatactctgcccccactgtgttcacaagatcagcatcaagcaaagattaatctcaagacttgtt

SEQ ID NO: 464296 - DNA, 418 bp, Homo Sapiens
  misc_feature (133)..(133): n is a, c, g, or t
  misc_feature (136)..(136): n is a, c, g, or t
  misc_feature (353)..(354): n is a, c, g, or t
  misc_feature (394)..(394): n is a, c, g, or t
gggtccacgtggagtcggcgatgcgcgcgggaaggctgacagcgcccccataactgcacgccccccatgtccagcaaccaagggtaacgccagcctccgagacccaaacgatgtctgtgcaggctgtgctagnatngatgcggcccctgcccgggcctgggctggaggcagaggggtcccatgggagagcacaggctgaaagagggttctagaatggggtcaggtggagtctgcacactggggcgtttatttctgagacgcccaagcagccccaggggagatgaccagctctgggcggtgtcggggaggctgagtccagtccagggctctgcacacggagggtcccggcagcnngagtttggcattcctgcacacggagggtcccggcagaggnagtttggcattcctgcacacggag

SEQ ID NO: 464297 - DNA, 352 bp, Homo Sapiens
tgaccagtttgcctcccagctcagcagcccagacaggctcctacaaacaacgtcacaaaagaatcctgtggagaatgttgcaaacacacaaccttcccctcgcttggctgcccatgatcccataaacacaactggcgcattccacctcgagcccctcacaccagtgccaactgacccacaggcccctgagacataccccggggttcctcgctcctctcatgatctttgggatctgagttctagacgcgcagccccatgcaacgcgctcatcacagacatgcaaacccatccatcgccctcttcaccactggaccacacctcagcagggccacagaaatgggaccagacgtga

SEQ ID NO: 464298 - DNA, 209 bp, Homo Sapiens
gccaggggcacatccattagtcccggacgcatgtttagagatttggatgcagattttaggacacagttctcagatgttctggatctttatctgggaacccattttaaactggataattgcacaatgttcagatttcctcttcgtaatgcagaaatggcaaaagtttcggaaatttcgtctgttccagcatcagacagaatggtccagaa

SEQ ID NO: 464299 - DNA, 421 bp, Homo Sapiens
gaaagcctgaaggtagaaggctgaggctttggctgggaaatgccctgtctggagtgagaagatgtccttgggcctctgaagtagctctgcctccttgaaagcaagagcctgtcatgcctctatggagggctggcttgtccttacccatggccagagaaccagtcagtaacaaatgtcctctgtgtcttcagccttgaggaaggtgacacccctgtctcatgggaccctggcaggtactgggaagctggaaggaaggagtagctgttggaatgaagtagctgatagagagggtagcttgcagggggagactctagcatgggttcaaagatggaatggggcataactcagcaaaattatgctctaaggagtatctgaccaggcagtagctggttaaacagggattagctcccatttccacagt

SEQ ID NO: 464300 - DNA, 325 bp, Homo Sapiens
attataaagttgtaaaatatgaaagaatcaaatttctggtgattgctttgaagagttctgtggaagtcctatgcgtgggcaccaaagccatatcaccaaatttatggcctttaagtcatttggagaattggtacataagccattactggtggatctcactgttgaggaaggccagaggttgaaagtgatctatggatcctgtgctggattccatgctgttgatgtggattcaggatcagtctatgacatttatctaccaacacatgtaagaaagaacccacactctatgatccagtgtagcatcaaaccccatgcaatcatcatc

SEQ ID NO: 464301 - DNA, 299 bp, Homo Sapiens
gcagctaacacagcaagatcataccagttaaccttcctggttagaagacctgagcctcctgacttccggtcactggatactctctgttaggctcatgatttaaactctgtagtcactgctggcttggaaacctctaactctctctgcctcttgacagtgttccctcaagggagtccattagccaggactaggttacatgcccctgtgttagctgtgagggacaaggcagagaaataactgcccaagttcagcttcccataatgtttgggggatgctatgactcaactttgatctatttt

SEQ ID NO: 464302 - DNA, 700 bp, Homo Sapiens
  misc_feature (46)..(46): n is a, c, g, or t
  misc_feature (56)..(56): n is a, c, g, or t
  misc_feature (81)..(81): n is a, c, g, or t
  misc_feature (85)..(85): n is a, c, g, or t
  misc_feature (89)..(89): n is a, c, g, or t
  misc_feature (94)..(94): n is a, c, g, or t
  misc_feature (100)..(100): n is a, c, g, or t
  misc_feature (123)..(123): n is a, c, g, or t
ttcaaccgatttgggaggaacccgaatttttttaataacagaattnttcccaatanatttcatcccgccgctattggcatnttcnactnaattnaacttnttccatttccgggatggccgagnccgtgcagcgagaggctgtcacccatgcccgcgtccaggccgtgtgcgccgaatgcagcagcacgtccggccggcggaccgagtggtagtccctccgggggtcaaggcccgagagctggggcaaggcggcccgaggctggggcaggagagagccggcttccgaacccacttcttgccgctgccgttgcccccagggatgttgctggggctggtgcagtgggttcagggagtaggggtcgttgacgtgggagtaggggtcctggctctggtggtaggggagcggctggtaggggggtgggaagtagggcggctggaagtccgacgacggggtgtgggacagcggcggggcgctcgagtagggtccttgggacaccgagcccagctgggagagccgcgagctgtggctcgggacaccatcgtgccggtcctcatagatatcttcgtacttgacattctccacaagcttccagagcatgatggcagcctggtctctaggaggtgagtgcattcatgtgaggagcagatgtctggcttctcaggactccgctgtctgtaatgatccatctataattggaaa

SEQ ID NO: 464303 - DNA, 698 bp, Homo Sapiens
  misc_feature (45)..(45): n is a, c, g, or t
  misc_feature (91)..(91): n is a, c, g, or t
  misc_feature (93)..(93): n is a, c, g, or t
gattatcagctgagtcgttcccacagcaatgagaacccagagagnaaatggacaccagtgatttgaaacacattgcacaaaaggattcaantnacacatcgcttcaccaaagacccagtggtccattaatgtgtagacaaatgtaaaggggagacacatgatggcaacaagcaagtctgagaaggaaaggttcacaatcaggatgttggtaacatttctcatctccttttgtttcaagatgattatgatcaaggccaggtttccagagacaccaagaatgatcacagctccataagcaagagctaaggtaaatatcatggccaagggcagatgacaatcatcattttcaaaagccagaagctgggcattcttctctgagaaattagagtggactgaatgattttcaacctgggaaaataatgttgaattcattttgattggtttggttgttatagattattttagacaaatggacagtatgtttcttcaaagcaggtcaactgttcagcttattcttattccccatattggaatccatttaccaaaattattctgaattcttcattcccttgaactgaacaatcctctttggaatttgtctttttcgctcctgcttattaaagaaggaagggtgggaatggaagggagcagagtggggaagatccgctggtatttctcctgctcagatcctaaagatt

SEQ ID NO: 464304 - DNA, 622 bp, Homo Sapiens
ggggaaaggaggaaggaaacgaacgagggggagggaggtccctgttttggaggagctaggagcgttgccggcccctgaagtggagcgagagggaggtgcttcgccgtttctcctgccaggggaggtcccggcttcccgtggaggctccggaccaagccccttcagcttctccctccggatcgatgtgctgctgttaacccgtgaggaggcggcggcggcggcagcggcagcggaagatggtgttgctgagagtgttaattctgctcctctcctgggcggcggggatgggaggtcagtatgggaatcctttaaataaatatatcagacattatgaaggattatcttacaatgtggattcattacaccaaaaacaccagcgtgccaaaagagcagtctcacatgaagaccaatttttacgtctagatttccatgcccatggaagacatttcaacctacgaatgaagagggacacttcccttttcagtgatgaatttaaagtagaaacatcaaataaagtacttgattatgatacctctcatatttacactggacatatttatggtgaagaaggaagttttagccatgggtctgttattgatggaagatttgaaggattcatcca

SEQ ID NO: 464305 - DNA, 1011 bp, Homo Sapiens
  misc_feature (432)..(432): n is a, c, g, or t
  misc_feature (490)..(490): n is a, c, g, or t
  misc_feature (503)..(503): n is a, c, g, or t
  misc_feature (573)..(573): n is a, c, g, or t
  misc_feature (600)..(600): n is a, c, g, or t
  misc_feature (654)..(654): n is a, c, g, or t
  misc_feature (730)..(730): n is a, c, g, or t
  misc_feature (754)..(754): n is a, c, g, or t
  misc_feature (760)..(760): n is a, c, g, or t
  misc_feature (781)..(781): n is a, c, g, or t
  misc_feature (796)..(796): n is a, c, g, or t
  misc_feature (807)..(807): n is a, c, g, or t
  misc_feature (815)..(815): n is a, c, g, or t
  misc_feature (820)..(820): n is a, c, g, or t
  misc_feature (841)..(842): n is a, c, g, or t
  misc_feature (849)..(849): n is a, c, g, or t
  misc_feature (865)..(865): n is a, c, g, or t
  misc_feature (869)..(869): n is a, c, g, or t
  misc_feature (880)..(880): n is a, c, g, or t
  misc_feature (892)..(892): n is a, c, g, or t
  misc_feature (915)..(915): n is a, c, g, or t
  misc_feature (928)..(929): n is a, c, g, or t
  misc_feature (949)..(949): n is a, c, g, or t
  misc_feature (955)..(956): n is a, c, g, or t
  misc_feature (958)..(958): n is a, c, g, or t
  misc_feature (961)..(961): n is a, c, g, or t
  misc_feature (992)..(992): n is a, c, g, or t
aaaataatgttattgcttccagatgcagagccgaaatatctgatagttgtgcgacctgctccacctccaagtcaaaagaagtcatgttcaggtaaaactcgttctcgcaaacctctgcagctggtggttggcactctgacaccgagctcggtcttcctgtcctggggtttcctcatcaacccacaccatgactggacattgccaagtcactgtcccaatgacagattttatacaattcgctatcgagaaaaggataaagaaaagaagtggatttttcaaatctgtccagccactgaaacaattgtggaaaacctaaagcccaacacagtttatgaatttggagtgaaagacaatgtggaaggtggaatttggagtaagattttcaatcacaagaccgttgttggaagtaaaaaagtaaatgggaaaatccanagtacctatgaccaagaccacacagtgccagcatatgtcccaaggaaaactaatcccnataacaatcatcnagcaagtgattcagaatgttactcacaaggattcagctaaatccccagaaaaagctccactggggaagantgatactagtccaccttattattccangtcttaatgaaactactgtaaaacttcctgcatccctaatgtttgagatttcanatgcactccagacacaattagctaacaatgaaaccttggcattacctgccgaatctaaaacaccagaaggttgaanaaatctcgcccgaacccacaacantgaacncctgaaacattccaaaaaacnctaaaaccccctacnttctaatggcnttaaaatntttcnaaaaacaacactgggttctcnnccaaaanggacccccggaaaacnttgncaaactattcntaataccccccnttttgaaaattgcccctgaaacntcccaccctcccnntttaaaaaccctgggatttntgcctnncnccnaaattttttgaaaaaatcccaattttctccncccccaaatggcttttttt

SEQ ID NO: 464306 - DNA, 566 bp, Homo Sapiens
  misc_feature (65)..(65): n is a, c, g, or t
  misc_feature (228)..(243): n is a, c, g, or t
  misc_feature (333)..(333): n is a, c, g, or t
  misc_feature (401)..(401): n is a, c, g, or t
  misc_feature (407)..(407): n is a, c, g, or t
  misc_feature (418)..(418): n is a, c, g, or t
  misc_feature (448)..(448): n is a, c, g, or t
  misc_feature (467)..(467): n is a, c, g, or t
  misc_feature (489)..(489): n is a, c, g, or t
  misc_feature (499)..(499): n is a, c, g, or t
  misc_feature (507)..(507): n is a, c, g, or t
  misc_feature (514)..(514): n is a, c, g, or t
  misc_feature (537)..(537): n is a, c, g, or t
acgtaacttccggtgtacacagccggtccaaggcggtgcgctgggggccggggcgcgtctcacgnaaaggacttagaagccttacaaatacatctgtgcattcttgcttcagactttacaactgagggccagcccagtctggaagcatctcttattaatgttacaaggaaaccgctacctcagcaaacaaaaggaatggaggaggagacttacaacaaacgccatttnnnnnnnnnnnnnnnncttgttttcaggaaacattagaggaaatttggagaatttcagcattgcatagaaacagccttacagtactttcctcacagatctcttcancactgtgttcaggaactctcactactcaaaggcagccacacagctcaaagatgtgcaggagcatgtcntggaancagccagtcanctgactcggtcataaagcctgagatcgccnagatgctaatggaacttantgctggggctgcaaattttacngatcacaaangaattcantctccangacattgaagtgttggggcgatntttcctgactgtggtgccagtccatttcc

SEQ ID NO: 464307 - DNA, 856 bp, Homo Sapiens
  misc_feature (46)..(46): n is a, c, g, or t
  misc_feature (48)..(48): n is a, c, g, or t
  misc_feature (54)..(54): n is a, c, g, or t
  misc_feature (70)..(70): n is a, c, g, or t
  misc_feature (140)..(149): n is a, c, g, or t
  misc_feature (151)..(151): n is a, c, g, or t
  misc_feature (170)..(170): n is a, c, g, or t
  misc_feature (208)..(208): n is a, c, g, or t
  misc_feature (211)..(211): n is a, c, g, or t
  misc_feature (216)..(216): n is a, c, g, or t
  misc_feature (218)..(218): n is a, c, g, or t
  misc_feature (225)..(225): n is a, c, g, or t
  misc_feature (230)..(230): n is a, c, g, or t
  misc_feature (233)..(233): n is a, c, g, or t
  misc_feature (235)..(235): n is a, c, g, or t
aaaaaattttcccaaggaaggattttttattcccaaggggaccggnanttaggngggttttccaaggaanataaattggccaattttggggaaagatttttgtttttaagggattggagaacccaaataacattttagtnnnnnnnnnnanggtcccctgggaaggttanacagattaacaaggcccttaaggtggcgtagaaaattnatnaaaantnttttccnttagntgntntaacaagtttccggacagctcacaggatttttccgcgggggggagccacttttacatcacaaagctgtcctgcaggatctaactgcacttccacatagaacatatctgacgtgatgtaacattcagtgccactggcactgagatgagagcccagtccattctgtcttgctatggactccaaacgatcagtcattgctggtaaagatgttactttgagagccttctgcaatgtctccaaacagctgaccaaatgttgatgccttccagaactcatcacaaccttcttctccatgacttgacgcacaagcttaatggtttcactccagggtctattttggttaaattttgcatggagccgttccaggagagaactcatcttactcagcttttctgactccctcggtttccccctgagctttcatcctgaaggcgaggagaagctagatccgccacaaaaggataagcccttccccaccactaacggaggaaacaagttggctcgggatcccgggacgcagggcaccagcagtccctactcttcccgggaaggatcaatctgaagtcccccggcggcaagaagagaagggtgctcgaggccgccgccatcttccccaacggaac

SEQ ID NO: 464308 - DNA, 695 bp, Homo Sapiens
  misc_feature (19)..(19): n is a, c, g, or t
  misc_feature (30)..(30): n is a, c, g, or t
  misc_feature (36)..(36): n is a, c, g, or t
  misc_feature (48)..(48): n is a, c, g, or t
  misc_feature (50)..(50): n is a, c, g, or t
  misc_feature (54)..(54): n is a, c, g, or t
  misc_feature (61)..(61): n is a, c, g, or t
  misc_feature (76)..(76): n is a, c, g, or t
  misc_feature (89)..(101): n is a, c, g, or t
  misc_feature (151)..(151): n is a, c, g, or t
  misc_feature (172)..(172): n is a, c, g, or t
agcccgggaccccattccngagccgggggngccttngggttccccctngncttnccccttncccggagcagggggntcggcggcggttnnnnnnnnnnnnnagtaggcgttttcgaagaaacggtcgaaggcttgaggcaggacgctgttnttgttgactgaggagtagaanccggcgggggttgcgtgcggggcgctggggtggtggtgcccccccgtaggagccttcgtttttcatgaggatttcggtgacggtggaaggaggcaggcactcccggtgcataagcttgtcggccgccgcatagcaggaggagtagctgttccgatggtgccacttgccggatggctccaggccgtaggagacctcccggaccgggggcacttgggccgagtagggataggagatctgacgagagggggcctggggcaggaaggaggagaccgtggagaactcgggcatgtagtaagtgcaactgggcagatagaggttggaggcgcagctccctcgctcgccgaaatctgcgcccctctccttgcgcgacggcgagcagaagttgcccaggttgaccgagttaaacatcgttctcctctcctgccggctccggatggaggttttggacccggtctagcgaggggggaaaatttgggaaggcgagatgacgcgttatccgtcttagtctctctctctctgagca

SEQ ID NO: 464309 - DNA, 525 bp, Homo Sapiens
  misc_feature (47)..(47): n is a, c, g, or t
  misc_feature (385)..(385): n is a, c, g, or t
  misc_feature (434)..(434): n is a, c, g, or t
tccccgtggatcatgtccccatccttccatccagcaccataatcttnttctgcagaatggcattgatctcatcccgcagggttttcttcagactttcgggttgcgacaggtcttggagcgcgggtgacatgttgtcgagtctcctccttgcgcagagggcgcggcagagaagacgtgctctccacaggtgacgacggccaagggccacgccagccagcgccaggcgagcctgccacacaaggcccgggtcttttgacgcctcccgttggctcgcgtcgcggggggactgcggaccccgtaagcccgcagcgccctagggcctctctcggggctgggcgcggcaactgctggagcacgtgctttcttcccgggtacccggccagtnctttggtgtcggcctagcagccagacacgcgcggccagaggcggagtcngcgggacggcacggaaaaggacccaagagaaaaccggcggaggaggacgacgtgacatccggctctgagccccgcagacatttagaacctt

SEQ ID NO: 464310 - DNA, 582 bp, Homo Sapiens
  misc_feature (17)..(17): n is a, c, g, or t
gctctccaagattggtntcctctttgcccacttcttgttgtattcccagtttgtctgacagagttaagccagtctattatagagtcaccattagacacatcatctgaagagtctcctcctctattttcatctgagttttgcggtggtgggccttctttaatttgctgtagtcgtctcagcaactcttcctcagtactttcacctggggtgcctagcaaattgttatctctcataagcctataatcttcttcactcaggttatttacaaattgatagaaagcttcttctcgatccaatcggtccatctgacttctgcgctgtgctgcagactgatcaccacttcctttgtcattggaatctgagttttccatattgatgaacaagtggaaaatactaggttttagggtcaggatccgactcggttggttcggccgccgccgccgaggctgctccgcacctccctggccgccgctctcaagcccgcctccaatgagtagctggttgagacccgcctctagcccagcgcctgctcggagacgttgctcaggcagccattatcttcccccattgttaccaagcagc

SEQ ID NO: 464311 - DNA, 604 bp, Homo Sapiens
  misc_feature (41)..(42): n is a, c, g, or t
  misc_feature (46)..(46): n is a, c, g, or t
  misc_feature (164)..(164): n is a, c, g, or t
tgcagacatttttttcaaatattcattgtaccattttgtgnnactngaatcgttctatcattcctgtcattagcattttctccctgttcttgttcaacataggtttctctatggtgctcattagtgaaagtatagaaatgcttctcttggttattagtcacatntcggatgcgtttatatacgggggcactgcgatttctcacttcttgaagaactgtttgtagcacaataacattcgtgatggcagggtcttcaagaacatcaatctggtgcagtaacacattagtgtcgggcagcaagtagtgcggttgcgggcagacgctgctcgccgggtcctggggctgcggctccagggccggcccttcgtgcgcccctccacacgctgcgcacccgggcgcaccgcagccgatgtcgtctcgcaggtagtgctcgcgcacgatcttcatcacgccgcccgcccgggtcttttttaagaacgtcttggacttgagcatcttgcctcgccgcgcagaatcctaaccccagcagcgctcttccagcaaaaggcgtcaatctagaatacgcctaaccccggagttcttccctttccattcccggatattag

SEQ ID NO: 464312 - DNA, 821 bp, Homo Sapiens
  misc_feature (663)..(663): n is a, c, g, or t
  misc_feature (752)..(752): n is a, c, g, or t
  misc_feature (775)..(775): n is a, c, g, or t
acaggagtgtataaatcctcacaatcttttttagtaccacaactagcatggaccagtttaccagtaactgttgcagccttactatacgccacataacccccaggattctccaccaggtaatcaagtcagccgttcttatcatctatgatctccgagttttgagcgctgtctttgacatgaatcttaacataatgttgatcacgccagactttggtgagtttaaattcaggaaattgattttcaacatccaacgcaagatcttcatctttttgagatccagcctcacgagggacatatgaattttcattcagcagctcgatggtgccggtgaagtctgtgctgtccagtttgtccgacaactttctcttcaggtcatcccaatataagcgacgtgctgcagggaagtcctctcctggctcctccctcactggagactcggttcctgccagtctctcacactcagtttttggttctacccctttacaatagcccaagtagccaatcataaatccaatcaagaaaaagacgatcacagcaatagtcccatagcagatacttcgcactacacctttttggttttgtgacattggcctttgtgttattgtcagcattttcttcttcatctacagcaagtttcatctccacatgactgttatcgccatntacttgccgagccaggctgaaccgggtatatgacaatggttctccaccaaacaagttagagaatgctgatctagcttgatccatcattntgaactgccacacagaagaacantagcgcgtcctccgtcccgagccgccacccgatatcccgacgctct

SEQ ID NO: 464313 - DNA, 655 bp, Homo Sapiens
gacaggagttgccagcttttagatcagcttctgcggaggcctcgagggtgacccccatgctgccttctgtcatcgcctcgtcctggagggcgtctggcgggctggaaggcagagccttgcctgagactgcagttacacagccatgagctgcttttgttccgaggactgccgagatatccgtggaatccttcgtttctattgaaaatggcctcacgatggaaattttgctaaaatcatgttcaggttcttctctgaaattcttgactgagtgagagtcaatggcctgctgtggcacttcattttctgaaggtttagaacaagtcttagatgaacatttttcaaccacttctgctacaagctgttcatcagcttcttgtgattcttggcttttggccccaggtcctgccaatccgagtgatggatcacaggactccttgaaaggtgatcggatcggggtttcagcttcaggagtctcaaaattaccttcagaatccgaggcggtctccgtgggtctcgggtgcctctccccggcgggttcccggcccctcggggtctgagagtgggagcctcccatggcgcagaacttggggccggggctgcaccctcctgtgctgggcggcgggcggctgtgcccagacctgggcggggaggcggt

SEQ ID NO: 464314 - DNA, 975 bp, Homo Sapiens
agcctcccggaatctgagtgatgatgtagccccaaaagaaggaaccgtggatcatccccacggtttccgggtcccagttgaatttggctttctccttgatgaccttgcccccgcggtggatggtgctgttgttgaccatgtccacaatggccacgcccaggttgcagcggataccgaaggagatgcagaagcccaggccgctcatgatggcgataatgtagcggcggggcaggccgaagcacgtgcagtcgcacagcggcgccttcctctcgggcacctctaggggcttcccatcctccgtcagctcgattgtctccccggtgtcttgcttcttctccagcaccctgtagatctggccgagtgattttccagcaaaattctttagcccctcttttcctggggccaaaatcctttgttttacggattccattcttgcaaagactgttgtcagttcttgccagatttaaatagtgattgctaggaaaggcgaggattgcgcatattgtcttaatctcttaaagtagttgcgggcttttccttctcagcagaatggtagtggctcgcctccagcaagagtgagagtgagagaagggagggagagtgagaatgagaatacaacagaatagctgcatgcaacccacgggtttcctaataggagagttggtagacacaatcagaaagtctcattggaaggggagtatccggtggcaaagagcgcaagcagtgccacggtatttgggtagatgcggttgagtccttttcctggaagtcggtcagctgaaaaacaatgtaaattcccggttttgaagacttattgctctcaaatctgatggcttttaaacggaggggccggaatatcacagaagccttgggaacagcaaagtcaaaagaatggtacttttaaaaatggtgtctttgctgtaaggagcagagcatattcaaaactcatgggagctctcagtctcaggtgagcat

SEQ ID NO: 464315 - DNA, 584 bp, Homo Sapiens
cagccttcaggctgtccagagtaaaggtctctgcagaagtcagatgggaccccatgatggaagtgcctgccttcagctcttggtttttcaaaacctgggaatgaacggaatgggtcacagtggggcacacagtgcctgctttatgtttagcctccgggaaggcattcactcctctattaaatgctgtgtcatccataatgcaaggtgaaccgctttggctttgctggcctgttgagttcctgttgatggcatcagcagctgacgtacagctcaattcaggcacctgatgttgagagagaccctcaacctctgagatgccactgttggaaagagcttgctgacccacattcaagtctttaggcatgccctttggggtttcctcaagtgctctatgaagagatctggtcctggggttttcaagtgctatgacgcgtggtatttttaaattaagacctttggtttcaacacctggagtgttctcagtcctgccatcaggaagacagtgtccttgagcatcaaactgcttccctttccctttggggatgtgtatgtatccggggccctgctggttgtcagcatctaca

SEQ ID NO: 464316 - DNA, 659 bp, Homo Sapiens
atgaaagcagttggctgttgtacctctcatagtccaggttcaattcaacatcatgggttagtttaatcacgaactgaccagcgacctctgcagctgctcgtgccactttgttcaactcaggaatcctctcaatcagttccttataggtgtccatggtggtacccaaataaggataatctgtgtcctcgcaaaaacagaaagaaactgctgggattccagaatatgcaaggaaagggaaagcagcattgtctaaagtgagtttctcaactttgctggcccagttgctgtcctgatatagaaattgcccagtaaccggatgcttcacattttgcattgttttctcaataagcgtatacaacagtgggctggcagaaaccttgaagttgctggtaccaagaaccgctttatccagattaatataagtgaaagcctttaaatgcagggacgaaaggtatccctctagccattcagtggcaccaaccgatccaaagtctccagcactccaactggcaaagataatgcttctgctgggctgaaacccatcttttaagaccatatctgagaacatctgggcaagtttcaataggagagctgtgcctacaccggattttgcagctccagggccccatgctctctctgggccccaactacaacatagt

SEQ ID NO: 464317 - DNA, 584 bp, Homo Sapiens
  misc_feature (151)..(151): n is a, c, g, or t
caaatctagaattctgtttccataatcaattttggctgtgaccttcttcttcagttctttgagttcatcctgaggcagagttccagaaagaatttgtgatcgccattcaataaggtcatagatcatgtgccgcacacttcgaaacattctnccctgttatcttgcacgtagagctgcctccagatggtggaccactctcggagtgtcgtggtgacttcctggatgagggggaggtcacccgggatgactgtttcatgttgcccttttccttcaactatcgcttctttaagatgaatatatgaagcaggaaatatacccttcttagacttttttcgtaacgtgtaacctcggtaccacccttcatatgtttctaagatgtgcacagtgtctccgatctgtaaagaaagttcatccgctcctctggcatcatagttataaaaagccacgccgtacttctcctcgcgcttggtgggcacccagcgcgtcatggcgccgccggagccgccgcgggtcgggcaggaaactccgcgtctaggccgccattttccatccttcgagccgcgacaggatggggaggaaaaaaa

SEQ ID NO: 464318 - DNA, 618 bp, Homo Sapiens
cgtgaaaaatggtagtggctttctttaaggttgtatgtctttgttttcacatacagtaaatggcagttgtaaaaaatgctctttttgtagaatcaagttagtgctatagttttgcagttttttcaatatgtggaacaatgtttatggaaaagttctgtgtgaatgagtagcttgcatctaaattccaaatatttaataggttttctttagtaatcatcatgcaagaaactgaatacctgtggttcttttctgcatgaaaaatgtggcatccttatcatttgttaactatggcatgtttatatttacattggaggatctacccctcttcccttttcagcagcaggtcctttccctgtttggtgcagattgtgtataatcattgttggctgccttgtaactccagctaacctgagagtcagatttcaaaatctgcctttccttttaatccctcacctctgtgctgccttcaagttaccactgtgtggctgcataggcatgtcgagttgttctgccatgagattcatgtcagtggtgctgttttcttacacgtacagtgaactacacttacagcgtgaatgcgtatctttattgtaaagatcgaaatgtattatataatag

SEQ ID NO: 464319 - DNA, 598 bp, Homo Sapiens
attttaatcctcttgcttcaatttcccggatgcatatgtctaccaccatgggtctctgagtgttgtgagccttcacaagtgttgtgaggtcacaacagtacactttcttgatcctcttgagatcaggttggcagtcattgggaacgtgcttggaacactgtttgtgtacgttcaatccacagtctgagcaccggaccccttgggcgatgagcccccacatgaaattggcacaatattcacaccagtgtgggcctcggaacgtgtggaccttaaagttgtgtgtcttctcataattgaagtggttgtcgttgtgtgtgagggcagcccttcgaaccagggaggagatctgtgaacaggcaaagagtttgagagggggccaaagaaagccgcctttgacacccaccttcaccccgaaggctacggccagcagttcttggcgtttcctgccctgcttagacttccgaaccacagcacactttttctcattttccagccacagttcttcagagaacatagtgcctggatcccagctctttccagtttgctctgcagagcccaggaagccctgtgctgtcaggattttcgaaccgcagcttat

SEQ ID NO: 464320 - DNA, 587 bp, Homo Sapiens
  misc_feature (542)..(542): n is a, c, g, or t
actgagcacgcccagcccagcacctgatatgtccaccgaatctcccaggatttcagaatggaaggggctcgtccacctcctcgtcctccatcaccggggagacggtggccatggtgcactccccgcccccgacccgcctcacacacccgctcatccggctcgcctccagaccccagaaggagcaggccagcatagaccggctcccggaccactccatggtgcagatcttctccttcctgcccaccaaccagctgtgccgctgcgcgcgagtgtgccgccgctggtacaacctggcctgggacccgcggctctggaggactatccgcctgacgggcgagaccatcaacgtggaccgcgccctcaaggtgctgacccgcagactctgccaggacacccccaacgtgtgtctcatgctggaaaccgtaactgtcagtggctgcaggcggctcacagaccgagggctgtacaccatcgcccagtgctgccccgaactgaggcgactgggaagtctcaggctgttacaatatctccaacgaggccgntctttgatgggtggtgtccctctgccctaatctggagcacctgga

SEQ ID NO: 464321 - DNA, 587 bp, Homo Sapiens
atgtcaatgctatttattccagtttctgacaggtcaaacatcactgttacaggtttcccattttccctcttagcataacgttccagccagaatgctatgagcttctttttgtccaatatggttttctggtcttttacatgatacttcaccctgatccagaacaatctgttaccttctttgtcataaccatggagataaataacaccaatttccaataaccatctgggaatggaggattcattaaggtcattgacagaaatttctttcctccactgaaaactctcatcgagcatcttcagtgtttcatctacaatattatgtctccaagataagtaactttcaacccagttatcatcttgttgtagcctttcaacatcacgtgcatcatatttatctgacttatctgtcacatactcagcttcgaacctcctccgggtctcagagatgagcttggctttattctgggcgtgattctctgccatgatcaccgtcgtggatgtgattgcggttgtcgccgtcgcccgttctaccgtcgccgaccgagtatctcatcacccggcagtcccgcccagaggtagacagagaag

SEQ ID NO: 464322 - DNA, 594 bp, Homo Sapiens
ctgggattttaccaacatctcattgcacacattttcttctggtgaaagaaatcgtgcattttccactcgttgaatcccccaaagatttaaaccattttcagttagagttccagtcttgtcaaagcaaacaagattgagctgtccacaaatatttattctttgaggactgatacagaaaataccgatttttttcagtcttctttgagcatacacaataccagcagtcattgcagcaggaagtgcagggggcacagtaattgtgataatatcaagagtctcgataattatgaccccaacttgtacctcatttaaaatgctattaataatagtgtagataaacgcaatgcccgcccctgccacaagacatagtagaaacaagtaggcatctctgtagagtttaaaatcagttggtttgggatacaatatggaacgaacaagctgtcctttggaagtactaaatcctgttctaacaactatggctttgacgagttctccagtgtagaaacgagtctgaataacagttgtcccacaaaacaaagtatgtcgtttatgtgtttctggattatataattcatctcctattcctttcacatc

SEQ ID NO: 464323 - DNA, 583 bp, Homo Sapiens
  misc_feature (540)..(540): n is a, c, g, or t
tatccaggagattaagactcttcctgctaaagcgaaggtcagtgccagattttcccattcattactttgctgtgaacctggtctctttttatgtttgtatattcatttcactttcccagctctttcaatggaggcccataaaagattttcagtcctttttcttctagatgccttttctttgccacccttctgtactttctctcaactgaccatgaaaccagttgcatctctgcctgtttttctgtgaggatgctgatctgtgggtgtgggaacgaagaccctcctttgtcctctcctcctagatccaagacatggttgctattaggcacacggcctgcaatgagcagcagcggacaacaatgattctgctgtgtgaggatggcagcctgcgcatttacatggccaacgtggagaacacctcctactggctgcagccatccctgcagcccagcagtgtcatcagcatcatgaagcctgttcgaaagcgcaaaacagctacaatcagtaaggctccttctcagatgacttgtgggggagtangaatgggtggtcttctagacagtgactcagaatagactgttga

SEQ ID NO: 464324 - DNA, 595 bp, Homo Sapiens
atagagcttaagcgtctccaggaaaatcataacgttgtagggtgtccagaagaggaaaaacacgatgaccaccagaaggatccgtttaatggctttggctttcttgtggttcttgcaggaaaccagcgtctggatgattctgaagtagcaataactcataatgagcagggggagtaggaagccaagaaaattttgtttccacattgcgagggcacgggccagattttctggaggaccctcggggtagtcaccaaggcattcattttctttctgctttgtgaacatgaactggggtgctgccaccaaaatggctgctgcccagacgcctaggctgatggtgacgccatgctgcacggtccggttgttcatggagttggcggccaggacgatggccaggtacctatcaatgctgatgacggtgatgaagaatatgcttccaaaaaagccgatgaagaagaaggcggtagtgaatttgcacatggcattgtggaggcccttttcatttatcaaatagtgagtccagaagggcaaagtggctacaaacagcagatcagacaaggccaggttcaggaggtaaatgtcggtgacactcttg

SEQ ID NO: 464325 - DNA, 1000 bp, Homo Sapiens
gaattcaacaataaatcaatattaaatgttttctagcatgaatcactctgcttcccaagataatcacaggccatccttaaaatgcctttatttttattaatttgaaaatgtgtccttatgtttctttaaaaagttattgttttttaataaatgctgacatttttatggatgaaagtatttgatgtttaggattttcttcaaaataacgtgagggtagagaggatatctgatagcacataagttgataattagtgagttgggtgatacatacacaagggtttattttgttccttattctaaatagtaagggatccatcaccaggtttgggcacgagatttctccccaaggaaatcttaaatatatttttcagcacttcttcaacctcttcctcagtgagagttttaaactcgaccagatctgtattgtctttataattgaattttctataggtgaggatgaagcccaccaaacagtaaaccccttctggggtctgcaaggaacaaaatgatgtggttataaatgaagatgttggagacgtctgcaggtatgtattcatagactcaaaatcttcaattgttcgaggttcaagcgtaaataagtatattttttggtgtttcttctttggcaggagatgagaattaagaaattctttgtttgtaatatactgctctctcctgatttggtccaggtaccagattcctctctcttctgtcaagcagaaaatgcaaggcacctgaggctgatccttcccagaaattaattctagaggctgccacatctgggaggagcttccagacccagcatcgacaatgtaattcctgccgtcaatggtcacctgcaggagaaggtgaaccatgccagtgctgtatttgttaactggagggatgtaaaaataccctcctaacattgtggtctgaaaaccgattgtggtcagagcccagtacagaagttgattgacctggagacaccacccaccccggtttcttcttacaatgtgat

SEQ ID NO: 464326 - DNA, 1000 bp, Homo Sapiens
gggggacaggtgtgtttattacccacagtcagtcacacagcatgaatcaccacccctgccttcatcagactttacaaagggctgaggggcctctgggccagctccatggcccagccccaccacctgcccaacaccaggaccccaggcctcgtcatcctgaccccagccctgctcctgacctctgacctcaaggaaaagacagaccccaccaagggcctgtcgcactgggccttcatgccagggcaccagggcccgcgggaggacaactgaggtgtccctgagtgtcgctcagcccccccacaaccccgcccccaggagccagggccacttagatgaggaacttgaggcacagtggtgaggaggcggaaaggcccagaggcggagctgccaatggtcggagggcctcattcccatgtgatctgatctgggtggcagcactgagcccatctggggtccccagggagcccccgccgggccgcccagtctctgagccggggttggggtggaggcccctggctcccgcgccttcccgcagtcctggggcagtccgccgcgggctcagctccggtagctcctgagcagatgcccggcgatcaccagccgctggatttcgctggtgccctcgtagatctcagtgatgcgggcgtcgcggtagtgccgctctgccggcatctctgtcacgtagcccatgccgcccaggatctggatggcctggtggctgatggcggtcgcggcctccgaggcggccagcttggccatggctgcctccttgatgaaaggcttcttgttatccttcagcatggcagcgcgccaggtcagcagccgggcactctccagggccagggccatgtctgccaacttgaactggatgacctggagcttggtgaggggcgccccgaaggccatgcgattctcagcgtagttcacagcacaatcgagggcggtctgggcaatgcccagggcctgggaggcgatgccgatgcggcccatgtccagggtt

SEQ ID NO: 464327 - DNA, 1000 bp, Homo Sapiens; identical to SEQ ID NO: 334960

SEQ ID NO: 464328 - DNA, 1000 bp, Homo Sapiens; identical to SEQ ID NO: 157229

SEQ ID NO: 464329 - DNA, 1000 bp, Homo Sapiens; identical to SEQ ID NO: 157230

SEQ ID NO: 464330 - DNA, 1000 bp, Homo Sapiens; identical to SEQ ID NO: 334961

SEQ ID NO: 464331 - DNA, 1000 bp, Homo Sapiens; identical to SEQ ID NO: 334963

SEQ ID NO: 464332 - DNA, 1000 bp, Homo Sapiens
ttttttttttcaagtatgaactacatttactatgcaagagcagagtcaacttcaacgctctttgtttttgccttgttgagaaatgtgagactgagaaacaggaaagcaccatgggaagaagaaagtgctgtactaatttaaggtaacaattctcgaggtaaaataaggcgttatagtaacacaattttcatgcctcagcaattaacaatgattttcgtttaattctcttccaactctacagacataattctgctttcaccttcatcacgctttcatatggttttaacaggggatacacctcctcttctaagaatctctgcacctgctgggaggcacgaccagtgaaagaagaaggatccagtaaatgatccaactgggagtgaatgggactgaagtaggcatcaacctggatacgctctatgaggtcattgtcacccccttcctgcttaaccacagaagctgcctgctgagaaagcactctgattttctcatggcaatcctggcggctacctccagctttgaccatggccatgatgatgttctctgtggccatgaaaggcagctcttgccgaatgcgccgttcaattactttggggtacacgaccaatccttcagaaatgttctgcagcgtattcaatatagtatctgcggtaagaaatgcctcggccaaacagatccgtcggttggcactatcatccagtgtgcgttcaaaccactggacagatgctgtctgtagcgggtccatgacaagggtcatcaggtggcgggcaagactgcagcaacgttctgaacgcatgggattccgcttatatggcatcgcacttgagccaatctgctgtttttcaaagggttcctccatctccttgaggtttgccaggaggcgtatgtcggtgcaaatcttgtgcactgatgcccccaagctagccagcacagacagtacttcaatatccacttttcgtgtatatgtctgccctgtgatgatgaaagctctcttaaatcc

SEQ ID NO: 464333 - DNA, 1000 bp, Homo Sapiens; identical to SEQ ID NO: 334964

SEQ ID NO: 464334 - DNA, 1000 bp, Homo Sapiens; identical to SEQ ID NO: 334966

SEQ ID NO: 464335 - DNA, 1000 bp, Homo Sapiens; identical to SEQ ID NO: 334968

SEQ ID NO: 464336 - DNA, 1000 bp, Homo Sapiens; identical to SEQ ID NO: 157231

SEQ ID NO: 464337 - DNA, 1000 bp, Homo Sapiens; identical to SEQ ID NO: 334971

SEQ ID NO: 464338 - DNA, 1000 bp, Homo Sapiens; identical to SEQ ID NO: 157232

SEQ ID NO: 464339 - DNA, 1000 bp, Homo Sapiens; identical to SEQ ID NO: 157233

SEQ ID NO: 464340 - DNA, 1000 bp, Homo Sapiens; identical to SEQ ID NO: 334975

SEQ ID NO: 464341 - DNA, 1000 bp, Homo Sapiens; identical to SEQ ID NO: 334978

SEQ ID NO: 464342 - DNA, 1000 bp, Homo Sapiens; identical to SEQ ID NO: 334979

SEQ ID NO: 464343 - DNA, 1000 bp, Homo Sapiens; identical to SEQ ID NO: 334980

SEQ ID NO: 464344 - DNA, 1000 bp, Homo Sapiens; identical to SEQ ID NO: 334981

SEQ ID NO: 464345 - DNA, 1000 bp, Homo Sapiens; identical to SEQ ID NO: 343627

SEQ ID NO: 464346 - DNA, 1000 bp, Homo Sapiens; identical to SEQ ID NO: 334982

SEQ ID NO: 464347 - DNA, 1000 bp, Homo Sapiens
ttccaaggagaccccttgccatgtggaaaagagctccaatttttattagggagagaatgaggagggagggattagaaaggcggagacaggaaggtcccctggccccagcctggtccttccttttcaggcccctgggaccgctgtctcacctgggggcacctgctccctctttcctgccactcctcaggcctctgctgcagcccctcctacacccagctcagtgagctgacctgaggggcccccacagtcctggggcctgaagctctcctcatacagctggggatgtggagacccaggcaggggctgtggcttgtccagggccacacagtgtcccagcctcggggccacaggctctggccaattctccacgggtccccctcccagtggctcccaggaccagccccaggaaggcagctgagcttctcaaagcctctagaggcaagacacccaacagctcctcacgatgaagtgtccttggccagggaggagctggcggtggtgcaggactcatcttggggacccaggctgggtggggtgcgtccccgggcacagcagagcaagcttcgcagctctgaggacacgctgctgctgaaagatgcatagatccaggggttggtgcagctgttgaggctggccagcaacatgagtagcacaaagggcgccccttccagaggtgcctccgggtcccacgcggcccacagctgcaccaggaagaagggtgcccagcacagcacatagacgaccacaatcactagcgtcatcctcacagtcttggccacagctgctgacacgtgggctccctcaccggggctgcctgtccggcgtcccctgcggcgccccccaggcctctctgatggccctggcaccagactggcatgaatctcccggaagatgagcacctggcaggcggcgatacccagggtaggtgccacgaacaccatcagggcaatccaggtgacataggtgcgacggccccagggctccgcaaagcaggcccagc

SEQ ID NO: 464348 - DNA, 1000 bp, Homo Sapiens; identical to SEQ ID NO: 334986

SEQ ID NO: 464349 - DNA, 1000 bp, Homo Sapiens; identical to SEQ ID NO: 334987

SEQ ID NO: 464350 - DNA, 1000 bp, Homo Sapiens; identical to SEQ ID NO: 334988

SEQ ID NO: 464351 - DNA, 1000 bp, Homo Sapiens; identical to SEQ ID NO: 157234

SEQ ID NO: 464352 - DNA, 1000 bp, Homo Sapiens
gctacatattttacctgtttatttcattttttgtgtgtctacccctgaatgaatgtatgcttcatgaaggcaaaggcttttgtctgttttattatctgccgagttctcaggactttggtcagtacttgacatcctgtatacacactcagaaattatttgttgaatgaagatatgaaagctgggcttcaagaatgtgtttcagaggttctggagatttctgtttattaactcattgaagaaaattatgggttttattcttatttctaattgtgagaatgcttaatgtcacaggctacataagggcctcagaagtcacattatttttgtacaatgtgaacaggagaatttacgagactgctgtggaagttggtacctaggggtatgctacagggcgtcatgagctggaactgaataagacatgcccaaacaggagagtcaggggagaataatgatctcaaactaacagaaaataatttttgtcagtaactttgagcatgccagtctgctgtttgtgcaagaattctcatttgtaggagttggttcttcgggatggtaaatctgttcattgtgctgggcctagcagtaattgtgctaggccaaacactttccaggatgcagtatttccatcttcctgtttgcacatcttatagttcccacttcacagatgttcaatgttttctcacttgttgatgatcccattttgacacagtagagttggtttccacccttgaagcactgtgggggcaataggcagacacatttggaagtggaggctgaacatttttcccagtcatagcaggtgtcatagccacaggattctttctttgtgctgttggatgaaagtcttgtcctttcaagaccccattctaactggcggccgtcttggcaggaaccaatatgtagaaaatggagttgctgattatttaaacatttctcagccaaaaacttacaagcgggtgaagtaaagtaatcgttggagtctgtgtcaaacacacagaga

SEQ ID NO: 464353 - DNA, 1000 bp, Homo Sapiens
ttttttttttttttttttaagcctttaactcagtatttatttaaatcaacttgcattttacaaggtaacatctttattttaaacagcttgcatggcactgccttttgcccttgcatgaactccaggtggaaactggtgtagggctgagctggcatgagttcttgagggctcagggctctcattgtatgtagcccactgctgtatcatctgctaggagcagtcaagtgtttctgaagcagggcctgaacaggggctacccccattttgaggaggtggattgttacactgcctttgtcttgtcttacgtcttccagagcatgaagaccaatttgaccagcaattccacttcccatcaatgggggtattcttccgataggagacctcacaggctaggccttgggatccaacaggacagatgcagtcacagcgtgatcctttcaggacagggactccatttccttggcagggagcacagtggcaggaactaacttccttctggaactcctccagtgcctgcttcatgttctgcctcactgtgctggaataggcaaaatctgtggctgtcactagttcatacagaggctccaccttaactttgatgatggctgggttgtactgcacagcgtctccccactcctgcatcaggtccgccgtcggcagctcctggtatgccagggtggtgatgtgctcacttgcccctcctcgtaccaggaccaccaagtcctccaccatggtgtccctcttgtttctgtcttttatttcattcagaatacctctgcatttgcctacagacacacccagactgacgtagacctcttcaatggcaccaccaattttaaaatcatttttggcacaggcatggacgttgttaagagtataatctcctctctccatggcctctttgttcataacgagggtgtattcataaatgcccccaagcacagcctctgtgatgtagtgggtcccaaaatcacggaagagatctctgtattccccgtag

SEQ ID NO: 464354 - DNA, 1000 bp, Homo Sapiens; identical to SEQ ID NO: 334991

SEQ ID NO: 464355 - DNA, 1000 bp, Homo Sapiens; identical to SEQ ID NO: 334992

SEQ ID NO: 464356 - DNA, 1000 bp, Homo Sapiens; identical to SEQ ID NO: 334993

SEQ ID NO: 464357 - DNA, 822 bp, Homo Sapiens; identical to SEQ ID NO: 334994

SEQ ID NO: 464358 - DNA, 1000 bp, Homo Sapiens
ttaatgttaagaggtctttattattcaaaaaataaataacaagataattacaagttcactctggaaacaatggagactgcaggtagatacaatagatttcctttaaatacagtcatttcgtaatgaggagtgggcaggctcagggctgcactccctactcctcaccctcatctatagtggtagagatagggacagggtggaaagaagagaactgactagcaacggcctgactctgtgtgtgtgtgtgtgtgtgtgtgtgtgtgtgtgtgtgtgtgtgtgtgtgtgttagaaagggggattgagaagagagactgggggagggaagagactgacaaagggaaacagagagattgagaaagagagattggaagaaagaggttgagagagagagactgaaagagagagatggagagagagagattgaaagagaatgaataactgtccgagagggtggcggggggggggggggggtttcggttctccactgtgttagacgttctagagcctggccccctccaacaaggccataggaacccagagtcaaccataactgaatgtgagctgaggctccccatttcccttctgcatcttcactgataaatcaaatgcattatccatggaaagacactgcacgcaaagaaacaaaactgaacttggcaagttatctgctgtttactcagaattcaacctgtgcataatggccttgtcttttcataggactctctggatgtctgcatcagtggggttgctgcttcagatatataagctcttatggagcagggcccgttttggtttcatgtgacctgtaattcacttattacagttctacatgccttggagtgtataataaatagttctccataaggaggatcctagggttataaataggcagttaacagggggtgggcttaaccgctgtgctgtattatgaagactcccagcgtcagctccaccacagcctgcaaggtgacactgttcagagtttgagtaagccaaagga

SEQ ID NO: 464359 - DNA, 1000 bp, Homo Sapiens
ttttttttttttttttttttttttttttttttaaaaaaaaaaaaaagaccattatttctttgttttgtttttcctgtataaaaaaggaccccaaatataaaggtagggaaagggacaagagggaacataccccttagtgtagagaaatgggaaggagaaggagaagcctcaaaaggagaggtgggaggggaatgtcattaaggcagcaaagtaatctctgtagaaagatggaggaggaccctccatagcctcagagataaaggcaaagattgccctctcagtgtccagaagggaaatggcagcttttcttccttccatggcagccactccattgctcactccggattaccttcatccttatgtagataagagtgctgcagagctcgaaaggcagagattcgcttgtgtgggttaaaagtcagcatttccagcagcagctgtgctcccgactcctccatctcaggtaccaccgactgcactgggcggggccctctggggggaaaggctccacggggcagggatacatctcgaggccagtcatcctctggaggcagcccaatcaggtcaaagattttgcccaactggtcggcttcagagtttccacagaagagaggctttcgacgaaacatctctgcaaagatacagccaacactccacatgtccacaggtgttgcatatgtggactgcagaagaacttcgggagctcggtaccagagtgtaacaaccacgggtgtaagtgccatctggtagctgtagattctggccaggccaaagtcagccagcttgactgttccaccacttgtcaccagaatgttctctggcttcagatctcggtgaacgatgcaattggcatgaaggaaatctaggcctcttagaaactggcgcatcagatccttgatcgtttcggctggcaagcctggtgggggtgccttgtccagatatgtccttaggtcctggtctacatgctcaaacaccagggttaccttgatctcccggtcag

SEQ ID NO: 464360 - DNA, 1000 bp, Homo Sapiens; identical to SEQ ID NO: 334995

SEQ ID NO: 464361 - DNA, 1000 bp, Homo Sapiens; identical to SEQ ID NO: 334996

SEQ ID NO: 464362 - DNA, 1000 bp, Homo Sapiens
cattttctgaaagcactttaatgattccccttcccccaaactccagggaatggaggggggaccccgccagccaaaacattccccccattcccgacccccctctcctcttctagcccatgcccttccccggtggagggagggagcagggagccctcactctccacgccccttgcttgcatctgtatatagtgtgagcagcaagtaacccttctcctccctcccccctcccccctcctcaatgtagtggccttggatatcctgtttgttaataaagacaattcaaccagctcccaccatgcaggccgcatgtccttgctttctgtcagtactgtagactaggcagagagagcctccagggtggggaagaaaggggcagggtgggctgggatctgcaatgagtgagcctcatggggtgggatgggcagtgctgggccaagaaaacctagaagaaatgactgtggaagggtcagggcagcctcagccttaaacctgtgggcctgagggccaccagcactgaaggtgtttggttcccacccgctccagcagagccagaccagggaagaagagggtttcctggctacagcctccctgtgtgcaagtcctgcaaaggggtctcctgtttggctatgaaatgaatatagatagatagctcacaagctggcagccaccagagtcccgtggggctgagccttagaaaggctgggaggtcagcaaggctgaatgaagggcagtccttgctttctggaagactggcacctgagagcctatgtgaaccctttcctcctgctgacccctggactgcggccaggcctacacacgccagggaacgggcacacaccattcttgtgaagttcacaaactgcagattgatcagcagggggaagggatcataatgccgtggtggcggcagcctactttttcaaaatcaatttcctactggagatgggtgggaaattgaagtcggtgcgagctaaggctggatacacggcgcgtaggggag

SEQ ID NO: 464363 - DNA, 1000 bp, Homo Sapiens; identical to SEQ ID NO: 334997

SEQ ID NO: 464364 - DNA, 1000 bp, Homo Sapiens
gcctctccacggtctttatgaggaggtcgtgggagggggtcaaaggatcagttcatcctcatcctcctcgtctgtggatcgcaggctggggccctgcaagatgtcggccagctcctcttccagccctggactctccaccagctccagctcctccaactcgccctctaccttgcctggggccagggagagagggggctctggggaaggagatggcacaggggtctctggggaggcagcaatcacatcccctgttccagtggccccaggcctgtcctcaggcaggttccagttctctgcagaagatggaggtgccccggtactctttcgagttgaagtcgtgttccggaagctggcaaggggagggcggagctgcaccccagacttggtgtgcccctcaatggccttctgtagctcctccagggccaggacgcccctgagcttccccatgctggtcacgtaagcgaggtggaggccaaggagtgaaaacagggtatgagtcttgtgcagggttgtctgctccaccagctggaagggagactggtcaatacagcaggaatcaaaacagacaggctggctcagctgctcctgctcccaggcctcaatctcttcaggtgacatgttatccactaaatctgtggaatcctgggttgttttcttctttgtggggcgagctctgcccagcaagcagtgaagcagggactggaagatggagggtctttgacctgcaggctctggtgcttccggctgctgtttgtggccaggcagaggcccattgggctcttctggggacagaggggcagtagtagaggggtggagagcaagggaaggaggaagctcgctcttgccagagagatcttcgtcctcatcctcatccacaaaggcgaaggactcgggccggcctggaggcgcgccggggggcccctccccagccagccgcgccttcccgtcgtaaggcagctccgacaacttccgcgccatctcttgggctgcgcgcagcctg

SEQ ID NO: 464365 - DNA, 1000 bp, Homo Sapiens; identical to SEQ ID NO: 334998

SEQ ID NO: 464366 - DNA, 1000 bp, Homo Sapiens; identical to SEQ ID NO: 335000

SEQ ID NO: 464367 - DNA, 1000 bp, Homo Sapiens; identical to SEQ ID NO: 157236

SEQ ID NO: 464368 - DNA, 1000 bp, Homo Sapiens; identical to SEQ ID NO: 157237

SEQ ID NO: 464369 - DNA, 1000 bp, Homo Sapiens; identical to SEQ ID NO: 335003

SEQ ID NO: 464370 - DNA, 1000 bp, Homo Sapiens; identical to SEQ ID NO: 157238

SEQ ID NO: 464371 - DNA, 1000 bp, Homo Sapiens; identical to SEQ ID NO: 157239

SEQ ID NO: 464372 - DNA, 1000 bp, Homo Sapiens
ttttttttttttttttttttccctgcacacacactttattttgtcctctctgagcccttctcacttccccctcaggacggccaccccttggggctgggtgcagagcccccatccagccgcggtgagggtggctgtcatccggcgggtcctcaccctggtccctaggcttgccgcagctgatgggtctcatagtcctctgggatggtgtcattgcagcggtaacgcaggttggcccagatgatgttctcctgggagaagcagaagacccccaggcggccaccccgcatggttgtgtccaagaccacgttgctgtcggccaccagctcagggccctcatagaatcgcaccctgatgtagcccacttggggccggtgctgcaggaaccaacgataggacttcttgtccttccaacccacgtttcgcgggtccttccacagcagccgcacctgggactctgtgtctcctgtatgccacagagcgttccgcagctgttccccggggcctgtggaagacttcacagccttgagttggatgccaggctcggccacagcacggaaggggttcgcctgccaatacgtttgctccatctgcttccacatgaccacgtagaagctggagctgtcctggtagccaaagatgaagcccgcatagtcgtcatccgtgaccgtgttcacatggaacgtgccctcgaagtccacgccattgaaggcagtgtaacccacagccaggcctgggtcgctgttcattgtctgcacgatctcccttccctggttgagcaccacccagttggggtcaatctgcgcgtcaccctccgggtccagcacgactgtctggaaggccctgaagtcggtgagcgtgacttcagcgttctccggacacacgtcgatcttgtctaccaccttgtctgcatcaaagtcgtcctggcacacgtcgcccacgccgtccctgtccgcgtcctcctggccggggttaggcaccaggcggcagttgtcccgactgt

SEQ ID NO: 464373 - DNA, 1000 bp, Homo Sapiens; identical to SEQ ID NO: 335006

SEQ ID NO: 464374 - DNA, 1000 bp, Homo Sapiens; identical to SEQ ID NO: 335007

SEQ ID NO: 464375 - DNA, 1000 bp, Homo Sapiens; identical to SEQ ID NO: 335008

SEQ ID NO: 464376 - DNA, 818 bp, Homo Sapiens; identical to SEQ ID NO: 157240

SEQ ID NO: 464377 - DNA, 674 bp, Homo Sapiens; identical to SEQ ID NO: 157241

SEQ ID NO: 464378 - DNA, 743 bp, Homo Sapiens
ttttttttttttttttttttttttttttttttttttttttttttttttttttttttcccggcttcgctgcatttattgcaggtgggtgcacctggcgggagggcaggtccggggcgaggtcacacgacctcgtcggtcaccgggatggggttgacctggggacctcccgggggtccccccgccgccaccgcagcctcctcctcgctgggcttcttgcgggcctcggccgggggccgcggcggggggttgctgggcggctgcttgatggtgcctccgatctgcggccgctcccggggcttgggctcgatgggcgtccactgctcgccacgcacagccgccagtaggtagatgccgctcgcaatggccaggcaggcggtcccaaggatggtggccagcaggaagccggcgggcaccgagagcaggagatgcaggacggcccgaacatagtaattcctggtaaagggcccgaacagcttcaccacggcggtcatgtacttctgtccccagcgctccatggtggagcccttcttcctcttcccccgggggtactccagcaggcacacaaacacgcccgccacaatggagtaggcaccaaagtaccactgggtgaagcgcccagctgtggccacgatgcccccggtgatgaggatcaggccggacgccagcgcctgttcgttggcccacatggcccactcgatctgccccatggcgacacgaacccggctgggacactgctaggcgcg

SEQ ID NO: 464379 - DNA, 1000 bp, Homo Sapiens; identical to SEQ ID NO: 335010

SEQ ID NO: 464380 - DNA, 1000 bp, Homo Sapiens; identical to SEQ ID NO: 335012

SEQ ID NO: 464381 - DNA, 1000 bp, Homo Sapiens; identical to SEQ ID NO: 157243

SEQ ID NO: 464382 - DNA, 1000 bp, Homo Sapiens
gaatatttaagacgtttatttcagtatcttcattccccactgtaatacatttgaatgcccacgtatttgagttccgtaaatagactctcttaatttgggtaactatataattacccttcagagttgcagacaacaatggaagctttaaaacctcttcaacacaaatgctacccctaaaatgaaagaatttagaggttaaataaaacaagtgagagaccatttacttacatcagtttggtttatagacatttgaatcatatctgaatgactgacttgtttccaatgtgaaaaccaaattaaaaataacttgatcactgtgcttcaaacacaactgttcacatatcaaattctagctccagccatgtaaaattcaacttttctgtatcagagaaaagagctatttaaattcaggggcattgaatctttcatgaacagcatgaaaatatgagttgacggagatattccaggatgactacaataagtagtcctttttgtcttacatattagtgcactgaaacaaaatactaaatttatgtaaaatatagatataagagtattccattttgtccaaacctattaaataccttccaaaagtttcataattcagtcctagaaattcttggagctgtgagaatatcctgttcaggaatgtgacttctacaaaagctcccaggaaatttcagaaaaaaaaatatataatcttctaattcaaaagttgattgatttgccaaatgacgcagcaagatttgcttctctaaaagcttctgataaggtcggatgtgcatgacagactctagctatatcttcacaggatgctccatattccaaagcaagagcagcttcatttaccatttctccagcacctggtccaagaatatgtgctcccagtactctgtctgtcgatttctgcccaaggatcttcaccatgccatctgtgtcagcatttgtcttagctctgctgttagcagcaaatgggaatttcccaactttgtactcaata

SEQ ID NO: 464383 - DNA, 1000 bp, Homo Sapiens; identical to SEQ ID NO: 157244

SEQ ID NO: 464384 - DNA, 1000 bp, Homo Sapiens; identical to SEQ ID NO: 335015

SEQ ID NO: 464385 - DNA, 1000 bp, Homo Sapiens; identical to SEQ ID NO: 335016

SEQ ID NO: 464386 - DNA, 1000 bp, Homo Sapiens; identical to SEQ ID NO: 335017

SEQ ID NO: 464387 - DNA, 1000 bp, Homo Sapiens; identical to SEQ ID NO: 335019

SEQ ID NO: 464388 - DNA, 1000 bp, Homo Sapiens
ttttttttttttttttttttttttttttttttttttttttttttttttttttttttttttttttttttttttttttttttttttttttttttttttttttttttaacaaataaacggggcttttattgtgtgtccacaaaaacaaagtcagggtggcctttggttaatcccctccccccaacaagatgacaaaaggaggaatgcatgtcaacaaaatgacaaagaggaccatggagggcctgagtctgctgcctccctggtgggacaaggcagggggagcaagcactactctgggctaggcccagcgccccccaagcaaaaacacataaagcccctgcccctgcccccacccccacccccactgctaaggcagtcagccaggacttccccaaagacctagctctgaagcccagaccctcatggctccctctagaaggggttgccttcttcagcctgcatgaagtggtaaatgaagaagaggacgatcacaaagaccaggaaaagcagcagctggccccagagcgggacctggcgatcctggcccagcccagccccaggagcacggttttcaggccggatggcacggcgggtgagccatgaagaggaagatgatgaggaggacataaaagaggtggaggaggaagtaggataataggacaggtccagggagctcctggaggctgaaacagggcggtagtgcgtgatgctctggtaggcactgtcccggccgtacatggggcgttccctatccttgcactcctcttcagaagaagacaaaagatcgtcatcatgcacctggtgatggaaagcgtcagcatctgggaatgaagtcactgactggcggacagccctggacgggccggcagactcgggctccccataagtcctggtggtgaagtagctctcttcatagtagtcgtcattgtagcccttgctctggtagagtaaagcgtcctctttcttgggaagatcatacatatctgcatcccctctagtcgaa

SEQ ID NO: 464389 - DNA, 1000 bp, Homo Sapiens; identical to SEQ ID NO: 157245

SEQ ID NO: 464390 - DNA, 1000 bp, Homo Sapiens; identical to SEQ ID NO: 157247

SEQ ID NO: 464391 - DNA, 1000 bp, Homo Sapiens; identical to SEQ ID NO: 157248

SEQ ID NO: 464392 - DNA, 1000 bp, Homo Sapiens
ccttccttaaagttttaattctgaggtagacatcatgcaaacaaacatcaagtgcagccaacttccattgacaaacatgattattaataataaattaataatcagaaatgcccgttagaaaaagggacttgaaagtttaggaagcaatgttgtttagcagtattctggcttgagtttccaaattccttcaccaccagaagttctatggaaagtgcacagatttctcaatagttctcggaagacacaagactgtgatgcagataacttggattcaaactcctgcagtatctccctggtgctggcctggccatcagtgtgggcctggaaagcgatgaagtttctcatctccaccagaaggtcatcgtgttctgtggtgggcagcagggcagaagcttcctgcaggtgcccgctttcactttctaaacgctctggcagaatcaggtggtttctagctctcattttagccaagagtgaggaggaagcgaggggcccggatgaagagtctgcatcttctgctcttccactaaaatgctcagggacattatcttttccctcctttttcatgatgccatcctggcacttctctgttggagatgttgatgaaggatgctgcacagagaagttagaattccttttcttaccaaatctactcttttttcctgctggtgcaccagaaatccccctgtggccagtccaggtgggaacaccagacactgctcccagacaccgctgacgagagagcctcagtgctttcagggcatcctgggccactcggttggcttctgcctccaccagtacataatctgggctggctccatccatgatggcatcgtgcttcatgacactgtgcacgccaactgattttttgaaaagcttttccaaaacataatcgtcattgctctgttccttggcctcactcttgttttcactgtcttgcttctggtaacgccttttcttcaccaggtgtggaattcgagttccttcaaacttggcgtctctg

SEQ ID NO: 464393 - DNA, 1000 bp, Homo Sapiens
agtttaattctttatttgaacatcaaataggttgagaaaattgtttacaggtgctcgagcatcccgctggattctttttcaaagtgcaaaagaggtttacaagtgtgtttcattaaacaaagcaaagctgcgacaaaaccgagtcacatcagtaatagtatgcatcggcaaaagggcatattaatccatcaaacacaatttggcatttgagccttttcccataaaacaagagctctacactgaagagtatgtagtgcacaaaaagcattgtttatcacctgtgagagaacagaaactggcataatgtcacttattaattcaagtctctataaccaatgacctctctgtgaatgcaaaggggtctgtgtctcaggcacctgctcatgggacaatatgttgtttctagggtgcacagctctaaacacacacactgacgatgggtttggaacatggcagcatttacatattttaaaagttcaggcacaattggatgcaaaaaaaagaatagaaatttttcttgaatctcaaaagacagtgcaaaattgaagtgccataatagaggcagcaattacttagaaaacaattttaaatgactaaaaacgaggccacactttaattcaattggaaaggaaatgcagttggaaacagagcataattaacgctactgaaaagatggatatttgggaccaaagttcatttgctccagttgagagtaagttttcaggggattaacttgggaatggtgcagtgtaatctagatcacgctcccaagacctgcaccaaagagaattatggttgccttttgagctactgtatgactctatttgcctttcacataactagcttccccaagcagatctgcctgtgaatattagacattactatggtgttagtgatcactcccagtacccacagtccatctcataattggaaagtatgaataggaaagtatttgtaatcagtgtcatgcaggggaaggagtactctaagccagtggcct

SEQ ID NO: 464394 - DNA, 1000 bp, Homo Sapiens
agttttaaagctgtggaaaagctttattatagattttagtacagaattaaaaaagttcaaacaataattgtttggaaccacaaataattaaaaggaaacacagcaatcccataaacaagcattctggcatctgttagaaattttccctcaaattatgaaatgtagctctccatgctttccaatgattgttataatacccacaaatatctgtgatttcagtggaatactttaacaaaagttttctttttaaggcatgatcctgattcattttttcttcaatatctcagtcatttcaggaactaccttaaataaatctgcaactattccataatctgccacttggaaaattggagcttctgggtctttattaattgccacaattgtcttgctgtctttcatcccagctaaatgttggatggctccagatattccaacagcaatataaagttctggtgctactatttttcccgtctgtccaacttgcatgtcattgggaacaaagccagcatcaacagcagcacgggaagcaccaactgcagcatgtagttgatctgccaagtcatataacaacttaaagttctctccactcttcaagcctcgaccaccagataccaccactttggcacctgttagctctggtcgatcactttttgttaatttctggtcaagccactctgatatttccactggtgaagtacttgatgccttttctgaactggcactaccgccacttgttgctgcagcatcaaaggatgttccacggacagaaaacactttcactttctcatcacacttcactgtacatagagcatttcctgcataaatagttctcacaaatgtgtcaggtgacttgattgcaatgatgtcagaaatcggggcaacctcaagtttggctgctactctgggcaaaaggttctttccgaaggcagatgctccagcacagatgtgtgtgtaattgaactgcttctgagttgccaaaatcaatggtgtcagttcctct

SEQ ID NO: 464395 - DNA, 1000 bp, Homo Sapiens
tttttttttttttttttgattaaacaaagaactctggtttttaatagttttgatcattaaaaaagtttaaacctgcatagcaatcatttcaaaaataattatttaatgttccataattaaactgtacacaacctagtcttgggacacagaagccagtgaggtgagtttggagcagtctggtgcagtcccaggagccaggagttgagttctcattggcctttttttttttgtcattctgctcatctaagtttttggatagttggcacaatctggctctgctgatgagtggatctgcactgggaagagagagcagcttgacccccatcccttcttgcttcccctcccccactcagccggattcctcaaagtcgctcaatgtctcggtatttcttcctcaaaatagagacctggtctttaaagaggacggggtcgagcctcatctgagagtggatcagcggcatgtagccaaaccagctggcaaacgtattcatgcagctctgtcgctgggcaaagtggtcagggtcagcccaacgggaagcccgagaagtctgtcccatcattgtctccttatactgcttcttctgggtcactttgattggaggcaattttgtcacagcagacaccaggaagttcatgagaatgtcctcacaattggccaattggtccaccatgttcttcaggctggctggcaggtaatgggagtataggtagtgataatatttgtggtaaatagcagctcctgtcaacaccatggagtagtcgttcgtccactttgatgtgtatccccaccgctccttagagttatcccagaagtggctgcgcgcggggtaccccacaatcctctcagggaagctctgccacactgtgaaggcgaaatccacctctgttgttgaaagcaccgtgtcctcgtcaaggctgagcacggcgtctgtgatgatgttgtcgtagggcagaaaacggctgctcataaccttgctctctccttcaatgacgacgacag

SEQ ID NO: 464396 - DNA, 1000 bp, Homo Sapiens; identical to SEQ ID NO: 335025

SEQ ID NO: 464397 - DNA, 1000 bp, Homo Sapiens; identical to SEQ ID NO: 157249

SEQ ID NO: 464398 - DNA, 1000 bp, Homo Sapiens; identical to SEQ ID NO: 335027

SEQ ID NO: 464399 - DNA, 1000 bp, Homo Sapiens
tttttttttttttttttttttttagatttaaggtatttttatataaatttaaggagtacaagtatagttttgttacattgatatattgcatagtggtaaagtctgggctgtaaccatcaccccctgaataatgtacattgtacccattaagtaaattatcatcgccccctgccaaccctccaactcttccaagtctccagtgtctattattctacactctggtgtgtccatgtgtatacattatttagctcccacttataagtgagaacacgcagtattcagctttcaaagattacatactctctattcattttcatcaggtactcaaacatttttcttcctacattttaatatatatgtcatatgtatataccacttagaacagtgtgtggcaagtagtaagaactatgtaaatgttaagctgttatctacatcagtgtgaaaaagaatttgtcaaaagtctatagagttgcagctgcaaatgcttaaaaattgtaccccctctccatcccctaatatgtaccctgctaaaatacaattatgtgaagcacataaaattttacgtcatgtgaaaatatgaataaaaggaaactttttgagccctggaaaattggcaatgtatgtgtttatgtgaaaaaacccacaacaacaaaaaagaagggggtggttaaaaataacattgataactgatatctccattgttctcaaagacaagttagtggacaggctgcatcagaatcaccaggaaattttctagaattcttggttctattagcgattctgatataatagaataacagtggagattaagaatgcagaaattgtttaagtttctcagatgatcctgattttcagccaagcgtgggaatgactgatgtgtacaaaaatgtaatacaataatttaatttaatgtagtacatcatttatttcctatcatcctattcaaagtggtatgtattgggaaatatctgcccccagggaagagagctgagaggatatc

SEQ ID NO: 464400 - DNA, 1000 bp, Homo Sapiens; identical to SEQ ID NO: 335029

SEQ ID NO: 464401 - DNA, 1000 bp, Homo Sapiens; identical to SEQ ID NO: 335030

SEQ ID NO: 464402 - DNA, 1000 bp, Homo Sapiens; identical to SEQ ID NO: 335031

SEQ ID NO: 464403 - DNA, 1000 bp, Homo Sapiens; identical to SEQ ID NO: 246386

SEQ ID NO: 464404 - DNA, 1000 bp, Homo Sapiens; identical to SEQ ID NO: 161065

SEQ ID NO: 464405 - DNA, 889 bp, Homo Sapiens; identical to SEQ ID NO: 157250

SEQ ID NO: 464406 - DNA, 1000 bp, Homo Sapiens; identical to SEQ ID NO: 335032

SEQ ID NO: 464407 - DNA, 1000 bp, Homo Sapiens
tgattaaacatatggcctttattttatttttttgagatggagtcttgctctgtcgtccaggttggagtgcaatggcgcgatcttggctcactgcaagctccacctcacaggttcacaccattctcctgcctcagcctcccaagtagctgggactgcaggagcctgagaccacgccccactaatttttgtattttttaatagagacgggtttcaccatattggccaggatggtctcgatctcctgaccttgtgatccgcctgcctcggcctcccaaagtgctgggattacaggtgtgagccaccgcacccggcctcatcattggttttctttgcagtattacatctggaaacggtgcggtgattatctctctgcacccctcacaggcggctaacaacatcacaaacaaatcagccagaaccatcactcatgggtgggcccatgggtgccagttcccagggcccagtgcctccagggtgaggtccccagcaggtgaggctcctagcaggtgagattcagtgtggaaggtctctgggagcaggtcccagcaggtaaagtccccaacagccgaggtccccagtaggcaaagtccccaggagacatccccagcaggccaggcttccgcaggggacgctcctggaagccagcatgtgaaatcccaggtaagggacatacctggccaccgaagactccagcaggtgaggccccaggaaagtgaggacccaggtaggtgaatccccaggcaggtgaagctgcaacaggtgaccgtcccaggcaggtgagtcctcaggcaggtgaagcttcaggcaaacgagtccttaggtagatgaggcccccactcaggtgaggccccaggaaaatgaggttcctggcagcccaggccccacaccagcctctcaggtgaaccaagccgctatgccgcgtgtctggtacctggattcctcctgcagtttccagcaggccttgcagaaagcgagtgcccagctgaaggagcgaggccgc

SEQ ID NO: 464408 - DNA, 1000 bp, Homo Sapiens; identical to SEQ ID NO: 335034

SEQ ID NO: 464409 - DNA, 1000 bp, Homo Sapiens; identical to SEQ ID NO: 157251

SEQ ID NO: 464410 - DNA, 1000 bp, Homo Sapiens; identical to SEQ ID NO: 157252

SEQ ID NO: 464411 - DNA, 1000 bp, Homo Sapiens; identical to SEQ ID NO: 335037

SEQ ID NO: 464412 - DNA, 1000 bp, Homo Sapiens
tttttttttttttttgagatgcacagttttattaatgctatatctgcccaaattccaggccaggattcaaggccctttctgcttaattcagcaagactgttgaaaacaaaaaaggattcaaggccctgtggtcggcgtggtcaggcgatggttgctgtctccctgtccttctgccccaggtggtaatgaacctcaggaagtgcccttagtctctctgcagcctgctcaggggtgaggtccctctgagcctgagcaagcatttcgtagccaaccatgaatttccggacagtggcagagcgcaggagcggagggtagtaatgagcgtgcagctgccaatggttccagttggccccagcctctgatcctgtgggagccccatgccagcccatggagtagggaaaggacgtctcaaagaggttgtcatacttggtcaagagcttcttcatgatggaggctagatcatcacgctcagcaggggtcagctcaggtagccgccgcacatgccgacggggcagcagcagtgtctggtagggccatgttgcccagaaggggaccagtactaaccagtgctcactggttaggaccagacgttccttcctgagtagctcctggcggctgtactccattagcaggggctctccatgctgactcttataggcctgctgagatcgctcctcacgctgggcaatatctggcaggaaactgctggcccatacctggcagtgggggtgggggttagaacagcccatcatggcacctttgttttcaaagatctgcacccaagggtactgggcacccagctcctctgtgactgaggcccatgcatcaacaacagcccggatctcagggaccgacatgagtggcagcgttacatccgaccaggggtggaagcacatgaccttacagactcctcgagcagactttgcttggaaaaggggatgatcactgggtcctggactgggggcatcaggctgcagagctgggaagtcgttgtcaaaca

SEQ ID NO: 464413 - DNA, 1000 bp, Homo Sapiens
ttttttttcatgtttaaaacttttaacatttttaattaaaaaacccacacaatcttaggttgggcatggagagggtggcatgtcatatgatggggttgtcccttggggtgtgctgaatgctgcttggggtttcttcctgagccagcgctatgggagctgaagatgtagggctggcccttctcccctttgtgggccccttggggcagaggcttgggggctctgtctcttgcacctgctgcgagggtccatcccagaatcacaagccactcagtgatggtatgggagagaaaaggtctctggggggtattcaaagcttgggacacctcctccatggagccccctcccattgctccctgggcctcttgagcctcaggcaagaaaatggccaggactgggtgatgagcagcccctggcctgcccttttggcccaggtctaggtctggtcaagctgttggagctgcctccccacacaggatgagttcccagggaagtgaggccacagcaggatccagagggcaccccttcccagagcctgggcccaggcgaggccaacagctctgacagtgtggaaatgcatcaaagtcctgagtgagcaactcccttctgggaaattgattccagcgagaaaggtggggggcttccagagtctctgttcctgctcctgccgcacccccgttagggccctggggctgtcccaccgaaaaactgagggaagaggcccgctctgttccccagcggtatggcaggcggcctgggtcctgacaaggccaggcctcctgccccgccaggctgcgagcacgtgtggggagcacttccccatggagcctgggtgctgtggggctgtggcatcctccctgcgcttgcggccactgctctcactggcccagcatacaggccttcttacaggccaccgccgagaccagggccgcgccccggccactgccctcctccgactcgatgaaggtgatctcgcagctgggcgtcagcctgcgcacgctgg

SEQ ID NO: 464414 - DNA, 1000 bp, Homo Sapiens; identical to SEQ ID NO: 157254

SEQ ID NO: 464415 - DNA, 1000 bp, Homo Sapiens; identical to SEQ ID NO: 335041

SEQ ID NO: 464416 - DNA, 1000 bp, Homo Sapiens
tttttttttttttttttttttttggctgtaaaatcctgtttaatgtgtaacatttcaggcagagagaggccttggggactagaggcagaggtggccttgaccaacccctgctccaacttatctgcctgcttctctctccctaactccctcaccccagacacctcctccttttccttgtggccagcaagcactattcctcctttactagtgctggccaccctcccttctccacccacatgtccacagcacccctgccctctgctcctcttacccacatccctcctcactgatgtgactccagaaacagggtatctgacagcacagggttaagattagtttcataattggagacgctgtcggagcatcccatctcttgtacccagtggtcccagagagagggagagggaagagggaagggtgcaggcaacaagggcagcccacactcccagtaaccttgagcactggcataggtggcctctagctccccacccctccagctcctcaaaaggaaggccccgggaggaagggaagtagccagggaaggaaggttttgatcgagtaatccccagcaggcagaggcctgtgcaccggcaggggagaaggaggggctcgcccagggcagggtcgggggtgggatgggaggttgcctggtatgtggcatcagcaggccgagcagcggtcgctcttttcagccagcccagccccggtgccagggctgcggcgcagtatgtctttcagggagccatcctgctcactcagcagcttgttgatctcattctgcttgtattcaggtgagaggcggtggccgaagcccgagcccttgcgggaaggtggattggagcggcgctgggctcggcgggcacaggcccggatgatgaggtacaccacctcggccacattgaggatgatgcagatgccagaggcagctagcatgaagacggtgaagacggttttctcggtggggcgggacacgaagcagtccactgtgttggggcagggg

SEQ ID NO: 464417 - DNA, 1000 bp, Homo Sapiens; identical to SEQ ID NO: 157255

SEQ ID NO: 464418 - DNA, 1000 bp, Homo Sapiens; identical to SEQ ID NO: 335043

SEQ ID NO: 464419 - DNA, 1000 bp, Homo Sapiens
ttaaagtaagtcttttaatgacatctgcattgtattttctagctgaagcaaaacagtgcctgtgggatttatgtgacttcttaaccttgaagtccattcatagaaccctagcttccttttcacagggaggagctgtgtgatgaagcaggcaggattacaggccactcctttacccagggaagcaactgcgatggtataagagcgaggtccaccaatctcctgccggtttatcatagctacagcccaggctaagcctgagagaggtcgttcccacacttcaaagttgtctccctgtctaagctggtacccttgcttgcccaaggggtcctgattgatggcaattacgtccttatcctgaaggagagctttggcttgagggctgatgtgtcggaggtcattagacatgaataaaggagcagccatgatagcccagagggccatctgagttacttgctgattccagctgaggccaaagttgccaatcactaacatatctgggtcattccaaccccctggtccagcaacatcaacaattctctcctggttaaaagatgtccagtccaagatactctttatacttttccaggaatcatcaatgtcagcaaaatttcgccagtgattgcagtactgtcggatttctgtataattgggcttttgaaagggccacatataaagaggccactcacaggagtacacaatgcttctgccagtcctattcagggccaaggacatgtgcttataaccatctgccaaattttccaaactgtcacagtaacaaccatcaaattttagcagatctactccccagtcagcaaaggtctgggcatcaatgtcgtagtatccaaaactcccagggaagcctgcgcaggttttatttccaacatctgcataaatccctagcttcagtcctttgctgtgaacataattagctagctggcgaatcccatgaggaaagcgctgagggtctgcctgaagtctgccttctgaatctctttgggga

SEQ ID NO: 464420 - DNA, 1000 bp, Homo Sapiens; identical to SEQ ID NO: 335044

SEQ ID NO: 464421 - DNA, 900 bp, Homo Sapiens
ttttttttttttttttttttttttttttttttttttttttttttttttatataaaacagctgagctgccagtttattctgggcttctggtggtttgggctgaccaggcttggtggagtctggggacctgcctcagggactggccccctggcctggagccaggggttctgggggcctggctcaatccagggcctctgtggtggcacacagcaggccagccagaagagccaggcccagcgcggccacggcgaccagcgccacgtcccacaagacccccgggcgcacccaggacgcctgcagctgccagccacagctgcccagctggtagcctgtcagccggcccagcgggccatgggcagcgaggctggggctggcacagcggacctgcagcagggcctcgggcgtgcggtcctccagccagaggcgcagataggtgaggctgcagtcacagtgccaggggttctgcgtcacatcgagggtctgcagctggggcaggtggtcaaaggctcccgggggcacggactgaaggctgttgttggccagcagaaggtggcgggtgcgggccggcagggcaggcagggccgtgagtccgtggcccctgcagtccacccacagccccatggtttccagggcgcggcaggtacatgggctggggcagtccttggtggcctctgctgtggcccagagcaggaacagggctccccaggcaggcatgggacaggctggctcccttctcgggtctcagccttctcctctgggaaaccagctggtgactagggaaggtggagtgtgcccagcccaggcctggctaactgtctctggacaccgtagaaggccgggcggtgagggcggctgtgaagcctttggtcaggtgctcctgtctggcctgaaaggtcctggc

SEQ ID NO: 464422 - DNA, 1000 bp, Homo Sapiens; identical to SEQ ID NO: 157256

SEQ ID NO: 464423 - DNA, 1000 bp, Homo Sapiens; identical to SEQ ID NO: 335046

SEQ ID NO: 464424 - DNA, 1000 bp, Homo Sapiens; identical to SEQ ID NO: 335047

SEQ ID NO: 464425 - DNA, 1000 bp, Homo Sapiens
aagacagtatgcctttatttcacccaccctcccaggacccaaataccatggcacatggcctggtatccacggtgcaaggtccagaagagcccgaggaacacagcccagcaatgcagtgtcacaaatccctgccaaggagcagttcaccccacctcctcaaaggggggtgcctggggtccactgcagatgggacagggagcagggcccagaccctgtccggggccgggcctcacttctcaagagaactggcccggccgcgccttctccagcttccgtcgccgctcgggtgggatctcctgcaggctgatgccgtggttgctggaccccggttgcaggtcaggcggtttggggatgggcttgttgaagccgcgtctgcccactagccagaaagtgtcctcggcgcccttgcccttcagctccgtgcggcctcgcagctccacctggtagcccgagtccagagcacggagaatccccacagtgctcaagttcacgtggatgcggtaaggcagcccggtggactccatgcgcgaggcggtgttgaccgtgtccccaaacaggcagtaccgcggcatggtgaggcccaccacgcctgccacgcatggacccgagtgcaggcctatgcggatgcgcacgggaacctcaggcatatggcgcatgcggaaagtgcccacggcactgaggatgtccagtgacatgttggcgatctctgccgcgtgtcgctgcccattccgctggggcagccccgaggccaccatataggcgtcccctattgtctccaccttgtagacatcgtgggaaccaatgatggcatcaaagagtgtgtagagatcgttgagcaggtccacaacctcaatgggctcactcatggcagagatggtggtgaagcccacaatgtcactaaagtacagtgtcacttgctcaaagtactcgggctccactggtgtccccgtcttcaaggcctcagccacagacggaggcagcatctgtgtaagcagccggt

SEQ ID NO: 464426 - DNA, 1000 bp, Homo Sapiens; identical to SEQ ID NO: 157258

SEQ ID NO: 464427 - DNA, 1000 bp, Homo Sapiens; identical to SEQ ID NO: 157259

SEQ ID NO: 464428 - DNA, 1000 bp, Homo Sapiens; identical to SEQ ID NO: 157260

SEQ ID NO: 464429 - DNA, 1000 bp, Homo Sapiens; identical to SEQ ID NO: 157261

SEQ ID NO: 464430 - DNA, 1000 bp, Homo Sapiens; identical to SEQ ID NO: 335051

SEQ ID NO: 464431 - DNA, 1000 bp, Homo Sapiens; identical to SEQ ID NO: 336121

SEQ ID NO: 464432 - DNA, 1000 bp, Homo Sapiens; identical to SEQ ID NO: 335052

SEQ ID NO: 464433 - DNA, 1000 bp, Homo Sapiens; identical to SEQ ID NO: 335054

SEQ ID NO: 464434 - DNA, 1000 bp, Homo Sapiens
aaagtggcaaaaaatgtgtattctatgcctctgtgaccccagccccctccatcttcagcggactaggttgaagtgctggtctgctcctctggtcctcttcagccagcatgggactggtgaggaaaaggttgtgctggactcctcaccgcctggctacctgaccttggtgttgagcttcaggtatgccacatagtgtgtcaggagcagcctttggaaggcaccgctgtagaaggcccaggccgggatcaggctcagaaagcccgccaagatttcatgggcaaggcagccacaggtttcacctccaattgtgacataattcaatgactctttgacaaactcatcagcagtcttggttatcacatttgtatttagatactttgtcattgcagtcgagacagcatatggggtcagcacctggatgatgacttcttttgctttatattcctcttgcagggccttggaaaatgcgcacacaaacgccttggaagctgagtacatggagtagagaggccaaggaaacagggctatcccagaagaaatgttcaggatgagacctttctgccttgattccatatgtttcagaattagctgtgtcatcttgactacggaggtgatgttacaatggatgaggctctggatttcatccggtgcgttcaggaaatggcttgggagaaggtttggaagcattccgacattgttgactaaaattccaatttctaagcctgcaagtttttctttaatatgctcgtagatgtcatcttttgtaaaatctgcttgtataatcttcacactcctccctgtagtccgctcgatctctgtggcaatggcctctagtttttccagcgtccggctaataaggacaacattgagtccacgttttgctagctcgaacgagtacgctttcccaattccatcgcctgctccagtgatcactgcccactgtcccattgaccgcaagaaagactttggcaaaactttccagtagttcagtaaaacacat

SEQ ID NO: 464435 - DNA, 1000 bp, Homo Sapiens; identical to SEQ ID NO: 335055

SEQ ID NO: 464436 - DNA, 1000 bp, Homo Sapiens; identical to SEQ ID NO: 335057

SEQ ID NO: 464437 - DNA, 1000 bp, Homo Sapiens; identical to SEQ ID NO: 335059

SEQ ID NO: 464438 - DNA, 1000 bp, Homo Sapiens
atgcttcaccaaaatatttatttgagaattatacaacaaaattccaatatggcataaactctgtggagacctttaaaaatatccaatgagatttgcttcatttttcccccctagagaattattaattataccgttttatttccattaaatggaactcttgagagaaaaagaatagaatgaagagagagatcacaattttatacattgtactgagaaataaaaggccttcctacatggtagctaatccagtcaaaataattggccactttggtgtaaaaacctgggaactctggttttccacagttttccccccaactcacaacaccccagacataagtcacattgttggcatccatacagactaaggggcctccagagtcccctttacaggcatcgatggaaccatcatatgtacctgcacattccatttctttttcatagaaacgatttccgtaaaacttagagcagttgcttattagtttaacttcaccccactgaagtgaaaagactctttcgttatctttttctcgtccccagccagaaacgatgcatgtatcattaggttggaataggtaaggagaccaggggacacaggcagggatggaacgaggcagctcacaatcttttttgtttccgtcttttttcatttcaatcaaagcgatgtcattttggtaagtgcctgcattgtagttttcatggaaaataattctatccacgtattcaattactatacgtttaaggtcggggtgtatccagtctactactgttgtccatatttggtaacgatgagttttactggctctgagacaatgtgcagcagtcagaatccaacagccaccaatataaattcccccacaggtgattccactggcatccttaattgccacctgccatgggaggtctcccagttgtgctcgctttcctcccacaattcgtttccttcgaatgtgcattctgtttttaactccacaagatagtttaggtaataatgattttatcc

SEQ ID NO: 464439 - DNA, 1000 bp, Homo Sapiens; identical to SEQ ID NO: 157262

SEQ ID NO: 464440 - DNA, 1000 bp, Homo Sapiens
tttggttttttctttcgaaattttgttccacaaacaggaagttttgtcttttatactgaagctcagacaccagcaaaaaaaaaaaaaaaaaaaaaaaaaaaagaatttgtaaaaacaggtgctttctttccatctgctgggggcgggtggggggaacgaaaaaacacaaaatcctggtttgaaaccgtcgttgccccaaaggagcagcaactgtggaaaccccttgccctccaggttcacagttaaatcctctgcaggactagttaaattggtaaccaaacgagtccaccttaagatgaacagaaatgtataggaacgatctctgaactccactggacatggtagagtcgtgagaatcctgagttttccagaggctttcaaaccagaggaaagcgaaaatgggaacccctgcccgcccccgccacggtaggcactgttaggaaggattggaccgaggcaaggtcagaatccgcccgtttttcttgcctccgttcatgtgtgtgtaagggatgtgttcctcgtagctccgcttgaaacccagcgaggaccctccatcccggccccccgcctcctccctctgacagtgcgaggaacggtccaggggcacattctccatgtcctcaaactccatctccagctcctcactctcgggagccttgttctcctcgctgtggaagaacgacacctctggaaagctggggtgcaggtcgtccttgagcaggttgacaatctccaggaaggttggcctcatcttggggttgaattgccagcacatgcgcatgaggtcagtgactctctctggacagttgtcgggttgatccagataccctccatccatgacaaatttcaacacctgttcattagacaggccttggtaaggctgttctgccaagctggtgatttcccaaaggaccacgccaaaggaccacatgtcagaagaagtggtgaagaccccatccttcagggactccggtgccatccaccgtacagggagcagacc

SEQ ID NO: 464441 - DNA, 1000 bp, Homo Sapiens; identical to SEQ ID NO: 157263

SEQ ID NO: 464442 - DNA, 1000 bp, Homo Sapiens; identical to SEQ ID NO: 335062

SEQ ID NO: 464443 - DNA, 1000 bp, Homo Sapiens; identical to SEQ ID NO: 335063

SEQ ID NO: 464444 - DNA, 1000 bp, Homo Sapiens; identical to SEQ ID NO: 157455

SEQ ID NO: 464445 - DNA, 1000 bp, Homo Sapiens; identical to SEQ ID NO: 157264

SEQ ID NO: 464446 - DNA, 1000 bp, Homo Sapiens
ggtgggaggatcacttgaggttaggagttcgagatcagcctggccatcatggtgaaacctcatctctattaaaaataaaaaaaattagccgggtgtggtggtgcacacctgtaatcccagctactcgggaggctgaggcaggagaatcgcttgaacctgggaagcagaggttgcactgagccgagatcgcaccactgcactccaccctgggtaacagagcgaggctctgtctcaaaaataaaaataaaaataaaaaaaataaaaagagagagacagaaaaggaaactcagggggccagggcttaaggggttgggaagatgcgagagtcttaaatttggttccttgcttctttgggccaggactcagagagccccactgacacatatgcccatctgtcttgaaccttaacaaattgcaaaggccacaggctattctacaggccacgggagcccccccaaatgcaatgtcatgggggtgttcctgaagtagaggaccctcataaggcctctgaggcccagagaggggcagctccgggcctaaggtcacacagccagtcaacagagacctaatccagaggtctgcgggcaggagctatgaaaaggacagggagtggtgtttgccctctgggtgagcagtgaaggcatgagtctcacacccccggcttccgctccacagcatgtccagctgggggcccagggcgctgaatgatggccggtcctgtgggctaggggcccagcacagcttcatgagctcgtgaacctcagcagggcaggcaggaggcgccggcagcctctggccctcctccagcagttccaagaggcggcagagggcggggacatcccgctcacatcccatcatccgcaggaactcggccgaggggctgcagcttttgtcgcagtaggtgaagagctcgtacaggacgaccccgaagctccagacgtctgactggcgagagaagatgttgtccgagagggattcgggggcataccagaaaatgggg

SEQ ID NO: 464447 - DNA, 1000 bp, Homo Sapiens; identical to SEQ ID NO: 157265

SEQ ID NO: 464448 - DNA, 1000 bp, Homo Sapiens
ttaaacatcggtcagtagcttgctcttattaacgcagttttggttagctgtggtgcaattggcagttctgatattgacctgtctataatgggctatgctattattcatatcctcttcgatctccatgtactcatacttgctcatagtagaggaactgcggcgactgaggtcactgtcagaggctaagttaggggaactgacgtggagcaactgagcctgctcttccccctcagtttctcggtggtagaaatagttgaaattggacacaatgacaggtacgggcagggcaattgttagcacaccagcgatggcacacaaggagcccacgatcttgcctccaattgtcacagggtacatgtcaccgtatcctacagtggtcatggacaccaccgcccaccagaaagcatcggggatactggagaagtgcgactcagcttcttccgcctcggcaaagtacactgcactagaaaacaggatgaccccgatgaagaggaaaaagatgagcagccctagctctctcatactagctttgagggtctggcccaggatctggaggcccttagagtggcgggagagcttgaagattctaaaaacccttaccaagcggatgaccctgaggatggccagggaggtggcctgctcgcccttctggtttccttcctgctcagctatctcggtgcccagggtgatgaaataaggaatgatggccacaatgtctatgaagttcatgatgtttttgaagaagtccgtcttgctggggcaggcgaagaagcgcaccaccagctcgaaggagaaccagatgatgcacagcgtttccacgatgaagaaggggtctgtgaagatgttggaattgtagatgaccgtggtgttgtcgatgcggtggacggtgcccgtgaagtccttgtcatccttcagctcggggagcgtctccaggcaaaagatgacgatggagatgaggatgaccatgacggagacgatggcgatgaccctggcgggcccc

SEQ ID NO: 464449 - DNA, 1000 bp, Homo Sapiens; identical to SEQ ID NO: 335066

SEQ ID NO: 464450 - DNA, 1000 bp, Homo Sapiens; identical to SEQ ID NO: 335067

SEQ ID NO: 464451 - DNA, 1000 bp, Homo Sapiens
ttaccattcatcttttattacaattaactctattaaaacaatactacttgagtaaagctctatgattaaaaaatattccgggttaccagaagaaagttcgttaaaagactactccaggtccagaaggatataaggtaattttgatttgttacaaagaccaacatgaccaaaatgacttgtgactgaatattgtttcagaagggcaaaaaggattcaatgtgaatagggaatccaaagaaaatggaacagacaaaaatagggattgaagtaatacagcatgttactctgaaaggaataatttctacttgtaaatttcttgttcctaaggaaccaatcatggggcagatcttgtgaaattttacattagttcttcaatttcctgaacttgagatgagaccacctcaccattcaccatctcctgcacaactgtcttgatttttcgggttttggttgggtctttagaggaatcagttgactgtgcttgtgatttggagtctgtcacaaataaactttcctccaaaccatcaccttgggcctccccgtccagcaggcggcggtaggtctcaatctccagctccaggcgggccttgacattcagcagccgctggtggtccacgttctggcgctctgcgtccgcgcgcacctggagcagctgtgcctccaggttgctgatgagctgctgcacctgggacagctgcgcgcagtaatcgccctcggcttcggccaaggagtcctccagggatttcttcatggcgagctgggactgtagctcgatctccaggttctgaaaggcgcgacgcaggtcggtgacctcgctcttgctggactgaagctgctcggtgttggtgctaatctccttacggagctccccgctcttttcaatgaaccaggcttcagcgtccttccgattctgctcagcgatggtttcatactgcgcccgcatatcattgaggagcctggtgaggtccactccgggggcagcgtccatttctacgctgac

SEQ ID NO: 464452 - DNA, 1000 bp, Homo Sapiens; identical to SEQ ID NO: 157266

SEQ ID NO: 464453 - DNA, 1000 bp, Homo Sapiens
gcagtagggaagctttattatagtcaagatcgtgcagggtgtgagagcaccccaggccagagagaggaaagaggtctgtctccccaaccctgaaggcatcaaagccaagcagggttggaagccaatggaaagccagaggcacatatgccaagtcagttcagtcccaaacgggcacaggggcttgttgccagctattcctgatgtcaggatccaataagcaggcttcatcgggagtctgcccatctggggatgctcagctggggctgggcaggagaagtttacagaggctctagtatcgcgaaaggaagccttttgtctcatcttggtcaccagattttgaggaagaagactaggaatgggatgattttccgcttcctcctccgtagccgccaccacttccactcgcttcttcaccgcctccgtagctgcctccactttcacctccaaaaccacttcctccaccatggctgcctccacttcctcccctggacccacttcctccaccatagccacccccacttcctcctccagagccacttcctcctccatagttgcccccacttcctccactatgaccacctccacttcctccgctatggccacctccacttcctccaccatagccacctccactacctcctccagaaccacttcctccaccgtagctgcctccacttcctcccctggacccacttcctccaccatagccacctccacttcctcctccaccatagctgcctccacttcctcccctggatcctcttccataactgcctccacttcctcctcgacctccaaggccaatttttccagctccggaggattcaaagtcttcctggcctccctcaaggaggttgtggtaggtctcgatttccttctccagccgcatcttaatgctgagcagaaggctgtattcctgattctggcactcgatctcttgccggacgtcagtgatctgggcctccaagttactgatctgctcctggatcatctgcagctg

SEQ ID NO: 464454 - DNA, 1000 bp, Homo Sapiens; identical to SEQ ID NO: 335069

SEQ ID NO: 464455 - DNA, 1000 bp, Homo Sapiens; identical to SEQ ID NO: 335070

SEQ ID NO: 464456 - DNA, 1000 bp, Homo Sapiens; identical to SEQ ID NO: 335071

SEQ ID NO: 464457 - DNA, 1000 bp, Homo Sapiens; identical to SEQ ID NO: 335072

SEQ ID NO: 464458 - DNA, 1000 bp, Homo Sapiens; identical to SEQ ID NO: 335074

SEQ ID NO: 464459 - DNA, 1000 bp, Homo Sapiens; identical to SEQ ID NO: 335075

SEQ ID NO: 464460 - DNA, 1000 bp, Homo Sapiens; identical to SEQ ID NO: 335076

SEQ ID NO: 464461 - DNA, 1000 bp, Homo Sapiens; identical to SEQ ID NO: 335078

SEQ ID NO: 464462 - DNA, 1000 bp, Homo Sapiens; identical to SEQ ID NO: 335079

SEQ ID NO: 464463 - DNA, 1000 bp, Homo Sapiens; identical to SEQ ID NO: 335080

SEQ ID NO: 464464 - DNA, 1000 bp, Homo Sapiens; identical to SEQ ID NO: 157269

SEQ ID NO: 464465 - DNA, 1000 bp, Homo Sapiens; identical to SEQ ID NO: 335082

SEQ ID NO: 464466 - DNA, 1000 bp, Homo Sapiens; identical to SEQ ID NO: 157270

SEQ ID NO: 464467 - DNA, 1000 bp, Homo Sapiens; identical to SEQ ID NO: 335084

SEQ ID NO: 464468 - DNA, 1000 bp, Homo Sapiens; identical to SEQ ID NO: 335085

SEQ ID NO: 464469 - DNA, 1000 bp, Homo Sapiens; identical to SEQ ID NO: 335086

SEQ ID NO: 464470 - DNA, 1000 bp, Homo Sapiens; identical to SEQ ID NO: 157271

SEQ ID NO: 464471 - DNA, 1000 bp, Homo Sapiens; identical to SEQ ID NO: 335089

SEQ ID NO: 464472 - DNA, 1000 bp, Homo Sapiens; identical to SEQ ID NO: 335090

SEQ ID NO: 464473 - DNA, 1000 bp, Homo Sapiens; identical to SEQ ID NO: 335091

SEQ ID NO: 464474 - DNA, 872 bp, Homo Sapiens
gccggcaagaagcctttattcatgaggcccatggggtggggacagagctgctgtcacaggtaagcacagcctgagaggggccagagacggcaaccacgtggagaggtccaagggtttttgcaggagtcttggtaaggctcccctccttcccacgactccaggccgcttggtgtcagcatcacacatgggagatgagacgtcctgcacagccttcctggcttctgggcacgaggtttagctggacatgatgtgcttcacaaatgcttcatagttgatgcagccattggagtcctcttgcccagccatcaacttctccacttcgtcttctgtcagcctctcacccagcgtggccagcacgtggcgaagctcagcacccatgacagtgccattgccctccttgtcgaagacccgcagcccctccacgaagtcctcataggtgcctgtgtccttgttcttggaaatgtgctggagcataggcaggaaagtttcaaagtccatcatcttggtattgagctcttcctgtcttggcttccccaggacacggagcacttctgcctgtgtggggttctggcccagcgcccgcaggacatccccacactgcccgtaggtgatcttcatctcacacttgggtgtgcggtcgaacagcatgaaggcttccttgaactcttcaatctgctcaggtgtgaactcaatcttgatcttggaagcatcaaactcgacctccttagggcgctcaggctcagggggaggtgcgggagctggagctgccttgggggctgccttggcatcatccttcttgggctctggctttttgggggccattggggctgtaagtacagagaggcatgtggagagaagaatgcagaaagcag

SEQ ID NO: 464475 - DNA, 1000 bp, Homo Sapiens; identical to SEQ ID NO: 335092

SEQ ID NO: 464476 - DNA, 1000 bp, Homo Sapiens
tttcagagaatgaaacatgctttatgccctgaggtgatcagggtagacttgagcaggggcccagcattcacactgcaatatagaaaagtggtctgtctccctcatcccacctgcagatccagtcccttcggtttcagagtattcaatgcacatttggttgttcaaagtatggagagctagattgtcctcttgattcctctatcccagtggtacacagaaagtcaaaggaagttgcatggtggggctggtctgaaacaggagacacatctaaggatcacaggctctcacaaccgggaaggccacagcaaactaggattagaccaacccaggtgccagaggggtggatggagggaagttctgcatcccagagagatgcctcactggaagaacatcagaggcccagttggtatagtcagtggtggctggccagcccagcctcgctgccgggatggcataagtcttccccagctgcaggggtagctgatgggcctgaacccactgctgcctcgagagcaggcatggaaccagcacctccccgtgactgttcacttgccgctcctggagccccgctgtttgctcatggctgtgagcatctggctaatgtaggaagtcaggaggtcatccatcttgtagcccagtgacgtctcgcagagcagtttgctcccgcgcaccaagttcccaatggtgatgtggaagtaggtgttgccgctgctccagttggagatcttggtgaagggatgagtggtgaggatatccttcgttttgggatcgatgaggctgaccccatacttgttgatggcaattaggaggatctcagggaagtttggctccgtagtttgcttcacctcgaagaaggctgagccaaaggtgggccacttgaagatgagcttcaggaaggccagcttggcctcctccttggacttccctgcgtgcttgttgaagtaggcgacgatggaccgcttccagtcatcaggtgagacctgccggataaggtcctggg

SEQ ID NO: 464477 - DNA, 1000 bp, Homo Sapiens; identical to SEQ ID NO: 157272

SEQ ID NO: 464478 - DNA, 1000 bp, Homo Sapiens; identical to SEQ ID NO: 335094

SEQ ID NO: 464479 - DNA, 1000 bp, Homo Sapiens
ttttttttttttttttttaaaaattaaaacatccaaatgaacaaacaggacagacaaaataaaactattaaaagagagagagaaattctaattccctgccagccccaccccccgcccaccccagttctccctttgccaatgtgactattggagaaagttctacaccatgcagaaatcaggggccgcgcagcctccggcgcaacacgagctgggctcaggaagggagcgagggcacgccaggagccagagggaagtcgacttcagaattctgcatcatccctcctccacgcaggacgttttctgagcagagctgggtgttaggatggcagaccatgtgggtgacaggcaccaagacagcagcaggggggtggccagggtccccagcagagacacacacacacgcacgcacgcacacacacacacacacacccagcagccacaagcggctcccaatcagcatcttaaaagttttgtggtgagtatcagggtctgaggtcactatgctgtgggtatttctgggggcccattacctttctgttaagatttcccaggtaatttaaaagggagtaacaggagctgccactcgtgagcgcctcacagtagcttaggcttcagccctgcagggaccccgccctttcctctgacttcttgtctgtaacaaggtgctggtgtggatttggatggggagccgacactgggtgcttccctgacatgtgctggtctctggttacgagatgagggagcccacacctcagagcaaaagaagagaaccagtacagaagcaacttttaaaaatatgcctggttgagagacctgcccctgcctacatctttcagtggggtgtgtccatcctcctgctttcccacatcacattgaaagagcactaatgacggggaggatggagacaatgtttggatttacttaggaagcacgtaccctaaacactggtgcatgaagaatccccccggagctcttatcctacataatgcctgcctctaca

SEQ ID NO: 464480 - DNA, 1000 bp, Homo Sapiens; identical to SEQ ID NO: 157273

SEQ ID NO: 464481 - DNA, 1000 bp, Homo Sapiens
ttttttttttttttttttgaatatactctttttatttcaaaacgtgggaataactcaaaatttgagcctccaggaccaaaacacatttgaaccaaacgttcagaagacaagccaggccaccattttggcaacatgtttcacatggacaagtggatattagagaatgatgcccgtgacacgctaaagctatagcacacccacaaatagattcatacttggttgtctaatttgcatgcatgagtatggtgcattctccatgccactagtacatatatgccttttccagagtcagtgcaggatccgtatttgtgcaagtctttaaaagtctgctcccttacaaaattttaccataatttatctgagacagccttcctgtgacaaattctttatgctgcttttactttcaaaaagtcatttctgaataataattatagctgtcaagagttccagcatcacataaaagaatctgtttgttagttattttaatgtcagttcgctggctgtgagtaaacgtagctaaacatatccacatgcttggtatctggactttgaaatcggtaacctttagcagcaatggcaaccttagaccaaaatgacaaggtaaaaaaaaacatcaacaataacagaagatgtcccaggaaaagctgggcttttctactttccaaagtaaattcttccccagcgtgcaccaaacactgacagcctgacacgcttgtgtatgagggcccactttttcccactaatgctgaattgttggaaacccaaacagcattgagagccaagggggaaaatgcctgaatctgaaaatgaaccaaaagaaattgtaccagagaaaggagatgggaactgcaaagaagttcccagagtatctctctctgtcaacaagcatgtagagtctttattactagaatatgcagagtcccgggagaattgttgcatccttttttgccttaactcttttcttgccagtctttccctggctggtcgaactgcctctaca

SEQ ID NO: 464482 - DNA, 1000 bp, Homo Sapiens; identical to SEQ ID NO: 335096

SEQ ID NO: 464483 - DNA, 1000 bp, Homo Sapiens; identical to SEQ ID NO: 335098

SEQ ID NO: 464484 - DNA, 1000 bp, Homo Sapiens; identical to SEQ ID NO: 335099

SEQ ID NO: 464485 - DNA, 1000 bp, Homo Sapiens; identical to SEQ ID NO: 335100

SEQ ID NO: 464486 - DNA, 1000 bp, Homo Sapiens; identical to SEQ ID NO: 335101

SEQ ID NO: 464487 - DNA, 1000 bp, Homo Sapiens
acagtttattttaatacataaaatgtttccttacgagcagtaaaccttttcccagaaagtctatattcagaaagcatacaatttgaatgctgattattttaacatgaaaagtgattacaagaaaaacaaactgtgtttagcctcaggagaattgacagttaaacagtacagtcaattttaggtggatgtgtgtcttttcctatgtatagcaggaagggtttttaaacatacgtatttttctggaggggaatcttgagtaagttatctcacatctttctacattttgtccttggggagaaaggacacacagaggaggtcatggtgttccaacattcgcttgaattagagtgttagtgtcaaggtctattccactgtgtctctgtagcatctccagggtaagcaccttttcttcttcaaacagtggggtcagggtagttttatgactaatgggttgtgatggatgaagtttcctttagtcttcgagcaatagatggatgtctattaattccatcccaccaccacatgagccacaaggagataacacatcccaacagtgcaggacacaaccatcattgggaagcccagcctgaaaaattccatgaaggagaacccatatccatgctgttctgcaatccctgcacacacgacgtttgccgacgcgccaatcagtgtcccgttgcctcccaggcaagcaccgaaggccagggcatacatgagcggcggtgcgggcaggccaacctcagggtcgtggctcaggttcaggagcacgggaatcatggtagcagtgaacgggatgttgtcaatcagggacgacgccagggctgagacccacaccaccaggacaatggcggctatgaggcgctgctcctctgggaccatctttattagcaaagcagtttgttctccaacatattctattaagtggagatgtgccaatgcctccatcagaacaaagagcgctgcaaaaaacagaagggttgcccattccactctgtgtaga

SEQ ID NO: 464488 - DNA, 1000 bp, Homo Sapiens
taaactactaatgttttattactaatacaaataaaaatttcacatttatacagatttgcttttcaataatgtatttacttatttattcagtgaacatttcctgaatatctaccaaccaagcctttagtcaacatctgctgcatcataaatgtcctcaaagtgtttcccaaaacagacttgataattaattggaaaatgatactggaagttatggggattaggtgcagagttttattaccttatacagcagtatttatgattacaataaaacatacaaaaatgtttttatattaatataatactaaagaagttcaatgcttgtaactattttaatgggcttctgacctaaagaaaatttacttaggtacaataacaaagtagtaattggaatcatagttaactaaaatagaaaataaacttcataggttacgatttatattaagcccaataattcaattctaatgacagtcttgtgttttacatttagccttatatgctcctttatgagttctctgcaaagcatatatgaagcttgaatgaagcaggtcccaaattttaattaatcttgatgaaatgcgacagattactgatttaactcaattgagagtatgggattatcatctctaaatcaaagatgaccccaaaagatttaccattatgctcttgagtatgtactcatatcctgtcatttcagattattttgacttatttgttgtttctccatcttgtaaaggatttaaggctgttatttcaaattaaggtttgcttttcggactttttctgatgaaagaaatagttggatctccatcaacagattcacagctgacagaccacattctgtccatggctttactttattttctggagggcactgcaaaggattccaatttcactgttaatggaatcagccaaaatcttaagctgctgggtattgtccaagacctcaatcctttgggtgtatgggtcgtagcgaactgagaagggccgaggtattgtggca

SEQ ID NO: 464489 - DNA, 1000 bp, Homo Sapiens; identical to SEQ ID NO: 335102

SEQ ID NO: 464490 - DNA, 1000 bp, Homo Sapiens; identical to SEQ ID NO: 335103

SEQ ID NO: 464491 - DNA, 1000 bp, Homo Sapiens; identical to SEQ ID NO: 335105

SEQ ID NO: 464492 - DNA, 1000 bp, Homo Sapiens
aagcactcaataattcatcttttaatgcactaatgtacaaactgcatgcaattactacctgctcaatctacacacttaatggaagtttccaagaatttcattgaatttcattgactgggttttcttcctccttaaccaagttgagaacactgtctggtagccccctgaaggtataacctctccttctcctccccttaactgactgacttaaacttgatccactgattggcaccacgaacttcaaaaggtgggtcgctggagtagatgtggtagcccagctcttccaaaggtggctcaggatcggccgtggcaaactgggcagcatcctcaatctccttcctcacttccacatcaatttcctttagttcttccacactggcaagattgctgttcaccatcctgtccttgagaagcataatagggtcactcttacttcttacttcctgaatttcttctcgtgtacggtaactgactccagggtcactcatactgtgtccgtggtaacggtaagtctgcagctccatcaggatgggccccttcccagatctacaataggcagcagcaaaccttgttgcctctcggacgcacaggatatccattccatccactctcagcccaggaatgaaatcgcctctcttgtagtaatcagtgctggctgccgctctctcaacagacgttcccattccatagcgattattctcacagatgaaaatacaaggtaatttccacaaagctgccatgttgtaagcttcgaatatctggccctggttagcagcaccatcgccatataaagtcaggcagacctcatcttttccattatacttacaggctagagcaatcccagcgcccaggggcacctgcgctcccacgatgccattgcccccgtagaagttcttggcatacatgtgcatcgatcctcctttccctttagcacaacctccttttcgtcctgtaagctctgcgagaatttctcggacggaaaggccccgggtgaaagtaa

SEQ ID NO: 464493 - DNA, 1000 bp, Homo Sapiens; identical to SEQ ID NO: 157275

SEQ ID NO: 464494 - DNA, 1000 bp, Homo Sapiens; identical to SEQ ID NO: 335107

SEQ ID NO: 464495 - DNA, 1000 bp, Homo Sapiens; identical to SEQ ID NO: 157276

SEQ ID NO: 464496 - DNA, 1000 bp, Homo Sapiens; identical to SEQ ID NO: 157277

SEQ ID NO: 464497 - DNA, 1000 bp, Homo Sapiens; identical to SEQ ID NO: 335111

SEQ ID NO: 464498 - DNA, 1000 bp, Homo Sapiens; identical to SEQ ID NO: 335112

SEQ ID NO: 464499 - DNA, 1000 bp, Homo Sapiens; identical to SEQ ID NO: 157278

SEQ ID NO: 464500 - DNA, 1000 bp, Homo Sapiens; identical to SEQ ID NO: 335114

SEQ ID NO: 464501 - DNA, 1000 bp, Homo Sapiens; identical to SEQ ID NO: 335827

SEQ ID NO: 464502 - DNA, 1000 bp, Homo Sapiens; identical to SEQ ID NO: 157279

SEQ ID NO: 464503 - DNA, 1000 bp, Homo Sapiens; identical to SEQ ID NO: 157280

SEQ ID NO: 464504 - DNA, 997 bp, Homo Sapiens
ttttttttttttttttttttttttttttttgctaattgctttattcagaagagaccccccggagtacagcttctttggttaagcacggagttgaggtggaggagagcagtagaaggctggaaatctgctggatgtctcattctgggtgggtatagaagggctcctgcctggcctctaggatgggtgagggatgctttctgcatggccaaggaacttggttagggtagggagggagggtatgagagagggaaattcagcactgggtggaaggtttccagggaagaggggactcagcaacgaggggtgctccctctgcagtgtttattggaatagtactggtactttttattgtaggtcgtcttgtttctagcaaaacaggtggcagcagccttatcacactcacacagttgacttctgcaggagtcctgttttgcacaggtgattctgctccccgagttgctaaacttgtagctcagaaatttggtgccacatccacgtttctccagacgtttgtagcaacagtcatgagtgacacagcagcgatccgttgcatccttgggggatcctctgccacccacgccacagtggcagccgtagaagccataactgagtgcggcttcctttcctgtcgtcaacttgatcattctgtggaaattcaccaaattcccatgggcctgcagtaggccaaagatcatgatcactgccaacagtaggagggtcttcatggtaagagttcttgggtgacaaatgcagatggactggcctagctcctctgctgggtggtctcaacttctgccccggccgtcgctcccctgctcctccttggtggctctctcagaggactccagagttgtatccccaggccgtcttgtttgttctgcactcctgctccccttaaatagctgctccctctgggaggttgggggtaggtgaggcacaaggctgtttggagacagggcaggtgaatgctccctggatctgttgctctttttccttc

SEQ ID NO: 464505 - DNA, 1000 bp, Homo Sapiens; identical to SEQ ID NO: 335118

SEQ ID NO: 464506 - DNA, 1000 bp, Homo Sapiens; identical to SEQ ID NO: 335121

SEQ ID NO: 464507 - DNA, 1000 bp, Homo Sapiens; identical to SEQ ID NO: 335124

SEQ ID NO: 464508 - DNA, 1000 bp, Homo Sapiens; identical to SEQ ID NO: 335125

SEQ ID NO: 464509 - DNA, 1000 bp, Homo Sapiens
ttttttttttttttttggtgctcatcttcgctcgtttaatttcagtcagatattaaacatttacaatttttttatataacaaaacaagaacatgcaaagttacaaatatagaaaatataaagtacatgcatatttcaaagacctgttaatggtgtccactttggattcttacatgaaacgattcagtgcacattgtaagcctaaggaccacgcaaaagggtttcccacatattaagtattcagtaccttacaaaagttaatgcattagacacttcagatgttaactgctctaaacaaaactcctaagtctgtcctatgcaatatatattttatatacatatatatttttacatagaatactcacaaagtgcaagccaataataacattgcagaaaagtaatacatatctgctaggtgacaatatcaaacaattcagggaataattttactttaattaacattaacagaatttctttttccacttcaaatcaatcatatttctgtcatctccaacctaagatattttttagattgtctccctattctttgattcaaaagccaattacagaaactatgaacttgacctaattctggtttttgacaattatgagacagaaataaagaaatgcaagcagttcttttctttgcacactgaccattttttaattacatcatcctctatgatgatggtgctttcacaactgcagctctcctgtatgtcaaaatcattctggtttccaggtaaatggacaaaggagatttgccttcagtgtctagaaggcaatttacttttcagctgccttaattacctatagtttaaagaaaggaatgccacatatagggtcctttaaacatctaaaatgggaggttgcctccaagggcaccattcccaaacatttgatttcaagtcccagaagcctttcatatatgttacagttatgttcactgtgaatatgtcctctagccagaggttcagtgttgtgacaatatttactcttgt

SEQ ID NO: 464510 - DNA, 1000 bp, Homo Sapiens
ctgcagggggggggggcgggggggggttttttttttttttttttttttttttttttttttttttttcgtggttgtgttttttattctttttcataaacagagtatccccctcaacacacacagctttagaccccgcaaaacttggatctgctcctccccaccccacagagttgctctaggagttaagattctattcataaggcatgtgacatacaacaggtgctcagtaaatgttacttccctccagaagagcccaaaagagggatggaaggacagaacagcaggccggtgtgcttgttacatgtccctttaatgtcccatccattgccatgcaaaagcccagccctgcagggagggtcgctaaggtgcccagctcttctggggggcttccttgtctctgatgtgcccatggatccagtcgaggtagcggctgactttggtgtaaacgccgtagttgtgaaggagcccacagccctcaccccagctcaccaggcccaccaggaaccaggtgccgtggaaggaggcgaccatgggccccccactgtcgccctcgcaggcatcctgccggtccccgaggatgcccgcacacagcatgttctcagacaccatgttgctcatgacctcgctgcactcattgtgcgggaccacgggaatcttgatgaagttgaggacgaaggtgcggtttctcttggcctccttctctcggctgctgtggtagccccagcccgtcacgagggtctcctggccggcctgattgagctcgcgctctgcaaggccgctgtccgggaggcagatgggcactatggtctgcgagagggtggcgggctgggccaggtgcagcagtgcgatgtcattgtcggtggtgctcttgctgtagttggggtggacgaagacctccttgatgtccaggtccagctcccacttctcccagcgccgcaggtcatactctccaagcctgacaaggagcttcttggactcatccatgcagtgggccgctgtc

SEQ ID NO: 464511 - DNA, 1000 bp, Homo Sapiens; identical to SEQ ID NO: 335126

SEQ ID NO: 464512 - DNA, 1000 bp, Homo Sapiens; identical to SEQ ID NO: 335127

SEQ ID NO: 464513 - DNA, 1000 bp, Homo Sapiens; identical to SEQ ID NO: 157281

SEQ ID NO: 464514 - DNA, 1000 bp, Homo Sapiens; identical to SEQ ID NO: 335130

SEQ ID NO: 464515 - DNA, 1000 bp, Homo Sapiens; identical to SEQ ID NO: 335131

SEQ ID NO: 464516 - DNA, 1000 bp, Homo Sapiens; identical to SEQ ID NO: 335132

SEQ ID NO: 464517 - DNA, 1000 bp, Homo Sapiens; identical to SEQ ID NO: 335133

SEQ ID NO: 464518 - DNA, 1000 bp, Homo Sapiens; identical to SEQ ID NO: 335134

SEQ ID NO: 464519 - DNA, 1000 bp, Homo Sapiens; identical to SEQ ID NO: 335135

SEQ ID NO: 464520 - DNA, 1000 bp, Homo Sapiens; identical to SEQ ID NO: 335136

SEQ ID NO: 464521 - DNA, 1000 bp, Homo Sapiens
atttttgtcaatatttatttttaaacaatctctggaagaaaagaaatttaaaaacaaaaggcttaaaatgtattaatacctcaatgttaataatttaatatttttcccaagtgattgcacaatgcttaaatacaattaaacaaaaaagatgcaataaagtataatcctgcaacattatcccataatctgattttagtaaatattacatttttaagcattttatgctgtttttttaaatatagtcactactatatgtacttgcttttatgttacataagcttttaatatataacttaatctctgagatgttatttggttgagaggcctcagttgattaaacacagattttcttattataaaatcagaaataatagtacttgcttgtaataaacggaaaggttaacattcataagattcataatctttgagcagttacgtatacgcaaaataattactgtaattaatcttagatgatagtccctggtttgagaaaaagtttggtttgacatttagtaattaagccttattgcatgatacttccttgactcagcaaagccacatataatataaatcaagtgtagaggactttggtttttaaatgttaaaaatataattggagcagataggtacctaaaatatgctcttataataggaattaaaagccatttagtaagtccacattcatttcctatttgattgctaaatatttaagagtttttcagttatggcctgtctcacagaggaagtatgattatctaaatacgtacttttttttttaaataaaggaattgcttgctcaactcagtgctttctgtaaaacattgcaaaattgtgcgcatctgcaagttaaaaccatgacatatagcaggctaaaattgaacagaatttgattgcagacctgaagctgattttctcagttttgctaccaaaaacatatcttgctggagtatgctcaagattttttgaacagtccatgaaaggtgacagggatgttaatctc

SEQ ID NO: 464522 - DNA, 1000 bp, Homo Sapiens
ttttttttttttttttatacacaaatgttcatagcagcattattcataatagctaaagagtggaaacccaaatatccatcaatggatgaatggataaataacaatgtgctcttgacatgatactgaacaatgatgttcagcaataaaaaggagtgacaagtgacatagtgatacacatgttataacgtggatgaactttaaaacactatgctaagtgaaagaagccagtcacgaaataccacatactatatgatttcatttatgtagaacgtccagaaggccaatctacagagacagtcgattcgtggttgcagagggcttggggtggccgatgggttggggagtgttggctgatgggtgcaggatttctctttggggtgataaactttctaaaattgatctagtgataatggttgcacaactctgaatataccaaaagtcatcaaattgtacactttaaatggatacaaattgtatgtgaacttaatctcaataaagccgtgacaaaagtttccaacatgaactcttatttggaaagcctttctccctgcctcactgtttcctcctctcctttttccctgaactgcactctctcgactcctgtgtttgatgtgccttaactcttaggatactgccattttgtctgacagtccatgtcgtgaccaaagttaattcacctttccaaataagggtctctgttcaggcatttctatccaaaatagatttgtcctgtgtcctaaggccagggataagtccccccaccccccccccccacccccaacaccctgtgtgatgtgtttatatttgagagaagattgggcggggaaaagcattttccgaagttcaagcatacagcatagggactagaaagatgctgggttggatataaaataattgagcccccaaagcatcaagaaggatgtttggggcttttagaaggctgcctgttcacagaaaaggtgaatgtgttgtccagcactgtattagcgcgagtctagtc

SEQ ID NO: 464523 - DNA, 1000 bp, Homo Sapiens; identical to SEQ ID NO: 335137

SEQ ID NO: 464524 - DNA, 1000 bp, Homo Sapiens; identical to SEQ ID NO: 335138

SEQ ID NO: 464525 - DNA, 1000 bp, Homo Sapiens; identical to SEQ ID NO: 335139

SEQ ID NO: 464526 - DNA, 1000 bp, Homo Sapiens; identical to SEQ ID NO: 157282

SEQ ID NO: 464527 - DNA, 1000 bp, Homo Sapiens; identical to SEQ ID NO: 246387

SEQ ID NO: 464528 - DNA, 1000 bp, Homo Sapiens
tatgcattacattaagttaaaatgtattccaatctttcatgttttaagagtaaaatgtcaagacatttttgtgatttcctctaactagtaagacaggtgggaggttctttgtgaggatttccaaccaagccatatacaacaaatccgatatggatccctttcttgccacgggaaggctcaggacaatgagattagcagctctggagtgctcctgtaagagttcattcagtcgaacttggcggtaactcttttccttgactgcttccagttctgcatctgtaattttccacggagtttctctttttaatttctcagcagttgttaaatctttgcagctttcatggagacgatatggttcaatcatctcttcaaagactttccagctctctttgtttggcctaatgttgatgtcaccgatgatatggatgtctgcaaattttatcctaaatttgctcagaagggaagccattgcaattttttcttcttcaatgcggttgatcttccctcccacatagattcttaatttacagtctttccatttttttctgagagttaagatataggggataagaagtgttaaccctccatcatcaaacaaccaccaaacatcaattgtgcctttttcttgtttctttttaaattgagtgctggcttccaccagtttctggttgaactctcccacatgcatcgactggcttgtgttaatgctgccatcttttttaggcgttgtcttagtaatgttcaacttgccagcttttttaaacaagcctcggatgcctccactttcctcttcacactcattatctttgatagtcgcttccaatgctagtctctcctgttctaatctctctaattcctcttgcacctgaagaacctgagagatgtcaaatccttggctgattctgactataaccacgccaatctcaaaatcaaatgcatcatgtatgattcccacgtagttctcaatctctgtcaagggagctttcctccagtttttctt

SEQ ID NO: 464529 - DNA, 1000 bp, Homo Sapiens; identical to SEQ ID NO: 335141

SEQ ID NO: 464530 - DNA, 1000 bp, Homo Sapiens; identical to SEQ ID NO: 335143

SEQ ID NO: 464531 - DNA, 1000 bp, Homo Sapiens; identical to SEQ ID NO: 335144

SEQ ID NO: 464532 - DNA, 1000 bp, Homo Sapiens
catggtcgaatattatttattgtcagaaaggtacagcattcacaccaatatcagacaaaatagattttaactaaaaaattatttcgagacaaaaataacaatatatgttaataaaaggctcaattaaaaatgtataacaattataaacacatacacatcaaacaacagttccccaaaatacataaagcaaacattgacaggattgaagggagaaatagaccactctacaatagtagttggggtcttcaacaccccactttcaataattaatcacagccacttaaggaaccagtgcataccaaaacacacttctggcagtgttgcttcagggaattccgagtgtagggttaatgttccattttctctacctcttctaaaattcctccttcttcaaatggctattaataactttatatttttgtcctttgtgtcagttcttaattcatgttgcttataagcatgatttttattattaaagtgagatgggataaaaataaaatatttttgcaatgagataacgttttattttaattctcaccatttatatacaaacacaagtgaataaaacacatcgcaaaatggtaaaatttcatatttagtatttataggtgcatagtttcatgctcacatatttttaagtattatatatattaacaaatttcacaatacgtcattattcttagacagtatcattaaaagacacctaaaaatcttataatatatgatagcaaatcactaacaacttctgaacaacagcaacaaaaaaatagtgaggatttagaaataagtggtagtcacttaggtgtttttaatttgttttaacatcgtagattgaagccacaaaatccacagcacacaaagaccctgctaccatgtattcacttcagtgaaagggaagcaccgaaatgctgagtgggggcaggtacagatacttcaatcactgctgatggaagacttcgagatacactgtaaaaactttgagaaatgtcatgactgggca

SEQ ID NO: 464533 - DNA, 1000 bp, Homo Sapiens; identical to SEQ ID NO: 335145

SEQ ID NO: 464534 - DNA, 1000 bp, Homo Sapiens; identical to SEQ ID NO: 335146

SEQ ID NO: 464535 - DNA, 1000 bp, Homo Sapiens; identical to SEQ ID NO: 157283

SEQ ID NO: 464536 - DNA, 1000 bp, Homo Sapiens; identical to SEQ ID NO: 335148

SEQ ID NO: 464537 - DNA, 1000 bp, Homo Sapiens; identical to SEQ ID NO: 157284

SEQ ID NO: 464538 - DNA, 1000 bp, Homo Sapiens
acttggtgaaatttattaaaaaaaaaaaaagaaaaacaataatttatgcccttgcaaaataaaagatcttatcaatataaatgtttcttagaaaatgtatgaaaagataatatatattaataaatcaatattaacattacagcaaaagtaataatgattatataacaatgacaagtgaagatatttctggcccttacacagtagtatttctggaaggtctctgattcctgcttgctctagtacaggcgtgctctcactttaagaaagcctgatgccgctgggcgaggtggctcacgcctgtaatcccagtactttaggagacccaggcgggcagattgcctgaggtcaggagtttgagaccagcctggctaacatggtgaaaccctgtctctactaaaaatacaaaaattagccgggcatggtggctcacgcctgtagtcccaactgcttgggaggttgaggcaagagaatcgcttgaacccaggaggtggaggttgcagtgagccgagatcgcgccactgcactccagcatgggcgacagagcaagactccatctcaaaataaagaaagaaagaaacaaagaaaagaaaagcttatattgaacttctctaaaaaaagaaaaaaaagaaagcctgatgcacacaaatctaaatttggcaagtcgatcaattaaaggatatttatttgcatccaaaataattctttactccccccaaaaatcaataaaaagttcaaatagcaacttttcctaatgtgtttaaaatgtaatcaccaaatacatgtgtccccaacttctttccagttataattctattgtgtaaagtgaggtatacctgaagtgaggcaataagagagttgagcttcagacctgcctggagagagcgtgttctttcttagagtctgaggaaatggttgggggcacaaattctctcaatctttttcttttccctcatcctgagctcttattttcttgtctcaactgctttctggtaaactttgt

SEQ ID NO: 464539 - DNA, 1000 bp, Homo Sapiens; identical to SEQ ID NO: 335149

SEQ ID NO: 464540 - DNA, 1000 bp, Homo Sapiens; identical to SEQ ID NO: 157502

SEQ ID NO: 464541 - DNA, 1000 bp, Homo Sapiens; identical to SEQ ID NO: 335151

SEQ ID NO: 464542 - DNA, 1000 bp, Homo Sapiens
ttttttttttttttttttttttagagaccacagtttcttttattgtgacggtgattggggcagcagacagtgtcagggaagggcggagggcagtgcagcagcccccaggaccctgggagccaggacaggacctcaccacaggcagcacaacctcaccacgggcacacacagctgttgcgctgagaagcaggtgcaggggcagtgggagcctggcagcagggagggcatggggggcacccgggacccagcccctcaccagggcctgagctccgggacagtgcaggaccaggggaggttgggaagggccctcagggacgccgtgcacctagccaatggcactcagcgcatgggcaagggtgtccagctcatcctggacaccctccagggagcgccgcacggcctgggggctgtccagcacgtcgatggccagcgtgtacgggtcgaacttcacggagaaggggcgctggatgcgtgaggcatagctcctgagcttgtccttggcgtcactgaagctctcagacacgaagtagactgactggtacgtctggtcttggtagggctgcacggccgcagcctcagggtcgaaggcccgaatctcaggctcctcagacaggcagtgcaggagctccccgtaggaggacagcagcccggcaccataggccttcacctccccgttctgcttacacagcccgaactccaccgtgaaccatgacagcgtggacagcttctcaatttcctcatccgaggcccccagggacgccaggccaatgtcctgcgagaactgcgcgaaggtgcggtcggccagcatgggcacgtgccccagcagctcgtggcagcagtccggctcaggggagtgcatgggcgaggacgcgtggcggatatactgggtgcactggaacacgcggaaggccaggctggccaggaagtcccgggcggacagcaggccggccacaggccgcagctggaagcccgtgcgctccttcaggaagcgggagacgtc

SEQ ID NO: 464543 - DNA, 1000 bp, Homo Sapiens; identical to SEQ ID NO: 335152

SEQ ID NO: 464544 - DNA, 1000 bp, Homo Sapiens; identical to SEQ ID NO: 157286

SEQ ID NO: 464545 - DNA, 1000 bp, Homo Sapiens; identical to SEQ ID NO: 157288

SEQ ID NO: 464546 - DNA, 1000 bp, Homo Sapiens; identical to SEQ ID NO: 335153

SEQ ID NO: 464547 - DNA, 1000 bp, Homo Sapiens; identical to SEQ ID NO: 335154

SEQ ID NO: 464548 - DNA, 1000 bp, Homo Sapiens; identical to SEQ ID NO: 335155

SEQ ID NO: 464549 - DNA, 1000 bp, Homo Sapiens
gcggaatatttctaaatttttttctaaaccaatttaatcagagaacttgtttaaaatataactttctagaaacatacaaagatgcacatgagcagctactttagcaataactttcatgttctcttcaagtacaaaatcgccgatttttatgctcttaaaatgtactgacatttaattacttcaaaagtagagaaaaaagcatttaaaaagtaaaaaatctttccaaacacctgtgttgctcatgtcagaagatttctacatttttaaagttcaggcaagcattagtttaaaagatttgctccttttctttcattcatttaaccaggttggatatcactcatgtatttttagttaggaagccattcacatgacataacttctcattgaatgctctcagaaatgctgctgagataatcttcagacttcattataaaatttgtccattcctgacaaatgtcctccatggagaattcttcaccaccatattccagaggaagaatgtctgggaaatgctgaagcaagctttgtttgtagttgttcccatgcatgtgaatccgttccttaattttttcagtcaggaatggtttgatcatggaaaagacagcatggaaaattactggttcatttatcaaatggatgccacgaactttcaatggaaatgaatccgtaagtacagcagcaatcttcttggctacggatggagtgatttgaaaagcatgagaaaactgccaaccttccagatcaaagatagccttgattccattccgctgagtttctacctcctgtacaataagctcggatgtgattagacttactcgaaatacgtcataagctgtaaaaactttggggtcccagtgtgcgattctgtaaataagaactttgctgccagtgggatccctggatctcaggactccatggtagccagcctttaggaggccaataatacttctagggtgtagatctgcacttatttctggacattctgctctccacttataat

SEQ ID NO: 464550 - DNA, 615 bp, Homo Sapiens; identical to SEQ ID NO: 335156

SEQ ID NO: 464551 - DNA, 1000 bp, Homo Sapiens; identical to SEQ ID NO: 335157

SEQ ID NO: 464552 - DNA, 1000 bp, Homo Sapiens; identical to SEQ ID NO: 335158

SEQ ID NO: 464553 - DNA, 1000 bp, Homo Sapiens; identical to SEQ ID NO: 335159

SEQ ID NO: 464554 - DNA, 1000 bp, Homo Sapiens; identical to SEQ ID NO: 157580

SEQ ID NO: 464555 - DNA, 1000 bp, Homo Sapiens; identical to SEQ ID NO: 335161

SEQ ID NO: 464556 - DNA, 1000 bp, Homo Sapiens; identical to SEQ ID NO: 157289

SEQ ID NO: 464557 - DNA, 1000 bp, Homo Sapiens; identical to SEQ ID NO: 308844

SEQ ID NO: 464558 - DNA, 1000 bp, Homo Sapiens; identical to SEQ ID NO: 335166

SEQ ID NO: 464559 - DNA, 1000 bp, Homo Sapiens
ataatattaactaatatttattgaatgcttattgtgtgctaggtaccaggctaaagtactttatatacattatctcgtttaatccacataagagctctgaggggaaggaatgattattatccttattttaaagatgaagaagctgtggcttagagaggttaaggttccctgcctacagtcactcagcttgcaaatgacgaagccatggcttgaaccccggtctgtctctctggctccagagcctgggtgaccggcagtattaataccactgctggagggaacatagctctgacatttgagggtggatctttcttggaaccacgctttcctaccctagcagctattagcaggccaataattgagaacttactctgtacagggatagggtggatctggcttcaggaattctttggggtagagatgggagggacttctggacccttgagtccctgaaggggctcacataaggcttagcttatgggagtgaggatagtggggtggggaaatagagctcaataatactgccttatataaaccagactgacatttttcagtttatattgtccatggactattacaacagaagcattttcctaaggataaagctacatataggaatattaattacagatacagctcattggtttatgcagtcccttcctaacaatttgaggtgattcttgtgatcctggaatctaaacatggcatcagtatcatgtcctggacagaagcagacatatggtataggaggggtgcaaaccttctggatgttacataatagcagcagcaggtaggagacaaaatatcatatggttttcataaataggaggagatacattctccttatgttgtgaacatttaaaattcagtctgttgtcaaggcattgggcaggactggtgacattctgtctttcagactctcagctctagtggtggcaaatttgatgtcccatcagtctgcacactctggagggtagtttaaagccatagtttcatctct

SEQ ID NO: 464560 - DNA, 1000 bp, Homo Sapiens; identical to SEQ ID NO: 157291

SEQ ID NO: 464561 - DNA, 1000 bp, Homo Sapiens
tttgtttcggtgtagcagacatttaattcttatttgccaactcctgagctaggacctgggaacacaaagttaaataggacacgattctagtcctctaggcaccaacggtcttggaaaggaaggcagacaagtaaactggccatttcaatactatgtggtcgttacaatgctagaggtaggcacagggggcgcagtgcaagggaggaagggcgttaacatctgccacctacttccaggtgccaagcactgttatcaacattattccactttattccctggtgattatgaaaggcaggtattgatattcacacttaacagacgaggaaacagcctcagggagataagcttacttgacccagtctctctcctagtccatatcagaaccaagattcaaacaggttttgtttagaaaatctaggatttttcagccataccaaaataaagtagcctcagggaatcaaaacattcacgaaagaaggtgacttctgaactgagtcttgcaagaattctggaaattaacctggcagttgtatcaggggtggtaaggggacggaacagcttgagcaagagtgagagttccttggggtttggggagggaggaggaaaaatgattttttacttaagaacaaatagcaaggaaggtttgtgagctatgattgggggctggaggggaaagcctgaattctatccagtaatccttgaagggttttcatccaagtggcctgatgggatttgcattttactctggaagatgacttggggattggcaggaagtaaggacactttttttcaagagaatatagccctaaactaaggtagtagcagtggggatataagtggataagttctagatatacttgggaaatataattggaaggacttgtggactgataaagatatatttaagatgtgcagtcagtaggacttgttgattgaggacttgttgattgaaggtggggtgaaaagatgacacaggtttctggcttggttggaaaaagca

SEQ ID NO: 464562 - DNA, 1000 bp, Homo Sapiens; identical to SEQ ID NO: 157292

SEQ ID NO: 464563 - DNA, 1000 bp, Homo Sapiens; identical to SEQ ID NO: 157293

SEQ ID NO: 464564 - DNA, 1000 bp, Homo Sapiens; identical to SEQ ID NO: 335169

SEQ ID NO: 464565 - DNA, 1000 bp, Homo Sapiens; identical to SEQ ID NO: 335170

SEQ ID NO: 464566 - DNA, 1000 bp, Homo Sapiens; identical to SEQ ID NO: 335171

SEQ ID NO: 464567 - DNA, 1000 bp, Homo Sapiens; identical to SEQ ID NO: 157294

SEQ ID NO: 464568 - DNA, 1000 bp, Homo Sapiens; identical to SEQ ID NO: 335173

SEQ ID NO: 464569 - DNA, 1000 bp, Homo Sapiens
caggagtcaccaggaaccgtttatggccccacccgccccactcagagctgctgagcaatctgctctatcctcttcagcgtctcctctgattctagctgctccaggctgagcagggacaggcccagctgatcctcccggtggaagggctgtgccatctgccgcaggaagtacttggccacctggacaccctcgtccacggtcaggttgaggttggcatctgtgaggtgctcctggatccagcggggcagcttcccccgcttgtccccacgggcaaaccgcttgtcggcaaagaccatgaggccgtagtccgtcttgcccctgatggcccgacccacacactgggccgcgtggcgcatggcatcgaaggtaagaaagtcattctcacgaatctggaactggtcccgcaggtattccagccgcgccttgagaatgcggctctgtgtgtagacgtaggggacgccaaacatgatgacggcccgcccgtagtggtgcacaaagtcgattccctcggacactttgccccgggccactgacagcaggatggccccgcggccattctcgcaggcctcctggtacttctccagggcgacactggtttcggcaccatcctgggtctcaataaagagcagcttgttcctctggatgttctcaaggatcccctgctcataccaggaggccacggtgctctccatgtactggtagctggtgaagaaggccacgatgccatcagggaccacagcggacatctccagcaggaggttcccatagttccggatcacagcaatatcctcccgggtctcaaatttggagctgatggccacctggtcattgccacggccgatgatcatagggcagaggcagacccgtgccagcgtcatggtgaaggttgccatggtgacggggtggaagtccaggatcttggggtagatgtccagcggggacagtgtcccagatgtgatgatgacagactggaaacgctcaaatacgggtttgatggcca

SEQ ID NO: 464570 - DNA, 1000 bp, Homo Sapiens; identical to SEQ ID NO: 335175

SEQ ID NO: 464571 - DNA, 1000 bp, Homo Sapiens; identical to SEQ ID NO: 335176

SEQ ID NO: 464572 - DNA, 1000 bp, Homo Sapiens; identical to SEQ ID NO: 157296

SEQ ID NO: 464573 - DNA, 955 bp, Homo Sapiens; identical to SEQ ID NO: 157297

SEQ ID NO: 464574 - DNA, 1000 bp, Homo Sapiens; identical to SEQ ID NO: 335179

SEQ ID NO: 464575 - DNA, 1000 bp, Homo Sapiens; identical to SEQ ID NO: 157298

SEQ ID NO: 464576 - DNA, 1000 bp, Homo Sapiens; identical to SEQ ID NO: 335180

SEQ ID NO: 464577 - DNA, 1000 bp, Homo Sapiens
tttttttttttttagtttcaataccatactttattagtatgcccaggtatagcccaagcagtaacagagactctagaattagagttaagtccaggaaagaaggagattctgagtggcatagatttgtctcaagtgatgtagtggtgagtgacagaattaactactaataggcagcactgagttctttcctctcctttccatttgatctctcttctcaggccatctcttttcccattcacattttgctgcatcttcagtatgaaagtaggttgaaaagaactgtaattttcacaattactggtcattttatttatgtttctaattcaatgtattattcattttcctcttcaaaggaatcacattttattttggaaatgtatgtgtaaaaaacatggaaacttgtggaaacccactcttgaacttccctggacatgattcagagactgattgaggaaagggctgattgtctggctttagaggatgtttgtggtgcggcaatgggaagctgggaaaattggcctcaggaagtggcagcacctcaccttttcttagaggagggagtcggtacacagatccaatttgtctgcaatggaagggacggggtcctttacctgggcctcgccttcttaagtgcccaggtggtgggccgtggccatggcaacagtgaccttggttatggggtggtgggtcacaaggtccatagtcttggaaatcatggcagtggggatggtgtccatggggatggtgtccatgggggtggtgtccatgaggatggtgtccatgggggtggtgtccatggggatgctgtctatgggtatcatgttcatgaggatggtgtgcatggggatggtgtccgtggggatgctgttcatgggaatgatgcttatggggatggaggtcactggaattattattatgagaatgtctttgggccccatttgtgccaaaagtggcatgttgacaacttgagcaggacatgggcaatagtggaggagggcct

SEQ ID NO: 464578 - DNA, 1000 bp, Homo Sapiens; identical to SEQ ID NO: 335183

SEQ ID NO: 464579 - DNA, 1000 bp, Homo Sapiens; identical to SEQ ID NO: 335184

SEQ ID NO: 464580 - DNA, 1000 bp, Homo Sapiens; identical to SEQ ID NO: 157300

SEQ ID NO: 464581 - DNA, 1000 bp, Homo Sapiens; identical to SEQ ID NO: 335185

SEQ ID NO: 464582 - DNA, 1000 bp, Homo Sapiens; identical to SEQ ID NO: 335186

SEQ ID NO: 464583 - DNA, 1000 bp, Homo Sapiens
ttttttttttttttttttttttagtttgcatcagtaagaaagtttattgaaattcattagtaaatgagaacagaaagttgtttttctttccattaaagaacactttctggtaaagtgaaaagaagaaatacagaaaccacaaaacaccttgtagacaccttattttcaaggtctatttccatagaccatcaagacagaagtgttttcttggagactttgttttccatgcatctgtaaataatggtctgtgtgaagggagactctttcctcttgatgcagtttaatagtagtgtttcttggtttctgattcaaccatagatgaaagaactctaccgtcgggcgccacctcttcaataattgtcttgattactctggttttgttagtatcttggtcccttagatgaagactcgcccacggacccggaagaggaggacttgtggcctccgctggagctgccgccgccgtatccgccgccggagctgctgccgccgccggagctgccgcccccgtagccgccgccgccgccgccggaactgccaccaccgtagccgccgctggaactgccgccgtggccgccgctggagcttccgcccccgtagccgccgccggagcttccgccgccggagcttccgcctccgtagccgccgccggaactgccgccgtggccgccgccgtagccgccgccggagcttccgccgccggagcttccgccgccgtagccgccgccgaaacttccgccgccgcgtccgccgcctccggaacttccctctccttctagcaggctgcggtaggtttgaatttcattctccagtcggatcttaatatccaggagttgttggtattcagtattctggcactcggtttcagctcgaatctgttgcaactgttcttccagagcggatatctgggcctgaatctgtgagagctgcacacagtagcgaccttctgtttctgccaaggaggcttccagggattgtttcaaggccagttgggactgta

SEQ ID NO: 464584 - DNA, 1000 bp, Homo Sapiens; identical to SEQ ID NO: 335187

SEQ ID NO: 464585 - DNA, 1000 bp, Homo Sapiens
atattataaaagcattttattgaacacattctggaggtagttagaaccaaaacaaaatttgggattggggtggggattctgttttgatgatttagatttgggaaaactttgggttctcgtgtcagcaggggccatgctgtgggaaacctgaaggctgatttgaagcagaatatagaactgcggcacgggagaccaggggctgggaatggggctctcctgggaaccaaagaatgtggttctgcaattggcttggtctagactactctccagaaaaggataaaacatggcttgagcaactgcctagaagaggcaatctccatgggctgggttgctgcacttggaaggcagtgacttgcagcaggttcttagctcttgaagctcttccgggaggaggaggtggtggagacaaatttgacgctggagctgctacccccgccactgccaaagcccacccccagccctcggccactgcttgcactgaagccagagccccccacactgagcccaccacctaggccgacacccccactgctgctggagtagtagcttccactgctacctccggcaagacctccaccgaggccgccgccaagacctccaccgaggccaccgccatagccactgccactgccatatccagaggaaacactgcttgtgacaacagagatgttgactggtccaactccttctccactgagtctgcattcctcgccctccagcagcttgcggtaagtggcgatctccacgtccagggccagcttggtgttcatgagctcctggtactcacgcagcagccgggccatgtcctgcttggccttctgcagggcctcctccagctcggccagcttgttcctggcatccttgagggccagctccccacgctgctcggcatccgcaatggcgttctgcagattggcgcactgtttcttgacattgtcaatctcggctctcagcctctggatcatccggttcatctctgtgatctcatgcttggtgttgc

SEQ ID NO: 464586 - DNA, 1000 bp, Homo Sapiens; identical to SEQ ID NO: 335188

SEQ ID NO: 464587 - DNA, 1000 bp, Homo Sapiens; identical to SEQ ID NO: 335189

SEQ ID NO: 464588 - DNA, 1000 bp, Homo Sapiens; identical to SEQ ID NO: 335190

SEQ ID NO: 464589 - DNA, 1000 bp, Homo Sapiens; identical to SEQ ID NO: 335191

SEQ ID NO: 464590 - DNA, 1000 bp, Homo Sapiens; identical to SEQ ID NO: 157302

SEQ ID NO: 464591 - DNA, 1000 bp, Homo Sapiens
ttttttttttttttttttttttgcattgacagaaccatagagactctacaaatattcattatccttcattaaaaattttaagttacaaacattttgattgatagtcagtcatggtggtgcacctagtccttactctgaaaccaaatatcctgccatctggggactttcaccagccctgtcggttatcttaccgcaacaccaaagaggaggctcagccttccccagttccctgagttcacattgattcaattctacagctcactagacctgcccaagacaggaccaatcaatgtcccgggagggcagagagggtggtggggccacacttagccatatggaaagacagtattctcagatgagggcaggacttttttgtgggagaggacgcctagctttcagtcctaaaggaagtgatttccctggtaaagggaaggtgattttgccaaggctggagtctaaaggaagatggaactgtctttcaggcgtctccagcagaccctctacagacccgtgttcctgaaggcagagtcctgaaggcagaatacccctgtggcagtggcacagctcagagtgtcccatagacactgattttggccacggagatgctctctgtgtagtggttccggcctttctcatacaggacgtagagctggggggcctgctcctctccatccatgctgccctccagggttgccagggatgaatagccactggggcctggccatagctggactgtctctttccgccatgaggtaccattgctgaagctccatcgcagggtcaggttcactcggaactctggatgtgctgggttggagaagaagacaatgccggagctggtgactacagctcctgcagctaccacagggtccacgagctcagggtcgaaggtcacatcacggggccttagtgtatcacaggcatcatagctgcggaggacaattcggcagtggcagtggtagttgttctggtttcgggcattgatgacgactgagccatc

SEQ ID NO: 464592 - DNA, 1000 bp, Homo Sapiens; identical to SEQ ID NO: 157303

SEQ ID NO: 464593 - DNA, 1000 bp, Homo Sapiens
ttttttttttttttttacatcactttagaatatttattgtattccttaatgcatttcttaacatgtatagcactctttaatcaagaatataaagtcatctacttagaatcacattatcttaaagatgcatactggaatgataagtttgaagatgtaactatcaacaattcttttcaaaatcatatcaatatattactctcatggaacttgcacattctaagaagggtcattttttccccccagtactgggaaggtatgcatttaaccatgtggtcagccagaaaggctgttttatatatggtgtgtgttactcataaaaagcctgtcctttctctaatattgtacattacacaattgtagctacacctgaaaagaagtgagtttcaatgaccatcatcacctaaaaacatgaataagtttgtatatttaggaccagaggaatgatatatcgtactgtactatgcctacctctgtccagaggccagctgtctcacctgttcttcagggtgcctagactttttacccatctattatccgggatgcttctgaagtcattcccatgggcccctgtcaggtattgagaataaatacctctaaggaagtttttttcaaacctaatctacccaccatgtttattccctgacactaaaagttcactgactcttcaaatcctagacttgtccaacattattttccctagttggataaggctgaattaaaggcacttcgttaaaggaagtagccttggcagaagaaaaaccgttgttctgtagaagtgtcattcaatatttaaaatctcctctgaaccaaaacaagagcctgaaagtaaaacaccttttattttttaactctgctgtcattgctactaaggattcatggtaaattatcccacagcccttcttggcttgagaggaggtacagtacaagtagcccacagggtctcaataacagaagtattctcaaggacccttgaggatacaaaggaatactgggctgtttt

SEQ ID NO: 464594 - DNA, 1000 bp, Homo Sapiens; identical to SEQ ID NO: 335195

SEQ ID NO: 464595 - DNA, 1000 bp, Homo Sapiens
attctggtcaatacatcaaatgtataatgtggaagttcccttaagaataccaagaccacacatgttaaactcagctacatgttgtattaggctattagacaaatgtcacttttaatatcacaacacatacatgtactttttttcattgacagaggaacatgcctttcaaaaatattttattgggtgaaactttcttattctcaggaaaacttttggttctttaatataatttattatgctctttaaaattctgtttgataaaagcattggtatattataaatacctgtaaagaaaatatagtttaaaatttcaagggaaatagtatataagttttctctttgacattttcacaaaaatccacacaggcactaagaaagactgacaaaactgttttatatctgaatattatactccaggttggaaacattcaatatgattttatttaaatattaaagcttcttgagagtgaacctttggctacaacccaatgagttggctggggttttaacccagaaaatattttgttaggaagaatcaaaagaaagatttatacatctagcactagattgggaatggaaaagtaatgagttttcattctaactctttattggcctttccgggccaatctaagaattctctggtcctttttagttttaatactttttgatatgctccaatattggaaattctatctaacacttcatatcaaacaatatatgaaacttccaaggacagagtgattccgcaagtcttttaggagaacattctctaagcattacgggcattgctctgcaaacaccctctacacaaattcaaatggtagaagagcaggtgaaaatttgtgttaccaaccatacttcaagccaaagcaaatgacagactctagtgttcttttcatgaaccagttcaatgccatgaattaccttatgaagttcaaacttcatggaaaaattgcaaacagcaaactcagtgggagaaagccagcattgtaggtgactg

SEQ ID NO: 464596 - DNA, 1000 bp, Homo Sapiens; identical to SEQ ID NO: 335196

SEQ ID NO: 464597 - DNA, 1000 bp, Homo Sapiens; identical to SEQ ID NO: 335197

SEQ ID NO: 464598 - DNA, 1000 bp, Homo Sapiens; identical to SEQ ID NO: 157304

SEQ ID NO: 464599 - DNA, 1000 bp, Homo Sapiens; identical to SEQ ID NO: 335199

SEQ ID NO: 464600 - DNA, 1000 bp, Homo Sapiens; identical to SEQ ID NO: 335201

SEQ ID NO: 464601 - DNA, 1000 bp, Homo Sapiens
tttttctaacaggactcatctatttattgatattactattaagccacttcccagcagtgtgactgccgtaacaagaacaggactcagtttctaaaggcaataaaataacaaggacatcatggacaaagcattgggaacactcctcgtagggaactggcttttcctctccagccagagcacccaggtgccaggggccactcccgagcacactctttgcgcatctcagccctcatgccggatgctcttctccccgccctaatctgaccttctcagttcatctggataaacctgctgtgcttcctgtccgtgaagcgaggcgctccccaaagcgggagccaaagtctggtgatgaaacagctggcaccaaagagctggttctgcctcctcctcaccaagtaaacacgtactttattttttaaggaaagaaaagtcttaaaaatatatggcactagagtgtaaaactatacaactgcatccaatgaaaattccctgcagcttgcagcctgtggcacaccatgtccctcagatgtagagctgatgggaggccagggtgtccatgaacggccgcaccaggttgtccgtggagaagtaaaagatgagcccgaacgtgatggagatggggagggcgggcagcgccttcttgaacacagcaagcagcaggagggtcagacacaagccaatgaggatggccacgaagcaggccagcgtggtattccagtccccgctgcccgtggcagccgccttgcccaccagcacactgtagaagatgaagtccccgaggccaagcttcacgcccctttcctcctcttcctccagctcctcccctgggtagccagtcaagggaggctcaaagacttcggggtatgaaggctccccaaaactgtcataggagtcttcttccatctccgggtcgtaggggagctggagggcaccctgagaggaggggtccagcttcgccatgccaaccgtccacaccatggcagatgagtatatcagggca

SEQ ID NO: 464602 - DNA, 1000 bp, Homo Sapiens; identical to SEQ ID NO: 157305

SEQ ID NO: 464603 - DNA, 1000 bp, Homo Sapiens; identical to SEQ ID NO: 157306

SEQ ID NO: 464604 - DNA, 1000 bp, Homo Sapiens; identical to SEQ ID NO: 335204

SEQ ID NO: 464605 - DNA, 981 bp, Homo Sapiens; identical to SEQ ID NO: 157307

SEQ ID NO: 464606 - DNA, 1000 bp, Homo Sapiens; identical to SEQ ID NO: 335206

SEQ ID NO: 464607 - DNA, 1000 bp, Homo Sapiens; identical to SEQ ID NO: 335207

SEQ ID NO: 464608 - DNA, 1000 bp, Homo Sapiens
ttttttttttttgagtaggcaagacatttattcactcatgatatatcagtgcaaagtgtgcctacagtatacaaggtaaactcacaactcatcaaaactaaaactttttacaatgtgcaatacatgtagggatattaattcaatatataaatgtcacatgtctcccaaatgtcacccaggctttctgttatttcttaaaatatacaagtcaatattaccagagaaaagaaaagaaaatcccattattttatcctaaacttatgtatacttctctaaagattcttaggcttgtaagcaatgagatttaagtctatttttagatgttagcatcctggactgaacttgcaggctgtggaaacacaagacagagtggtcacatgactaaatgaaacgggactggcatgctacaggtgagggataaaatgagagagaagaatctgatttatatcacttagatttttcagtgtcttaaatattaacctatgacttgttagaattccagcacatatgtacacttatatatcacatcctttggcagaggcatgttttctcagcagttgtcaagggtctcccatgccagtgaaagggaaacagagggtatacagatgttctgtcctaggccgcttcttcagcagaacagtcaattcctgcataagtaaacttctcataaagcgtggtattcacgtaggtctttcgctcctctaacattctgtttaaggacaccaatatctgggcaaatgatggcctctcataaggcttctcccgccagcattgtctcattagatcatacacctcatcatcacagttcaggggcttctccagtctgtagccctggggcagcttctcgtagagttctgcacaagtcatcccgcagtagggtgtgcctcctaagctaacaatctcccatagtaacacaccataggaccatacatcactgttggttgtgtacacactgtaattcagtgactcgatggccatccagcgcactgggagccttccc

SEQ ID NO: 464609 - DNA, 1000 bp, Homo Sapiens
ccatgtctatgccaaggactacttcccttttccctcccaaataatccctcccaacacaaagaaacaaacaaaaaagagctaggcaatggaatgaaatgacacccagtagtgctgtaggaattatgagaatgaatccagtcagtctaatcctcgaacacttccaagaacaaaggggggaagagttctgtggggcattccaccttcatgtgcaggaagcggctggcatggcaggctcctatcatccgcagatctgtcaccttcatcaggagttttggccaaaagtgtgtcacgtggtgttttcggtaattgatatagtgttcaaaggccagcaggaaactatcttggtacttttctattctctcaacacaggcaagccccgggcgatctgaagacatcagcaggacggcctgaaggagggctacttcagtgtcatccaggttgaaagaagacagagacatgcccaggtcaaagatggcgtctgacaccaccccaagacccccatttttcagctggccccgtgtcactgccatttccccattcaaggttaaagtctcactttctgggtcatagcgcacagcagcgcgaagggacatgatctccatgcagcagcctttgaggaggatgatctggtcttcacatggcagctcacaaaacataggcaactttttggcaaaatccaccactctggtaattgctggtgtgatgatttttgtaaaatggctgaaggcttccaagtcaacctttccaccttctggggcattgactattggtgcttgtccaatgtcttctggcaggaatttccgtttttgcttccagtggctgccttgggcgttggtcgccacatgggcttcggtgacagttttgatgagctcccattcctcgtctgtgggctctggcttgtgcccgatggacttctgcagctcttcccgccgtcttttctcccggttctcctctatcagcttcctcttggccagcctcttgctgtcatccagcaccaaat

SEQ ID NO: 464610 - DNA, 1000 bp, Homo Sapiens; identical to SEQ ID NO: 157308

SEQ ID NO: 464611 - DNA, 1000 bp, Homo Sapiens; identical to SEQ ID NO: 335210

SEQ ID NO: 464612 - DNA, 1000 bp, Homo Sapiens; identical to SEQ ID NO: 335211

SEQ ID NO: 464613 - DNA, 1000 bp, Homo Sapiens; identical to SEQ ID NO: 157309

SEQ ID NO: 464614 - DNA, 1000 bp, Homo Sapiens; identical to SEQ ID NO: 335212

SEQ ID NO: 464615 - DNA, 1000 bp, Homo Sapiens
cctcggaaatatttggaaagttttatttaaatgttttgtgttcccttttaaccaccaccaaaaagagaaaaaaaaatttttttttgccgttccaaacaggagagtcgcttcagagaggagctggcgtgtgtgttcagagcccaggagtgtgagccctgccaggtggctcttcccggcctgggcacgctgggtaggatggccacccaggcaccggcttcctgggaccctggtggtcttggagtgagtgagtgagcaaggccttgtcctgaggagaaagacctcaactcccctgaaggagggctcgcctggggacagggacatgagcattgtagggcctggggggttccagaggtaaggagatgggagtgggagggtcaggagatgagactgggagggtcagatccacaatgttccacggaggcttcagggcctctgggtctggagaaatacgttcgctagaaaaataagaggctttgagaatgtctgcagtctgtactctctgcctgcccaagagaaatctaccctggtggccaaagggcagcggggagggagcaaaggctggaggccagaagtgggtttggcccttggggaagattccagaggggagcgaggtgggcggcagactttggtttcctgggtcccctttcttgcagttgcagaggctgaggaggcccccacctccctgccccttgaggggggggctgccgtgtgggaagttggcatctgtcacgggcttgtgggtgcccgggccctgggccctcagaacaggacgctcagggggtagagggccagagcgagcagcagggggcctgcagcaaggctgcctgccgagctggcaggagcacagtggccgaggttggccccgatgcaggctgcatacgccatcacgtgggggacgtagttctgctcgtggacgccgtgcagcaggtgcgccatggggcccttggagaagacggccacgtcctccccgccgtgggtctcgtggcgcaggggcacagga

SEQ ID NO: 464616 - DNA, 1000 bp, Homo Sapiens
ccggttgcttgctggtctttattggggcgatgcttggggtccgaataaatatgggaaggggcgcgagctggggcgcgtccggaccctcggggcaggagtccgcgcggcgcaggggtcaccggcagccacactcggtggccaccatgttgggcacgtggtgcgcgctgatgcgttcctccgacaggctgatgagcagcttgcccgcgtaggcggtgggcacgcagcagggtgggcgcgccagggcggccccacgggcctgcatcttcagcagcagcaccacgtggttgccgtagcgcgggttgcggtcggactgaggccagccgcacacgccctggcaattgttggcctggtaggtctcggggatgagtacggagcgctcggcgcggaggtctacgctgagctcgcgcagcgcgcacggcccgtcggcggcggtggcccccgcgctgcgctgtgcccgacccggcccgcgcggatcccgcccgcgccactccacgcgcaggccctgcagcgccttcaggagcagcagcgctcgcaggggatcgccgaggccgccggggcctcctgggcagagcgcgagcaggcgcgccagcagcggggctgtggccggaggcagacccgggaggcttcgcagctcggcagccgccgcttgcagttcagcagccacgcggcgcgccagggccgtggcccacggcgccgacgtggggtcgtgcaggggcgcaggatccccggtggtggccgcagtgggcctcagcagcagcagcagcggctcctcgccgtcgagtaggcgctccagcgccgcggggtccgacaggttgactaggccctgcgggaagccggccagcgcgtccggatccagggccaggcgcggcgcggaggcccgggccggggggacccgcagcgcccgcaccaggcgcgtgagcgtctccaggaaggggtctgcgctgggtggcgactcctcgagttccgcggatggcctgggcggcgggaagggcacggtgtc

SEQ ID NO: 464617 - DNA, 1000 bp, Homo Sapiens; identical to SEQ ID NO: 335214

SEQ ID NO: 464618 - DNA, 1000 bp, Homo Sapiens
tttttttttttttttggcaagtaagaaggaagtttaatttttttttcaggattcagtggagtccattaatgcataccaggggcaaagatcagcccagggtaaggcaagtctgggaggaagcccaccctgccctacagcagccctggaactcagaataggtggtgagtctgccatggtttgctactgggcagcacactagaccaacttgggaatgtggaagagtgagtctatgttccctcagccatccccaagtttacacacaggcatagcagccctactgtgagtcagcaatcattcctgacttgcagtaaggacaatttgcatttacggaaagcaaactggagggggtagcctaagtccgcactgcccatgttattaccctttgcaatgtgaaaaaccatggtgaggtaggttgggcaggttttatcctctccacaaaggtgagcctttgctccacagccagcacctggcagagtgggagagatggcagaaccaaagcttctcattaccctccagcaggcaagagtaggtcagtgggatcatggactgaaacaagacattgtgtgagctggtccgtcactcagaagcagggtcctgaaggaagctggaatggcatgagttaggtggggggaataggtggtgtggcccctcaaccagacaattagaatcagcctccaccttaactgcccacccccagtgagttctgcctcagcttcttgactaaccccttgtaggggcaaaactcctggaagggacagccccaccctgagccagcttcacttgagggtatagtagtttgtgggcacaaagggcatcttgctgactacagccatctgctgcttccgccgcacctctaccagcagcattgtccctggacgactgtactcgcagggcacataacccatcgccacattcttcttcagagagggggaggggcagccactagtcacagtaccaatcttggtaccctccatgttcaggatgggactgtgtgcccgca

SEQ ID NO: 464619 - DNA, 1000 bp, Homo Sapiens
gaggctagattctcagcagctttattgaatattgagaggtggtctcacctcccactggacatgtgtcctcaagttcataccagaacttctttgggacagacagacagacaggtggcagggcagggcaggtgtccacgagggtggggccagtgcaccaggggcagctcagctctccaaaggggccagcatctgcacctgctcctgctgctgctcctgctgctgttcctgctgttgctccagctcagggagggagagagtcttgtcctggctctctttctccttgaaggtgctgaagaaggagttgaccttgtccctcaggtccttctccaggaagctcaagtggccttccacgtcccccgcatgggggcccagtttctgcctgagctgttccatctgctgcaccagggctttgttgaagttttccccgtagggctccacccggcgtcggaactcctccacctgctggtccaggtgcccacccagctctgccagtgacttctgcagcccctcggtgttgcccctcaggttgccacgcacgtcctcggccaagggcgccagcctctgccgcagctcctcggcactggccgagatcctggccttgagctcctcggcgttcttcttcatctggaaggtcaggccctcaagctggtggttgagcttctcctgcgtgtcctgagcatagggagccaggctgcggcgcagctcctccacggtctggtcaatcttgactttgaattcgtcagcgtagggcgtaaggcgtcccttgagctcctccacgttctggtcgatcttggccttgagctcgtcggcgtggggcctcagcgaggcctgcaggctgtcggcgttctcccgcagcactctctccatgcgctgtgcgtagggggtcagctggcgccgcagctgctcggcctgcgtgctgacctgggtgcgcagctggtccgcgtagggctccaggcgctgctgaagctctcgcaggttgtccccgatcttctggctcacc

SEQ ID NO: 464620 - DNA, 1000 bp, Homo Sapiens; identical to SEQ ID NO: 335216

SEQ ID NO: 464621 - DNA, 1000 bp, Homo Sapiens
ttttttttttttttttttttttttttttttttttttttttttttttttttattggcaaatgagcatttattgagtgcttattatatgcagagcagttgaaggaaggtagataggagaacgccatccaagaactggaagcagcccttgtccccaaagggcttacagtctagctgggaggcattgtatatatacaacatcacagcttaaagatacaaaacgacattgaagcaccatttgcaggtgcaaagtcatttggcacaaagtgggagtatgggacagctcagaaccttctctgtccccagcttagggacctggaggtctgtctacctgtctccatgctgccctgcctctgtctggtttggtgtgtgtgatctctgttctctgactgaccgggtgctcttaaagggcagaaaccagccccacattctttgtcctctctaccctgctgccctcgccaaggctctccgtccactgcaagacagtgggttgggctggaaaggcccagccatgtgttctggcttctgccagggcctcccaggagcctaggatttgtctcagtggaaaaatcatgggattttgtgtaaaaaggtctgagttcaagtgttggctccaccatatactacctgtgagactttagaccagtcccttagccttggtttctgaatctgtaaaatgggaagaacaatatttgctctacctttgtcacggggttgggagataatcacaggggacgataaggggaagctttggaaatagcaaaacccttcatggctgggggcctttgtccttccctaacctatctgaagtttgaggaagatcagataagcccgtgcatgcaaggcacccagcacagcagctggtacacaagagatgccaggaactgccaatttccctccacccctggagttccatcacttggaatccttttttgacctctgactccaatctgggcaatagaggctagaaatggtagggatttcacatttagtttttggggaga

SEQ ID NO: 464622 - DNA, 1000 bp, Homo Sapiens; identical to SEQ ID NO: 157310

SEQ ID NO: 464623 - DNA, 1000 bp, Homo Sapiens; identical to SEQ ID NO: 335219

SEQ ID NO: 464624 - DNA, 1000 bp, Homo Sapiens; identical to SEQ ID NO: 157311

SEQ ID NO: 464625 - DNA, 1000 bp, Homo Sapiens; identical to SEQ ID NO: 335223

SEQ ID NO: 464626 - DNA, 1000 bp, Homo Sapiens
gagggagctggagttgatttattggctggaaagggccagctcagaattaagcctcaatcctctgcagcggagggtcaggaagggagctctgcggggaggttggttgagtgctgggagctacctccttaaggggaacgggaagagcagatgggacatccggctttgactctctcttgacaacccctttcccagggagtgagctggtaccactggaagggcttcgagttctcggtgcccttcacggaaatgaagctgagaccaagaaactttcgctccccagcggggggaggctgagctgctgcccacctctctcgcaccccagtatgactgccgagcactgaggggtcgccccgagagaagagccagggtccttcaccacccagccgctggaggaagccttctctgccagcgatctcgcagcactgtgtttacaggggggaggggaggggttcgtacgggagcaataaaggagaaactgaggtacccggctggcatcggtcctgccccatcactggctctggcccgggctgtgggcccccatcccccggggctgcagccgcacttggaaaggctgcatcttgaggatgacactgcagtggggcaggggctgcagggagggcagggcgtccccggagggcagcagcgtgaaggcctgcagcagtcgggtcagcaccacgaagagctccaggcgcgccagcggctcgcccaggcacacgcgggcaccgcagccgaaggccagagctctggagttcttgcctggctccaggaagcgatcaggccagaactcatgtggcctctcccagaccgtctcatccaggtgggcgccttggaggttcggaatgatgactgtgccctcagggatgtcgtagccggagatgctgctgggccgtgtggtgcggtggggcaaggctaagggcacaacgggccgcaggcgcagcacctcggcgatggtggcattgagcaagggcagccgtgcacggtccttgtaggggacccggga

SEQ ID NO: 464627 - DNA, 1000 bp, Homo Sapiens; identical to SEQ ID NO: 335225

SEQ ID NO: 464628 - DNA, 1000 bp, Homo Sapiens; identical to SEQ ID NO: 157313

SEQ ID NO: 464629 - DNA, 1000 bp, Homo Sapiens; identical to SEQ ID NO: 335229

SEQ ID NO: 464630 - DNA, 1000 bp, Homo Sapiens; identical to SEQ ID NO: 157314

SEQ ID NO: 464631 - DNA, 822 bp, Homo Sapiens
tgatgcaacttaattttattaggacaaggctggtgggcactggagtggcaacttccagggccaggagaggcactggggaggggtcacagggatgccacccgggcagctagaagccacagctgccctccacagagcggcactgcacgatgcgcaggaatgtctcgaccttgtccatgtccttcctgaagcagtagagcagcccgtagttcttgagtagtgcgtcatcgttgtgtgagtttgtgtcgaacttgctgtaggtctgcttgaagatctgcccagtccgggggctgccatcttccagcctccccatcagcgtttggatgccttcctctaggtcctttaggaggtcatagacgttgctgtcagaggcgccgtacaccaggctgttggcgaagacactcctgaggaactgcacgggctccagccacgactggatgagcagcagggagatgcggagcagctctaggttggatttctgttgtgtttcctccctgttggagggtgtcggaatagactctgagaaacagagggaggtctgggggttctgcaggaatgaatacttctgttcctttgggatataggcttcttcaaactcctggtaggtgtcaaaggccagctggtgcagacgatgggcgcggagcatagcgttgtcaaaaagcctggataagggaatggttgggaaggcactgccctcttgaagccagggcaggcagagcaggccaaaagccaggagcagggacgtccgggagcctgtagccattgcagctaggtgagctgtccacaggaccctgagtggttcggggagttgggccttgggatcct

SEQ ID NO: 464632 - DNA, 1000 bp, Homo Sapiens; identical to SEQ ID NO: 335233

SEQ ID NO: 464633 - DNA, 575 bp, Homo Sapiens; identical to SEQ ID NO: 335234

SEQ ID NO: 464634 - DNA, 626 bp, Homo Sapiens; identical to SEQ ID NO: 335235

SEQ ID NO: 464635 - DNA, 774 bp, Homo Sapiens; identical to SEQ ID NO: 335236

SEQ ID NO: 464636 - DNA, 1000 bp, Homo Sapiens
agagaacaatatgtgtttaataatatttaaataatggttgtataaaattgcagcagcaagaaacccaaaggagaatagctctaggggagggaggtggatgagtatgcatgggggagaggctcttttgtgaccaggttgggtctggagccctccccactgtccagaacacctccaagcccctacatctttttccatataccaacgccttggagatataatgcagaagtgaagtgagcaggctgaggattagggcaggtgtctggaatatggtcaggagtgggaggggagtgacatagctcacaggcaaggcagaacagcacaaaggctataggtttcattcccagccctcaacttaaaagacctcaggggcagacactgactccagcctggctgtgcccttaccctaacgccattcacacttttttttttaaacacaggtaatccatgtttattatagaaaaatgccacattactctttattgaatgcgagcgccagcaccggcccctttctctccaagcacaggggcacgcaggcaaggggcacgaaggcaaggggctccgtcccctggccaggatgcagtggaagcctggctccactaccattcacctacagccagcaccctcctcggtgcctggggctcaggtctgttcaaactcctgctcacagaagcctacattgaggggttgggcctggacacctcgcctcagcaactcacagcggaagtgtgacaaacgttcataggcaaatgtcaggtcagatgtcaacttgttgctccacagcctttcggcaacagcccctgctctgggccagagcctggggaccaggtttgtgttgtccacatattctccccacatacaagcctctccaccaatcaccagagccttctgctcaggggtaccttcaaatgccaggggttccactacgtagaaatccttccagtcagggccataggatatacggttcaggtaccagggggcagagagaagggcccggaagccg

SEQ ID NO: 464637 - DNA, 1000 bp, Homo Sapiens; identical to SEQ ID NO: 335238

SEQ ID NO: 464638 - DNA, 1000 bp, Homo Sapiens; identical to SEQ ID NO: 335239

SEQ ID NO: 464639 - DNA, 1000 bp, Homo Sapiens
atgcaactcagataatgaagctgtattgattgccaggagggggtgagggtgaagcagggtccagctgtgaagtgcttgggcaggagaggggatcttccagtgggatctgtgtccacacggggggcctcctaggcctgagcggggctgggcagcctcagttcttggtgcgaaggacctgctcgtgggtggacaccaccttgccatcgtgcacatccatgaccttggtgcggatttggcggctggaggaggtcacatctctggatgactgcgatccagaggagaactgggaggaggagaggtgggcgtcctcgccctccagcaggcggcggtaggtggcgatctcctgctccagccgcgtcttcacgtccagcaggatcttgtactcctggttctgctgctccatctcgcagcggagctgggccagctgctcctccacgctgccaatcatctcctggatctgggccagctgcatgcagtagcgacctttggtctcctccaggctgttctccagggatgctttcatgctgagctgggactgcagctcaatctccaggttctgcatggtgcgccggagctccgagatctcgctcttgccgctctgcaccagctcgctgttggtggccacctcgcggttcagctcctctgtcttggtgaagaaccattcctcggcatccttgcggttcttctctgccatcttctcatactggtcacgcatctcgttcagaatgcggctcaggtccacgccaggtgcagcgtccatctccacattgacatctccacccacctggcctctcagggcattcatctcctcctcgtggttcttcttcaggtaggccagctcctccttcaggctctcaatctgcatctccaggtcagctctggccagggtcagttcgtccagcaccctgcgcaggccattgatgtcggcttccacactcatgcgcaggttcaactctgtctcatacttggtgcggaagtcatccgcggccagacgggcatt

SEQ ID NO: 464640 - DNA, 1000 bp, Homo Sapiens; identical to SEQ ID NO: 157316

SEQ ID NO: 464641 - DNA, 1000 bp, Homo Sapiens; identical to SEQ ID NO: 157317

SEQ ID NO: 464642 - DNA, 1000 bp, Homo Sapiens
acatccttccttttttattagacagggctcagaattactatcagcttgagtacacatcctgaacattttcagctatctggtccaaggctaggtcatcgataaagctgaacactcacagtatccacacagcagtttaaaaattgggtaatttgataaaagaattaagtcctcatgggaaaagtctgaagcttgttgatcttcctcacacaaatatgtgcagtttggtggtgctttcatttggaattctatatgaagttagaggtagaaaaacgtgagttttctcagtaactatgagccctgaagcttctgttctgattggaatatagcagaagacctagaattgaaaatgtctggaattgcaagttctctgaattagcactcagacttcatttttgtttcatccaccattagactagccatcttcattttgtttcttagattaactgcaacaaatcaaaggcagtgagaggtgaagtttcttggtgattttccttctgacaacagtcacatgcacagcagagagcttgagagtgattaggagacagcaaagctgttgacaaaggcagaattttataggaagagcagtttgggactatttatgatacaggttaagtggcattgcttacctctgtggtatcacagagcattgcagcatcaaaaaaaggttacctcttattgagaatacgcactttaatcacataaaatatgttatacattactttttcaatggtagaaataacacttttaaaaattagttctagggttgtgctttagatttcatgaaaaattaacttatatatatctcatatattaattaatacaggttagtattagagtaacatagttcatttggcaggggaaggatcaaacagggaaggatttctacagaacagaggacaagaaggtgcacctttcacctccatctgtgggacaggccatgtgaaagcacgcctgccactgtcctcacttgactccagctgccttgcctcctttgcttctg

SEQ ID NO: 464643 - DNA, 1000 bp, Homo Sapiens; identical to SEQ ID NO: 335242

SEQ ID NO: 464644 - DNA, 1000 bp, Homo Sapiens; identical to SEQ ID NO: 335243

SEQ ID NO: 464645 - DNA, 1000 bp, Homo Sapiens
ttttttttttttttttttttttttttttgatgtagattatttatttcttcttttgtgtcagtggagaacattatctatctatatgtatacatatatttatatttatatctacatctgtaaagctatgagaaactaacttgttcatgggcataatccaaagggttgcttgaaggtatataaagaacactaatgtgggatgtagtagatcttgcttttaagttttggccaactgccgaattgttatgttgcacaaaataatcaatttaattcttttgggtgttaatttctttattggctaaatttgtcataaacactttataggttatttgttaccaagactcatataataaatataaacatacctcgatgattattactgcttctgggtgtttaaggtttgttgaataaaaaatcagatcagaaatcctcagtgaagaataaattagtaaattgagtatttgggtaaaatattttcaaaatgtatagggtctagaatgactttatttatcattgcattataaacacttttttctggcccttaattcatgtaactaaaagaaaacataggcattttaaataaacaaaaatgtatttttaaaatcaatgttatgattttaaaaatagattcaaaaattccatacacctgaatctgaaaggcttttgcaaaactaatcaaacaaccttctaagaaaggatttcttggcaggagtcaagatttttccagaaccttttttacggagggatttcattggaggcttttttaagggtaggactctttggggagtgtgtagagctcttgctatctccacatgctcattgcagtaatacttgttgcttcctgctgacagatggatgagtgtgcgttctgccagatccatgcactgagcatggacccagtgcccatccccatgagagcagtagatcatggcgggtttgttgagctcagttgaatagaatggtacccaagtgttgatatccacatcacaagtagggcagcatg

SEQ ID NO: 464646 - DNA, 1000 bp, Homo Sapiens
gtgaacatgaagtctttattctctttgtcctcaaagcagggaagggctggtgcaggggtcagggcacgcatccagcaggagctccacatccaatgtctccatctgagggcataagcccaggcagaggggcatctcagagagtgttccagctctgggccagggctgaaggcagggcctgcctgggtggcagagggcctcagcgggccaaggcgaagccaatgcggttgttacgccgatcaaactctgtgtagaactttcggatgaaggtggcccccagggcccaggtgggtccagtgggtggcgggatatccatggcgtggatggccagtgtgcacagctttttactactgtaggattcctgaaatacatagtccgcgctggtgagcgtgtattctttgcctcccaggtggaaagagatgtcggggagtgtagggccctcgttacacttcacgacataatcaaacagcctcttcttggctcccaaggcctccatgagcttctctatggagctggtagaacctgagatgtaggatgcaccggtgtctaccaatgccaggcagccgtcttcacagagcaaggtggatgaccccacagacacccccttcatttgaatctgccagacaccagtcttgatgaggttgatatagtggaaattcccttcgtaatgctgggggtcgctgcctcccagcacaatctgtcctcccagcgattgggaattctcggaatctctgttgtagtagaaagagaagacgtcctcttttagcaccccttgggagatgatgttgtcgaagataggggtgaccctgccaatggcctgttcaatgaagcccatgcccacaaccccatcaaactcggccagcatgaagggtaaggcgggcatctccgtgacctctccaaacatctgtgtcaccgtgattccacccacggtgatgatgtcctggctgagaaagccactgactgtccctgttgaatagcggagggtgagttctgttccattgtg

SEQ ID NO: 464647 - DNA, 1000 bp, Homo Sapiens; identical to SEQ ID NO: 335244

SEQ ID NO: 464648 - DNA, 1000 bp, Homo Sapiens; identical to SEQ ID NO: 335246

SEQ ID NO: 464649 - DNA, 1000 bp, Homo Sapiens
ccaggggagaacaaacaagctttatttctcggaagaagactcatcctttcatacgcagcataactccaaaggactaaactgtggggctttgctcgttgcactggtaactacaggtcattttccggcatcctgagccgacatcttcactcatcagcgtcattcttgtctctcttcccctcctcagcttctcctgcatctttcagattatggcgagcaaactcctcaaaaactaaatttgcatcctgataactttccttagctgggtcctcaggctgagggtgcatgaggcggaatgggacctcagtggcgacttcactggaggtgagctctcccagaaagcctgacactgtgagcttcaccttgatctggtaagacaccaggattcccaggacggtccggtctatgccctccttaatgatggtgctggaggcaaggtttgtgtcctcgtgcttgattttcccatccagggcaatgcctctcctttctcgattgttagccagcaagggcagcagcgtcagcgtcttggtcaaagtgctgtttggtggcactttttcttgcgcttcctccatagccacgggcttgacgtaataatcactcgagtagagaaccacattggccacctgttccacgaatgctttaatcttcttcacggtcttctctgtgttattggtgacagtcacggtcacagggatgggctccccatggaaatagatctctttgttgagagagaccgcaaggtgcaggggcttgtcagacatgaagaactgccaggccgcctcagctcggggctggggacccatctcaagtggggcatgctgtactttgcggatcagtaatcgcacggagctcttcttggggattttgtcctcttcggcatcggtgctgtctgtggcgaatgctttgacctcaaagtcaaccccacaggacttccctgaatcttgtggagctggctgcaacatcactgaacagggcaagtagtcaggaaacgtcaggagaaagg

SEQ ID NO: 464650 - DNA, 1000 bp, Homo Sapiens; identical to SEQ ID NO: 157320

SEQ ID NO: 464651 - DNA, 1000 bp, Homo Sapiens; identical to SEQ ID NO: 335248

SEQ ID NO: 464652 - DNA, 1000 bp, Homo Sapiens; identical to SEQ ID NO: 157321

SEQ ID NO: 464653 - DNA, 1000 bp, Homo Sapiens
ctgtaaatacattttaatggcaaagccccagaaggaacaaatcaggcaatgtttacaagaaaaggccagacaaatgcagctataacatttattcatccatgcctgagagtaactacgacatggtactagatttacccgtgttgggaaaacagtcgtcctgctgatttccgatttgcctgtgtttggaaaagagtcgtacggtgattttgggaacatgaagctgttctgcagtgtcctgccactttgccctcagagggctctcggcagcctgtgagtatcccggccttccatcccagcactctcctgctccgagtcctgagctgcggcccgctgcggtgaggtccctacggcctggtgctttccgcatctcagctcgggagttcctccgcctgtctccgagatgggcagtgtggatttagtgccagtgcgtgtccacctgcaaatcaccgtcgaggtgagacctgcgaagcctccgatcagcagagcagccagcgacatggagatccaagtcacccgagggagcctcccggagtctacgcaggttctcccatcgtctcctaactcgtaggggtccgcgcagagacactggaagccgcctttggtgtttctgcacctcgcagaggcgtggcagggggggtgggcaccgtctgcacactcgttcacatctttgcagaggggaggctggaaatcccatccttcctgggtgcaagtgagctgctcccggccttggagctcatacccgtgccggcaggaatacaccagcacgcgcctcccagactcctcacagtgcacaaagtccccattctccacgctctctgggaagccacacttgtcgtcttgaggaaaggtttccctccaggcctccaggttcatgccagtgatgctgtcacaagactcaaagtcttcggggaatttgccgacttggaaggcatccatgggcaccctggtgaggccagtgttgtcacagatgacccgagacagggagtgcttctccagctca

SEQ ID NO: 464654 - DNA, 1000 bp, Homo Sapiens; identical to SEQ ID NO: 335251

SEQ ID NO: 464655 - DNA, 1000 bp, Homo Sapiens; identical to SEQ ID NO: 157322

SEQ ID NO: 464656 - DNA, 1000 bp, Homo Sapiens; identical to SEQ ID NO: 335253

SEQ ID NO: 464657 - DNA, 1000 bp, Homo Sapiens
tttttttttttttttttttttttttttttttttttttttttttttttttttttttttttttttttttttttttttttttttttttttttttttttttttttgagatccaacattttaattggtttcactctgtgggtggacagagaagggggacccagaggccagtgtgtggggaagaggaggacagataaggtgacaccttctcagggaggctcctggcttcttccttctgtccccacctgccttgtcactcttcctggctttaggacgtagaacgtttgaaatcccctgtgcacagctggaagaaccaacactcaggagcccagcccaggaaaagcaatctgtaacctcctagctggatttggctccctgccctctccggctcctggtggagtctcagaagaccccaggatcaggctctctcgaagtcttaccccatcggcctgtgatgggggccccttggccttcactacttctcactccttcccagaaccttgcatgcatccttcagtccctccccaactcccatcaagtttctatgacttgtttgcacaagacacagcctccccggtgaataaggagaagattctcttccacgcctgagtcccggcctccagtgcagagcttccgtgtctccgaagaatgaaacttatagtggattctggtcccaacgtttgcacagacccagggcacaatattgtctcatccctgcccctcccgtgtgaattttgtctagctcccccagcctccccagtgacatatgttgtcttcctctgtttatattttcatcccacactggactcttgagccactcctgggttatttttgttgttgttattattgagacggagtttcgctcttgtgacccaggctagagcacagtggcaaaacaaaaacaaaacaaaaaaaaaaattctgtccacgtggaaagttaagttatcaagcccccctacctgcttgttcaagggcacggtgattctgacctaaacatgaccccaaa

SEQ ID NO: 464658 - DNA, 1000 bp, Homo Sapiens; identical to SEQ ID NO: 246389

SEQ ID NO: 464659 - DNA, 576 bp, Homo Sapiens; identical to SEQ ID NO: 335254

SEQ ID NO: 464660 - DNA, 584 bp, Homo Sapiens; identical to SEQ ID NO: 335255

SEQ ID NO: 464661 - DNA, 1000 bp, Homo Sapiens; identical to SEQ ID NO: 335256

SEQ ID NO: 464662 - DNA, 1000 bp, Homo Sapiens
gaaataactcaagtcaatttttagtatttttctcattgtttcagagtgtctgcttaccctaccaattaataatgtttctatgagtgaacaaattgttatcaaagaactaagagaattttcatcctactttgttttattgggcgttgattgtttcaggtgtctgcttgttttgtctctaacatcctgtaagttctccctggtcatggattgagttttctcagttttctattttactttatttttttgatgatccaaagtgctgtaagtaggacagagcttctagttaacagtcaacatccagttgctgaataaaatgattgagttttgtaactaatagaatagttggctgtagacagcaaaacctagtcttaggcctggaagctggcagaacaaagaaaaaagtgtgctgatttgcatcttctcttagttgaaagaagtctttatccaatagtcagtgcaggggtcgacatccacagcatctggtccagcctgtgtccagaggccctcagcaagcctgcgtctgtactttccgccctggacacgaggcccctccattctgaggtgctggattgtcacactctcttctcctttcctggatgcctgctctgcatacagaccaggagctccagcaactccagctcccatctgctttggctccttctgtctgtgtttgctcacaggcagcacccaagctacccaggcggcactggcacctgcagctggtgccctcgaggatgggcaccccattgttgaagcaaggcccacatcggcaggcattgaattccatcagatactggtccaaggcgcggcgcaggttctggcgcttggcctccagaggccccaggcttgtgtgccgcagcacctcgtggataggctgcatctcaaaatcgataacaacaggattatactttaatgacctcccccaggaacggtatgtaatggtgctcctgttctgtgccaagccaccgctccagccagaactgccacctcgcacccgaga

SEQ ID NO: 464663 - DNA, 1000 bp, Homo Sapiens; identical to SEQ ID NO: 157323

SEQ ID NO: 464664 - DNA, 1000 bp, Homo Sapiens; identical to SEQ ID NO: 335257

SEQ ID NO: 464665 - DNA, 1000 bp, Homo Sapiens; identical to SEQ ID NO: 335258

SEQ ID NO: 464666 - DNA, 1000 bp, Homo Sapiens
gatgtgaataagatacatttatttattcaaaattaaaatctgctatgaagacagacaaacaatgtaacattcccagaggaattgaataaattctagttaaaactgagttctattagaaccaaatttatttttatttttattttttgagacagagtcttgctctgtcacccaggctggagtacaggggcatgatatcagctcactgcaacttccatctcctgggttcaagcaattctcttgcctcagcctcccaagtagctgggattacaggtgcgcgccaccatgcccggctaatttttgtatttttagtagagacggggtttcaccatgttgaccaggctggttaggaactcctgacctcaagtgatccacccgcctcagcctcccaaagtgctgggattacaggcgtgagccaccgcgcccggcctagaaccaaatttaggttgttataaataacaagctggccacagctttcaagaatgaagtggttggggaatgaggttaggggaatccctccgagacactggaaggtgaattaatcatcaaaggggctccctggtttctcttcctaagagtatttgtagcagttaggaagccccaagcccagagacaagataaattagagggaggtcagggaaaacagctcaacagctagaaagcgtggtcaggcttggaatggaagcttctgttggctccccaaagaacattttttttcctcccttatgtaacttataatttatcttaaaacactcaaataccatagtgtgtcaccctatggaaacagcttaaaaacaggtgaaaataataaatattgaaaaaaattataatattgggcttctttctaaatcgttcacagagaagctcagtaaataaatagaaatgggggttgaggtatcagaggtaataaatattctataagagaggtacaataaggtttctcaaggggctgggtcagctatcccagagccccagatccgattttggagacctctaatttatg

SEQ ID NO: 464667 - DNA, 1000 bp, Homo Sapiens; identical to SEQ ID NO: 335259

SEQ ID NO: 464668 - DNA, 1000 bp, Homo Sapiens
cttcagtgaagtttatttcagaaccattgaacagtatgatatttgctcatttataaatattcccatttaaataatctgagcttatatattttcagtcttaattaaaggacttgatttaaagagagcacaccagtccaaattgaattgattccatagctattaaaaactaggctcttttacagacactgctacttcttgccccctttgaataaattagaccaatgaataaaacaaacaaacaaataaataaataaatagggaagcggttgctcatcagaatgtgggagcgaatgacagagggtttcttagaaccaaatgtggccgtggtttctgtcaggcgggctttaagtgagtaggagaggtgagagaggcctggctcaacaaaagggctggggattggccctgaaaggagagagctgactgtcctggctgatggacaggagatcctcttagcactaccctaaggcaggcagttgggcattggtgtagacaacaggaaagtccaggctatagccgtactcaaaaacctttctgttccctttctgccagccctagggattgagtccacattcagcacaggactctctgggtacagctctctttaggaagacacaaattgcatggtgaagtcagttatatcctggccgcctttggtccctcccaggaagacgggcatgttttctgcttgagaggtgctgatgtaccagttggggaactgggcagactcaaattccagcttgttattgatttctatcttgttgaagacaaatcgcttttccatcttcttctttgggtaatttttgggatctacactctccagctgtagagtgggcttatcatctttcaacacgcaggacaggtacagattcttttccttgaggcccaaggccacaggtattttgtcattactttcttctccttgtacaaaggacatggagaacaccacttgttgctccatatcctgtccctggaggtggagagctttcagttcatatggacc

SEQ ID NO: 464669 - DNA, 1000 bp, Homo Sapiens
ttttttttttttttttttttttttttttttttttttttttttttttttttttaggcattttcaagattttattgtaaaacagagctgaagtcacaggaagtagggaactttgcacccaacatatacagcattcattcgctgagtacctgccaagagcgaggctaggtgcttggccctgcagggacctgagacatatacgagtcatgtttcctgctctgcagagctcccagcccggtgggggagacaggcagaggcacagccatctttcatacaagtctccaagtgccagaagctctacaatgtcaaggagcaatttattccttcagcagaggaagaaagaacccccaggagccacatttgctcagagccttgggagctgagaaacttctgataggaggtaaagtactgcaggcagctgtaaaaaatctggagtggagatggagcttggaggctgggcagcagtgcctggacagaggagtccagattatggaagtgttttaaaaggaaaaaaaaaattatggggctaacatagtaccataacttttaatttttacaagttgggacatcacaaaaaaagaagaaaaagaagggaaaagctaccacttactttcaccatcatttcacaaatgcaggaatattttaagtcctcagcctctccccgaaagaacataatctccaaatgaagggctctccttcacggggactgaaaaaaaaaaatcatgaaatcctaattttcattttccacaaacccttaaaaacctccctcatggactggtcttttcttttttgtaaaacagggtgtgggagccacttggttgggggtcatcaagtggcctgatggatccagggcatgggaaggtggaatgagggaggaagaggcagtggcaagaggagagcaggttgggcaggtggtcggggtttgatcctgaatgcagaggcgacatggaagggctttgtgcaggggctgctgtgctctgattcacacattagaaagaccatt

SEQ ID NO: 464670 - DNA, 1000 bp, Homo Sapiens; identical to SEQ ID NO: 335261

SEQ ID NO: 464671 - DNA, 1000 bp, Homo Sapiens
tagaaggtgttttttattagatgcatattttctttcaagcaatttgtaactttcacatacataagaatatgcaaatactaagatgtcagaatgtctttgacttggcccagagggtagggtcctatgctactgttgcactctccacaacttaagagcaaaaggaaagacatttcccttcgttgcttcctgctgacagccacaatgctcaccgttcatattcagaggctgagaaagtcagtagcacctcttattattctgacaccttcattccctgagtagttctcaccacttactattccctcaccttacctgtactatgatggttttagccatcccccaaattcaaaacagtctcaagtatgtgcacaatcatatgagaaagaacagaaaaaaacctctctctctccctttgaaatgaatatacccaaacactaaggggtatattcatttcaaagggagggagagacgattttttctgttgcttctggtttgtctggagaaggcatctggaataagtacctaaggcgccccccccacccccattcagtctgaaatacggaggctggtaaattgtacttttgtgggttttaaggctcaaggcagcttatttccaaatgaatatgtcccttcccccctttgcctattgacggttaaatgcagaaaatgatacctacacttgtgtgcactgggcaggcagcatcttagtttttcaggcttccctcacctatatgggacccctttgctcaatgctttgctcagtgctatccctgaatgagtaactaagagtttgatgcttattgaatgtgtagtatgtgctaaatgctgcctgtggttgcctcatagaatcctcccaacaacccatgaaatgactactaggtaatcaatcctcacctagatctcatgtgtgagctgaagtatgttcctagacctcatacctcgtgtattcataaatctagtctcctcctggagacccctcagtatttcagctgggatgggaagg

SEQ ID NO: 464672 - DNA, 1000 bp, Homo Sapiens; identical to SEQ ID NO: 335262

SEQ ID NO: 464673 - DNA, 1000 bp, Homo Sapiens; identical to SEQ ID NO: 335264

SEQ ID NO: 464674 - DNA, 1000 bp, Homo Sapiens
ttttttttttttatatttatcaaatttattaaatagttttactaaccaatctacatagatactatatttaacattcaacataataataaatattttgggataaataagtgaaaccattttagagcccctagggcttacaaaaagaatcataaaagatccatatttatagttttaagattaagaataatagttacaataggtagcaaaccatacattcaacaataaatataaaatttaaatatttaaataaatagaaggcctgatatgttttaagtgggaagcacttaattatcaagtcagtgttgagatgatgctttgacaaaaggtaatccatctgttcagaaattctacaatggttgctgtctcatcagcatattcacacatgaatgttgtttcagatccctttagttccagaactattacgttgatattgctgattaagtccctgggtcttaagtgaaagtttttgctttgagctaaatttagcacttcctccagaggtttgagttcttcttctagacactgaagatgtttcagttctgtggccttcttgggcatgtaaaacttaaatgtgagcatcctggtgagtttgggattcttgtaattattaattccattcaaaatcatctgtaaatccagcagtaaatgctccagttgtagctgtgttttctttgtagaacttgaagtaggtgcactgtttgtgacaagtgcaagacttagtgcaatgcaagacaggagttgcatcctgtacattgtggcaggagttgaggttactgtgagtagtgattaaagagagtgatagggaactcttgaacaagagatgcaatttatactgttaattctggaaaaatattatgggggtgtcaaaatgttttacatattacacatattttcaaagactttacctgtctgaaaaaacattaccttcatttttcctcttctgatgactctttggaatttctttaaacccccaaagactgactgaatggatgtaggtgaa

SEQ ID NO: 464675 - DNA, 1000 bp, Homo Sapiens; identical to SEQ ID NO: 157325

SEQ ID NO: 464676 - DNA, 924 bp, Homo Sapiens; identical to SEQ ID NO: 335266

SEQ ID NO: 464677 - DNA, 1000 bp, Homo Sapiens; identical to SEQ ID NO: 335267

SEQ ID NO: 464678 - DNA, 1000 bp, Homo Sapiens; identical to SEQ ID NO: 335268

SEQ ID NO: 464679 - DNA, 1000 bp, Homo Sapiens
ttcttttctaagcaaactttatttctcgccactgaatagtagggcgattacagacacaactcccctggggagcagaggctcagcaatgagtgacagttggtcaccaaatcagcattgtttagacaacttaatcagataaatattttaaaaaacataatcaaaagaaggcacagaggccagggggctacatgggaacagcctattgttcagctccgttttcacggaaaacatgtctgagccaaggcagctcctacattgggtcccccaggataccccggtctcccaaataaatacattcatctgtaaataaataaataataaataaataataaataatcacaagtgcaaacataaatagagggagctggctccatggggagggctgggctccgtgtctcaaggaagtctggaaacatctggagagaggaaggcctaaggtccacttgtgtcaatttctaggtgaggtcttctcaagtcctgcagcattctggccagaaccaaaggctccctggtctccagattccagatgtcagggatcaaagctgtaggccccagtgagttctggaggccccagtttgaattcttagtggttgccagcacttcactgtgcaggccacacattcctgaatcccaggtttcgaagtggtggtcttgttgcttaaagttctaagcttgggttccgaccctaagcccccaattctctttttgagccagaagaggttgagggtgtctgaaggagggggtaataaagggattggggcaggggaggcgtttgggaaggttggatgttcgtcctcctcacagggcaatgatcccaaagtagacctgcccagactcggcaaagtcgagatagtcgggccgattgatctcagcgctgagtcggtcacccttctccagctggaagacccctcccagatagatgggctcataccagggcttggcctcagccccctctggggtctccctctggcaggggctcttgatggcagagaggaggttg

SEQ ID NO: 464680 - DNA, 1000 bp, Homo Sapiens
cagagaaaagaggtttattgggcttcatcgagggtgcagatgcctccgtgtggggctctggtcggcagctggctttcagagcctttccctgccttctggggccctgtgatccctcatgcctacttctttctctcttggtcagccttgtgcgcatgccctctcactcttcatctcttgggcctgtctctgtttctccttggatgttcttctattattcccctctctccatcctccataaataaataatttaatttttttgccttcataaatagtcccctccctgcctctagtcatcccccaagctcctccatgtgcctgctcttcctctgtgtgtggatctaggccccacctagctggtgggacagaccaacagctttgggctgggaattcctaggcaggcttgaaatcctcagccagacagacatcagggatggttcagggaggtgtggtcccctgggatgcctagaattccttctttgaaagctccggtgacttgatcagggaagacttgagctgttggaatggccaaaggagaggtggtgacgacccctgaaatggtcagaatggaggcagaatggggagaaggtcttgaaatcaattattttttctttctggatttttccaagttctacagagcgaaggctccaaagaagacagtactagggctgaggactaggtgggggatgccatctgtgtgggtggatagctggtctccctgggtgagctggaacgcagccccgtggtacatcgagtgcagccagggttcctgcagccctggatacaccatcttctgggagctgaggagaggcacatggaaggggtactgggaggagaagagctggacctcatgggccaggtagagtggggaggaggtggccttgggagagtaggctttcccagagaagaccacctgggagtagacgaagtagatgccactggtggggaccaggagagaattgttgctcaaggagaaaccatcctggaggaaggcacggtccgt

SEQ ID NO: 464681 - DNA, 1000 bp, Homo Sapiens; identical to SEQ ID NO: 157326

SEQ ID NO: 464682 - DNA, 1000 bp, Homo Sapiens; identical to SEQ ID NO: 157327

SEQ ID NO: 464683 - DNA, 1000 bp, Homo Sapiens
gaattttttaaaatgccatttattggtataaaaaccatttatacattatataaatacaatataaatatttctttaaaaatatgtataagttagccatttatttgaggtaagcctacactttccaagaaatgatctggctctgaaacaaaggatattcaaactgcatagccactttccattattatttcaaaactaatacataaaatgtttcaagtggtacttcttaaaaatataaatatgacttacataaattaactcagcttcacatatttaaatattaataaattaaaaataattaaaatagtgtcctaacgctcatacttttagttctccatagagaacaacataagttctgtgcccagtggacaggtttctgaccagaagaaggaatgcccattaacaacaacaatctgaggtgcccatgctacatttgccgaagagccctcaggctggactgcaggaactccttaaagctgcgcagaatgagatgagttgtcatgtcctgcagccactggttctgtgcctgcagcttcgtcagcaggctggcatttgtggttgggtcaggggtggttattgcatctagattctttgcctttttctgcaggaactggatcaggacttttgtactcatctgcacagctctggcttgttcctcactactctcaaatctgttctggaggtactctaggtatacctcaaactccaaaagaccagtgatgattttcaccaggcaagtctcctcattgaatccagattggaagcatccatctttttcagccatctttggaaggttcaggttgttttctgccagtgcctctttgctgctttcacacatgttactcttgttacatgtctcctttctcagggctgagatgccgtcgaggatgtaccgaatttgtttgtcaattcgttctgaagaggtgagtggctgtctgtgtggggcggctacatctttggaatcttctcctgggggtactggggcagggaaggcagcaggcaa

SEQ ID NO: 464684 - DNA, 1000 bp, Homo Sapiens; identical to SEQ ID NO: 335270

SEQ ID NO: 464685 - DNA, 1000 bp, Homo Sapiens; identical to SEQ ID NO: 335271

SEQ ID NO: 464686 - DNA, 1000 bp, Homo Sapiens; identical to SEQ ID NO: 335272

SEQ ID NO: 464687 - DNA, 1000 bp, Homo Sapiens; identical to SEQ ID NO: 335273

SEQ ID NO: 464688 - DNA, 844 bp, Homo Sapiens
ttagctgttccaaacacagaagctttattgatgcaagtgagggaaaaagctgaggtacacatgtcgggttggaggggcaggatggcccccaagtctctgtcctgatccaaggctgtgtcctgctaggattccccctcctcctgtttcctctccttctcgtgctgcttctccagtggctcacacttatcctttttccagtcggtgtacatgacatctgacctgggaatgcacaagcagtcgagagcttcgtagaactctcccagttgctccttggtcgtctctggcttgtcagcatagaaagacagcccccagttcttctcatcgtccaggtaggaaccaaacatcaaggtcttggtgtccctaaggaacagcaggtgagcaacatgttctcggcctccctcgtatctggagacggtcccattctcccgctggacattcaggtaactggagttatagaagcactggttctggcgggtctggtactctctgagaaagatcgtgtcctctgtcttgttgggggtaaagtaaaagaaggttgcttggatctcctgaaccgacttattgtactcctcgtttcgaaaggccgatgcgatataaaaccacttgccagtgatccggtccagggtggcgttggtgatgggcaccggtactaggttggcacacaatgggatctgggcttccagcagaggtaggaggctcaggactgtaagaacccaggacagcgccatactgagaccaggaggcacgtggagccaggcagtgctggtggctgcagggtgcagtcacctttataataaactatgggcggtcacttggagcccagcaaaagtttactctgtgtctg

SEQ ID NO: 464689 - DNA, 1000 bp, Homo Sapiens; identical to SEQ ID NO: 335275

SEQ ID NO: 464690 - DNA, 1000 bp, Homo Sapiens; identical to SEQ ID NO: 335276

SEQ ID NO: 464691 - DNA, 1000 bp, Homo Sapiens; identical to SEQ ID NO: 344561

SEQ ID NO: 464692 - DNA, 1000 bp, Homo Sapiens; identical to SEQ ID NO: 335277

SEQ ID NO: 464693 - DNA, 1000 bp, Homo Sapiens; identical to SEQ ID NO: 157329

SEQ ID NO: 464694 - DNA, 1000 bp, Homo Sapiens; identical to SEQ ID NO: 335279

SEQ ID NO: 464695 - DNA, 1000 bp, Homo Sapiens; identical to SEQ ID NO: 335280

SEQ ID NO: 464696 - DNA, 1000 bp, Homo Sapiens; identical to SEQ ID NO: 157330

SEQ ID NO: 464697 - DNA, 1000 bp, Homo Sapiens; identical to SEQ ID NO: 335281

SEQ ID NO: 464698 - DNA, 1000 bp, Homo Sapiens; identical to SEQ ID NO: 335282

SEQ ID NO: 464699 - DNA, 1000 bp, Homo Sapiens
ttttttttttttttttgtgattaaagtaaaatgcaattcatgtaaatatctccatcaaggaatcatacagggaagacccaagtggccatggggaacagactgggtgttagttttttaaatacagaggcataaataactgtacacaaggcagttaaatacacagtggtgcgatagcacctcctggtggtcacttgaagtggtgcactcagcagcaagttccatctttcacccacttgccaggcctggcatttaagattttgtctccaagggaccagggaggccccagtttgagagaggaggctccgatcaatccagggtgctacttgttaggaggtcaagtaaagggcttgatggggagcaacgttgaggaaataagacttgaggctgggggatatcactttcctccatctccccaggccctgtgacctcagataatgcagagctggctccatccttaagttctgtgccggcagctttaacccctcctgtaggccctcagagcgctgacatctccaggctgctgggctgcaccgccaccctgtccttcttcgcctcgtaaggaaatacagcaccaaagatatcttcgtgatagcgcttctggctcttgagctgaaagaaatagtcctcgacctgctcctcattcaatttcagcttggcagccaccagctgcttcagggtgtgggccacgtcccgggccatgcgcacatccccgcaaacatagaggtggcctggctccttgtggagcacacggagcacctcgctggccagctgctgccgcaggatgtcctgaacatagaccttgggcttgccaggcaggcgggaataggctgtgtgcaccgcatgcagcacccccttctgggccatctccagcatctcctcctggtagatgtggtcctcatctgggcggcggcacccaaacaccaaggtcatgcggcctccccgcactcccttgtgctgggagtcatggagccgttgctgccagaaactgcggaagggcgcg

SEQ ID NO: 464700 - DNA, 1000 bp, Homo Sapiens; identical to SEQ ID NO: 335283

SEQ ID NO: 464701 - DNA, 1000 bp, Homo Sapiens; identical to SEQ ID NO: 335284

SEQ ID NO: 464702 - DNA, 1000 bp, Homo Sapiens; identical to SEQ ID NO: 157331

SEQ ID NO: 464703 - DNA, 1000 bp, Homo Sapiens
atttttttttttttttttttttttttttttttttttttttttgacatatatttgatttattaactcagcagatgcaataacaagagatgaaaatagtatatcaaaagaagactggttaaatacattatggtacactcacacaatggaatactatgcagcggtataaaagaatgaaaaagtaatttatgtcttaatatgaaccgatgtctgagaaatattggtgaaaaaaagcaagatacagaccaatataaagtatgctaccatttgtgtaaaaaagcttgtgtgtgtgtatgtgtgtggtgtgtgcacacgtgcatacacttgcacatcgcctggaatctgtctgaaggaaacctcaaaacacaatcttgactacctttaaggaggtgacttgaatatctggaaagggagacttttcactgtacacttgaatgccttgtgatttttgtaccatagacaggcttatccatccaaaaaattaaagtcacattgaaataataaatgaatccagaaaggaagcttcatgattcctcagtgggcatctttattgggcatcagcgctggtgtggaggaggctcctggttccacccacggcttttctcatggagtatccatccaagctgcgcaggctccagcaggccgcaggctcgcaggcgacgggaagtcccacttctttcagtggagagatgctgctgtgtttccctctctcttcacccacaggattgaccgtcccctctcccggaggaaaacccagcagcggcttacccacgcacaagggagcccaggcagttcccttctgccggagaggctacgctgccgtcacctacccacacgccagagacactctgagtcacacacgtgagccacagcccctgagcacacacatgcacacactcgcacacatgcacacactgcacacacatggacacacgcacacacactggacacactcacatacttgcacacactcacacatgggcgtgcgagtgcacatgcacgc

SEQ ID NO: 464704 - DNA, 1000 bp, Homo Sapiens; identical to SEQ ID NO: 335287

SEQ ID NO: 464705 - DNA, 1000 bp, Homo Sapiens; identical to SEQ ID NO: 335288

SEQ ID NO: 464706 - DNA, 1000 bp, Homo Sapiens; identical to SEQ ID NO: 335289

SEQ ID NO: 464707 - DNA, 1000 bp, Homo Sapiens; identical to SEQ ID NO: 335290

SEQ ID NO: 464708 - DNA, 1000 bp, Homo Sapiens; identical to SEQ ID NO: 157332

SEQ ID NO: 464709 - DNA, 1000 bp, Homo Sapiens; identical to SEQ ID NO: 335292

SEQ ID NO: 464710 - DNA, 1000 bp, Homo Sapiens
ttttttttttttttttttttttttttttttttttttttttttttttttttttgtatcctaacatatactttttattacatgttttcatttcacaaaaatgcacatctacataaatatttattatattataggaaaacatcattagtagctgacaatcaatgatttttaagcactattagagttgattgtcaggaagcattcaaaatcttgaccaaatgcaacccatattttcctaatatgtacttcacaatatctacattctctctttagtcatacacacacacacacacacacacacacacacacccctacaattgcactggaaatacacatgctgtgttaggaatgaaatgagtccccaaaacatctctcttgcttatctgttagtttcaccgatggctcaggatatgcatttagaagtgaagatgctgccagtggggcattggcctctttcagcctctttagcttattatgcaagcctctagtcttccttttccatcccttaaatcctcaggtcacaaccatgtatctgaaagacagtcccccttgaggtagcaaggcccaccttgagaggtgagttaaaaggtgtccttttcaatctgcctaaatactctcaggcactaagatgagtgtagaacacctggtagctgctttttcatgcttctccctcttcacatggcagcccagagttctatgttcttccgtcatattcctccatttgtctggctcataaacattaggtgagttgaggagctacagacattttgaaccctgtggtctcaaggtccacttggttcatgtcttcttacttgacctcaaatgcatgtaagaagaccctcactgaatacaacattctcggtgcctgtaacaaagaatcataatggaaagaatcccaaagtgcttctcttagagcttatataagccgaaaaacgtctgagattcctcaaaattgaccagagagagctcagatacgttgacatataaatgatcagcactggta

SEQ ID NO: 464711 - DNA, 1000 bp, Homo Sapiens; identical to SEQ ID NO: 335294

SEQ ID NO: 464712 - DNA, 1000 bp, Homo Sapiens; identical to SEQ ID NO: 157333

SEQ ID NO: 464713 - DNA, 1000 bp, Homo Sapiens
cttttatcaacatagttatagcattgatttattttccaaatcatagttgttaaaaacagtatttacatttcatcaccatcaacttaacattttatgcattcattaggatcatacaaatatatgaaggtgaaagttctgctctgtccccacttctttctgaaaccttctttagccatgtggcctgaaagtagagccatagtccagcttgggagtctagttcccaagttgcctggttctagaagcccagtgtttcttgcttgcatcagatcagaaacacactgggcaacataagaacattcttaacttggctcgactaagaggaaagtctttgcttacttcagggagcttctccaccttccattctttaccaatagggtttaaaagctttgattagaagccaatttgatttaggagttcccactggcaaattagggaacaatatgagcatcaaggacatctgcgaagcactgaaacactcgaatgtgattaaacgcatgacttcataatgatacaaaacaaaacacaaaaggcttttggcagcaagcctgagagaatggagatccagctgagatgacagcgatggagcgtatactgtgattcaaacgacatcattacttagatgctgcatgcacataggctaatgtgcccacagatcacacacttccaactcctgccaatcaacaactattgggttgactcagcagtctcccaaacataccacctgctcaaaattcttaagctcaaagctagaattatctctgtgactaatacagcattttcacgtttgacatgatagcaactcaaactaactctttaccacatttacaagttgcagttttcagctttaattttatttttactatttaaaaaaagtctgaactctatgcctgtattcaaaaatgaggaactggaaggtagtttggaaaatactgttttccaacccagctggagtctctctcctctcagccttcctgcctggtaacgtagacaccaagattca

SEQ ID NO: 464714 - DNA, 1000 bp, Homo Sapiens; identical to SEQ ID NO: 335296

SEQ ID NO: 464715 - DNA, 1000 bp, Homo Sapiens; identical to SEQ ID NO: 335297

SEQ ID NO: 464716 - DNA, 1000 bp, Homo Sapiens; identical to SEQ ID NO: 157334

SEQ ID NO: 464717 - DNA, 1000 bp, Homo Sapiens; identical to SEQ ID NO: 335300

SEQ ID NO: 464718 - DNA, 1000 bp, Homo Sapiens
tgtccttgtgttagtacttcagagacagccctgtccatagactttattatttggaagggggaagaggaggtccttggcactggttgggatggaagccccaggggcaaaggtttaggagttccagggctcagctgtcactgggcagggcaggcacactggcaagggcaggcagcaggcgtgtatatatgtccaccccacggaggaacacagcctcatgcagccgttcatcgtggtcgtgcagcagcacaggtgtgcggttcatgggtgagaagcctagagctgggacccccaccgcgcggatatagcggttgtcagtggcagcaggcatgatctcaggctccagagtgaggttcatatccttgcagacccggctaaaagctgcccaccaagggtttgagtcatcagtaggtgtcacttgggggtgcatccacttctgagcaaactctagggtgaccccctcgccagctgcctggcaccagctctgcagctgctcctcaaaagccttgaagtccacatccggtgccacacggaagtcaaagctggcgctcatggtggcaggtatcacgttataggccacgccaccctctagcttagtcaggttcacggaggtcacggacccctctttcaggtgggggtttgactgcagcctctgccattccttctcccggaatgccaggatggagtttacaaccttgtgcagcttctctgctgctgtgtcctccatgaagcgtgaggcatggcctggcctcccagtgctggtaacccgcacccaccagggactccgctcactataaaagacagtgaaggcatcagtgggattggctatgccctcatccagggcaaagcctgccctcagggcgtggaactcaggccgctgcacgaacagctccatgccttggtgacccccaacctcctcatcaggcacaaaggtcatgtggatggttctggggaaccggtggccctccaccttcagcctcctcacagcttccaggtactggat

SEQ ID NO: 464719 - DNA, 1000 bp, Homo Sapiens
ggcgaagctctttcattaacatcatcccatttaatcttggttaagctgtaatggattggttgagtaattttttcaaaacaaaggatgaacaagctcagagagcctgagagacttactgaagatcacacagtaaatgataaactattttactttatgtctaaggtctttcataatatgaaatagaatgtagatattgcaacaatagcatttttggagacagctacctcctttaccaggaataatctttgcatgtcacatttagagataaagctcaaaatgcaaatccttcccctgagagtgggaaagcattaacaaatgagagtgggaaaagcattaacaaagcattaacacaggtctttacatattcaaaatattaaactaatgctaggattatagacttgattttaagacatggtagttaatagaaaagttctagattgaaaacaattttgcaaaaatatacatttgtatatgtgtatatatgtatgtgtatatatatatctactaggaaaatatattgcttaaggtgtttgtgccatttcttagttaccaattttacattctgcattcacagcatttgccatcccatctctacacttaaagccaccatattacttttaattactttatacacattttcagtcatcatctaaataatcatttatagccacaaactaatactgtttagtcaatgaagcactttcatcagcaaaaattacagattttttgaacatgattctgggaatagttcagtttttacaattagtaattgaggctttgtcatatgaagcaagaaatctgctattattttaaaaaatcaattgtatatcgaccataaagaaatagtataaaagtcataaaaacactgccatttactgtagtaaaatgtggggcattttatttgagttcctaagaaatttcctgtatttagaactcttggaccttcactacttgtaaatgtgagtctatcctttaccttaccctagcttttaccccaggg

SEQ ID NO: 464720 - DNA, 1000 bp, Homo Sapiens; identical to SEQ ID NO: 335302

SEQ ID NO: 464721 - DNA, 1000 bp, Homo Sapiens; identical to SEQ ID NO: 335303

SEQ ID NO: 464722 - DNA, 1000 bp, Homo Sapiens
tactttcaggattatgtattttattagctagaaataaaacaaaatgcagaggggaaggagatgctttacaaattcctgaaagcctcttcaattatcagtatacagcttctgcagcagggacgacccttcttctactcccaagccaatacaccctttctcttggtctcaaacacacagacataaaatttatgtgggcagtttaccattttccagttttcattaattcaactgcttcattgattttatcaagattcagagtatgagtaattagtggatctagattcaacttctctgccatataatcagcaaccagtttagggatgtgctgtctgctcttccagcctccaaaaacagaacccttcaaagaacgtcctgagaagaacaactggccactgattttgagttgaacactggcaggcaacaccccaacaaccacacagaccccatagctctcattgcaggaggcgagggcagctgccagaacgtccagatttccaatggcctcaaagcagaagtctataccagcatctgtcatatcaaataaaacttcttgaatgggtttctttaagtcctgagggttgaggcactcagtcgcacccaattcctgtgccttcttaaatttctccttgttgacatccactccaatgatcctggctgctcctgctgctttacaacccatgacaacagacaagccgactcctcccaggccaaacacagcacaggtagaacctggagtcaccttggcagtattgattgcagcaccaaacccagtggaaaagccacagctaattaggcatactttctctagaggagcgactgcatcaatcttggcaactgagatttcctttatcactgtgtattcacagaaggtgctggtattaccaaagtgatatattgattttcccttgcaggtaaacctgctggtaccatcagacatcagttgggtttttgactgtttgaattgtatacaaaaattgccctcagaattcaggcaagaggt

SEQ ID NO: 464723 - DNA, 1000 bp, Homo Sapiens
cattttatataatttttaattttcttaagaatttttaacatgttatagatatatatagatacatcagtgtagttgttaaaaactaaaaacactttttattaaatggagtcactactaagcacagtgaatagggacttagggacttgcaattctactgtatcaaattgaacattatgataagtatgataatatgattctagctctatgtttatattcagtattacaaaaggaatattttctaaaatattaatatatgctggcaaatagccttgtgtacccatatgatatactttttcagtttcaccaagttatgtaatgatgattcttaatcgttgaaaaatgtgcccgtcccttaatcttttctgtctttcttaatctaatccagtaatatgcatcatggaatgaactgatttcaaaatgtaatccaacttaactcataacaagtgtttaaaaaatacatttatattcaaatctaaaaaataatagtttcaatgtgttaagtgaatattactctaggagatgcatttactatatctttatacgctatatctgttttgagttatatatctgcagcagctggttaaaactcttaaaaatctccatttcaacatagaaatccaagtgtatgttttcttaaaagatacaattatagccttacaaaatgtaaatcaaaaatattaacattgttattatactaattcccaggtgctcacaagactttaaatgtttataaaggttaataattctttataagggttctatgtcttcaacaaatcttctacttatgcttgtatttgtgagacagatacatgatttcagatgagggaactctcacaagagaaactccagttcaccatgacaacacagacctcctgccactttggatctcaaaacgtcaggaccgttcgaatgctttgtcctgaattgagcagctcaaatccttcactgatttttttaaatggtaaaacatgagttatcaactggtccaggtcaaatttct

SEQ ID NO: 464724 - DNA, 1000 bp, Homo Sapiens; identical to SEQ ID NO: 335304

SEQ ID NO: 464725 - DNA, 1000 bp, Homo Sapiens; identical to SEQ ID NO: 157335

SEQ ID NO: 464726 - DNA, 1000 bp, Homo Sapiens
cactatattggacaggctggttttgaactcctgacctcgtgatccgcctgccttggcctcccaaagtgctggaattacaggtgtgagccaccatgcccggccgaataattatacttttaatttttgaggtcaccttcctggcaacaagtatacatttttagtacagtcaacttttatttttccattgcctctaagttaaaaagtatttgcattataatagttcacactgtttcacagtaaaatagtttcagtaattttccaccataaacaaggcagacttttaaaaacaaaagagtctgttagaatccattcaagctgttggcataatccacacagtaaaagcagctgaatagatcataaatatatttgtcaatccttggagcctactactgacacatacatattagctagatacgtggtagctccagggaagtgctcaagagaggcagtccatttccttgtgaggtgtagctatctttcacaatgaaaaccagccgtgtcctctttgtttcttgtggatttgtatcttctcctggaagaggcgagagcctagatcataggcccacaccgagagcaggctgtaccccagcctgaccattcccactcttgacatctgcttggcagagaagatacctggagataattttgtgaaaagtgtagcggaagtctcggttccggtaagcatagacaatgggattgacaactgaattggcatgtgacagaagaatggccatattcattgcccacttgggcttatttttaccctgagctggctggaaaagagtgacacagttaacagcatgcacaggtaaccagcacagggcaaaaatccccacaatcatggccagtgacttggctgcatggatctcccgctggagggtggtcctcgagtggtccatcagctcagtgcgctgaagctgcctgcaggccaccaggaagatcttaatgtagatcaccagcattataagcagtgggggcagaacacacccaaagaaattga

SEQ ID NO: 464727 - DNA, 1000 bp, Homo Sapiens
ctattagcttttatttactcaaaaacatccacaggtgaattcagcagtttaagtcccccttaaactcagtttatttcttctgttcccaacatcttctaggcatcctccgagagcaggttctctgctcaattccacaatggcatggaaatgagtcaccaccacacacatgttcagcccaactagagccttttgtcagtaagtcaactaggcacccttcaggctccatgacttattcttctattgggaagaaggaaaacagacaataatatcaataatacgttgtccccaagtcaggcctccaaaacactgaattagagagaaaggacaaaggaaaaatgaagtggaggaagagagtagtggagtgggggagatataattggggagcactggagatgctcccacctcagtggaagtaatcaaggatgtaaaaatcccttggcccaggcatacaggccctcaagtgtttgttgatggggaatctgaaggtcaatgagacagagtcatctctgatggataactactcagaattcttctcaatgcttgtgtccaaagaatcagagggatggcagaccacacaggctttgaggatcaaaaggtaggtttccttgaacttctttattttataggcatagacgatagggttcatcatggagttggcatgggacagcaggatgcccatgtacagcacaagctgtggtacctcaccattaaagtagatgatgcagttgatgatagataaaggcagccatgacagagcaaacaagaaaagaaccagaaacaaggacttagccgtcttgaactcccgtccataaaatgcacctgtctctttggagttagataagttcagactgagtttgttccgaatgatgtaaaagatgtcaagatagatggcgcacatgacaaccagggggatgaaaatccaggtgaggaagctgaagtataccatgtagtccattctcatgacggaaacaaattggcatgaaaggaaggtgacatttct

SEQ ID NO: 464728 - DNA, 1000 bp, Homo Sapiens; identical to SEQ ID NO: 335305

SEQ ID NO: 464729 - DNA, 1000 bp, Homo Sapiens
ttagattacaaaggtttatttagaaaatagtttggttgttttggctgttgtttttggcaaacatttaaatactttcagtaatcaaagattgtcggtgctttctccttgccccctggcagccaccccccgactaggtcctggagaagtcagcccttggtcagacggggatggggagtggtagtgtctttggggggctccttgcttgcccatttagggggctacctctgccactgctctctaaaaccctgacctcacagccacacctcggcagggctcccagagctggatccaggcagggagccccagaagcagccccttgctgaggggggaaggcaaaggggtctccccctctctcctccccactccctggagcccggctatctctctgccaagctcctgccctgccgcaccctcccctgcgccctggaggccaatccatccccgggtctctgggaaagctcccccgtccgggccgccccttctgcccagccccgagcgcggagctgtccaggattcccagacgggtgcgagtcactgcctgaagccccttctcctccgtcggaagaggatgtgcttaaaggatcgccggaaatcctggttgaagaccgtgtagatgaccgggttgagcgagctgttgcagtagccgatccagaagaagaacttgaagagcgggccgggcacctggcaggcctcgcggcagatgccgtacaggctgtagctgaagaagaaggggaaccagcagagcacgaacacgcccatgaccacagccagcacaaaggtgaagcgcttctcgcgcgcctgggccaccttgcggcggcacacgctgctgcgcgcccggcgccggcgcgacaggaagaactcgacggagcgcgagctggcgcgcgacaggcggccaccgggccccggggacctggaggcggtcagcgcccccgactcagccgcccccggccccgccccctgcccgtccgcaccgcccgcgcccccctccgcgcccgctcgc

SEQ ID NO: 464730 - DNA, 1000 bp, Homo Sapiens
caacaaggaacatcagcaagccactctcccatcccttcccaaactttcctttttgtgcaacggtccgtggcttttctctttgcctcggatgattcagacgaggattgtgggcttcgagttcacctgctatcggtcttaagtaaacacagatctcctcgttcccctgggaagccgtgcccggagtccgcgccccgcgccgggccctacaccttggattccgaggcgaagccggggcggcacggctcgtccaggctcgagtcgctgtccgccgccgccccgccgttgcagccggcccagggctccagcaggcgcgcgggcggcgtggccccgacgacatcgtcgtcgtcgtcgtccgaggcggccccgggcgatggcgggggtccgggccgggccagacagcccgaggcgcgcggccggtctccgtgggtcgcgtggcgccggcgggcagccctgcgcgcgcagcagagcagtccctggaaggccttgcggaagtcggggctgcggcagtagatgatggggttgaaggccgagttggcgtagcccagccagttgaagaagacgaagaggcggtcgggcaccagctcgcggtggaaggccttcaccacgttggccaggaagaagggcagccagcagagcgtgaagacgcccatgatgatgcccagcgtcttgagcgccttctgctcgcgtagggccacgaggcgcgagggccgccgcttacccgcacgcccgttggccagcggggcggtggcggcggcggcggcggggcgcgggggtccgggcggcggcgcgggcgcggggacgggcgagggcgagggcgagggcggccgcgctgggccgccgaggaaacggcgctcgcagctgtcgatcttcttcacctgcttctgggcctcgcggaacacccgcaggtacacgaaggccatgatgcacaggggcacgtagaaggagactacggacgaggcgatggcgtaggcccggttggtgacgaagtcgcagcacttgg

SEQ ID NO: 464731 - DNA, 1000 bp, Homo Sapiens
tctagacctgcaattggtttaaaatagctccatagaatcatacagattctggaacaaacagtgtttatagatatagggtaaaactacccccacggtatatattttcaaagtcacattgtactgccctgacaggttcctttcttggtaccaaacatgtaattgactgggtctctttgcccccacccagaccccatgtagcaaaattccattctggataccatttcctatgccagttaagggtttattacaagttaaagagttttttttaagccacccagatattttaggaaacaacccagaaccaaagcattaataataaaaatcaaatcaatgtcctatatatcaaagcagcacatctaaaaagtcaaggatgtgaaaagtgacctttacattttacaacaatacacagtgtttactgatttcaaaaaagtatcagagaaaatagaaacctttaaacaatcattaaaatgagtagaaagttttttaaaaagtgcttattcagagtttagtgaacacacaaatattatagattgcaattctatgttatagtacatcttgctttctataactgtaaaaataagctaaagcataggagtatgatttaatctatattcctagccctattcaatatgtagttatagattaactataaacctccactcaagtgaaatgcaagaggaatataatttatagcgtttttaaagaagcatatgcctaaagcctgaataatccagtactaatctattataatatactcaacttagaagtgctcatctctcttacaatgttgtcttgtaaatgatgcaatgagttgaaagactggttctggttcaagaggaaatcctgataaaaatggatataaaaccccactaagaaacacaagcatgtttcaaagagaaatctgaatccccaaatcattattcacaatctattattaattacaatttgagatatatcaccagttacttctaggttgtaaatatgtctcaccaatgaaatc

SEQ ID NO: 464732 - DNA, 1000 bp, Homo Sapiens; identical to SEQ ID NO: 157336

SEQ ID NO: 464733 - DNA, 1000 bp, Homo Sapiens; identical to SEQ ID NO: 335309

SEQ ID NO: 464734 - DNA, 1000 bp, Homo Sapiens; identical to SEQ ID NO: 157338

SEQ ID NO: 464735 - DNA, 1000 bp, Homo Sapiens; identical to SEQ ID NO: 157339

SEQ ID NO: 464736 - DNA, 1000 bp, Homo Sapiens; identical to SEQ ID NO: 157340

SEQ ID NO: 464737 - DNA, 1000 bp, Homo Sapiens; identical to SEQ ID NO: 335315

SEQ ID NO: 464738 - DNA, 1000 bp, Homo Sapiens
ttttttttttttttttttttttttacagcacagtcagcatgagctggttttattaccatcgcccaggacacaagcgtgtctttaacgaagggccctcaggcagccgtccagcctggactggagtcctaagaacagaaacaccctccagaagcggtcagctgtactccctgtcagagccccaccgccaccacaggtggcggctttcccgaggccagcccagaggactgcccaggcgctgctgctccaggaggtgcgaaccttgggaatgggggaggggagtgggcaggtccctccaagtttggggtgccgtgggctacagaagcagatactggtggggctgggactcttggttgctcagatatcttggtggctgtccagagggtcccacgagccctgcccccacctgctgtggcagttgcagggatgcttgaaggcagtcgtccctctaatagtagagttcctggtcccaccagctccctgggcaacagcgaactccaagcttccggatctcatcatagacgaagatgaggatgccgtagggcagggggaccagccaccactggaaccgaatgggcatgaagttgaagatgttgggcatgccggggcagtagcacaggaagcagccgatgcagacctggaacacgatggcgatcaccaggatcttattcctgaagaagccttgctggaaggcagagagacggcgcgtcttgcggatgaggacatcggcgatctggcacacctcaatgctgatgaagaacacggtgtagcaggtgtactgctggtacaggcgctgcccgaatgtccactcctggccgtagctgtcctgcagatcttgtaggtggtggtcctcccactgcgcccgcagccccacgcacagcagtgggaaccagccctcctgggccattgccgtgaagtagtcagtgaagccagcaaaggactgaatggcaccaatctggaagtaggagtaggcagccaggggctcgttgaccaatctgtcacg

SEQ ID NO: 464739 - DNA, 1000 bp, Homo Sapiens; identical to SEQ ID NO: 335316

SEQ ID NO: 464740 - DNA, 1000 bp, Homo Sapiens
ttctctctaacaacaacaacaacaacaacaacaaatccaggatccaaatagagtcctcctcacggtttttcacttctcccctctcctggttaggctgagatgtgccagtcaggttagaatggagacaggtagccagggcacaaggccagcctctgaattcctgccacccgtggacccctagacagcaccatcctaggcctgcctagatctgggacaccatgtgtgcatggacaccctatgaatatggcaggaccagggagacaggcagtttgattctccctgactgccagtgtctgagattgggagcttatgaggcagccctcacactaggggcagctgtgacaccagggtaggggacccattctggccttttggctctgcttcagacagggcctcctctaactccaacccttaccctcccagctctcatttccagtgcctgaggtgggcagagaacctccactagtcctgggggcagtaccagaccccagcgagtctttcctaaaagatgatggtctcagcggtgccttccccatctgccagctccaagtcccttggtgactcttcaggcctgggcctcccactgagggttaggctgaggctgaggctgagggtggccgggcagctggagcgggtcagcagcgtggtgtggcggctcgagaggctgccgtcggagagccgccggcgcatcctgggctggggacccccacagcaggcaaggtgacgcaggggccgcggtaacaggtggctgttgaagcccatgtagatccaggggttgcagcagctgttgaggttgcccaaaagcatagagatggtgaaagccacattggtggaatcttcatcaggggcattcttgtcccacacggaccacatctggacactgaagaagggagcccagcaagcgatgtaggccagcacgatgacaaaggtcatcttcactgttcggatcttggcccgtgagatggtgttgatgctgctgacccgagatggcagcccccga

SEQ ID NO: 464741 - DNA, 1000 bp, Homo Sapiens; identical to SEQ ID NO: 157343

SEQ ID NO: 464742 - DNA, 1000 bp, Homo Sapiens
ttttttttttttttttttttttttttaaagcttgtcacactccaaatacaaaatgatttactttacatgcagcaaaatatacaagaagtgaatccgaaaaccaacttaattcaattcattatattcgcttggcacaattgcaattcagttttaaaaaaatatttgaaaaatactgaaactgacctgaattcaagtataacggtttcttcaacagaaacattatcaatgcaataaaacattacacggaatatattgaagcaaaatgccttcttgtgtttttcccttaaatttctgtctttttttaaaatacagttttaatgccaacacaactcacaattgtatttttaaatgaatattattgcattgtttttgcatatcttgtgggacagaaaatgcaaagagttactgattcccgtttcagaagcagagacagtggtttgtttttgctttcaaacggccccagattcagatcttcccacagctaaaccagaaaggggggactgcgtagtcactggtgtgcacgggcacatggtgtgggtgcatatacacgggcaggacatatgcacacagacaacccaccacacacacacgcgtcgcacacactcggagactctctcgcgcatgctcctctctcccaaacccacctgtacacccagcataaaaaggaacccaactctatcacccacatgtgcaagaccacatcaagtgcattgccagttacctttccattagataaccgaaccaaaccagaacaaaaataggttactacctaaggaaatgataacaaattattgggcatacacaatggttggtaaaactctcctgcagcggcttctattgaacctccgtggaaaaaggaaaccacaaccgtttaaataatacaagaaaaccaaacccgatgtacattggcaaaagtgaaaacagaaaggtgagggggctacaggactttgtaaacactcttcttcctcccctcccgctgggaaagcaaaataaaacattt

SEQ ID NO: 464743 - DNA, 1000 bp, Homo Sapiens
tatttcagaacagctaaacaggaaccaggacgcagtgtatttgggggaaagggtttaaaaatggatatgttgggcccagtgactgatatgctagaccgatggctgaggtaacgacacgaggtgtgatgatcgtcatcacctttaactttcccctgcaccccgccgccatgccttcagttgggtgggcctggtgccctggtacatgggagaagcagactccacagcagtgcccatctggacaatggggcagggcaggtctggcctcctcacccatcctctgtgagagggcggggcctgctgtttcctgcagctggggccgagcgcatggtactctgccaggctcaaccgcttgggacctgttcctaccaggtttatggctttcttgaggcatgacatctcttatacaaaagtctaattaattgaatattactcccaactagtgcctaaactttcctaactatgaggcacttttcccctggctctcctgcgccccacctgaggccagagccagtctgcccctcgctgggggctacaaggtggtgatgcatatcatttcatccgccaggtcctcctcatccctcccagggtctggctcttcgtcgctgtagccaggaccaaagtcctgtagctcatagtcctgccggtgtgagagggggcccacatccccgttggctcggggacgcacgttcccattaagcagggtgctggctgcactctccatctcgtcgatggtgaggtcacaggcatcagcgatttcgtgttttgttgctgacacaaattttgggtcccttgcatagcgtcccaagccttcggatatcaggactgcctccaccaagctgtccgcactcctctgcttgtcgctgtttttgttccggaagctgctggggacagtcaggctggctggtgtgaaagtccggtaggagatgtcgggctcgtctgtgtaccaggagctgcggtgcagggacggcaggctgccgttcacctggtccagggcctctga

SEQ ID NO: 464744 - DNA, 1000 bp, Homo Sapiens
tttttttttttttgtgactcaacggaaaattattttattttctggtcttaatagaagagtaagtgcaggctgagggaaaagaaacccaatttcttggtcaagggaaggtgaataaaagaaattcactggtaatagaaaacccaggtggtcagtcaggtgaccgcatctgcagtgctttccaacactttattcaggactcaaatacctgtgtgtatgagttcaaggagttcaggaagatttcctggcacagtaaatttagtgttgtttatactatttgcaggcaaattccatttctggaaattgctctgccagcctgcatttctcctcttgaaatggcataaggtgtcactaaaattccctttctcaaaacaccatgcaatagactcactggctcagaatggtcgtcctgttgtaggcctccccctagggaaagctgcatttccgaggtggaaaaagcaattttgtgcacacaaagcagcccatagcagcactttggcatgaaatgatgctgagcagaggaaactttaaaagcaatacaaggcccagtatcagcgtcttacgtaacaatcacacctgttaggatcagggtgctgtatatcacattcccagccaccctcaagcacacatgtgctaagtgggagaggaaaatgaagacaaaagagggtctgagagtgggagagctctgtctctgcctcactggcctcctctgttgggacaactttggtttgggggctgaccgtgggtcatgaagctccattagtatcagaagagaaggcggggccatgacaaatgattctccagccatgtggttgaatttggcttttcagggctgatgcagctattatatttcaatttaaaaaatagagggaaaagaggctccttctaagaaaaataacaactctggattgctcctgcccaagaggaggagtgtgtctgggctggaggagtgtttatccactgagtgctcagtgcagggcagatcaggatcctgggtggcagg

SEQ ID NO: 464745 - DNA, 1000 bp, Homo Sapiens; identical to SEQ ID NO: 335320

SEQ ID NO: 464746 - DNA, 1000 bp, Homo Sapiens
gaaaaacagtcatgtgtatttaagacattgcaccagtgggtctggatctcacccactgagcaacattgagcttcccattgcctttggctctacttgtggagagacaggtaagtgaaggggctcagggccagtgtggagctgggactgcccaagcagctcctggcttgggcacaatacatcagagggccaaaatcaaaggatcatcttttcttttgagtcaatgactcagggcacaacatcttcaggcacccaccctttcaactccccgtgcatatcagcagctcccaggtgcctacgctgacgactatgtggcgaggacaaagaagcaggcttgggaggcagccacaaaggacaggacagtggttttatatatggcaaaatacttctcctaggggagtacagacaaatatagacagacagatgggggcacaggacaccagacagggaggggggaagggagggcagtggtgtcttctaatcagtaagtggaagctgcaccccacccccaggtggagggtgggacattggcacaggaggtggcgagacaggcatgaggtgcccatccctgaggcgggcagccgggcaggccccagtccttgttggcacactcggctctctctggcccagctgggatgctggggaggggcagggttgctgggctacagggatgccaaggcaaagggatgccccaggggagagggggtaccaaggcctctcctgggggaagtgaacatgggtaacaaacagaatcacgagaggcaaatacagagcagcaacagcagcagccaagccccccagaggagatccgaggtcccaaggcaacccctgggcaccatcccacgggtcctctcccctggggcctcagggtgagggtgaaggagcagttttttggtttaaaatgaggcggaccagagtgttccatgggctccacacccaggtggcacagggatggggggctcagatgcagaggggccccctctactaatggcagcaggcaagg

SEQ ID NO: 464747 - DNA, 1000 bp, Homo Sapiens
tttttttttttttttttgggagaagttataaaaatttattttcccacgaaataattccacaagctgtgtaaacatttcttactaaaacaaatactctaacacacaaagattgtacatttccagtgaaacactcacagtaaaattgcctgtattttcactctctaggagcaaaaacaaggaggcagcagatgaatgctttcctagttacctttggcagcaagcttactcacattccctgactgctcaatgggttgttaaagcaacatatagcacaattaattaaatacagagcgaggtgggcagaatgctcgatatcagtctctagtttcttcgttagtcttcagcattccaattcatctcaaccattcagtcactcggtgcacactttcttacatacggacacacacacgtgcatatagcgagttccggctcgtagactccagtgcagtgactagaacagacactagctactaagaatgtgtcacaatcagtgtgaactgtatggagtagaacaacctctggagttttatatttaccataatttatggtggaaattacaaacttacttacaaggatggtataacattcagaattcaaaccttttcaagtcaagcaatcacacatatttacagtatgtacacactttctactagaatgaggataggtgtctagacaatgttattacaaatttcctgaatgtgggcatttctagtccctgtaattcataaagcaaatctgctgacttggcattaagactctaaaatagtgtgatcaaactgatatatatatatatattatatataataaggaggtgtttgtttgcagaaataacatttacaaactgtctatacagtacacagtactagtacatagaaaatagattctaactttatgatcccctttgtgtaaggcaagactgaatctgtccccaaatttagtcagccagaggtacaagcaagaaacagtggtccatgaatgaatatgcaaatcagatgcctgc

SEQ ID NO: 464748 - DNA, 1000 bp, Homo Sapiens
tttttttaaagacatttgtgtaaaaagggtcaatttcaataatttcttagatcagagtgaatctaaggcttccttgataatataaaacataggtcaccaattccataattatagccactggaaaaactgtgaagacttaataagatgaagaggagtgttcattagaaataaggcagctcaatctccaaattctttataattttctgcattaaaaatgctataattttagtcaacaaatatttgctgaatctatgagtttattttttactgcaagcttttaaaatcatttgtttcaacttttttcaattagtcattttgtaaaaacatctcctgaatatcaaagttgagtgtgtccacataaaacgaaattccttagcatgatttaaagaatttgttgaagggccagaacattcagatattcaaagacagagactgagagaagcaatggaaagatactcaatcttgttggcaggaaatacagaccctgcgtttgtgttaagtgaaatagatgaattcccacctggaagtgtttagcattgcactcgggaggattggtaccacatccttactatctgacttcagattcctggatgtatgtagttgtgctcagattgattaaagggagaacaacaccccattttatatttcacataaccagctatgcttgggcctctctttactattctctctcactgctgaaaaaaatttgaggttttttgcttgtttgtatttgtttttgccaacttcaaatgagctaacagtactgaccaaacaaaaagcaaaacactttgaatacaacagctgtgccaggaaagaaataaaaatattaaaatctgaggagactatataatttctgcattaagatttctgagattttttttttggcactatcaatacatttggtaagtctgaaaagtcattctggcaacattaacatatattaaaatgtttatacactccaactttaagtgtaaatttagcttccagcaaataaatacca

SEQ ID NO: 464749 - DNA, 1000 bp, Homo Sapiens
gcactcaaaaatatttattattatcatcatcatcatcattattattacataagaaaacaagttgtaatgcatcaccaaggttttgaaacaaatgtacccaaaatatgcttttaatcttgatgaagttcacaaatggcacaatattgacattttcttaaacaaattatacaatcatgttcttagataacaaggcacagcatcaccattaccatgtgtcctcggagaccacaacaggcagtgatttcacgtccccctaaggtttggtggagctgcatgatcaacaggatggctccgaaagaaccagtttgctaccagataagtcaatgagagatgccatcacttttactggacatagaattaaatataaaaatgatgcacagcaaatatggaattagcttattttgcattcagtttcattcctttcaagtgacaaaggtgcccttttttcagtatcttaggatgcaaacatgtgtatcttccacggggcattctcaccaagttcttaccaacagaaattaatagaaatggtgagttcagtttcatgataaccttcttcctggagtcattcatctgctcaggcttgaaggtccctgcggcgcctgccaaaggctttggaacccacattggtgggcacgaagttgctcttcaccatgccccctgatctgctcagcaagcctgccagccgatgagtcacacaggtggcagtgttgcaggctctcttctgggcagcggagctggagccctgtgtctcctgctcctgcttcagctcactggccttcatctgcacatagtcctgcaccagtgcagccagcaggaggcgcgcgtcctctttactgagtgtggccgggtctgggctgctctccagggcagacctgaatggcgccgcctggaggctgcccgcctggtacaggaccaagatactgagagccaggaagggggagaacttccggaaacccatgccgcctctctggcgactagagtttcagggcagcgcgagcgg

SEQ ID NO: 464750 - DNA, 1000 bp, Homo Sapiens
ctgatggtgagtgttacttaacatatcctgctttgaactgcctagaaaccaatcatggccccactggagcagtgctctggaatccagatgaaggatgaaaagcagaccttgaagagttcccactggagatggagccttccttctccatcagctctgctccttctcttcctgatctcttcttccgttctttcttctctgcctcctccctgccttccttctgcggtggagggtcaggggacatctcactggggtggcaccgaggcactcatatggctgtacgagaacctggacagagaggctcctgtggtcccgccttcctcctcctcccccacctctcccctcgcccctgggggaccaggattggggcagcaggggaaggtggccatgaagccgaggcggaagcgtttgttcatgaagcagtagatgatggggttgacgcaggaggaggtgtaggacaggaggaggatgaaggaaatgggggttcctgagaggcggcgctctgcggaggcggtgtcgtaggcccgccaggcgttggcgctgaagatgggcatccagcacaggaagaagaggaccacgatgacgatgagcatgcggatcacccttttcttggccatcaggttggctgcggagctgttactccggatgcggttggccctgctgctgctgccggtggacagctgccggagctccagcttcctcgggggcctggtcttttgcaggtaacacccatcgctgtcctcatatttgccgctgctggtggtgctaggtttcctttctttagcagacttcttctggctagcctcaaattttattccctggtagagttccaaagagattaatccatatgccaccatcatcacaattccaggaataagaaagaggatgagtaacaggaatgtgtgccaggactgctgcataacatcatttggcagtagaaagcggcacatattcgcggtctggttgttatttttggtaaaaggcaccaagttgctataaatgg

SEQ ID NO: 464751 - DNA, 1000 bp, Homo Sapiens; identical to SEQ ID NO: 157344

SEQ ID NO: 464752 - DNA, 1000 bp, Homo Sapiens
tttttttttttttttttttttttttttttttttttttttttgcccgctggttatgtggctttattcacagactcagcacttgctgaggatgaaaggaaagaacatttggggccaggctgggcctggagatccgggtggctgggaggccatgcatgggttggattggggagctcacaggagagaacctgctggctgggccaggcctgtgtggggcagggccggaggcaggcagcatgcgggaggcctggctagatctgcatggagcagatccatccaggtggtggctgtgagccaggagggagggactgaggcttctctggggcagggggtatggatttgcggctggatagcaggcacacttgactcccactcccaggaaaatgatattgtaggacagtcaggacacctggctcctggtcctgttgctgcctcgggacttgatatgtgactagccaagccggacccttccagtgtcattgtcttgctgatgcttggacatttgccttggagttgacccacctagggaccctctgaggacatttgtggacaatcctggagagtatgcctagggcccaggtgggcgggctctgcctatgaagcgaggggattccccagctccctgtcatctggcttttctcccagcggccagttcagtttctggctgtgccccccagggggcaccatctcacaccgcaatctgggccgctgctgggccaaggaatacttaatgttaagccttctttctcctggcccgccctgctggctcctgacttcctgcctaaaggcaaacaaggagtccaaagcccggatcctcctcccgggccttcttcctggtgaagagcgcattcccacccagcagggaacagaaaaaccagttccccgggtttccctccctgcctgggaatagcgaagtctggaaagttggcagggtctctctgggctgcccaggaaggtgacccagggtcctgggaagccaggtgaggcctgagcagggccctgg

SEQ ID NO: 464753 - DNA, 1000 bp, Homo Sapiens; identical to SEQ ID NO: 335322

SEQ ID NO: 464754 - DNA, 1000 bp, Homo Sapiens
tcttgtttgcctgctgcacgcgtagggacatatggagcccctgcaggccatggctctcagctctgccagacctcctgggggccggctggtgcagagccattttgcagcaaggaaggagaggaatgacgtcaaggagaagcctggaggctcaaatgtgcttccagatggatggaatagcccagccacctgtatccaaccatccatccctccccggtagggaagatctgcctgtacctccacatcaggtgcaggcctgcctcccgcttcctccccttccggaagagcccttattactcccctgctggaccatacagctcagcaccctgcaaactcggacagactccaaacttcaaccccagcctgacttagagagacctcacctggctctccaacctcccacctcacctggctgttctccctggcactttgggctcatctccaaatctaaacattgttcaaagcccttccacatccaagaaccctcccctttgccctgggagccagctcgagggaggtgcagtcagatcattccagctaggaacggaggcagaaagaggccgatggtccccaggaagcagacgatgataaacagccagaggaagatcctgtcgatgaccatggcaacatacttccagtcctccttcaccgaagagtcagcatcctcagaccgcaggtggtcggcaatgtagtgcacaccttccagtgccttctgcatgtggggtgatagcagcagctcaccctcctgcagcagagcctcagccttgggacctgaggccccagagtgcaggtggccgtggctgcagagggtgcccacagagggggccacatgacctgcacatgcccatctgtcctcctcctccaccaccacctccctctcctcggcatccacgttgctctccagccagtgataagaggggctgagcttcaggcgtagggggtggcagagctccacgggtggtgggggccggttcatcagaagccaccggggcacacagcccag

SEQ ID NO: 464755 - DNA, 1000 bp, Homo Sapiens; identical to SEQ ID NO: 157345

SEQ ID NO: 464756 - DNA, 1000 bp, Homo Sapiens; identical to SEQ ID NO: 335324

SEQ ID NO: 464757 - DNA, 1000 bp, Homo Sapiens
ttttttttttttttttttttttttttttttttttttcctgtttttcatttatttttaaaatgttggttatggaaaagcagcagcacattaagttgttgttattattattatttgagactgagttttgctcttgttgcccaggctggagtgcaatggcgtgatctcagctcaccgcaacctccgccacctgggttcaagcgattctcctgccgcagcctcccaggtagctgggattacaggtgtgcaccaccaccctggctaatttcatatttttagtagagacggggtttctccacgttggtcaggctggtctcgaactcccaacctcaggtgatacgcccacctcgacctcccaaagtgctgggattacaggtgtgagccaccgtgcccggccacattaagtaattattatatcaagcatcacattaagtaattatatcaagtagtcagctttttaaatatagcagtataatattatattaaagattagctgttactcagtgagtacaggaaagtttacatacctttaccaaatgcagaaaagttttaaaatcagtcttcaaatacaactggaattctccagcacagtcaaaggatgaactttactgtggattataaattagtattatttgccaggatacaaatactagatttttcactagtccagttcagataatattttgctatttttacaagatcaaatgtatctcatcagttattacttcagtcatacagccaactgttcaaatggatcatctgttaacataaattgaggttagcaacttagtctgttaaagcttgcactaaatttaacacataacttacattttcataattttataggtgccatcagatatatgtgtgttaactaaatgtatacttcagtcccttgggaggcttcacttatttgcatttccaatatgaactggtattaatatatttgcccatttataaataacaggaacaaaaagcccaagagatccaacaattgaaacgaaaa

SEQ ID NO: 464758 - DNA, 1000 bp, Homo Sapiens; identical to SEQ ID NO: 335325

SEQ ID NO: 464759 - DNA, 1000 bp, Homo Sapiens
cggcaccaaggaggccagtgcagggtgggagatccaggctctgcccacacagatagctcgacaccgagacttccttaattccaggtgaatcccccctcccccaccaccgaggcctgctgcttctaggaggtgttcctccaccaagtagcaacagctttttgtgcactctggccacatgtgagctcaagcctggacctatgatccctccctgaatgtctgggaaagccaaggcaggggtctgaggaggctccactttctttaaaagcagctcactctcatggcaaccacaaatgagcacatttaccagagtttctcccatgaggagatgttccatttccacaaagacaacgcattcggggttcgtagaacaagcacatgcatttggattctgtctgtgtgatagccagatgtcaggtctaaggtgtaatttagtcttatgtcttttaaattcctaatggtaactatgtagccacatcttcaaagcaggggtaaaaatcagaaccgagcctgttactgacactatcagaaagagccacaggaagattcggtcaagaacttgagctacaaatttccagtcttgtactacctggctgataaaatgttctttcttcacatgtctcgaaatgtatctaatggaatcagcagctttttccaaaaaagcaactagaactttttctccatcactaagctgtttctgtttctttttttcgaggactttgcctttcactactggttgactctcctctttctctggggatgagtagcgatccacatgatctttcatgcaaagtaattttggaagtttctgcagaaagagcctcttaacccagggggccatggggtggtacgtggaagaagatctgtggtgaacgttaatgacaaacacggtaacaatgatggacagggtcacaaaaatcatgatgaacagcaggtactctccaatgagaggaatgactttggaagacgatgggatgatttcttcaatcactaaaaggaaaac

SEQ ID NO: 464760 - DNA, 1000 bp, Homo Sapiens; identical to SEQ ID NO: 335326

SEQ ID NO: 464761 - DNA, 1000 bp, Homo Sapiens
tcgggtggcccctgtcttgatttcaggggagccattgagcattgaggagtggctgctccctcccttccttggactcttccccagtctgaggggcacgagcctcagggctaggagtgggtgtcattagggactgtggctcctctctcagaccctgctgtctcctggctccccaacaggcccaccctagatgaagcgcttgtcctgcacgttgtaggagtaggggtccccaggaaaaggctggggtggtggctggttgtaaacgccctgcaggaagatccaggctgtgcccaccaccatgacaggcgtcaccacaaacaggcagaggcggtccactgtgcgggccactcggttccagctgtctttctcctcattgtaattgttctggtccctcatgtggttaacaatgaagtttgccccatccacagctggcttcagctcattgaagagttcctgctgggcctgctcagagcttgctgggggccggcgtgcagtggtgaggcgcctggccagcccatgccgctctgactgcttctcgaacatgaggtcactgcgggacttgagcaggaagtactcctcggccttggagatgtatcccagggagctgctcctccgcaccagggccccagggctgggtccatcctctgctgggcgggacatgtgcaggagctccggcagggtctccaggaagagcttcttgaccccctcagacagcacatgggtgctgggtgttcggaagtggatgttgagcacgatgacacagatcaccacaaccatggtgaccagcaccatgccgaagagcaggaacttgccgataagggggatggccatggatgtggcaggcagacgcttggagatgagcagcaggaagacagactgagccaggagcaccgagatggccactgatgtcttctcaccactgtcagccggtaggtagaagaccaggttgaccatgaaggagatgagcacgcagggcaccaggatgttgatgatgtagaagagg

SEQ ID NO: 464762 - DNA, 1000 bp, Homo Sapiens; identical to SEQ ID NO: 335328

SEQ ID NO: 464763 - DNA, 781 bp, Homo Sapiens
tagaagcatatttttaataataattattacggtaaaacatcttgaataaatatggaatatgaacttaaataaataaataaataaatattttaaaaatataaatatataaatattactgatttctgtcagtataaaatattcccattcttctgccatgcctgtatcagggtcagtgtggcccagggcaggtccaggccactcccaccatggctgtggcccaccccttggtccctccaagatgaccatcctgagtttctagctcttgtttcatgagagagcagctccccggcttggccagcctcatctggccggtctcactcctggactggctcccagcagtcaaaggggatgacaagcagaaagtccttcaggttctctttgaaactttcaaaggtgataatctgggttgcacaggaagtttccggggttggagggcagtgctgcttgtagtggctggccatcatggtcaaggggcccttgagcttggtgaggctgccccgcaggccctgcttgtacagctccaggcgggtctgtaggcaggtcggctcctggaggtcaaacatttctgagatgacttctactgtttcattcatctcagcagcagtgtctctactcaggttcaggagacgccgggcctcctggatggcattcacatgctcccagggctgcgtgctggggctgggcgagcgggcgggtgcagagatgctgcaggccacagtgcccaagagcagcaggctctgcagccacatcctccagagaactttagcctttctctctgtgt

SEQ ID NO: 464764 - DNA, 1000 bp, Homo Sapiens; identical to SEQ ID NO: 335329

SEQ ID NO: 464765 - DNA, 1000 bp, Homo Sapiens; identical to SEQ ID NO: 335330

SEQ ID NO: 464766 - DNA, 1000 bp, Homo Sapiens; identical to SEQ ID NO: 335331

SEQ ID NO: 464767 - DNA, 1000 bp, Homo Sapiens; identical to SEQ ID NO: 335333

SEQ ID NO: 464768 - DNA, 1000 bp, Homo Sapiens; identical to SEQ ID NO: 335334

SEQ ID NO: 464769 - DNA, 1000 bp, Homo Sapiens; identical to SEQ ID NO: 335335

SEQ ID NO: 464770 - DNA, 1000 bp, Homo Sapiens; identical to SEQ ID NO: 335336

SEQ ID NO: 464771 - DNA, 1000 bp, Homo Sapiens; identical to SEQ ID NO: 335337

SEQ ID NO: 464772 - DNA, 1000 bp, Homo Sapiens; identical to SEQ ID NO: 157347

SEQ ID NO: 464773 - DNA, 1000 bp, Homo Sapiens
tacattagattaagcccatctttatttcaaggttttattgactaagttgaaatctctggtgttctggggcacagctttcttgaagaccaaagtagaaatccttagaataactcattctccacttagggttccatctcttgaatccacctttagaacaatgggtttttctggttgaagaagtccttgcgtgtctaatttcaaggggatctgtgtttctttacaaggtttgaaggagaagttctgaaggactctgattagagcaagtttcatgttcatgagagcaaacctcatgccaatgcagtttctgggtccagttccaaagggtgtgtatatgtaaggatctatgctgtccttcttcttactgaacctttcagggcggaactcctcaggctctgtccagtactttgggtcatggtgaagagcataagttggaatcaccaccattgaccctttgggaatgaataccccattgatttcaacatctttcttgcaagtcctctcaagtctaatagcaactgggaataatctgagtgtttcattcaccaccatgtcaaggtactccatctgtaccacggcatcataggtaggtggtgccttattgggcaaaactgcatcaatctccttttgcagtttctgctggacatcagggtgagtggccagttcatataaagtgaaggaaagaacactgctggtggtttcatagccagcaaaaatgaagattattgactgggctgcgagctccagatcagacagagctttgtgggactcagtttctttcgaattctgggagtcaatcatcagctgaaggaaatctagtcggtgcttttgtttgtcgttgaggcgacttttcttcattctgtttacagatttacttaaaaaatttatggtatcttttggaaacagagagacatttaatgcttcaaaaactggggtaaggaatggaaagagtattattgagagaaataatggatctaagaaaccaaattttaggaacttctta

SEQ ID NO: 464774 - DNA, 1000 bp, Homo Sapiens
ttatttaaaatcactgagattgtgatagtttattacagcagtaataggaaactaatataggaacagacaagccaggcaggaagaaggagacaggtgtatgggcagacagtctggagggcaggcaggagtttgggaggtgggtggagattcagggatgttggggtgttcagacccaacaccaggtcgtgggggtgacaaagtccggcagagtcaaagcagtgagaaaagacagtttgagagagaaagtgggtccagggcgccaaagctaaggatggaggctgtgaaggccccgagctctggaagtgcagattatttattggtgatcaaacaaagaaacaggtggtgagaatgggtgggtcgaaagggcatgttgcattaagcacacaatttacagctgtgacggtttagcatctgctctgttacttgagataatggagagcaggttcttttaactcaagatacaattgatcctgggagagcaaggagcaaggagccagcaagtccagacacattccagagccacgagccctggattctatccaagccacgaggggttttatgccccgggcttagattatggtgcgtcagggtagccttccacccttcagcacagagcttggtgttccaaaggccacaaggggttttagaccctggatcctggacatgattcaagactcttttacattatgtcagacatgcaagctcggcctcagcttctcccaacactcagcttttctcccaacaagagatacaggtgggtaggagacaggtagacaagcaggtagggagccctggagaaaggtgagagagagaagggcaggcagactgggggacagcaggcaggtgggaagaagggaaggtgggcagacagaaaacaggatatgggcagacaggaaggggacagaagcgggggtcaggaagacaggacggcaggtggaggccctcaaagctggtccttgtcttcacaagggttagggagcctcctgagacgcaggtggat

SEQ ID NO: 464775 - DNA, 1000 bp, Homo Sapiens
gcagaagaccatcagtgataccatattccatatttcttgacttcagtgatggttacaagagagtctgcttcagaattatttattattttgtacagtcttcatttaggtaattttttcttatgtctgttatattctaaacacacacacacaaagttcaacaaagaaacacatctcagtgaaggggcactcccctaagccattcttctatttggtggtacccagccataaccatgaatctcagggcaaaactttccttgtgctcactatgagtctctaaggttggaatgtaagtttctgctgcatttttaagtttgccaattataggagataaatgaagtttctcgaaccgaaataggtgctcaccaaatgtttgttgaataaatgaatgagctctagaatacatgcatgataaacatttatagacacacatttttacatagcactgtcctctaggagtcgtctatggtaatgcctacttcccttctaaactacaagcctcctgaaggcagggggccccaactcctccacacccagcctggggagggtggtgcccagggaggtcacagcctgagccatctgggaccccattctcatcagagctacttcccagacccagggcccagtggcttcaggtggaggtgaaagccattcttggagcgcaggacaagctggggcatcttgatgggcagccgtgaggggtccagagagaactcaaagcggagcaagcacatggctgtgaccaccttcatctcactcatggcaaactgctgcccaatgcagttcctgggcccagcagagaagggcataaaggcaaagggatggcgtttggatgcattctcagtggaaaagcgcagagagtcaaagacctcagggtcgggccatacagcactgttcctatggagggcatagatatgcatagagatcaggcttcctgcaggtagagaccggccatccacaaaggtgacaggcttgctgagctggcggtacacctggggcacag

SEQ ID NO: 464776 - DNA, 1000 bp, Homo Sapiens; identical to SEQ ID NO: 335338

SEQ ID NO: 464777 - DNA, 1000 bp, Homo Sapiens; identical to SEQ ID NO: 335339

SEQ ID NO: 464778 - DNA, 1000 bp, Homo Sapiens
attggacaacacagatttattatgtttatgacatgttagataagctggagaggttagagtgacagttctcagtgttaccttttcaggttcatctttccctaaagtacagcaaaccaaaaaaaaattaaattaacttggatcaattttccaaatagggaatctaagtgactatagaagaatttacagagatacgtctggaataacacacacagacatatattttctaataactgttaacataaaaaacagctaagatttcttctcacagaaaacagatgcaaagatgacaaataagtccaggtaggcattgtaaaatctggttaaatacactaagaaaatactaaactggtgagttttacccaacaggaatcttaaaataccagaaaagtaccttcaaattttactttatttggaaatgatacaaattcattattttaatatttaaagattgtggtagtatagtcaaaacacataaatattataatatacatttagaaattaaatataaagtcaacacaacactccttaaaaactcatatgtacacttccaataagtctcaggtttgaacattcaagctcatcagatttccccatggaaatgggtgaatcttgcagggagattgtccacaggatacacggtgggactggttttcattgtaggaggtccatttagaagctgccagtcacaatgcctggccagctccactgtaaatattttgagaagaatttttgcaaattctttgcctacacagctcctaaggcctcctccaaatggaatgaagctgaacctggatgcatcctctgggtgaggcagcatgaatcggtcaggattaaattcttccttgttggtgaagatctctgccacatcatgagtatcacagatactgtagataacattccagcccttgggaatctggtatccatttaattcaaaagtcttcagagcaacccgaaaccctcctggaactgggggattcagtcgaagggtctccttaataac

SEQ ID NO: 464779 - DNA, 1000 bp, Homo Sapiens; identical to SEQ ID NO: 335341

SEQ ID NO: 464780 - DNA, 1000 bp, Homo Sapiens
aaataataaatttttattagcgtcttttcaattctacaaattttaaaagtcattatacatttttaaaggttactaaaaatcactgaaatatgtctccacttaaaatggaatcaaagtaatttatacaattttcacctttaatattcataatttatttaaaagtagaataaattttaattctaaaatgattattacatctttttagaactgaaattacatttcaatgagtgtagctccactgtagttcataaggtttatacttaagaaatatttaattaacaaattaatttataccaaacaaaaacaaactaaaaaaatgcatacgtataatgagacagtttatgtatggtaattacagatttgaaattaagtctcctttgcaaagatcagtgcgtctggactggttaatccactaaattatcatctttgaataagaaaccaaaaacaaaaatgacttggaaagaaaaatagtagtttaaaggtgaaaatgactcttccccttattttaaaatacataaaattttctaaaacgtaaaatggaaaggtttaatacacaggaaaaacactgcacaccttaactaaacaaactagaaagaaaatatatttatatacagaactaagatgagtccattcattatttttacaaatattcacatagatggtttagagataagtagttaagtgtgtctcattaattaatggatgctttctagcctctgtcttcattaattttatttcctattcaacaaaaaataatgctttcaggatatattacatatagagcaatatcatttttatcagtaatttgtctgaaaaagagaaaaacttaaaagcagaaccctacaaagcaaagcaaactacaaagcaaagagtaatcacagtgtttgcaaaatagaaatgtgtgactttaactttatagcaggctgcctaattaatccagacagtagagaaagcagactgaggcaggaagtaagaggtgggactaaactgttaagaagat

SEQ ID NO: 464781 - DNA, 1000 bp, Homo Sapiens; identical to SEQ ID NO: 335342

SEQ ID NO: 464782 - DNA, 1000 bp, Homo Sapiens; identical to SEQ ID NO: 157348

SEQ ID NO: 464783 - DNA, 1000 bp, Homo Sapiens; identical to SEQ ID NO: 157349

SEQ ID NO: 464784 - DNA, 1000 bp, Homo Sapiens; identical to SEQ ID NO: 335347

SEQ ID NO: 464785 - DNA, 1000 bp, Homo Sapiens
tttttttttttttttttaacactctcatcaatttttattcacaattaccattgcttaagagttcctactttcaaaagaaaatttgtaatagcacagtggaaaacaaaaatctcattttataggtaaataagtatcagataagtgagtagcttatacattgtatcctattactatcattctcagtgcctgaatactaatcagtttaactgctttcaagctatatatttttaaatgcaattaaaacatacagtctcacagtaaatttcaatgacttattaaaggcctttacatggcatcagtatcatatgttagagatgaatggtgtttctaatttgctagccacctgggtcaagtttaagcaggaagtgtatttatacaagtaatggtaatacaaatggtctcctgggaaaagctgttggtaagggtttaacatttttgaagtatgtttttgtatatcttcgaaatgggcattttataggcattggccaaagcctcttaaaatcatgctccttagtacaggcataactattgtcagtgctgcctgaatgctcaggtagactcatgaggtgtgcatttttaagggttagttgaggtcaggtgaggttcggggcgtcgaaccaccttcatttgaataactctttaggaccaggaccctgctccttaatgtatggcgggtaaggcagcagtattgtcagcacctgcacctgggggggacctgatggaactgcagaaactctgcccccaacccactgaatcagaatctccattcaaaccaggtccccagatgatctgcaagcacttcagtgttggagaagcactgggctaggaccccaaagcctctgcttaccaggggccaagcacaatgtgtggcattactttctttttccttctccttctgaaatcatcctctttttatggtatcccctcagccagtttccctttctttctctgcactcccacactcagtccccagatccacatgaatttcccagctctgata

SEQ ID NO: 464786 - DNA, 1000 bp, Homo Sapiens; identical to SEQ ID NO: 335348

SEQ ID NO: 464787 - DNA, 1000 bp, Homo Sapiens; identical to SEQ ID NO: 335351

SEQ ID NO: 464788 - DNA, 1000 bp, Homo Sapiens; identical to SEQ ID NO: 335352

SEQ ID NO: 464789 - DNA, 1000 bp, Homo Sapiens
ttttcttttttttttgccttgtggtaatgttatttacagtgataattaaaaatactgaacaatggaagacaaaagttgacaaattcatcttgaacccatttcatcctcataaagtttttctctaacatacagaaaagtcatatttttcagcaatcttcaactttctattttgaggagtaggattattgcttttttgcccacacatgcttacagaagctgcgttacagatttccaatttgatttcatgttctgagaagcatctacacaagtctcaatgctattttttaagaaaacataggaaacagaaaacaagaacttatagaattcaggttgtcctggaaaagctattcaacactgctactcacttccattgtatctttggaaagataaactacccagtacacaaggttgaatcctgcaaatgcaactgggaagagaattcgagaatactggtctattttactggtgcctccaaaggctggcgggagtggtgggggtgtgacaggtgttgattgtaagatgggcgctctcgtgagcactttattggcctcggaagatgaaactattggcaaagacagagaagtgatccttttcttcagatgatatttggagtcaggatgcaaaacaatctcagcttccaaaggttcagtagcttttgatattgtcactgtgggtggggctgcaaactgtgccttccttttcgccttctgtgtctgaagattggtaaagtagttgacagctgcgaactcgataagagcagagaagacgaatgcaaagcaaacagctatgaaccaatccatggcagtggcatatgacacttttggcaaagagtgccgggcactgatgctcaaagtggtcatagttaaaacagtggtgatcccaaaaacagttcttgctgggacggactccttattaatccagaaagacacctgggaaagaatgactgtcataatgcaaggagtgtatatctgtatcatgaagtagcccatcttcctttgca

SEQ ID NO: 464790 - DNA, 1000 bp, Homo Sapiens
ggcagcataagtttgttatagtttaccaggaagcagtgcaggcggacagcaaggtcctcttttcattttccctaaaaaataaatcagtgaaatccagggaaactagaaaagactgctaaagatctacctgtctaacttctctctttgtgtttgtttgtaaacatggcaattaatagagctcttaaagagctgataacctggaccacggtagactggaaaaataattttttttttgttttgtctttttgaagtaaacatggtgcagtaataaaactgatatgcaagacctaaaaccaattggatggctgaatctcttacctcgagaaacagcagtatcgctgttggggacctgtaaggttaaaaaacaatagaagaggaaagtagtctaaatggaaccattagaacagacctcagtgtacatagtaaagccaatagacgacattaaaaagagaaaaggtgatggggaaaaacattcgggaccacttgtctatggaattcacatcagtcaagtcggggatcttgactttgagctgggaggcacgcctgcggatgcgccccttgctgggtaccccgtgccggtccagggcgcgcccgtaggcctcgcggctgctcaggggcttgcggtactggatgctggcgctgtcataggagtacatggtggccttggggtcgctcacgctcgtgagcacttccgagccactcgtctcattccggatttccagggtgctgaggagaatgttaccgtgggcgtcgacctggactttattcatctccagtttattcttctcattggcactctggtcttgtttgctagctccctttttctgagggcctttcccaaagaagatgtaatttacaaaggcatactccagcagagccaggaacacaaacacaaagcaacccatcagataaatatcaatcgctttgacataagggatctttggcagggtctccctgaggtgggtgctgatggttgtcattgtaagcaccgtcgtgattc

SEQ ID NO: 464791 - DNA, 1000 bp, Homo Sapiens
acttgcgttttaactggaaaaccacaaggaccttagtgtattcattacttagcagaagcaacccaaatggtatgaaatggaccacaggataggccagcaactaaggtattttagcgtcacttttgtcctggattgatgtgttttccaagtcctacatcaggctgtacaactggtttgaggaggaatctagtccttgcttccagtgggaggccatgttttagttcacataataaagccaatagacgatgttgaagaaggaaaaaaccactgggaagaatatgcgggaccaccgatctatggcattcacatcagtcaagtcagggatggtgattttcagttgggaggcgcgtctcctcaggcgacttttcttttgcgccacatgtcgttccagagcatttcggccaaaactatgcctgggcaacccagctttccgatactggatgctggaggcatcataggctagcattgtgcttctggggtctccaagtcccatcacagcctcagatgtggccatttcattttttatctcgagagtgctcagtaagatgttctcatgggggtccatcttgttgacatccaggcgcatcttctcattgttggcactggcagccttctcagctgctttcttttggcgttggggccccctcccaaagaagatgtagttgactagggcatattccagaagggccatgaaaacgaagacaaagcaccccatcaggtacatgtcaatggccttcacataggggattttagggagagtttcccggaggtgggtgttgattgtggtcattgtgaggacagttgtgattcctaatgccacccttgcagctgaagcatcgtaattaatccagaaggagacccaggagaggatggtaatcaggatggaaggcatgtatgtttgcaggataaagtagccaatgtttctcttaagcttaaagctgagggataacctgggataggaacctgtggaaaaaacaaccttcttggtgataagtttgta

SEQ ID NO: 464792 - DNA, 1000 bp, Homo Sapiens
tttttttttttttttctttagaaagatctcatctaaatagtaagttaaggttgcgtctatgaaaccggtgcaccttgtcttgtttctacgagctttaaaaagtccaaatactgatgaggctgtggatcagaaggaaccaacagtgactgtgtttgctgtcaggttgccctcctttgcctcagagaacggtcatgggtcgttgggtgacgcgtggtgtgtacgggtcatgttcctgcagaatcctagtcagtctaggagtagttggatgtgcttatgaaatatgtcagatacagaaataaaggcatgaggatgattcttagtttctgaaattgaacagtagaagtgttttagcttcaatcttaatttctagataacagaaagtagttacatcacataaaggaaaatatgacatcgcatgctgccatgatagcaagcgtaagaaacaaaatcttggtaaatatacatatatatgcatattatgcaaatatattttctattaacatacaatgttataagaatgataacataactgcaagggggaaaatcatcctagatggttttaccttagagtaacgaataacctgagacgtctatgctttctgttggatatcaggcctagaaatccatacgagatgtagagcacattttcagtgattgaaatgtcactggccaaacgtgtcactgtgttcgcacatgacagtgaagctggatccactccaagtgaacaacagaaacaaactacacactgtatattagagtacttacaacgagatgccattcactcccgatgagttttcaaaagacggtcgttcagacatcaacgtgggatctatctatgtttcagacaacaggtaagcacactgccagtggctcaccccagccactaaaccattgcagaaaacgtatgcccgatgaaaacaaaccccatcaccagagaagccaagaagcctttgcttactaaactgaacgagaggatatgaagtaagtgactcattttaaa

SEQ ID NO: 464793 - DNA, 1000 bp, Homo Sapiens
ataattacattcaggaatcttttatagcccaaggacacaaaataaaagacaataggatgataacttcagtccatttattttggatctaaagagatgcatgcactaaacttgaagcattctaagttattgaaatatttacatcattgtacatgaatgtggaggaaattttcttcctatcttgagataaaggtgtaatagatttctggactaggctttcatatttaaagtgagttatgatttttcttaaatgagggaggtattctattgggatcaaatttatcacaacttgacccggagtgaacatagggtacagttttggaccttttctatctaattgcattatgaatctagtaaggataccactactgtaaatagtcagggctttcactgttttatttgctgtagctgaaaaatatcttatttggtttgaatgttcttgctctaattttactttgccttgcaggtttgaaacacagcaaacatcgaagttcaaagtacactaaccaaaggagggctgggcacaaacaatatgacattataaaatttaccaggtttggacatagaaacagattcagatcattatcaaccacatagaggattatttaagtggacttagaacagacatctctccatgagactcagtgaataagaaccatatcagtaaaacccatacctcctcacaggtagaggtaggagacccaatagaccagattaaacaggcagaaggcagtggggaagaagatccgagcataggagtccattttggcaatgcggatatgtatcctcccatgtctccaagctcctgttcgacaatcttcaaaacagcagaaaaaactggcacagtccttgccgtccagacactcatagccgtactcttcatctctctcttgaaggtgtgtagcattattcatttgaatggttgctgatcttgggcggatatcaatggtaggggcagggtttttcttctttttatctttgtccttgcttggtttccggttgc

SEQ ID NO: 464794 - DNA, 1000 bp, Homo Sapiens; identical to SEQ ID NO: 157351

SEQ ID NO: 464795 - DNA, 1000 bp, Homo Sapiens; identical to SEQ ID NO: 157352

SEQ ID NO: 464796 - DNA, 1000 bp, Homo Sapiens; identical to SEQ ID NO: 335353

SEQ ID NO: 464797 - DNA, 1000 bp, Homo Sapiens
tttttttttttttttttttttttttttttttttttttttttttttttttttttttttttttttttttttttttttttttatacttttaattaagaaaacatgttttaagctgcattatttcagattatcagtgattctgaaaattacaagtggcagggtgcaggaccttaagtcaaatagacgttaagttcaaaccatcagtccattcgtcactagctgtatgtcttcgggcaaattattttacctctcagcctaatgtaataatgcaggtaacactgctcacgcggtgtgttgcacatagcaaacacttgggaacagttagctattcatcgtggtacattaaattgcttttccccaagagccactttatttatttattttgagacgaagtcttgctctgttgcccaggagtgcagtggctcgatctcggctcactgcaacctccacctcctgggcccaagcgattctcatgcctcagcctcctgggtagttggattacaggcacccaccaccacgtctggctaatttttgtatttttagtagagaaggggttttgccatgttggccaggctggtctcgaactcctggcctcaagtgatctgcccacctcagcctcccaaaatgctgggattacaggcgtgagccacggcacccagcccccaaaaagccactttaaaccttatcctaggaggacagtttcacattgcgtctaacctcttcctggcctcttaatcttgggttgttaaatcttatttgctttatttccttggttcctctaagttgtaatctcggagttaaaaacagctttagaaccccgcccccccaaaaaaaaaaaaaaaacttttgagaatttttttcaaataaatgtccattgcatagaatgggtctgtgactggctgcttctacatctgcacccaacatctggcccccttcagaactctgagtggacaggatcaggatttgactcaggaggattagaatgtgaagaatccgtgtttga

SEQ ID NO: 464798 - DNA, 1000 bp, Homo Sapiens
ttttttttttttcatttacaggtttattggctcctctgagccttgggctagagccccaggccccagtaagaggaatggatgagagcagacacagagggaccacagaagtcagaggtagacatacagggacctcaaaagagagtcagatgcagagacagggaggaagggctgcacctgccccgggctgggtaacagctggggtggggatgtggcccccttgctcctccagagcatggcagacccgtggtagctgcccaaattcaagtgtggactccagtggcgtgatgaggcagcctagcacatagatgtcagcacctttgccgccgagcgggaaggcgtggtccacttagcacgggtcctccaggctggcagaagctcagggtcatggccatgccacttccgtgagatctcagtcctcacctcttggttgaggaagcagtagaggatggcaacaatgaagccctggaaggaacccagtcccagctccagggggaggcggatgcccaggccagcattgtctggcaggaagttgaagatgatgtagtgaattccaaagagtgggatcaggaaaagtgtcgacttggagagacgccaatactgagactgggtatggaggctgccctgagctggctccagtttcctcaccaggatgcggataatattgagaaaaagcccaaagttcaccccgaccgagaggacaatgggccctttgatgatccaccagtagggggaggtgtcgtccaggtcccagcacgcgatgtcctcgaaggccagtttgcagctcacccacgtgccagtgaagagcacgggcagcccccagccagcgagaaccagccaccagaaggctctccttgagctgggggaggtggaggccaggaggcagttcaggtagacggcttctgccaacagccagctgaagttggtcatggtggcgaaatgggaggcggccacagagaccttgcatagaacagtggagaagctgcagtggtcagtgtcgtcg

SEQ ID NO: 464799 - DNA, 1000 bp, Homo Sapiens; identical to SEQ ID NO: 335354

SEQ ID NO: 464800 - DNA, 1000 bp, Homo Sapiens
cattcacaacacagcactttattatggaatatgtgcaacttggtgtaaggatttctgaaattcataccatttacaggtatttaatgggttataaattttcaatgtcagaattatacttaagtcatgttagtaatggtcattccttctggcccaatggatttaaatcttcttctgcccagtttcctcttcaatcagactttccagagctcctttcaggtctcggaggggagaacgtggctggtgcgtggtgcattcgaagcgttgggtttctgccagttgaccaacctctttgactatctcttggaaagaatcaatcaaattttcggcatctctctttcctccagggcgcagtccataggaccagtgctggctggagcagccttccacgcacgaagtcagtagaataaggccagctaggagtttttgaattggcttcattctaaggcacatgaatgcacaatcaaattagatccagacaaggttgagtataaactaaaagacctctttagtgaaaaagctagcatctgtatcactaaccctgcagaagatggaagtcagagtcagtttttacatacagacactgaaactcagagacacttgctggcttgcctttagtttcttagccactggggacaaaatgagtacttaagctcacatgttcaggacctttttagtactaaaatagtctatacttttatttttattgtttggttatccaaaccccataattcatcccttatcaagttcatcattttgccttaacatttcccctgttgtggattggtcttcaactctttcattcctgagatagagagaactgagtcatctgttaagaaaagtagctcctactaggaatctctggctaatataaaattgcttgacattacatggctaccccatggtactaatgacatttttctatttatccttcagtcttgcctagcattactgctggctgaaccatctgtgggagagaggactcaacactgttcaaagtagt

SEQ ID NO: 464801 - DNA, 1000 bp, Homo Sapiens; identical to SEQ ID NO: 335355

SEQ ID NO: 464802 - DNA, 1000 bp, Homo Sapiens
gggaaaaattgcacacactaagacacactaacaactgaattaaaataaaacagtgcagtttcctcattagtgttccagtgactctactctcagagacacaggtttcattagacagggttactctccccttattgcagtacagtgttattttttcatcctcacttagcaaacagaaaagggtgaaagaacatcaaaaaaggaaaagggacagcaaaatggtttttcaattcttcaggaaaacctgttgaatcatccttcttgtggtcgcagtggttggtggtggttgcgtttcattttgttgttgtttttggcactgaagggtttgggatggggctggggagccgagcctgctccccaaggggtctccatctgctccagttacaatcccgtggctcccaagggcatccctgaactgtggctcatgcaaggaatcgattgcatggacttggggaagtcatggctgaccacccgaccattctctccactgccgccgctgctggctcctgccccgctgttgcgggggagggtcgatgtccgtatggcttcgttgatggattgctgtgggatcaaacaaaaacccttcatccgcttggattcactacgggatttgtagcagaactcgattaaggcaaccagcatggctagtccaagtcctccgatcaggatgtagaacacgcctgccacattgctgaggctcagagcgcttgtcttgtccttggaatcacctcccccgctgccgcactcgcccttgtcgtaccaccatttgtttttcaatttgtccaaaagcccctgctcgtttagttttaacactgccaggtttactggatttctcagggcagaccccttgggtgttgcaatgccatagcctttggaatccaagttacctcccaccttcatggtgtcacagggtttccgctgctcaatgtactcattcatggtggactccaggaggtaggcatatttgcctttggatttcctcactcgaatcatcccctcctct

SEQ ID NO: 464803 - DNA, 1000 bp, Homo Sapiens
ttatggtaggtccgatgcaatgacagccaatcctgaactttgtctgattgcagttccagtgtgtacagcctttgggcagtcaggcgtcaagacgcggccattctctcccacactcccagtgatggataatctggctttgtttcttatggcttcagaaaaggtcagcttcattctcttcgcttctgccctggacttgtaacagaactctatcaaagccaccagcattgccaagcccaagccgccaaccagaatgtagaagacgcctgctacattgctcaggctcaaggcactcgtcttgtccttgcttccagagtctttgggtccacattcacctttatcgtaccaccatttgtttttcagcttgtctaagacgcctgcctcactgagtttcaaaacggcaaggtttacaggagttcttaatgaggaacccttgggcgttgctactccatagcctttggaatccagatttcctcccactttcatcgtgtcacatggctttcgctgctcaatgttatcattcatagtggactccaggagaaaggcaaatttgcccttggatttgcggacacgagctactccctcagctgtagtcctagtgaatactgatggctctgctgatcgcatgtaggtccacatcttttcatacactgctatttttgatcttctgaagaattcttttgttgatcctgaatccagtgttccataggcaatttctgtttgtttggccaggtcttctgcactttctatgggagagaccattcgctcaaccgtcaggaaagcagccaggttagcagtataagatgatataatgatgagtgtaaagaaccaccaaacacctccaacaattcgacctgagagggatctgggtgaaatgtcacatccttgctgcataaaagcacccagggaaaaccagaggctgttaaagatgccaaactcattgggaggctggtcgctgggtccttcctttccgtcctctggctcttctgtgtgccactcatat

SEQ ID NO: 464804 - DNA, 1000 bp, Homo Sapiens
caaataccggctgcatctttgggcatcctttgtgagaaattcagggggtcctctctcctctggctagaaagtggagaagaattttctgtggccactcccccacttatattcttagagacctcctagaggattaggaaccactgggtcattgtccataagaatccaaaatggcggcctctgtttgtgcattctcttctctcccataccccaaactcctcttttcccctgtgtagctctgtcttcaactctgccagaacaggggctgccaggggcagcgccaagttcagaagattaggaccacgtgaacagccccagagggatgaagtcttccttctgcccaggcatatgggatgggtatccctcaccatgagctcccattggcagccatgctagaacatccttaaggcgccgaaggcttgtgtctctggcctcacggtcaagctgtaggaggcctgggctcttgtggaagaaatggcaatataagagctgtcttccattttctgtgccctctgcagggctgcggcagaaacttctgactctggaggagagttgaggggcaggtgagtttggcctgagagaggcatgtgcttcctttggccttggctatctcggctggcagctttagaaacccacagaagatctgaggaggatgaagcccaagcagctggcctgagagcctgctggcttcctggcaggtaagggcaggaggctcctggcccaacaggcaggtggcagctctggtccccaagcccagtgcggggacaggggacgttccttccaatctcctttgctttcctctgcccagcccccaggcctgaggtccccaccccagctgtgcctaggggaacacaggggctaaggatgtgctgcaggccatgctgtccttgccgggaagccggcggtcattgaatgtgtgcatgttgatgacggcgtcagtcttgaccatcatgggaggctgaggcttgtgcttgactcgacgctggcaggtaagggagaaacg

SEQ ID NO: 464805 - DNA, 1000 bp, Homo Sapiens
cgttttatgatatttaatttttaaactagaaaatcctgatctgagaaagtgtcataacatagcaactatcttgtcgggggcacttgtttttgtggcaggcactgtgctaacaggctccccatgcataagtattcccctctctgtttctaacttaaaaaaaaaatggatatcatttcatgtcatatatgcacaggtttgaggagaataagaatgggataatgcaggcgactcagaaatgacaaatactttgaggaatttttcctacatctctgttggtgctatgaagtggtttgccaccaacagagagaataactcagaagggagaaattgcttgtctcactaaactgtatccacagtttggaggatactcagggtagatccaagagtgcctcgtgttttgaaggcttttgatttgaggagtttggggtggaagtgagtgtccaacagaatttctggatgtgaaggaagataaacctaaaaccatgctagccttcggcagacagatggcattgtacttcttacagatcacagtacacatacggctgttggtgcatgtcaccacattaacaactctgggaagagcgatacacagctaattggacaccaccatggctgtttggaaacggaacgagttatggttactctgggagggaaggggtaacagatactatacaaccctgagtcatcaccagaagggaggaaatgcaaacttacgtacataggcgtcttcgggataaactacaatggccactgtgtcacagacagaagatccacacttagatctcggagacataaatgtgttagtttatgcagctctgaacaagaccatcgaagccgagggtagagagaaacacacatcaacatccaaagagattcctgtagctctccccacctgagggtccctcgggcctttggctccagatgtgtcttggaaatgaactataatgaaggtagcacagtcatcacgaacacactgatttgctattctttaggggagcct

SEQ ID NO: 464806 - DNA, 1000 bp, Homo Sapiens; identical to SEQ ID NO: 335356

SEQ ID NO: 464807 - DNA, 1000 bp, Homo Sapiens
tttttttttttttttttttttttttttttctgggaaaaggtgggtttaatgtcccagtgctctgatgagaagaaactctagccaggtagagcaaggatcgggatggccctgcctcaaccacaagttccagcctccatgcccacagcagccatgaccagtaactggctagccccagggaagggagagcctcaggagtctgacccccacagcacaccctcctggcagaactctgcgtgagaagaggacagcaaaagcccagccctcaccatgatttgaggctactgaggtcactgatgaccatggaagacatcatctgtcactggggtcccatggccaggatttcatggtagaagccagaaaagcccaatcctgcctgccgcttaaccctgacagtggcaggcagagaatccagctggctcggagcctgagtggctgataactcacacttctgactccagactggagatccgtctccaggtgcagggtcccgggaagccttgcgtcccacgggctaccctgctgatctcgtccagtcccccactgtctctgtagcctgtgcccagccccagagtcctgcccctgtgccccagaggcccccaggccccggagagccaggagccgtggctggcacagggtggaaggtgaggacagacagccccccagcaaaatggcaggtgggcgtgggcgtgcaggcagacgtgctgtctgtgctgccaggcgggggcccctgcctgctcgccctcctggcaggcctcccggtagatcggcaagcacatcgactgcgcctgcgccaagcgcctgcaggccgagtggccgtcggggcgggcgcaggcggggccggtgcacccagcgggcagcgagctgggccgagcgaaggcctcggccacggagctgggcagggaagcgtgacgcgggcgcgagccccgggcccaggccgcgtgcagcagggcctcccgccgggccagctgctccggaccgagcagcggcaggtcctccagct

SEQ ID NO: 464808 - DNA, 1000 bp, Homo Sapiens
cctgggtgatagttgagggaccaaatcctctccggcttgcggttcctccagaaccagggggcgcaggacgctgctccaggcggggtccggccagttccactgctttccttcccaacccacgcgggtcctgtccactgcgggcgccccctcgggccgtggcctgcgctgaccaagggggcggtggggcccccggggccgcgtcatacctcggactcgaggctagagaagtgcgccgagcccctgcgggtgcccaggtccccgccccggtgtctccggtgggaagctgtgggcagcggcggcccccagtgcgcggcgtgcggacacctgcgagcgtggcgggagggcccggtaagcctgcgcgcaggggcggcgcgagggcacgagctgaggtcctcgagcgagcgcgaggtgggcgcgggcggcgggaggtcccagcccccagcggcgcgccggtgcctgtggtggtggggcgcggcagcggcgggcgtgcggtgcgaggcccgcgggcggtgcgggtgcgaccgcgggcacccgcagcgggcccggcgtcggggcaggggcccggcggcccagggtggaggcggtggcgcccaccagccgccgtccaggccatcgtgcgagcagctgagatggcgcggcggcggcagcagctccaggctggcgcagtgccgacagtgccaggcggccggaccgctgcgcgggggcaggtagtcccagctcccggcgcgccagcccccgagcttgtcgaccgaccagtagcggccgggcggcggcccgaggcgctcggcatacgggtaagggaagtcggcgaaccaccagggatccaggccgcccagcgacgcgccgcccaggctctccgagtcctccgagtccgacggcgacggctcgagatcgaggtaagggcacgggggcggcgcggcgcagcacgggggcggagcggccggggctcctccgcctgcgccccccgtgccccccgcgccgcccgcgcctggccccagca

SEQ ID NO: 464809 - DNA, 1000 bp, Homo Sapiens
aataaatagaaaatatttattatacagcattgtcaagattatttgacaaaaggcagtaacaagccgaaggaaaacacatttacaagaagctgaacaacttgtatcagaacatacatcaaggtgaagagtttcggccctcttggtatagggtatgtatgtgtacatctccaattttgaacaatgatgacataaagactaatactctatttattcaggagaccccataatcaggataatagtaggcattcagagtaataaagtgatcacagttgaatgaacgtgttcaccaaaagtcttagaccaacctgatatcatcttacacttgaatataagttgtttccttatctatcctaattttttaaaaatctgaatgcacaagccctgtgatattagggatgtatattagtggcgttaagagtaaaaaataagcatgattcactaataaagagatcatatgctttccctcatgaatttgtcaattactaaaaacccatctattaatcactggagccattgattttccgctctctgctttcttacaatgaaaacatggaaccaaagtccacatctcagtcatgagatcttttcaataaaggtgttttaaaataatttttaaaggaaatgcagttcattcttggtgtggaactgactaaacttggcaatagaatatgatgaaatataagtaatacaagcctccaacattggaatggatgttaaattctgaacaaatgatgcaatggatatttaaagattctaagatgatttttggctgagaaatcagcagcttcaatatgaaggaagcatattaaaatatgactgaacataaggcataaacaaagatatttaaggggggtataattcattccacaaataatagaagaaatcaaaacagcaagaaaaaatccttttattggtggtaaaaagggattgtaaagatggagtaagtggattacatgtccatggatattacacaacagcaaatagcagaaataaaaagtta

SEQ ID NO: 464810 - DNA, 1000 bp, Homo Sapiens
ttttttttttttttttttttttttttttttttttttaaaataaagccactttatttacaggtaatacaaaataaaccacaggacaaactactgtgcagggggaggggcagcccccacaataaccaccctccccatcccagagtaacttatataaaaaataaaaaaggccctagttggggggaggggctgggctggaagcacctttgctggttaggactggggcctgccgtcctcagccacccgggtccagggcagagtgaaccctggcttgctcctctctgagccctgggcctggccaggaggaaacacagctacaagggcagttagtggccactgcagaggctcctggccaaggctcctgacttctgagtctgaagagctggggtaaggaggtgggtaagtgactttgggggcagacatagggtgggtaataaattattgcagtgctccagccaacttcctcctggccctggacgtgggtctgcactaggttcccaggagcagctgtgtcagggcgggagtatggggtcttcaaagcgatgacgttgtcgagtccaccacctcacggccattgcaaacagtggggacaaactgggagccagacccttggccaaggctggagctggccctggcagcagcactgccaaagcggctggtgggtgcccggtggctaaccacgttcttctgcggctggaagaggatgatgtgcagcttgggcgcaaagaggcagccaagcaccacggagccgctgaggctgactgacacgcacatggtggtggtctgtacccggtagtcactggaggtgacatagaagatgggcaggaatgccagccagatgatgcaggtggtgtacatggtgaagccaatgaacttggcctcgttgaagttttcggggcacttgcgagtcttgaaggcataaagcgtgcagagcgcgatgaggagcacattgtaggccagcgagcccaacatacttgcatcgcggtggttgcagcgcagtgtc

SEQ ID NO: 464811 - DNA, 1000 bp, Homo Sapiens
ttttttgcaaaaccatgtgtttatttttattagaaatgttcttggtataaaaacaatcatgcgctacacattgtcgtcaataaccatcaccaaacacccaggcactgaactccgtgtggtcggcaggaggggcaggcgggcaggcgggcaagacagacggcagacgggcggggcaggcgggcaagacacacggcagatgggcggggcaggcgggcaggctgcgggccacagggacacacacagaggccaccaggaggacgcagcacttggcaacacactcgagatttgttttcgttttggcttttttgtgttttgattttttttccttttttctcttttgcaacatgtaaggtttggtgaactggggaagggtggcagggagaggggagcaatggctggacgagaatgaagcagaggagaacaggaaagaaaacggcagaaaagtgacactggtgggacccaagaaagcaggaggagctgaggacaaagaggatgagagagagaggcggaggcaagagccagaaaggagacacagaaaaggccaagagtacaagcagccggggacgccagagagggaaaaggtgaaacaaagagataagagaacagaaagacagggctggagacagacagaggggtcgccaacagcacagacagagacgaagggagggagagatctagcactggggcccacacgacctgagcccctgtggtttggggccgggaggggcaatggtccaagacgcaggttcttgtggtagcctggcaccgccccggcccctcgtcctcctgttgctcacccggtttgcccaggctgccagcagtgatggctgggggctctgctatcctcagcaccaagccacgtccgtgggtgcccacgggcaggcaagacagctgggcccttgggtgtggccctggcccgacgcaccttccacagggtcacggctcctcctcctgctgctcagctccatggactcgctagattgcatggttggtgtaagtg

SEQ ID NO: 464812 - DNA, 1000 bp, Homo Sapiens
gattggcaacatggtgaaatagtcaagaaatcttccactggttttcttggttaatggaggtgaatctgaaataagtaggtggaatccccgatgcaggcttttggaagagtatttcacaacccaattggagaggaaaatctctggtagaagccctacgtagtacattagcgcacgactcactatccagtagtgtgttatgcatgggacacattcacaacgcctccgtaaatactggacccaagttactgcttttcaaggtcttttcaaggtctttacaggaaagaaaaaacaaaaagaaagaaaaaagaaagaaaaaagttgatgttttggtcccagattttgagtttgttagaaaatgtacattcatgtttggtgaatcaaagactcttttctgggaaaagaattaaagtaaacaaataaaactttttacaggggaaaagaattaaagtaaacaaataaaactttttacagttgcttattaactatgctcttcaccctccgttacgctgtttcacacgcactgcttccctagagcaaagcagttggtatggaactgtttgaagagacgccttgtcaccctcaaagatatcaccgtgtttcttaaaagccatgtttctaagccactagaagaaaatctcgcaaaagatttgtcgtcggtttcttgtggttgtcatgagatagcactactgatctgtgtttccattaaggggtcccttggcatattccccctgggccgtaaccaggcgactatgcttgccattgtgtgtgtgtgaacacggggggctccgctccgcacgcgcaggccggcgtgctttccagggacattcacaacgacgaggagctctgagtgtaatctcttatgataagagtgtcatatttgggagacgacgggatacagagggccgactcggacactggcgagttgggggttgtgctccccgagtccaccgagtctctgaagggggacggcggggtgagagccaccagctcctccaggtct

SEQ ID NO: 464813 - DNA, 1000 bp, Homo Sapiens; identical to SEQ ID NO: 335358

SEQ ID NO: 464814 - DNA, 1000 bp, Homo Sapiens; identical to SEQ ID NO: 335359

SEQ ID NO: 464815 - DNA, 1000 bp, Homo Sapiens; identical to SEQ ID NO: 157353

SEQ ID NO: 464816 - DNA, 1000 bp, Homo Sapiens
acaatacggtgggatacgttttattgagaagtgtcatgacgaaggatatctagatcagggaagtctatcaggacagggtgaaagaaggcagtctgcctgggagctgctcagcccccttccccatcagcctagcccctctttgaaccatgccagttctagacggcctacaggagcgcgaatgagtgaggaacttggcacagagcacctttctgtagtaatccccacagtgaggaacagagggatgtggctagagggcagaaatgaccaaggaaatttatgaacctgcctgatcaccacccccaacacacacacacacacacccatccactaagctctggctgtggacaacagaagacaaaaaaccacccacaattcgagcacagtcctgagtcaagggagcctcagggaataagacaagacatggcaggcatggttcaggctttactgggcatcacacggagctggggtagggacccagcaaagggagcagggcatacagatggtctttgaggacagtgctagggagctcagagatcagtctggcttctcaaagaagagaaaagcactgacaggaaaagcagtcaggttggcgttagtgcagggaaaggaagacgttaggagggggactttgatggaggacagtggggagctgaagctttaaagagcctcgatgcggggagggatgatgttagaagaaaggaagccaatgaggccttggggaagagaagagagtagaaagaaggaaaaaggaagaaggcaggtccagggagtcaggctgtcctccagggtcgcaggcagcaaggttggctcctccctcccatcttctggcatcactgggccctatttgctgttccatgtagctgactttccaaacaaaagacctcggaggaattggctggacttcatgtaggcagagatcttcttcaaaccctcaaagcgggagatgaagtccttcaagtttaggaaggcgtccaagcacttgggctcaaatatacgcttc

SEQ ID NO: 464817 - DNA, 737 bp, Homo Sapiens; identical to SEQ ID NO: 335363

SEQ ID NO: 464818 - DNA, 1000 bp, Homo Sapiens; identical to SEQ ID NO: 335364

SEQ ID NO: 464819 - DNA, 1000 bp, Homo Sapiens
ggctctcaaaagtggtacaaatatatagggaaagatacttgtatgtgtgataaacaagaaaacatggaatctatttattggttagttctgaaaggggacccacacttgtaattaaaatatatgtgtatatatatgaccaaaaccactcatatgaatggacacatcttatttccctcatcctccggctttttattgacagcggtcacctccaccttttagtaggattattgcctgacataatacagaaattttgctgcttgttctcaacaaagcaatgaaagagacacaatctctttccaccccccattggtgacccatgttctgggcttgtgctttttggaggagtctttgatctgtagcaggtctcagaggcttgtctcccggaggaacatggtgccgatgttgtaggaaaccttttttattctcgacgaagaaagagaaggctttggtggctttggaccagtccttacctccaggaaatagcagatcccaggaatttcctttggaaagttgtctggaagctcttcacgagaccgcggaatgaatgtgaaactttcttctcgttttaataattggtaagtggttgggctgacattgatgcgccgagggtgacttcccgactcgaatttgcttgccagtgtgacattatttccaaacaggcaataacgtggcattcgcaccccaacaactccagccagcacggagcctgagtgaattcctatcctcatctgaatcggtcttccatcaggtgtcagcacctcttctgaaagttccatcatcttcaaggccatcagagcaatgggtttagcatggcagaggctttttctgtggagccctgctgcaacacagtaggcatcacctattgtttccaccttataaatatccaaaaatccacactggtggtcaaatctggtgtacagttcattcagcatgctgattacttgcatgggagtacactgggcacatatggctgtgaagccaacaatgtctgaaaagagca

SEQ ID NO: 464820 - DNA, 1000 bp, Homo Sapiens; identical to SEQ ID NO: 335365

SEQ ID NO: 464821 - DNA, 1000 bp, Homo Sapiens; identical to SEQ ID NO: 335366

SEQ ID NO: 464822 - DNA, 1000 bp, Homo Sapiens; identical to SEQ ID NO: 157354

SEQ ID NO: 464823 - DNA, 1000 bp, Homo Sapiens; identical to SEQ ID NO: 335368

SEQ ID NO: 464824 - DNA, 1000 bp, Homo Sapiens; identical to SEQ ID NO: 335369

SEQ ID NO: 464825 - DNA, 1000 bp, Homo Sapiens; identical to SEQ ID NO: 335370

SEQ ID NO: 464826 - DNA, 1000 bp, Homo Sapiens
ttttttttttttttttttttgtttttgtatgataatgtttatttgaaattatgtatcacagataagaccagaggtagaaaacagcacgccaaataacaatcctcaaacaaaacagaacaaaacaaacaaacaaacaaggaaacaagaccacacatacttacaaactctcctgaaccaagtatgttcaagaattaataagttgcaccccttacccccatccactcatgaggctctggaaaaagtcgtgccttttagctttttacagtctaagtatgctctcggcatctaatgagctttttaaaagccagcttaaagtcttcattaaaactcgtatagagcagagggttgatcagagaattcacataaccgagccacgtcagaaagtcggccacttccgaggacacggtgtagatgctcagacccacaatcaactctttgatgaaaaatggcagccaggataaaatgaatgcacccagaatcagccccaggatgcgtgctgccttccgttccctggtgctagagatctgctgacgttctcctgggtgatctagatcattgtcgaagggggggatcctgatggaggcatggaacttttcaaactctgtggtagggtctgaggtggagaagtcagacacacagaaagtctgtgtaagtttacaacttgcaaaagaattctggctatctgtgcttctgttgcttaagtgccgacttgatccccttttctggtaaaggctcttggccgcgtggtaaatccggtaatagagaatcagtatcaaagtcaaggggatataaaacgcacccagcgtggagtaaatggtgtagataacatggtcgtgctggatggtgcactgactagggggagggcttaggcggcggtggcttctccagaacagagggggcatggagatgaaaatggagatggtccagacggtaaggatcatcagcgcggccctcttggccgtcctcttcctggcgtattcaatagcattggtgatggccc

SEQ ID NO: 464827 - DNA, 1000 bp, Homo Sapiens
ttttttttttttttttttttttttttttggcctgaaatttattgatttgactttatttcattcgaataccttaaaatttaaccagagtgctggattgttttcatttgtagctatataaaattattttcctcatggaataatcttgtccaaattaggaaaattagatattcttaatacttacatcttaggttaaagagatgatttgatatatgacataaaattctttatataatatattcttggcacatttacatctcattcatcatcttactcatcattatgtttgatgacaactgccagttctgctatacataactaactcgctcttcagttttgtcaccttcattttcagtgaggagaagcgtatctagtagaatgattgatgaagactgaatggttgaacttcggagcctcattggactctggtacatggcagggttaatcccatttcgaattccatgtttcttgaaaaacttagagttctctgccattggattccggaagtagatcttactggagcgttttctgagagtttttactgactttgtggcccggtaattgcaggtgatatatcggccaaatgcatcccgaaatgtcttattgaagagggtgtagaccaaaggattcactcctgaggaaacatagcctatccacacaaatatctccaggagcatttggagagtagtttggttacaggaatcacataaaactaaagttatatttgtaataaagaagggacaccacataagcaaaaagaggaaaaacacaatccctaggacctttgaggctctctgttcgttggaaatggtctgcactgactttttcccaattgtggatgttcttcgcataagtgtttcatcacctgagttgggcagagccttgtcctttcgagaaccatccagcattgccaccttttccggtgacgagcaaggtgtttcatccctttggaaaactgtagacacagtcaaccatgttaggcgttgaggtggcttgtttttga

SEQ ID NO: 464828 - DNA, 1000 bp, Homo Sapiens; identical to SEQ ID NO: 335371

SEQ ID NO: 464829 - DNA, 1000 bp, Homo Sapiens
tttttttttttttttttttttttttagggtttcactgcattttattcttcccactcccatcatctgatgggggatgagtgttcagggaagctgccacaagtgaggtgaagaaaaaaaagacactaggggttagagaagcctcgtacagagttatcaggcctgtgtagtagagagttggttttgccttcaacctaaaagcaaagttgtgaaagagaagcagaattccaaagtcccttattcaggtgagggtcaatggggaaaagtccacaactagagtggacttagggagtgcccgagtttctcctgatctaagagagcatgttttaaagccatggtgagctgctgggggtgggacaagggtgtaagggccttgaacacccagtttttggtggaagggttcagaccttggcttgtgattgctgagatgaattggcattggaaacagggcacgggactttgtctgtgtcttgaaaatgtccctggcattccctgggtcctgaggggcctaagcagaaatcctctgtccccacctaaccaggactgtaccccctcctccactgggctgtacccactcaagcgtactgccagatggaccagagcataaccagggtgatgctgtaggccagcaccgctagcaggtaaatgtggaatagcagcttgtccagcacggagcccacgcgcagccagtctcgggccacctctcggatctcatcccgcttttccaggaattgccggatggaggacagctcctgcagcagcccacacaccgccagcgaggcctcccgaggtggtgggggagggctacatctgtccctcgggctcttctcgaagtcctggggtcctcccatgtggctgcagtggtttcccatggctgagcagtcatcagtcttggtggcttgggaggtggctgggggcctctgggaagttgactgctccctcaggcaaagtagccaggcgattctctccagaaccaggtgacgcagccaagcaggcacgggct

SEQ ID NO: 464830 - DNA, 1000 bp, Homo Sapiens; identical to SEQ ID NO: 157355

SEQ ID NO: 464831 - DNA, 1000 bp, Homo Sapiens; identical to SEQ ID NO: 157356

SEQ ID NO: 464832 - DNA, 1000 bp, Homo Sapiens; identical to SEQ ID NO: 335374

SEQ ID NO: 464833 - DNA, 1000 bp, Homo Sapiens; identical to SEQ ID NO: 246391

SEQ ID NO: 464834 - DNA, 1000 bp, Homo Sapiens; identical to SEQ ID NO: 335376

SEQ ID NO: 464835 - DNA, 1000 bp, Homo Sapiens
agtggaggcgttgagacctgcttgatttattccaagtatttaatacacaatgacgcaactgtgatcccaagtgtgcaaagttaaagccttcgactgcagctgaggagaagggaggaatggttcacctggggacggtggtgagtcaggaatgacaggcaggcggccatgaccagggcagtctcctacccatggccagggacaggggagcggcctgaggagcaggacccaagggtagcccagggccggggaagggggcagagacctccccttggcctaggtcaggagctcagaagtgccacatggctgaggggcagcggcccgggaagggccagaggcagggccaggagagcaccatttcctgggaggctaggggcagggaggtgccctacaggagaagccaggaggggccgcctgcccctggggtgggggccaggctggagcaggctgcagcaagaaagacctgaggcaggcgcagggcctgagagcctggctggctgggctcggaggggggctcccagggcagcctggccccgggagcagtcctgactctgcaggggatgccgagtgaggggcagcagtcccctcaggacctcccctcctctctgcctggaaaggagctggagaacccgtagtgcaaatctgtggaccactcagttatggagggaggctgtgcccaaaagtggacactggggtgcatcccctccaccacctcggcctccaccgctgtcctcagtacagccgcttttcgtaagagtgcaggccatggacaccaccctcaatctgggccgacatggtccgcttctcaaacttgagctctcctgagtacatcatggaccgaaggacagacaggctgcgggccccgatatcctggcagccgtgttggatgcctgctatgaggtagggcacgaacttctgaatggatcctttgtcctggatggagcccgagacaccctgcgcgatcttcactttatccccctcgctgaagtatcgtttctggctg

SEQ ID NO: 464836 - DNA, 1000 bp, Homo Sapiens; identical to SEQ ID NO: 246392

SEQ ID NO: 464837 - DNA, 1000 bp, Homo Sapiens; identical to SEQ ID NO: 157358

SEQ ID NO: 464838 - DNA, 1000 bp, Homo Sapiens; identical to SEQ ID NO: 335380

SEQ ID NO: 464839 - DNA, 1000 bp, Homo Sapiens; identical to SEQ ID NO: 157359

SEQ ID NO: 464840 - DNA, 1000 bp, Homo Sapiens
tttttttttttttcaatttttaatttttttatttagaaataataaaataagacataatatataaaaatatgtacaatccatggtttgtgcagtacaataggaagactttagatacaaaaagacagcaaatgggaaaataataactatcacgattgtcaatggctaggattgttcaacttgccagagcccagagcggaaacccaaaattaccagaaaagagattctactttgctgagggttggggatgggcaggtagctatgccacacttttttttttcccaccttaacattattagacacagagtgaaaaagaactcactctacttctcaggacaagcttttgcttttactgagtggtttattataaaatatgaagtgacatttattaattgtaagggaaatatgatttacgggacagaactcatcaaataaacagagttgagataggagtgtactggtaagaaaggaagtaaagagaagaaagaatgcattaacagaataaaaacaaagtaaaacaaacttttctaggaatttggaaatgacaacagtgccatagtgacatccttaaaatgtctgattcaagtatactcttagagggatagaaaactactcctttctcaataatcaaaatagagttcactttgtctacattttgtttaaaaataggataaccaggaatctatggctcctcccaaaaatatagtgcccttccagatatgggcaaaaattctttaaaagggaataaatccgaagtaaatccaacagggaatctgcttgcaatagagaagcaacacacatctgggaatcaaccccagatattcatggtgagtcccctccgtctgcattctaatgacatgtgtacattaattaaggagacccagtcaataaggacaaatattttgaaggtaaaatgcagcaatcaatgtcgtgcattacctgtgtcttggctcttgacaaaaaaaaaaaaaaaaaaaaaaaaaaaaaaaaaattgccatttaa

SEQ ID NO: 464841 - DNA, 1000 bp, Homo Sapiens; identical to SEQ ID NO: 335381

SEQ ID NO: 464842 - DNA, 1000 bp, Homo Sapiens; identical to SEQ ID NO: 335382

SEQ ID NO: 464843 - DNA, 1000 bp, Homo Sapiens; identical to SEQ ID NO: 335384

SEQ ID NO: 464844 - DNA, 1000 bp, Homo Sapiens; identical to SEQ ID NO: 157361

SEQ ID NO: 464845 - DNA, 1000 bp, Homo Sapiens; identical to SEQ ID NO: 157362

SEQ ID NO: 464846 - DNA, 1000 bp, Homo Sapiens
ttttttttttttttttggaataaagattttaattgtctctgctcatggtagaagcaaggcatacaggcccccaacccttctgcgccacccctcttctcccctgtgcactgtgtctactgctgggtggagggggtcgggggagcaggtattgtgggccagccccagatgtgggctcccctgccctctcttcacctagtctcttttcatgttccccttcaggtgactctttctcctcccagtaagtcacagggtagcaaggctgagggaggagagcatggggaggggaggggatcaggaatccacagcccagcccggcctgagtccaggtggagagcaggtgcgtgtgcctgtgtgagtgtccctgtgcatggccgtgggcttggctcagcctgtaagctctgagatccccccatgccagtcccctctcagaggtcctatctggtgtcttcactggggtaagcacacctgagctattcaaattacttccatcctttggcgatggggctgctgtgggtgaggctgaggcctggcacctctgttgcttctggcacagggtaggggaggtgtggagggataggagaggaggcaggtcagcctcgggtgctactccccctctccccaaggagccagtaggtccgaaccttgcctttgcccttcatttctacatcccctcgaagctccagctcgaaaccaccaaactcctccaggacagccttggtctcagaagacaagtggatcttcagggcttccccattagactccattcttgaggctgtgttgactgtatccccaaagagacagtaacggggcatcttcagtcccaccactccagcacacacaggtcctgtgtggatgccaatgcgcaagcgcagctgctcctggggccggtggcggattcggaaggagcgcacagcatccagcagtgccagggccatgcgggctacctcgcaggcgtgtagccgcccgttccgcacagggagccctgacaccaccatgtagg

SEQ ID NO: 464847 - DNA, 1000 bp, Homo Sapiens
ttttttttttttttttgaaaaagcaaaaacaatattgattttaataaaatgtccgcccttttaaaatcaaacacatgtaatactttatctgtataatacattgaagtatgtcttgttctttaaaatatagtttctccaaatgattctgaggctcaatcatgattacaagatacatgaaattaggcacattaacatgacacaactattcagtaatctttacagtgcattatttataagacgccacaagtcacacagtttatacaagttaaaatgggctatatgaagtatctgcagtttttgtgtatttttccctgctaggtaaagtgaatattcctttaacattgtaccttggtgttacttcctttgaaagatggacattgaaagttaaaaatcagtcactatataggcactgctgtatggaaaacgcattttgtgtttctacaaattgtaagcggaaatgccttttgagtacatatttatgccagaaagcttgacaaacactgaacagtctgtaaaaaaaatggaaaatctcttgaccatcaattcaaataaatataatttaactatttgcagcaatactaatttactttattaaattaattactctaaaatgctcttgttgtcaggtaccaaaatggttttgaagttagggagctgctttctctcttcattcctgtgggtgccccaattctccataatatttgcagctgagaagtatgtctttttattcatttttaaattttcatttaagtgacaatcagttgggagcaaattaaatcctcccttaaggtgaaaaaaaaaaaaaacaaacaaaaaccaccaaaaaacagaaacctcaaaccacttctgaatgacttcagactatctttcggctcctgaatgctgcttttgcatactgttactattgtaacacactaaaatgatgcctatcataaagtaaggatggcccaatctgttgacaatctaatctaatctaatctaatcaagatgacccaatcta

SEQ ID NO: 464848 - DNA, 1000 bp, Homo Sapiens; identical to SEQ ID NO: 335388

SEQ ID NO: 464849 - DNA, 1000 bp, Homo Sapiens
ttacgaagaatacccagccagtgagcaggtgtttattagggtcctttttcattaccccagagacagacccagggctggctacgtgcacaggaagtaacgcttgccacatgcataaatacgtgaaggtgcacattacatcagcacagattcacaaaacacctcgccttggcaagaaaactgtagctaggcagctcccgtcctcagggactcctgccacagacgtcatggagacagcatgagcctccccagaacagtccccacggcctagactccccagagcaggaggagcagcccaggctctgttgcgagacagccatcacttcctgttctttgcaggtgcctaaggtaggttacctggccaaggttttggtggaaaaaatgagttttttcaatgttgcaggtcttttaatagttcatctgtaggaagtgcatttgcaaagtcaccaacctgcagcttccatctgtagaccaggaagggtgattctctgggtgaccacagcggggcatcccctgaggtacagacgccccccccccaacccccgcagtgtcctcacagccaccacagcctttgcagtttggctcaagcaagccctgccaggccccacccctcatgctggctctgctgtgaagccatcctcccgttgggcagcaagctcaggccctacacagagccatcttgaggcttgtaaatgaagcaggcgtccccagagcaggactctgctgtggccaccagcttctccttccacacagcttcccccgcaacacagcacggccactgacctctggcttcaagcaaaggagaggctgtgaggggagccttgggaggatgtggggacccccagagaatcttctcccacccaaacagagcagtcaagaccaggaaaacgaggcctccactttgtgaacagagctgcccatgtggtcacgcggcgccttcgtcctgagacacctgccccacactgagaagcagggctgggttgacggtccacagcatgatagt

SEQ ID NO: 464850 - DNA, 1000 bp, Homo Sapiens; identical to SEQ ID NO: 335390

SEQ ID NO: 464851 - DNA, 1000 bp, Homo Sapiens; identical to SEQ ID NO: 335391

SEQ ID NO: 464852 - DNA, 1000 bp, Homo Sapiens; identical to SEQ ID NO: 157366

SEQ ID NO: 464853 - DNA, 1000 bp, Homo Sapiens; identical to SEQ ID NO: 335393

SEQ ID NO: 464854 - DNA, 1000 bp, Homo Sapiens; identical to SEQ ID NO: 335395

SEQ ID NO: 464855 - DNA, 1000 bp, Homo Sapiens; identical to SEQ ID NO: 335396

SEQ ID NO: 464856 - DNA, 1000 bp, Homo Sapiens
ttttttttttttttttttttttttttttttttttttttttttttttttttttttttttttttcctggtctcccttctttattgttctctggctatagcaggggtctgggaaaccaagggcaggggtgagtcacatgcgtctctgcccttctcggggtggggtagggtggaagtaccagggtagcaggtctaggagaccatggatgtggatttcgcatgaacagggcccactgtacaaatgcatggttggtatttacaagaaagaaggagggcagtcacctggactttggcctttcctggggcaaggtgggggcaaggaggagcctgaggagaggaaggggcaccgcgcctggctgggttctctccagaggacaggaaggcagcagccctgagccccttgtccatctgcctttcaccgactacccctcacttgtctcaggggaggagcttcttagtgcctgcagctgggccagttctgggacgtggagaggaggggacagaccctctcttttagcaatgcaggattactcaccctccccaggcacccttgaccctaacccagctggtgtcgatacattctgaaggtgctttgctggggagatcctcaaagcactttacagacattggtcggatggagcctcccagccccaggggagaggaaggaggcaaagggctccggactcagggcaggcgacaagccccaggggcccagaccagtcccaaggaaggtcccaggaaaggcctcccgcagcccctggtcacaatggctccttttgccccagtcactgtatcagaaagggagggaaggaagattcagaggatcaggctggagatggggctgaagcagcgcaattctggggtgaagaggatgtcctctccaccccattcccagatcctagaaaggtaccatgccctgaaggaatccactcccctccccacacatagggctctgaaaacccccagctttctatcctattccagcccttcccaggggaggaaaa

SEQ ID NO: 464857 - DNA, 1000 bp, Homo Sapiens
catgttagaaattcctttattccttatcaaaacaaactaacagtaaatgtgtattatatgctttaattttatacatataagttatcttgtttggatacatctttcatcaggactctgccacatccatactttgtccttgtggtgagagaggataaaatgtgatataatttgttattcaaagaacatggcaaccgtaacagacaaaaggaagcatggcatctaggggaggagagtggagagttttccatacacaaacacatttaaacttccctgtacaaaaatacctgctgttgctttagaaatcgttttcctttatgaatagtcaggtcttgcagtacaaatccaggtgcagtgccagcaagtatttcaaataaatttcaacgacttgatattcaagtccaaactaaatatttaatgttttctttattgcaaatatgatgtctttgacctgaggtatagagttgtcctctagaatctttgcataaggcatagggacatcagcaccagtgacacgaacagcaggagcatccaggaaattgaacgcaggaccttccatgatcctggcacagatttcagctcctactccaaactgtggccagcctccttccacagttacaagatgatttgtcttcatgacactggcttctatggtttccatgtccattggtctaatggtacgcatatttatcacctcacattcaactccttctttagatagcactgctgcagcttctaagcagtggcccacaggtcttgaatgggaaaccacagttatatgtgttccttgcctttctattttggcttttccaataggaatcagaaaatcttttgactgagcttccgggagaaattcaaaaggaaccccatacatcaattcattctctagcaccaccactggattgttatcccgaatggctgatttaataagtcctttagcatcctctgaattccagggactgaccacctttaagcctgggcagtgcccataccaggcagcaaa

SEQ ID NO: 464858 - DNA, 1000 bp, Homo Sapiens; identical to SEQ ID NO: 335397

SEQ ID NO: 464859 - DNA, 1000 bp, Homo Sapiens
atgtggaaatgcaagaatcagcaggatcaagtccaagaagaatgaagccagatggttctgtaagacccaatgtgaatagacatatacaacaggaattatttaaactgcttaaccattcccacaaaaatgagtaggtatatttaaagaaaacttttttaaagcagaagttatctacaatattccaattgagagaagatatattcacaggcagtttggacaagatgactccagtcacatgaaagtttagttttattatagacactttatgcaaacatttcaatactttttgctacttctataatcttttagcaaggcagtcagttacagtccaaatgggaaaatataaacaaaattacacattttatcttttaaaatctactttaattctgttataaaatttataatgcagtttaaactatgatttctctccacttgatgatgtctctcactctgttcctttaattacgaagtctctgaagactctgaacttgactgaggaaatgttaaacagatacctcttcataattctgtaagtgtttgcttttaactttgaataaatgtcatatctaaacaaatattaaaaagtatttaacatctcatacagtcagagttcactggcgctttgttccagcctggacactgaccattgaaaaatagatgcctttctgtgccagcagctgctgatgcgtgccatgctccttgactctgccattctgaaacaccactattaagtctgcattctggatggtggacaggcggtgagcaatcacaatgcaggtgcggccttctctggctttgtccagggcttcttggacaaccttttcactttctgtatccagagctgacgtggcttcatccaaaagcaaaatatgaggctgtctaacaagggcacgagctatggcaatgcgttgtttctggccaccagagagctgagttcctttgtctcctactttagtgctatatttattaggcagtgactcgatgaaggcatgtatgttgg

SEQ ID NO: 464860 - DNA, 1000 bp, Homo Sapiens; identical to SEQ ID NO: 335398

SEQ ID NO: 464861 - DNA, 1000 bp, Homo Sapiens
tcagagctgcgtgttctcctcctggctctccgagtcagcgcccgacaggtgcccgctgctcccgggtgcgtgaccgttgctggcacaggccaccagaggcccgtcccccagcccctccggcatctcgcccagcaggctccggcggatctcctgggggagcctcgcccgctgctcctgacactcctgggccagctgggccagcagcttgggctcctcttctgccagctgttgcaggacctgctgctgcccagccacaagacggtcatgccgctgcttctgggcctcctccagccgacggatggagttgactgactcagtgatgtgccgacggttaatctccgtcagttccgcctccttcttatgcttgtccctcatcttggcctccgagatgctgttatggcgctttctgtccaggatcttctgcagctccttcttctccctctcgttcatctctttcagcctcttgaactgagttgtgtttgcatcaaggacgacctccctgagccgctgcagagcctgtctcaggtgttccagcctccgctgggcctctgcgtccacctgggcctcccgcagctccagcaggctctgcacctgtctgttctggaactcctgataccgctttgcctcgtcctccccctccttcgtgtcctccacatcagcggccccacctagggcacctggccgcagccggcacctgccctcagcctgtgcctgagccaggccatccagcaggcggcgggtgagggtgactgccttccgctgatgcttcttgcgcagctcccgcaggtctcgctcttgccggctccggagcttgaccagagccttgtgacctcggagctcatccagcggggtgggggccacctctgagaggatgctggcgatgagatcatcacgctgccctgggctgctgagggaggtgctggcaggggaggtggtggggccagggggccggcggggggaggcatccagtgggctgggggtggggtttgaggacggctga

SEQ ID NO: 464862 - DNA, 1000 bp, Homo Sapiens; identical to SEQ ID NO: 335400

SEQ ID NO: 464863 - DNA, 1000 bp, Homo Sapiens; identical to SEQ ID NO: 157368

SEQ ID NO: 464864 - DNA, 1000 bp, Homo Sapiens; identical to SEQ ID NO: 335402

SEQ ID NO: 464865 - DNA, 1000 bp, Homo Sapiens
tatctagagtctagagctcacagtacagagttttgtgaaatacggtgcctatgagaattttcccatggtacacagaagccacagaggtgccctgaagcacagagccattgttggcatacacggtgctcaccctgggcttctcagacaaaacattctggatgcgaagtacttctgatcctggagggtcctcagggttatagttcagtagcttcataggattaggatggcatcctgccaaaatgtctcctgtggcaggatcgacagtcaggttatccactaaggtgcccaactgtatcaccttcagttgagttaaatcccagttatcatgtttttccattatgtgaatgttcttagctgctacatcagctacatagacatacttctggtctgctgagactgtgatcccattggcactacaaaatcctttggccaccactttaacctcccttgggctgtagaaaagaacataagtccagcgaagatccaagatcatctcaaaaaatgacaggagggagttggtaaaatagtggtctctggtggcatagaactgttctggtccaagaaccacaatgtcattcacacttttgagaagttcatgttttatagttttcaggtataccagagaacgttgttgttcctcaaatttaaatatctccacagtggacttcatgtggggatgattcacaacataaagatacacagtattgtctttgtcgatgaaaatactgatcccatgtggattaaataattctttgtcaaatccaccactgatttctagtgcttgtgcccttgggttttgttcattcagatccatcaagaagatttttcctggttcatctggcgcaaagtttggcatgcctggatattttaatccactggagataaaagccagcccactaggaagtatatcaatatcttcagagccactttcaagttcctcaataaggtggcagttttcaggttctactggctccacttctcgagaggcattcaccctttc

SEQ ID NO: 464866 - DNA, 1000 bp, Homo Sapiens
ttttttttttttttttttatattaaaaaaaaaaaaacccacatttttttttattggtcagtgttggtaggagtttgttacaaaagtgagtccatgggcctgtggaatgtgaggggagtgggtccgctccaccagatgccagcaccggggccagtgcagctcagagccctgtggcggactacagggcctgcacagacggtcactcaaagaaagatgtccctgtgccctactccttggcgatggcaaagggcttctccacctcgatcttgccgcagtctgcgatgatcacatccttcaggggtttatcccggctgtctgtcttggtgctctccaccttccgcaccacctccatgccctctagaactttgccaaacaccacatgcttgccatctagccaggctgtcttgactgtcgtgatgaagaactgggagccgttggtgtctttgcctgcgttggccatgctcacccagccaggcccgtagtgcttcagtttgaagttctcatcggggaagcgctcaccgtagatgctctttcctcctgtgccatctcccctggtgaagtctccgccctggatcatgaagtccttgattacacgatggaatttgctgtttttgtagccaaatcctttctctcctgtagctaaggccacaaaattatccactgtttttggaacagtctttccgaagagaccaaagatcacccggcctacatcttcatctccaattcgtaggtcaaaatacaccttgacggtgactttgggccccttcttcttctcatcggccgcagaaggtcccggcagcagcaggaagaagacggaccccgcgatgagggcggcggcaaggagcaccttcatgttgcgttcggagaggcgcagcatccacaggcggaggcgaaagcagcccggacagctgaggccggaagagggtggggccgcggtggctagggagccggcgccgccacgcgcgggtgggggggactggggttgctcgcgggctccgggc

SEQ ID NO: 464867 - DNA, 1000 bp, Homo Sapiens
tttttttgatctaaaagtatttaatataaagaacagcaaagcacccttttgtcagaaagaaatccctatgacatatctcagattacactagtcaaatttccctttatctgaatttctgtttggatacaaaataataatatcctcatctgtttcagataaatgttcagcattacccaatatggggatcataatgaattcagaaaaaaaatattgcattaaaaaaatagccaattcaaagttttttttagttttaaaatagcaccacttgaggaaggggatatatttaagttcaaagtccctaagcaggtggtttactaaagttcaagcaaactaaagggtgacggtttgatttttataactttcctgtgatctgggatagaatacaaaaagaaagtaaaaaaaaaaaagcaaataattgaaagacaacacaacacacacacacacacacacacacacacacccctgccaaagcatatccttgttttctgccagttgtgtcaccaatcagcgatctcaaccacaaaaggcgttttcacgtctatcttgccactgttgatgatcgagcagttggtgagtggacggtcatgcccatcagttgcttggagctctatggagtgcaccactgtcatcccatcaatgacttttccaaacaccacatgtttgccgtccaaccaggtgggcttggtcaaggtgataaagaactgagagccattggtgtcaggcccagcgttggccatgctgacccacccaatgccatagtgcttcagcttgaagttctcatctggaaatgtctcaccatagatgctcacacccccagtgccatctccagtggtgatgtcacctccttgaatcatgaaatccttgatgacacgatgaaacttgcttcctttatatccatatcctttctctcctgttgctagagcaacaaaattttccactgtcttgggcacaacttttccaaagaggccaatcacaattctgccaacatctttgtctccaa

SEQ ID NO: 464868 - DNA, 1000 bp, Homo Sapiens
ttttttttttttttttttttttttttttttttttttttttttttttttttttttttttttttttttttttttttttttttttttttttttttttttttttcaagtttcaaatattttattttcttattcatacagtatgaagttttctaaagatcccacaacatgacgtatcatgcagaagaaaaactaaacattcaacataaaccatcccctcccttacccacccccacacacaaactaaaaaaaaaaaaaaaaaaaaagaaaaagaaaaaaccctcattccccggtaaggaaataatgtttacactatttttctgtaacgccagccaagatatgcacaagcaagagaaatagaaagcatttgctaaaatatttgtaacaaatacttatgtacaaaaaattcacaaaaggctagttcccccttgaagcagagcacatggcagttgacactggaacagttcaaaccactggctgggattataagccatgccactgatccagaggaagaaagttacatgtagtggagattttcagtctgaacattaacatttccaaagtttggcaacattatcttttaaaattatgcaaattatgtaaacaagaggtacattttaaattgatctacatgcaaaactccatgtcatgcaaggacaccaagcaccgggatttttctctcacagacagagcccatgatgtgcagcactcagttgaaggaacagcgatggcaggcaggtgtgctcaatttcagattgattcaccttgattcaacctgcccttttccactgattttaaaaccagtttttatagagaaactataaagggaaagactactgtcatacaaagctaaccaaaatgtttttcttccagctaacagtacctttgcagaaatgggaagggataagatcaaacagtagaacatgatacactacttttatatcacacaaatttattaagttatccattaccaattatatgggcaaatcaagaaaaaaaaaccagt

SEQ ID NO: 464869 - DNA, 1000 bp, Homo Sapiens; identical to SEQ ID NO: 335405

SEQ ID NO: 464870 - DNA, 1000 bp, Homo Sapiens; identical to SEQ ID NO: 335406

SEQ ID NO: 464871 - DNA, 1000 bp, Homo Sapiens
ttttttttttttttttttttttttttttttggattttgatgtctctaaggagtcagtttttattttttaagaggagacctgttacacccaagcatggattcaaaagagatacaactaaaagaagcttgcaatggaacggatcattaaggaccttctcagaaatagatgaaatggatgtgggcttagcagttgttgttgtggatgattcggcacttcaggagcttgagataattgtcgattttatgtgaatccctgcgtaggcagtggagcaggttataataagcagaaaggcgagactcttcatcagccatctgcagggatggaagtcccgaccagacagggtagatctcattttctttggtttcaggatgaacctggctgactatcagctccatgccctctagaagccgtttggtttgctcctcaatctctacagctttggataggatagcctccggggcttcttgcataccacgtacttccgtgaccagatgatacagaggctcattccaggatcgcaatatgctgactatcaggctcagaaagtctttttgattcatctgttgggcttgctccttgtcttcgggggtggcaagggaagaagtgtggcagctgttgatggccttggtaatgaacccccggccatgggtataccgtttatcgaattcgctgaacatttctgaggagaggttatggatgtagtgggacaggacgacggcgcggtcaaacaggtctcgaagggtcacctggcatcgggcagccccgccgggacagatgggcaagggggccacgctctggcacaggagcaggtttgacaccagcagcagcaggagggaccctttccatggcgatcctttgatgttcatgttcgtgatcgttgcaggaaacacacttcaccagagaagatctggaagtctcacggttttctctttcccagatattggctttataaacctttgatatcttcatgaatataatgaatcaggcattcgtttccctt

SEQ ID NO: 464872 - DNA, 1000 bp, Homo Sapiens; identical to SEQ ID NO: 335407

SEQ ID NO: 464873 - DNA, 1000 bp, Homo Sapiens; identical to SEQ ID NO: 335408

SEQ ID NO: 464874 - DNA, 1000 bp, Homo Sapiens
tttttatttaggggaacagctcaactccagctccctgggtgcaatgcgagcctgcccgcaccgagcgcgcttgcaaatatgccccccgccctttccctgggttacgaagtgcccctgtaccgcacggggagtgcacgaagacacgcgtgtgcacaggcggggctctgcgtgtgcgtaccctgtggcactggagggggctgtcaggtcatatctgcccatacacaagatggcacagccggggctgggctcctgggtccgaatttccccgcgcgtctgcctaccacgggggcggaactgaccagtgccctcacggtcaggagagtgtgggggcccgtgaggggccaggacacgggaacacgttgccgaaaacatgtgtatatccatacgcggcggaaacgcgtgtgccagggcagcctcgggccggatgacccctactcccaccattccccactccaagtccagcttcggcgtctatgaggcctagcggcttccggaatccggtatgaatcaggggcacggttcggagagccgggtctcgaaagcagctcttcagtgaggcctcctgaggctggtgtaggggggtggaggtgcgtcgtgtaccccagaggctgccagcgcctgctcataggtggggaggcctgggggtgggggtgggggtggaggcaggggcgtcggtgggcccagagggttcaaaggactcagagggctaatgagcccggcctcttggggacagggctgctggcctcggtgctgtcgccagcgcagataccaaaaggctcccaggccggccaggacaatgagcaggatgccacctgtcagccccacagccaggctggccacatccactcgtccacgccctcctttgccattgtagatgtagctctcccaaaagcgctccgtgagagtgttgtcctcaaaatactccctggcctcttcccaggaacacctctcttccagacactcccgttccaggttccctggtgtgagcagctccaggtcc

SEQ ID NO: 464875 - DNA, 1000 bp, Homo Sapiens; identical to SEQ ID NO: 335410

SEQ ID NO: 464876 - DNA, 837 bp, Homo Sapiens
ttttttttttttttttttttttttttactgacttgcttccggagtttattgtgcaggatgaagcctgagtgggcagggttgctttggcggggagccggggcaggggctcggggaaggaacagagcagagacatccagagcgtgggggtcacctggctggccgggatcccagcttcagccctggggagtcctattgttccgtcatgcacttatcggtttggggcaggaagacaatggtatcctctgtgaagccctgggccttgcagaaggcggtgaatttctcctttaactcagccctgggggtctgggttcggctgtagagggtggccatgcggaagtcctcgccagggcccttgctgccctggctgtacagcagcgcgtactggtcgtagtcggtctccaccactgacacggagtaggtgctgccccagtggggactccggtagctgtaggagccgagggaccccgcgggctgcagcagcatggttcgggtctcacactggtttttcctgaggaaggtggaggtcaggttgaggccaccatccgtggcaggggccaccacagacttgcacatggacaacgccgccttcttctcccggagccagctcgagttggaggcgaggcccgcgctgaaccagcgccccaggaacttgtcctgctggaagttgggctgcacggagacctgggcctccggtgctgcctgcaggtcgcccagcacccccagcagggccagtcccatccacagcgtgtgatgagtagccattctcctgcagcagagcgggtgtccggggcctggtgccagtggtgtgggagagcgagggaggtgtgcaggaggagc

SEQ ID NO: 464877 - DNA, 1000 bp, Homo Sapiens
ttttttttttttttttttttttttttttttttttttttcgcagaatggctttttattcccaaaggctctgcgccgcgcacctgggcccagcccagggtgggctggcttagtcgttgggcctctggttgtgcttagaagtggctgaggccgctgtgccgggagctgcgcagcgagctggcctcccaggcgctcggtgttaggcccagccccgcggggccgcccttggctccggccctcgggggcaagaggcgaagcagttggcgcagcacggcctggcgcagtaggatgtacacccaagggtccaggatctggttccaggaggcaaggcgcacggccaggaacagtggccgctgcagggaggtagagctccagccgccgacggccagcgccaccaacaccagcattgggctccagcagatgcacgacaccaccatgataccgacaagctggcccaccatctccacgtcgtgggcgcgagctctgcgtgccgagccgctgctccgagagccgccaaagaaggtggaggccgaagcgatggacgaggcggacgaggcggaggccgagcggggtccgtgcgccccccagcgacgccggctgtcggggcctgaggccgggggaggccgtcgggagcggcgtcgccagcgggcgcgtagcagggccaggccgctgagcgtgttgcacaccagcgcggcgaggagcgcgaccaggccgaggctggcgaagaggccagcaagcagtgcctggcgccagccgcccgggggacccaggccgatgaagcaccacgtgcccgggtactgcagctcatagcggcccacgcgcgccagcggcagcagcgccacggccaaggccaccgcggccaccgcggccagcgccaggcgcgcgcgggcgaccgagacccgcgcggcgtggagcagcggccgcgtgacgcccacgcagcgctccacggccatgccacagcccagcagcagcgggcacaggccgaagaagaccatgcagccgc

SEQ ID NO: 464878 - DNA, 1000 bp, Homo Sapiens
ttttttttttttttttttcaaatttttgttttatagtttatttttgtaacatttcagatgagtttacacagtaactatgattaaacagtgcaaattcactgaaatattttgatgctgagtttacatttacatgccaaacatttagaaatatattaagatatgactcactgctacatggtttcccatataagatgagtcaaaccatgttccctaaataaaatatagacagatgaattttggtacaacacagtcatcttataaaatctattttactcatggccccaatatcaactttaaaagggttccagtatatctgaagaatgaaccagatttttcagtttttaagcctaatatttggcttcatacatggccacgtacatcctcccccagaaataggataataagagtattaatgagaattaactgccttgagacatttctattatttcttgttgagagaaccattcctaaagtcttcttgatcactattagcatatggacattataaaataaataacctgacaacttgacctgcagttcctggaggatgagtaaacaaaactgatgttaacccactgagtccactcttgtaagagtaatactgtagtgatgagagtactcccacatacacaaacatcacagtaaaaggtgcctatgattttcaacttcattgttcaaataaagggttcgctaagtgatcacaagacagcaggcttggttgcttccacatattgacttcctagagattacatatgaagtttaatctggtctggctgtacactatatgtgtataacggtagtagcaagattaaaatagaaagtacagtcactgtttggggtttcaaacaaattacaaaaccacatactttgtcattcaacaggaaagcttaaatcaataggcagctggatcttcaatgcagccgattgttcctccaaaggccaagtaccatgctcactgagggtaggttttgtagctccttctgacactttacatgaagtg

SEQ ID NO: 464879 - DNA, 1000 bp, Homo Sapiens; identical to SEQ ID NO: 246393

SEQ ID NO: 464880 - DNA, 1000 bp, Homo Sapiens; identical to SEQ ID NO: 335414

SEQ ID NO: 464881 - DNA, 1000 bp, Homo Sapiens; identical to SEQ ID NO: 340428

SEQ ID NO: 464882 - DNA, 1000 bp, Homo Sapiens; identical to SEQ ID NO: 157372

SEQ ID NO: 464883 - DNA, 1000 bp, Homo Sapiens; identical to SEQ ID NO: 157373

SEQ ID NO: 464884 - DNA, 1000 bp, Homo Sapiens
ttttttttttttttttttcatgtttctcactgcctgtataatcaggtctttattcaaaagaagctgtccaaaatgatttgacctttatggaataatcaaatttaagagtttatgcagcaggcttcttctcctctgtagtaggtttcttctctgcaggcttcttttcaggggctggtttcttggtagctgctgccttttttcccaccagaggcttcttctgcttcttaacaccaacagcagccttctttcctttcttacctaccacaggcttcttgcctgcaaccgccgccttctcatctgatttggcttgtagtgccgctgctgcagcagctgccttatccacccggagcttgtgattcctggcctggcgaagaatggtgttccggcgcatggtctttgcatatgggtttagcttcaacatgattctcaagtttttcagtgggttcttctttaggactctgcgatggatcttcttgcgtggtgctcgaagggctctttggatctctgggcttttcaagattctgctaagatctgtattaatcatcttgtgcatgggaagattgtagttactcttgagggaagcggctttacgccaagtgccgtacaattcatctaacttccggaaagcactttcagtccaaatgcagaaacgtcccacatgcccaccaggagcaagcttcaaaatgttcagcttgcttacattaagcagagtaattccagggatgtttctgaaggccttgatgataccattatcctcattatagatgatgcacgggcccctgcgctggatacggcgacggtttctcattttgcctttgccagctctcattcgctgagaggcatagacctttttgatatcattccaggctttaagtttcttaaggagcaaaacagcttccttggtcttcttgtagccttcaactttatcttcaactaccaaaggaagttcaggaacttcctcaatacgatgacctttagacatgaccagtgctggtagggc

SEQ ID NO: 464885 - DNA, 1000 bp, Homo Sapiens; identical to SEQ ID NO: 335416

SEQ ID NO: 464886 - DNA, 866 bp, Homo Sapiens
ttttttttttttttttttttttttttttttatttcaatttgagagcaggtactgtttattaaccaaccagcttagaaaaataatcatggtagacaccttagttcattcttctaataagcctgttgatctggtcctccctgttgccagcatctccaccttctacaaaatgggtggtctttttcttcattccacctcgtggagaagacaatttgaagggccacaggaagttatttgcctctttgaagcgttttccaacagtatagatctcatgaatcaaatcctccatgcagatgatgccgtatttaccaagagatcgagcaatcaaagcgttatctgtcaaagcaattcgcttcttattgattttgccataaccacgcttgtagattagttcatttactgacttcagattggggtacccccatgcaatatatggctctacaatcctcagcatgttaatcgaagccttgttgagcttcacaaaggttccattgaagatttgacgaaggcgaagaagctgcaacacctttcgaacctttgggctcactccattgatacctctgattctgatgacaaacgccaatttgggttctgcaggtacatagaagttgccagcttttcttgccatcctcgccattcgaatttcagttctgtacatctgcctatattccttgtgatagtgctttgctttttcatagataagcttcctccttgcctttcgaagcatcttttgggcaaacttctttctcaggcgcttgatcttcagctctgcgaaattccttcgctttttcttaagggtttctggcacagcaggaacctccttcttcttctcttctacaccctccatggttccagccggaaaaagagga

SEQ ID NO: 464887 - DNA, 890 bp, Homo Sapiens; identical to SEQ ID NO: 157374

SEQ ID NO: 464888 - DNA, 903 bp, Homo Sapiens
tttttttttttttttttttttttttttttggcataaacacaaactttattgaggccctcagcactagttctctttctcctgcacagtcttggttccccggagacgtccagtccggcgggcagcaatgagacccactttgcggccagcaggggcatctctgcggatggtggagggcttgccgatgtgctggtggttgccacctccaaaaggatgctccacaggattcatggccacaccccgtactcgtggccagcagttcctctttgccttatatttgtggtacgcccggccagccttcaagatgggtttgtcaattcggccacctccagccaccacaccaaccacagctctgttggctgaggagataaccttcttggagccggagggcagcttcacacgggtcttcttggtctcagggttgtgggagataacggtggcatagttccctgatgcccgggccagcttgccacggtctccaggcttctcctccaggcagcacacgattgtaccctcaggcatggtgcccacagggagcacattgccaatgttgagctgggccttcttgccgcaatacacaaactggcccgtgtgaatgccctcggcggcaatgaacagctccgtccgcttcttaaaccgatacggatcccggaagaccaccttggcgaggggcgcgccgcggcccgggtcgtggatgatgtccttgacgatgcccttgatgtagccgtgccgctcagcgaaatccacggcgcgcaggcgcgcagcgcctttacggtgcttcacgtgcgcgcggaacacagacccggcgcccttcctctgtccacggatcacacggcccatggcgacgggtcctgttcaccagcgcggccgaaagaggaaacacggcgtcagcgagcggccttatct

SEQ ID NO: 464889 - DNA, 609 bp, Homo Sapiens; identical to SEQ ID NO: 335418

SEQ ID NO: 464890 - DNA, 632 bp, Homo Sapiens
tcaccagttgtcaaatgatcctttattgaaatgttttcctttgtgcttaactggctgggcattccacagcaccactgttgatgtcatcgatgatgtcatgaggatggcggccatcaacattacagcccactgactgggcagtccccaggatctctttaatggttccagagagttctctggctaaggatcggtgccgcatctgtcgagcaatgttgacaatctcatcaaaagtgatattcccactgtgtttaatgtttttctgtttctttctgtctcttggtggttccttgagggctttgatgatcagggcagaggcagaaggcaccacctcaatctgggcctgtctgttctgaatggtcagtttcactgtaatcctcaggcccttccagtcacccgttgccttggcaatgtcatcaccaactttttttggagacagacccagggggccgatcttgggggccagggcagaagtggcaccgacttcacctccggtgcacctcaggtatacgactttgatctcgttggggtcgaacttcggcggcatggtggaggcggctggtgtcggatgaacccggattcgggacgaccgaaggaagttgcaccttggcctcctccgagccgaaagccgagag

SEQ ID NO: 464891 - DNA, 1000 bp, Homo Sapiens; identical to SEQ ID NO: 157375

SEQ ID NO: 464892 - DNA, 493 bp, Homo Sapiens; identical to SEQ ID NO: 157376

SEQ ID NO: 464893 - DNA, 648 bp, Homo Sapiens; identical to SEQ ID NO: 157377

SEQ ID NO: 464894 - DNA, 618 bp, Homo Sapiens; identical to SEQ ID NO: 157378

SEQ ID NO: 464895 - DNA, 748 bp, Homo Sapiens; identical to SEQ ID NO: 157379

SEQ ID NO: 464896 - DNA, 1000 bp, Homo Sapiens; identical to SEQ ID NO: 335420

SEQ ID NO: 464897 - DNA, 1000 bp, Homo Sapiens; identical to SEQ ID NO: 157380

SEQ ID NO: 464898 - DNA, 898 bp, Homo Sapiens
ttttttttttttttttttttttttttccttttaattacatttattttaatgctgaatttactcccgtgccataagtttttgtttcttcagtttcttctgggatatctttttcttctgggcaacctcctcttctggtttaggaacaatctgttccttttccgtaaggatcatctcaatgtggcagggagagctcatgtatgggttaatccgaccatgagctctgtaggtccggcggcgcatcttaggtgctttgttcacttggatatgctcaatgaccagagaatctacatctaaacccttaagttcagcattactctctgcgtttttaagcatgtgcagcaaaaattcagcactctttttgggccaccgaccttgtgtccagccccattgcttggcctgcgcacacctgccaactccaccattgtaacgtcggaatggtacacactgtttctgtaaagtgacatctttcagatacttcgtggcttttcgtatatgcatacccttgatggcctgagcagtttcacgagtgttcttaaagtgaacacgaagattggaacctcttgatttgcatgatttcgtggggttctccgggtcaagtgaatagcgaaccattttcacagatcacctagaggaaagtacagtgtaattctgtcaatacgtacttacagtaactcattcagtataaatatcagatgattcgaacagctgctcagagagtagttgttttcattattaatccaaaggtgtcctaagaaatgccatcatcgcagccatactttcccccaccaagggcttgctttcccttttatcttccagtaactacagcactgcttccacagaagtagccacacgggcctcaccaatccagtcaaccctcaggctgcttagggaaagagga

SEQ ID NO: 464899 - DNA, 556 bp, Homo Sapiens; identical to SEQ ID NO: 335421

SEQ ID NO: 464900 - DNA, 513 bp, Homo Sapiens
ttttttttttttttttttttttttttctttataatttttaatgatcaaaacaaagcatctaaaaccgcagtttctggaagaaccacttgttcttgcctgtcttgtatctctcttcaaacttgaccttggcctcccgtcgggccttgcgtttaagagcaggatctctgaagacatccttattgacgacagttttgtccaaggggatatccacagagtaccttgtgggcattaggtgattgtagttatacactttcacaaaagattttatctttgatctcttggcgatcttcttcttgcccatggcagctgtcactttgcgggggtagcggtcaattccagccaccagagcatggctgtaggggcgatctgaggtgccatcatcaatgttcttcacgatgacagctttgcgtccggagtagcgtccagccaggacaagcaccaccttcccaggtttcatgaacttgcccatttcggcagcaaccacccgggcctacagcaaaaaggaaagaagga

SEQ ID NO: 464901 - DNA, 524 bp, Homo Sapiens; identical to SEQ ID NO: 335422

SEQ ID NO: 464902 - DNA, 1000 bp, Homo Sapiens; identical to SEQ ID NO: 335423

SEQ ID NO: 464903 - DNA, 442 bp, Homo Sapiens
gcaattttataactttatttgatctgacgatcagcgattagttctcatccacattgactgtctgtagatttttgaaagtggtaacaggtacataggtaaccaaagtatatagcttatttggtgaatcttcatcctcattacgttttctggacagccgcacacggattcggtatggcacattccttattcctttggcccagacagctttgttgagcctggtgtcaatgcgcacatctggagttcccatctccttcatggcaaatttccgaatctctttgagtgcccgaggtgcacgcttcttgaagcccactccatggatgcgcttgtgaatgttgatggtgtattctcgggttaccacttcgttgatggcagaacggccctttttcttctcgccacccttctttgcgggagccattctgcagcgtccaagttggaaaggaag

SEQ ID NO: 464904 - DNA, 1000 bp, Homo Sapiens; identical to SEQ ID NO: 157382

SEQ ID NO: 464905 - DNA, 1000 bp, Homo Sapiens; identical to SEQ ID NO: 157383

SEQ ID NO: 464906 - DNA, 1000 bp, Homo Sapiens; identical to SEQ ID NO: 335426

SEQ ID NO: 464907 - DNA, 368 bp, Homo Sapiens; identical to SEQ ID NO: 335427

SEQ ID NO: 464908 - DNA, 549 bp, Homo Sapiens; identical to SEQ ID NO: 335429

SEQ ID NO: 464909 - DNA, 1000 bp, Homo Sapiens; identical to SEQ ID NO: 335430

SEQ ID NO: 464910 - DNA, 932 bp, Homo Sapiens
ttttttttttttttttttttttttttttgaggagttaatttatatttaattctaaaggtgaacgatggggacaagctgtgtcatatggtccacaactgccacagctcagttattttggattacattttcaatccagggtatatagtaaaaaattttggcatagatgccaacatcggctctcaaaacacatccatccgcaaaagacaggattccttgaagcatcccattgcagattgccggggcagcagaaacttccttgcagggctgcctccttcctggcacaatgcccacacacagcatattttccgtgatgttgtaggttttataggcatcgcgacactgaggcttggagattacagagatgttcacagtttgcagtgaatcgggctctttgtagatatcacacacattgtagctccaggtagagacagagcacatggtattttcagagatagtttggtagggcaggttggctaatttcacatagtcattgagttcagcctctgttttcagcttgattagcatgatgtcatgatcaatagaagtgactgagaagtgtggatgatgaatcatcttctcatagccaatcacttgcagatgcttttcattagagtctgctgggattgtaacccccaatatcacccgaagctttggtaaattgcagtgtgcagctgtgatcacccaaagcgggtggatcaggactccagcgcagggcaagtagtcagatttcaaatagaccaagtaagggggagtggagctgactgtgtaatctggattaaaggccaaagcaacagtcagattcaagagggcccagaggaggataaacttcatgatgatgttgaaagcccagtttagctccagtctctggaaaacaaagctaagttgaagttcatgatatctctacagacgcctcctgtctggtctcctttttg

SEQ ID NO: 464911 - DNA, 1000 bp, Homo Sapiens; identical to SEQ ID NO: 335432

SEQ ID NO: 464912 - DNA, 1000 bp, Homo Sapiens; identical to SEQ ID NO: 335433

SEQ ID NO: 464913 - DNA, 1000 bp, Homo Sapiens; identical to SEQ ID NO: 335434

SEQ ID NO: 464914 - DNA, 1000 bp, Homo Sapiens; identical to SEQ ID NO: 335435

SEQ ID NO: 464915 - DNA, 1000 bp, Homo Sapiens; identical to SEQ ID NO: 157384

SEQ ID NO: 464916 - DNA, 1000 bp, Homo Sapiens; identical to SEQ ID NO: 157384

SEQ ID NO: 464917 - DNA, 1000 bp, Homo Sapiens; identical to SEQ ID NO: 157387

SEQ ID NO: 464918 - DNA, 1000 bp, Homo Sapiens; identical to SEQ ID NO: 335438

SEQ ID NO: 464919 - DNA, 1000 bp, Homo Sapiens
agaggttgataaatgcttttaatccccacattccacacacgggggacgctgtcattcacattttcatatttctgttctggtcgcagtctgtgtcctcaccaccctcatgaatgagggactttgatagatgcctgggtttgtgggctctgcggtagctggaggagatacacaaagggtcctcggaggagggtgtgggacagctttgaggggacaaccactgcagacacctggagggagctaggggagattctgagacttaagagacatggaatggctgggcgcagtgactcacgtctgcaatcccagcactttgggaagccaaggtgggcagatcacttgaggtcaggagtttgagaccagcctggccaacatggcgaaatcccgtctctactaaaaatataaaaattagtcgggggaggtgctgtgcacctgtaatcccagctacttgagaggctgaggcaggagaaccacttgaacctgagaggtggaaattgcagtgagtcgagatcgtgtcactacactccagcctgggtgacagagtgagatgccatctcaaaaaaaaaaaaaaaagtaggtaagtggagatgctaaggggagatgtgtgaagagatcagaggtcaaggtcagttcagaaggaccccgggatgtgaaggtaatggaagatcaaggatcggggcggttaaatgggacaggaactgagtgaagtgaatggcttcattcccctttcaacacacatttgctgccacccactccgttcacagccctgggctgggtggtgctggcaacacagcagtgagcattcagtttcagtgaagttcaaagaagcagagaccagccctcagcatccttgggcacaggtgtctatgcattctctcaacagagatctacaaagcatctgtgccagagcatctgtcgggcactgaatttacaaggagtggctccgccctcatggggctcagacagtgctgggaaaatgctggagtccaccgcttaagggtgt

SEQ ID NO: 464920 - DNA, 1000 bp, Homo Sapiens
catttcaacaggaaacatttatttcaaaacgtgaaggtagttatccttccatgagtttaaagtacaaaggcaggctcacggtgtcgtcagaattcagaacgatggtcgtggggcttggggtgctgggaggggctgggcatggttggctttgtgatctggggtctggtgtgttccatctctgaatgtctctcaagctgcactctttcttaatacatattcataagtttaaccaaaaataaaacgaggacgcgaagcttgcttgggttgttaagcctagggaaattatccagccatgagccctggcccagatgcttctagaagcctggagggaactgagaactttccaagtggaggccgcagaggcaaggccctgaggtgggagcacactgctgttcgtccctagctctgaagggggtgccctggtcggaatcagtgctgggtgcagcgaaagccgatctcacccgctccgcagggtgttcagcctgccagcagggggccagctggtcctcctgggatatggcacggacccagcagctctgtctgaaatcataatggcggaaccaaggcccctctacgtccaggtccgttgggaggcggggcatggagttccactgcaggaatctccaggaaccctgaggtcctccctgagccagggccgggctgggcacaccctgagtgcccacagggtaggtgtcttcccggacagccccaccaggacagggtgtggaagaacgaggtgcccgtggcggggaagctgaccaaatgggccgcgggaaccgggctggtgggcctggaggggcctgcctgtcccccttgcagagggtcttcccgccacgtgaagccggcacaggcctggatgccgacgacccttgctcgggtttggctgggggtggcaggtccccctgctttcttgttagtttcttcatagaggccctaagatgcttgagcacagtgtcctcatccctggcccaggtatcaacgaaccggttgcaaaaacgtg

SEQ ID NO: 464921 - DNA, 1000 bp, Homo Sapiens; identical to SEQ ID NO: 157389

SEQ ID NO: 464922 - DNA, 1000 bp, Homo Sapiens
tcagtgtgtggtggctttttattactggtgtggagtgggtgtgggggcaggcaggagtggtggctcccacctaggccagctccccatttccaaacaggagctgcctggggtgcccaggagggcccgggaactgggggagtgcaggccggaggcaggtgcgagcgaggagcagatctttggtgaaggaggccaggctctatttccagcgcccggtgactttagccttcccgcgggtcttggagactttctggttatcgttgatcctgtttcggagaacattgatctcatatttctgctgcttgaacttctcctgcaggtcgaacttctctgcctccaagttatagatgctctgccacagctccttggccttctccctcagctgatcttcattcaggtggtcaatggccagcaccttcctcctctcagccagaatcttcttcttcttttcccgctcagtctgcctcttcccacttttccgctctgtctgggccttctggatgtaacccccaaaatgcatcatgttggacaaagccttcttcttccgggcctcatcctcagccttcctcctgttctcctcctcctctcgtcgagccctctcttcagccaggcggttctgccgctccttctcccgctcattccggatgcgctgctgctcggcccgctctgcccgacgtctctcgatcctgtctttgagagaaacgagctcctcctcctctttcttcctgttctcaaagtgagcctcgatcagcgcctgcaactcattcaggtccttctccatgcgcttccggtggatgtcatcaaagtccactctctctccatcggggatcttgggaggcaccaagttgggcatgaacgacctgggctttggtttggactcctccattgggccatcttcagcctcctttgcttcctcttcttcttcatcttcttctgccctggtctcctcggtctcagcctctgcttcagcatcctcttccgctgcctcctcctgctcttcctg

SEQ ID NO: 464923 - DNA, 1000 bp, Homo Sapiens; identical to SEQ ID NO: 335443

SEQ ID NO: 464924 - DNA, 1000 bp, Homo Sapiens; identical to SEQ ID NO: 157390

SEQ ID NO: 464925 - DNA, 1000 bp, Homo Sapiens; identical to SEQ ID NO: 335446

SEQ ID NO: 464926 - DNA, 1000 bp, Homo Sapiens; identical to SEQ ID NO: 335447

SEQ ID NO: 464927 - DNA, 1000 bp, Homo Sapiens; identical to SEQ ID NO: 157391

SEQ ID NO: 464928 - DNA, 1000 bp, Homo Sapiens; identical to SEQ ID NO: 335449

SEQ ID NO: 464929 - DNA, 1000 bp, Homo Sapiens
ttttttttttttttttttacagacagattagctttattcatggactctcgggggcggccgggcccacccgcccgggacacgctcacatgggggggatggggactctccatgccacaatcacaacacacgacgcccgcgttcggaccgggccggctgggatggggggcgggggacatggcacagcctggctcctggttttggttaaaaaaaaaaaggttctcgaggttaatgggagtcgggcggggtgctctggggctgcccgggggccgcttggagagccactgtcggggatcggggaggagccgtcgctcggatcttcgtttaaaaacacatagaacatgctacatccgcgcagacgctggatgggaggaggcaacactggaggggcgaggctcccagccgcgaccgcaaccctggccctgtccatgccccggggttggacgcgggcgggtaggacagacagatggacagacactaacacaggctccgagggggttgcctcagagcggaaggaagatctcgtgattggggagaaggagtctaaggacagccctggctctggggggcggggcagggacagggacagaattgtgctgctggtgggggctctcctgggcccctacgcctctggctcatactcctgatattcctcctggggtgggtcctcataactctccccttctggctccatcaggggctcaatcagtggttcttcagcagcttcctgggccacttcctctggcttcagatcagtagggaattcctccctcttcaccagtcctgtggctgctgcgatgttccctgccccagagaacacagctcctcccagatgtgaggcctgttccttggttttttcagccactgaagccacaccttgtaccacaccttctcgggtcttgcttccgacgtagaggacgccctccttggtcttctccgccgcctcggtgaccccctgcttggttttctccgcggctgccacaacgccctccttggccatgga

SEQ ID NO: 464930 - DNA, 1000 bp, Homo Sapiens; identical to SEQ ID NO: 335450

SEQ ID NO: 464931 - DNA, 1000 bp, Homo Sapiens; identical to SEQ ID NO: 335453

SEQ ID NO: 464932 - DNA, 1000 bp, Homo Sapiens; identical to SEQ ID NO: 157393

SEQ ID NO: 464933 - DNA, 1000 bp, Homo Sapiens; identical to SEQ ID NO: 335456

SEQ ID NO: 464934 - DNA, 1000 bp, Homo Sapiens
tttttttttttttttttaataaggagaaaaatgcgtttaataatatagcattcgattgcatatcatccaggaaaggtgtactgtaaaaaatgttttgattattcattgacctctggtaactttagcgttgtaaatacttgtattatatgaggtagacagtttaaaaaaaactctccattagacagacttaaaattttgtaataatatttaagaaaatggtaacattatgaaaaaatgaaatatctgattaatgcttaactttgtacaactcgaatataaactttaaaaatattagaaattataacatttgagtgcatataacgttttgtacattaggatgaattgcatgctgtccatttcctctttgcactttcagtcaccttaaataaacaaatatatacagccttaacagaacaacagtgcatccaaagcaaatgtgcattttaaattatttctcctggccaagtctttttttcacttagcatttttatattagcatttcttatcatccccaccctttctttgacagtttgtagttctctgaaccaaacaagcaacaggtttagattggaagagagcaaaatcacttaggaaaaactaaaactttttaaaaggctggtacaaattccattgattaaacaattttatagtcaaagatgaggaggaagctaactcttcaaagggcctactcatgggcaatgtttgaaaacaatactggtgcaggctgggggaaagttcatgtttttgactatctgggaatgggtatttcaatttcactgtgctctctccagcttcctcccagaagacgaattccacccctgtctccttcctcactgcctgttccccatctcccaccccaagctcaatgtaacacttggctcttttcacagtttctcattactaagttttaaaaacattgcctaactgataattacaatctgaaccaattcttttgggggagccctgggctattgctggctggtaatctttcaggaatgtc

SEQ ID NO: 464935 - DNA, 1000 bp, Homo Sapiens; identical to SEQ ID NO: 157394

SEQ ID NO: 464936 - DNA, 1000 bp, Homo Sapiens; identical to SEQ ID NO: 335458

SEQ ID NO: 464937 - DNA, 1000 bp, Homo Sapiens; identical to SEQ ID NO: 157395

SEQ ID NO: 464938 - DNA, 1000 bp, Homo Sapiens; identical to SEQ ID NO: 335462

SEQ ID NO: 464939 - DNA, 945 bp, Homo Sapiens
ctaattcctgaatagttgacagcagcgtttcaccccatcccgaagggcctctatgactttatcattccggagggtgaagatgaaaggattgaggaaaggagttactactgaaaccatcagggaaactacccaattgtaatcagctgcctgcgtttgcttgggtttcacgtagagaaacaagcagctgccgtagccaatcacaacacaggtgaagtgggaggcacaagtggagaaggatttcctccggccagaggatgacgggatcttgagaatggtggagatgatgtaggcgttggagacaattgtagggatcaaagaaccaaagagaacaaaaacagccattaagaagaggataaactccgtgaaaagagtattattgcaggatagtttgagcaattgccctcggtcacaaaaaaaattgttcaccacatttgatttgcagtaagtaagctgaaacatgacatagaccggccagatttgaaaaagaaacccaaacacccatgacacaagaaccacaaagttgcaggtgtgtctgttcataatgatgttgtacctcagagggttacagacagccacataacggtccacagccattgctccaagtaatgcgaactctgttgtccccacagcaaggtacaagaagagctggacaacacaggcagacaaatatattgtctgcatcccagggagcagcaatccccaaagcatcacggggacgattatggttgtgaccaggatctccagggcagagaggtggccgaggaagaaatacatgggggactgcagacgtttatccacacagacaatcatgatgatgactgtgtttcccattaatgtcaccaagtagaaaaagaagaatatagcaaaaaggatatgatgtagttcttcagagccagggaagccaaggagataaaattcagtggcactagagtaattcatcaacat

SEQ ID NO: 464940 - DNA, 1000 bp, Homo Sapiens; identical to SEQ ID NO: 335465

SEQ ID NO: 464941 - DNA, 1000 bp, Homo Sapiens; identical to SEQ ID NO: 335467

SEQ ID NO: 464942 - DNA, 1000 bp, Homo Sapiens; identical to SEQ ID NO: 335468

SEQ ID NO: 464943 - DNA, 917 bp, Homo Sapiens; identical to SEQ ID NO: 335469

SEQ ID NO: 464944 - DNA, 1000 bp, Homo Sapiens
catctttgaagtcctttattcccagcagttcacatcagttactcattgagctggggttcgtcatattaaccaagaattcattcatctttcttttgatattgtaatcttgccctcatctccacaactgagttggggcctgaggggtttaagagttctcactccatcacaggaggcaaggggtacccttgtgaaccagacttcaactcctggaagtcttgttcagttcataggcaaatatctttgcaagtttagtatgagacagcccaacggttaaataaataagacacagtgccatggttctaggcatttggagagggaaaaggcacattacacagattcccctggagaaaatacaggccattctcatcttctcaacatgcattttcccactcttcagtgacttttaatcttatcccctggtctatgagaaaccataacccacgtgctactgaatacatttttattttcccttcatgacatagacttggttccaagtatattttattttcctcccttatgcctacaagacatccaattttgttcaggtcccttttaatggcacttaataaatatacattctgagacctggcagaacaggctgtcccctttcacactgcctttaaagcgcctgtttgaactagctagtgcagagctcaggtggggcacgtcctagcttacagctcatggccatctctggcaccaggtctatctgtccaatactttgtgtctagggtagaggtccctaaccctggctgcacattggaagcacctgggaagctttctgaattcctgaggcccgagccacaccctaaaccaatttcatcagaatctctgggtgggacggagcctggattctgccagttgaaacctgccatggtaacttcagtgagcagctacactgagaactcctgagctacaattctagcacacagtaggccttcggtaggtatctgtggaacccacgagtgggtttcctatttcattatctgttcccctatgc

SEQ ID NO: 464945 - DNA, 1000 bp, Homo Sapiens; identical to SEQ ID NO: 335470

SEQ ID NO: 464946 - DNA, 939 bp, Homo Sapiens; identical to SEQ ID NO: 335471

SEQ ID NO: 464947 - DNA, 1000 bp, Homo Sapiens; identical to SEQ ID NO: 335473

SEQ ID NO: 464948 - DNA, 1000 bp, Homo Sapiens; identical to SEQ ID NO: 335474

SEQ ID NO: 464949 - DNA, 1000 bp, Homo Sapiens; identical to SEQ ID NO: 335475

SEQ ID NO: 464950 - DNA, 1000 bp, Homo Sapiens
gtttttgagatgaagtctcactctgtcgcccaggtggagtgcagtggcgcgatctcagctcactgcaccctctgcctcccgggttcaagcgattctcctgcctcagcctccagagtagctggaattacaggcgtgtgccaccacgcccagctaatttttgtatttttagtagagacggggttttgccatgttggccaggctggtctcaaactcctgacctcaggtgatccacccaccttggcctcccaaagtgctgggattacaggcgtgacccaccgcacatggccacatttctgttgttttaagcgaatacacgaatatactagtcattgttatcatcactgctatcgtcatcattgctaaacactccctatggtccagaaactgcaccaaacatacattcactcatctcatttaaccttcaggccgaatctctgagatacatactttggacaatcacattatgcaaaagagatgcctctgccacagcagcacccttgcgctgagtcatgcatgtgctgaggacaaggctgagattggagcctcagtctccccggccctgaagccccagctcttaaccactgagctccataatccccaagcagcaagctggttggctagctcgagtgcaggcacctgcgatttgccagggtggtccctgctatgatccctgccacttggacaacgaggaggaaatccactggctcccagcatccatgtgcattttatcctcttagagagggagacgggattttctcctctgtcacagctccgggagccagtgtatcttggataattagaaacactgccaataatttgctccaagtgctgcaaagagcaagagtgatcgccatgaggtcctgcgacatctgagatcttccacgtcacgacgctgctccctaccacggacgattggaacttccagaggatgagctccatgatccagagcatgagctgggaacgcagttgcactggggggtcttgcccccaccactttgtc

SEQ ID NO: 464951 - DNA, 1000 bp, Homo Sapiens; identical to SEQ ID NO: 335476

SEQ ID NO: 464952 - DNA, 1000 bp, Homo Sapiens; identical to SEQ ID NO: 335477

SEQ ID NO: 464953 - DNA, 1000 bp, Homo Sapiens
cttagcaaaataggaacatctttaatacaataaagattatgtacaataatcctacagtaagtaaagtttaagtgttatcatactcaatgacgaaatagcaaagttgtttttctttgagcttgagaactacaaacaaaaagaacagaacagggacacttacaattaccacttgtatataacaccacactggacatcccattatcttgcaaaaagccaaggaaaagaaaaaaaagctaaagattataaaggaagagaaaaattgtcattttccacagatagtacaattgcacaactataaagtctaaatcagatctagaactaaattattaaattagcaagatggcttggtattaaaaagtcaattgtatttctttatgctaacaaaacattttagaaactgacatttaaaaatataccatttacaagctggatgtggtggctcacgcctataatcccagcactttgggaggccacggccggtggatcacttgagctcaggagttcaagactagcctaggcaacatggcaaaaccccatctctacaaaaaatacaaaaaaattagccaggcctggtggtgcatgtctgtagtcccagctacttgggggactgaggcaggaggatcacttgaacccaggagttcgaggctgcagtgagccaagatcgtgccactgcactccagcctgcataacaaagtgagaccctatttttaaaaaaaagaaaaagaaaaaatatatcatttacaatggcatcaaaactattaaatgcttaggaataaattcaatgaaagatgcaaagggctctacagggaaattggaaggaggcatcatattcagtattaaaactaagaaacttaatattataaagatgaaattttccccatggtttaggccaaaaacattggaagcatccttgactcctctgttttgctcatatcccaaatacaatgcattagaaaattttattggctttactttcaaaatgtagtctgggtttacccaa

SEQ ID NO: 464954 - DNA, 1000 bp, Homo Sapiens
agagatggggtctcactatgttgcccatgctggtctcaaactcctaggctaaagcaatcttcctaccttggcctctctaagtgctgggattaaagccgtgagccactgcacccagtcaataataactttttaaatatttgattatgtttaatgatacttgaagtccaccctgagtcctgttcccctttgtaatactctgctgtttcttcttgggttcatctcagaggtatcatcatggtcacaccttcctggcatgttcctgagcttttatcttcacgcagacccagtagtacctgctggtggggagaggggtagggaaggggtgggggtcgcccacccaacccaggctcacccccaatcccatgtgaaactgcgcccacccgccatggctgcacccatgggtgtcaccagtgggacaacagtgcaggcgtggccttgctgtagcatgcctggtccacctaatgctttcccagcccctgcctgacctttgccaaatctgtcctttctttctcagccctagagccccacagagaaggtggcgtggaaggtccccacaaaagaatccagcccttctccatccactgatttcttttctttcattcattcaacaagaaattattgacgggcttcctgtgccaggcacaggccaggggctgggtggcaggcagaggggcagcctccagggccgcagggcccagccaggcccacctccatcacctctccttccccgccccagacttggcccaataggcaggactgaaacgaaacctcgcccctccagcatcctccaatttcttgctcttagttcagaccctgcacagcagcaggcaattgaaaaggacttccggatacccgctcacactttcatccttcttttctctctgccttttttcatcttctttttaaaaatgctctttaatagtgggaaagttagcatgaaaaggagagaaaatgaggcttgaaaagaatgtgtctgatgtgcagcaatttgttcacctgc

SEQ ID NO: 464955 - DNA, 1000 bp, Homo Sapiens; identical to SEQ ID NO: 335478

SEQ ID NO: 464956 - DNA, 1000 bp, Homo Sapiens
aattttaataatacattttattcacctcaagctatctaaaatcttatcatcttgacacactgaaataataatcaattaacaaatgattgagagattttactgtttttttctttagtaagtcttcgaaacacagaagacgatgtttcttatactgtcacagtgcagttaactcgaacagcacagacccggagccttaaacagctttgtcagagctcagcctctctgcagtgtcctaagcactcaacaaataagttggctcagcctctctgcagtgtgctaagcacacaacaaataagtcttggcgttggccatttgtacgtccaatcattaggcgctcagtgcgtgcaccttccctgtagacctccctgtgattctggcacccacagccaactcttgtatctttccccaggggcagggctgcctgggtccaaatccgacgtgatctcccgtgtggatcgaggggaagagctgaggcaggagagagaggcccagcgagttacctgcccaggtgggtgaggatatccagcaggtgtgagccctcttcctaccccatctctcatggtcagtgaggttcactcaggggtgaggcagtggaacacacgggtgatcatcgtgggctcgggagtcgggttgtgtgggttcaaatcccagctgattgcttcctggctgtgtggccttgggcaagtcacttagcctctctgtgctttgatttttttcatctgctacatgaacagagtgagaactccaatccaggtaccaggtgcccatcatgcatcttcatatttacagtcaacaatgctgacagcctagtacatcttgacccgtggtcttgagcatatggaagaacatcttacccagcacctgtgtaaacatcccaggagtttagttcccagagactggccaagggtcattgccatatgggctccggtaatgggcagctccagcctgcggcgtagacagttgccatggagaaagacaggcgtttccagagttgacggtt

SEQ ID NO: 464957 - DNA, 1000 bp, Homo Sapiens; identical to SEQ ID NO: 335479

SEQ ID NO: 464958 - DNA, 1000 bp, Homo Sapiens; identical to SEQ ID NO: 335480

SEQ ID NO: 464959 - DNA, 1000 bp, Homo Sapiens; identical to SEQ ID NO: 335481

SEQ ID NO: 464960 - DNA, 1000 bp, Homo Sapiens; identical to SEQ ID NO: 246394

SEQ ID NO: 464961 - DNA, 1000 bp, Homo Sapiens
gagaggatcacatgtttaagtggactctcttttatgtacattttcttccatttatgtctgttctgctgttgatggtccatcagagcatttgtctctcactgtgcattacacatcaggatcacctggaggtcttgtgctgttggcaggacaatgggcttccaaaaatgtccaagtcctaatccctggatcttgtgaacatgtgaccttacgtagcaaaggggactttgcagatgtgattcagtcaaggactttgagatgggaagattacccgggtgcgcccaccctaatcacacgggtccttacgtgggtcagatgacgatgtgacaatggaaggtcagaagacgcgaggctgctggctttgaaggtggaggaaggtccgtgggccaaggaagttaaaaaaacacgaggaaacgacttctcccttacagcatccagcaagaaacgcagcctcccaacaccttggtcttagcccagtgggatcccagcctacacaactgtaaggtgatgagcgcgtgcactctgcagtcactgagtttgtggtcatctgctccagcagctgcttggcccttggccttccttggaggatctcctggccggggagaagggccgctggctggtgcaggcagccgagacatgcctgtcctctaggaggaggcagccacgtccatcaggccctgagccttgcttgagcactcatgagggctgtgatgggagacggggtggataaggagggtggctgtaatctgcgcctcctgagcagttcggggcgatgtgctttgtctcctacaagcctgagatctcctttgaccaccctgcagaaaatgaaaccgcatctccaggctcatcacctgcctgaggccacatctgggtctggagggaactctgggatccaaacccaggtgtccttcttgaattagcagccaaacccctaaacggcccggcctcggctggcccgcacttcagttatgatctaagtcatgaacgtggtcgcagaactgga

SEQ ID NO: 464962 - DNA, 1000 bp, Homo Sapiens
ccattttaacagctacccctggaccaatgtttactgagtggcggggacttactcgctctgcagccccctctccagtctgtgggacatagcagcctctgttgcaggagggaaaagaaggcccagcggcccacggccagctggaagagggcagcctgggcccagactgcggtgggagtgcatctgcagatggggtgcgaccaccgctgggacaggctgggcatgtggtcctgcacagcactcaggtgagacgatgtccaggctccagagggtggctcagcggggaagccggagagcctacgtgacccacacgagaagtcttcaagggccgaccccatggcccactgcacaggccactgctgggcacccctggctgggacctggatgtgccacttggaatgtctgagaaccgcacatcccagcaggtggcccccaggcaggtggcctctgagaccacaggaagtgactgaccgttgctgggtgagtggggctgggatctggggaagctgagaccctctggaggggtccgagtggggcgggtgccccagtgaagctcagcacccaaggatgcacagacaggagaggtggactccagccagtgtggggtgccctgggcagaaactggggtgatccttgaccacctcgggcctgatcagctacaggaagggtggggttgcaccctgcaccccagagcactggggaagctccaggcagctgccagggccttgtcttcagggccagggacagtggccatgaccatgaattgtctgagagggaggctggggtccagcacctgggccatccggggaaggggtagcccacccagctcctgctgttcccaggggactcaggacagggctgaaggtcttttatgtgacccagagcccctgagggccccatggagctgtagccccaggacagccagcaggtgcctaggccccacagtcaggtgagaacaccccacactctcggaggggggcctggctcagctgtccgaggctgt

SEQ ID NO: 464963 - DNA, 1000 bp, Homo Sapiens; identical to SEQ ID NO: 335483

SEQ ID NO: 464964 - DNA, 1000 bp, Homo Sapiens; identical to SEQ ID NO: 335484

SEQ ID NO: 464965 - DNA, 1000 bp, Homo Sapiens; identical to SEQ ID NO: 335485

SEQ ID NO: 464966 - DNA, 1000 bp, Homo Sapiens; identical to SEQ ID NO: 335486

SEQ ID NO: 464967 - DNA, 1000 bp, Homo Sapiens; identical to SEQ ID NO: 335487

SEQ ID NO: 464968 - DNA, 1000 bp, Homo Sapiens; identical to SEQ ID NO: 335488

SEQ ID NO: 464969 - DNA, 1000 bp, Homo Sapiens; identical to SEQ ID NO: 335489

SEQ ID NO: 464970 - DNA, 1000 bp, Homo Sapiens; identical to SEQ ID NO: 335490

SEQ ID NO: 464971 - DNA, 1000 bp, Homo Sapiens; identical to SEQ ID NO: 335491

SEQ ID NO: 464972 - DNA, 1000 bp, Homo Sapiens; identical to SEQ ID NO: 335492

SEQ ID NO: 464973 - DNA, 1000 bp, Homo Sapiens; identical to SEQ ID NO: 335493

SEQ ID NO: 464974 - DNA, 564 bp, Homo Sapiens
tcatggcaggatggtgtgtgtacgggacgcgtctttcgggaggatgacggcggccttggagagccccagaatgtcacaagcgtccatgaattccttcagactctggaagctcgaaacattctgcctatggaagagcagcaggttcttgtagttttgggttgcacgccccaggcggaggtagaccaagccgtagctgtagtcagtggacagcacgtggaaggccttcacccctttcactgaaagagatgcccagagatgcccgctggttcccggatggcgtggctgtgcccgcccacagccctgaccccgtctgaaggcgaggagcacgcggagctggcccactttgttcacctttaccacggacgcccccagcttcctcttgtccctggccggcaagaatccctgggcatcagtggcagtggccagaatgtaccagaaccctgaaaacttgttccagttgagggcgtgggactccctggggtaccactcctgcacctgggaccctgcagccagcactagcaccagcaccagcaccagcgccagcaccagcagcccctgcctcat

SEQ ID NO: 464975 - DNA, 1000 bp, Homo Sapiens; identical to SEQ ID NO: 157397

SEQ ID NO: 464976 - DNA, 1000 bp, Homo Sapiens; identical to SEQ ID NO: 335495

SEQ ID NO: 464977 - DNA, 862 bp, Homo Sapiens
tgcaagatttgttttaattaaatgccatttacttttaactagccagtttatcctttttaaaaattttattgtttctctgcacaatttgaaccaaatttggaaaagttatgggtaaaagtgggtagaaaagactgttaagaattgggtcttattgaaatcaagtttccttctgtgttgtgcagcctgaataatgggcgaaatctgtcctaatatcttgctgcatctgtcctaactcactccttttacagggcctcagcagaggaattgcataacaatgtaacttgtatcctggttaaataggaaggtctctgaagcacatgtccaggaacattccgcttcatggcagaggagccaagattgtaccttttaagagaaagcactgtttccttaggcaacataggttctttgttggaacccaagagcgcctccagtggcaggcgtgcttttgcctctggataaatggaactgccagaggctcgctctatccatcctgtgtagagcacacactcagattctaggatctcaaagaaatgtacttcctggccctctataggcaacaaagtcaccataatttgaagctattatggaagaaagtccaaaatttaacttccattcgctttattcagcaagtttttataaggcagatctcatatggactatgctttgcataagcacggtgttagatgggaagaaaaaagtggtgggatccttcctcctcttcctttcttcccagctcctgctattcatggaatttcccttgatttcaagtggctactcaccaaaatcctcaactgaaaacagcttccaaggggtcatgtacttattcaattctcttctctcttttctccaaacacaacatcat

SEQ ID NO: 464978 - DNA, 1000 bp, Homo Sapiens; identical to SEQ ID NO: 157398

SEQ ID NO: 464979 - DNA, 1000 bp, Homo Sapiens; identical to SEQ ID NO: 157400

SEQ ID NO: 464980 - DNA, 1000 bp, Homo Sapiens; identical to SEQ ID NO: 335499

SEQ ID NO: 464981 - DNA, 1000 bp, Homo Sapiens
ttttttttttttttttttttttttttttttttttttttttttttaaaatagcttctttattttgagctacagcatggacagcaccaacaacacagtactctgcaaggatttctttttttgtattttacagctagtccaaatttctctttagtattgttaacatactcttttgtactattcactgtcatttcaatattattgatgctctctccttgttcctctactaaaagagatatctgaatgaaaagatcccttaaatcctttatttggttctccaaattaacaagttccttgtgtctctgttcaatctctgaaagttgtgctttagtgatattgatttctgtaagtaagctttcattaaaaacttcccattttccttgatgaagcatatcatttacatcttcttcagacatctcttttccagcaacttcaagctgacgtaaaataaatgtcttgcacttctcttgctttgctgctattgtgtcattgtatataaacatgatttgctgaaaatggcggaacattgcagcatgctgagatttaagtatccttgtgaccactgaagatggaccattttcaacctctgactttttaacttctttaactaaatcattcaaacttctgttgatgtattctgcctgaatttttatctcctttgtaatggtagactctctcttaagtagactaaaccttctcattgaagccaccagacttttctgttgctgcccaaatttttgaacattatctgccaaattgttaatactttcctgtagtttttggatttcatgtaggtgtctctcagctacaggctctctttcataaataacagcttgctgtagaaacaccccttgttcctctgtttctgtagttgatacatgactgtctctagagagttcaatttcctttgttctctgctttagttcttgaagtcggtctttcatcttccctttcctcctttctgttttcttccttttgttggttttccacctgcggtgttgga

SEQ ID NO: 464982 - DNA, 1000 bp, Homo Sapiens; identical to SEQ ID NO: 335500

SEQ ID NO: 464983 - DNA, 1000 bp, Homo Sapiens; identical to SEQ ID NO: 157401

SEQ ID NO: 464984 - DNA, 1000 bp, Homo Sapiens; identical to SEQ ID NO: 157402

SEQ ID NO: 464985 - DNA, 1000 bp, Homo Sapiens; identical to SEQ ID NO: 157403

SEQ ID NO: 464986 - DNA, 1000 bp, Homo Sapiens; identical to SEQ ID NO: 335502

SEQ ID NO: 464987 - DNA, 1000 bp, Homo Sapiens; identical to SEQ ID NO: 335503

SEQ ID NO: 464988 - DNA, 1000 bp, Homo Sapiens; identical to SEQ ID NO: 157404

SEQ ID NO: 464989 - DNA, 1000 bp, Homo Sapiens
acattcgaaggtcaccaggtgtaagaggagagggcgatgtggccaggggcggcgaggaccacaaagcccacctgcctgaggagaactgtcgtgtccaggggcctggggaggccaccgagggacagggtcccttgggtgcaggggccccttgggcttatgtctgggagcaggaaacaaagagggccttgtgagctgacggtccctccctgccggggatggagtgacaggcgctctgaggagagaagccggcgctggggggaagcaggcaatgtgcccagagatgaggcacaacagcagccagcggttcacacagccgctgcctgagggaagaggaaaaggacgctgctcgcagggctcaggaggggccactcccctaaggaccaccagatgtccttccaggcgtcactgctgcagctggctggccttgggaaccgtgaagggtgtccagtgggagctgagctctgagcccttgggctgctcatcctttgttccgttcgttccaaaaagaacctcattctcagccagtgcctgcttagccaggtagtactcccgcttcactttgatctccacagactctgggatgtcaggcaccaggaggtccaggaggcggccaacggagaaaaccacatgctcaaacacaatgacgaaggccaggcggatggcaagaagattccagtaggtctgggaataatgtccatcgtcatcccggaaagcccgatacctgcacgtgcggttgtgcgcggcggcgaaggaggacggggctcgcgccagcgtgaagttgaggaagccgcgcaggtcgtgggcgcgggtccaccggtagtaggcgcgcggcaggaagtcggacgagaaggccaggaggaaggcgttgctgatgaccgccaggtgcgtgaggcccgccaggatgtggaaccagatgccgatgtcctgggcgcgctcggccacagggcgccggtactcgcagacgaacttgcgcgcgtccaagcggatctccacccagttg

SEQ ID NO: 464990 - DNA, 1000 bp, Homo Sapiens; identical to SEQ ID NO: 157405

SEQ ID NO: 464991 - DNA, 1000 bp, Homo Sapiens
ttaaagtttaatattttctttctcatcagaaaccaccatcagtctgttccatattctcctcatggcctgttttacttccttattcctgaaagtgtaaatcaaaggattgagcaagggatttaagatgatataaaatattgccgccattttgtcaagggaaaaagcagatggaggtcgtgtatatacaaatatgcatgggacaaagaacaaaatcacaacagcaatgtgagatccacaggtggagagagctttccagcgcccttcagaactgtgtgttctcagagagagcaagatgacagcataggagacaagcaacaaggagaagtttatgatgcagataaacccactgttgatgaccaccatgaggccaaagatgtgagtatcagtgcaggcaagctccagtaacgggtacaagtcacacataaagtgattgatgacattggggccacaaaagggaagctggaaagtaaaaagaatttgtatcatggaatgcaagaggccccctgtccaggctacccccatcagaatgccacagagcctcctgttcatgatagaagagtaatgcaagggcttgcaaatggccacataacgatcataggccatggctgtgaggacaatcacctccaccccagcaaagaagtgttcagcaaagagctgcatcatgcagccttcaaaagagatggtttttgtcacatagagggagtctacaatcatctttggggtgatgacagatgagaagcacgcatccaggaaggacaggaagcccaagaagaagtacataggagacaccagaagagcagggctgctgagaatggttactacaattagcatgttgcccccaacagttgcaatgtagacaaacaaaaatacaacaaatactatttcctgaacatttggattctgtgaaagtcccaggaggacaaactcagttacaaagctttggttttgcatgtttcccaaggaaaagatgaaagctccaacagggatcatgtatagtctg

SEQ ID NO: 464992 - DNA, 975 bp, Homo Sapiens
ttagatattgactattcttaaacgatttaaataccattcatttgaatatccaattctttctaatagctttttgagagcatttttcacatccttgtttctgaaactataaattattggattaaacatgggaaatacaacagtataaaacactgccaccaccttatcagtgtctagggaatagctagtggtgggctgtaagtacataaacaggagcgctccatagaataaggtgactgctatgaggtgggaagcacaagtggagaatgttttgcttctgccacctgaggacttgatgctcaacacagtgatgaggatgcagaagtaagaaataaatattaccacaaaagtgctggtctggatgaagctgcacaaagcaaagagcagaagctggttgatctgagtgtctgtacatgataaagccagaagaggtgggatatcacagaaaaaatgattgacgatattggagccacaaaatgacagcctgaatgtgaggcacacatggaccagtgatgttgtacttccactgaaatatgccaacacaatgaagcagacacagactctcctagacatcagtgtagtatagagcagtgggttgcagatggctgcatagcggtcataagccattgctgccaggataaggcactcagcatcagcaaaagaagcgaagaaaaacatttgtagtgcacacccataaggagagatgcttttcctggatgccaagaagtttgccagcattttaggagtgattgctgtagaacagctgatgtctaagaaagataagttgctaagaaaataatacatgggaatttgaaggcttgaattaatattaactagaattattaagagtatatttccgaccatagttaatgtatataccagaaggaataccaagaacagtgtgactctgagaggtagataatctgtgaatccaacaaataggaactcagttggcatggtgtaattactctccaacat

SEQ ID NO: 464993 - DNA, 1000 bp, Homo Sapiens; identical to SEQ ID NO: 335509

SEQ ID NO: 464994 - DNA, 1000 bp, Homo Sapiens; identical to SEQ ID NO: 157406

SEQ ID NO: 464995 - DNA, 1000 bp, Homo Sapiens
ttttttttttttttttttttttgaaattttcacaagaatggaaaatgtttaataaactcagaatggtgggcttattaaactatagtgttatttacagccataattcatcaaccacaaacacaataatgtgtttgcatggcatgctacaacagaagctttattcagttcattcagaaaacattggcaaaataaatttcagttgcaaattcacagatacaagcttcaaagtataaagttgtatataacaaaaaatacaggtaatatttattacaataacttacagatacaaactaatgataaactacaatttcacaaaagattgtaaacattttgcacacttgtcagtcctttcttttaggcaaagtgctcttttgatgacaaataaattaacagatacacactagagtgaactatttccagacaatacaaaaaatgttttgatttgttttcttcttgtaaacataagttttacaaaaaatgaagaattaataaaagtgtcttgcaggccaactatagatacatacctgggcagcaaagtgatgttggaaatgctttaggtgttaaataaaaaattaacagtaatatcttttcaatggtattttatacataataaatgacaaatttatatccttaatcaagtctatccctgaaaaaagaattaggtatgacttattggcagttgtgtcattgaatggggtaacaagggctggagtccaagagttgttggtgaatgagcatccatataactatgcagcgcagttaacatcgttccatcttggggcacgtaggcagaataagccatttcttctaacatgggtggagacagcctggagggtgggactgctgtgactggggtggaggatgagtgattaggactgacgtgtttcttgtggcgtgctctacaattctgaaaccacacctgtatcacacgtctgctcaagcctgtcctttctgccaatttctggagtgtctgtgcatctgggttgttgtcctgagcaaa

SEQ ID NO: 464996 - DNA, 1000 bp, Homo Sapiens; identical to SEQ ID NO: 157407

SEQ ID NO: 464997 - DNA, 1000 bp, Homo Sapiens; identical to SEQ ID NO: 157408

SEQ ID NO: 464998 - DNA, 1000 bp, Homo Sapiens; identical to SEQ ID NO: 335512

SEQ ID NO: 464999 - DNA, 689 bp, Homo Sapiens; identical to SEQ ID NO: 335513

SEQ ID NO: 465000 - DNA, 975 bp, Homo Sapiens
ttagcccaaggtcataaaaatgaatggtccaccgtgagaaatcccggggtccctttccatggctttcctcatggcatttttaatctccttattcctaaaactgtagatgatgggattcaccacggggatcaccaaggcatagaatatggacaccaccttgtccctgtttagggagtagctggaactgggtcgcatgtacatgaagaatccagaaccatagaagagggtcacagcagtcaggtgagaggcacaagtgctgaaggcctttgtcctacctgtagctgagctgatcttcacaacagcagcaacaatgtaaccataagagatgaggaccactagcacagacactattccaacgacaacactgactatgaaggtcaccacctcgctggtgaaggtatcagagcaggacagagccaggactggagggaggtcacagaaaaagtggttgatcatatagggcccacagaaatcatgctgatagacagagtatgtttcaatgaaagaactaaggaatccacccacataggcgccaaccaccatctttaaacaaagtgtatgggatatgaggactgtgtaaagcaaggggttgcagattgcagcataccggtcataggccatagctgccaggagaaagcattcagtcagccccatcccacagaagacaaagtactgagtggcacagccaacaaaggaaatggttttctgctctgtgatgatgtcagacagcatcttaggggcggtggaggacacatagcagatgtccaggaaggacaggttactgaggaagaagtacatgggcatgtgcaggtgagagtccatcttaatgagggcaatgaggcttaagttccaggccaacgtcaggaggtagagccccagaaataacatgaaaaggaaaatcttcatttgaggatggtctgaaagtcccaggagaatgaattttgtcacaattgtgttgttccttcctacagccat

SEQ ID NO: 465001 - DNA, 930 bp, Homo Sapiens
ttatttgacacttgaaatagctttcctactacacaatttcctaatggcatttttcatttgagcattcctcaaggtgtagattaaggggtttaacatagaagttatcatagtgtagaatacagcaactgctttatcaatgggtaaagtagctggaggtctcatgtacacaaatatgcagggtataaaggataagatgacaactgtgatgtgggagacacaggtagagagggcttcatgccttgcctctaagctgtgggtctttaaggagtacagtatgaccacgcaggagaccaggagcaagagacagtttaacaggcatatgaacccactgttggcagcaatgaagagtcctagagtgtgggtattagtgcaggcaagattgatcaaagtgtagagatcacacataaagtgatctatgacattaggaccacagaaaggtaattgacagatgaagaggatctgtatggttgcatgaagaaagcctcctacccatgacactcccactagcaggctacaaacatgctgcttcatgatggtggtatagtgcaagggcttgcagatggccacatagtggtcataggccattacagtaagtaggatgacctcaacacctctgaaaaaatgttctccaaagacttgagtcatacatccattgaataagatagtcttgttttcatagagtgaatctgtgatcagcttaggggtattgacagaggaatagcaggcatcaataaaggagagataggccaggaaaaagtacatgggggatctcagtgatgggctggcagtgatggtgaccacaatgagcacatttcctatcatggcgttgatgtagatgacagaaaacacaacaaatatgattttctgcatttttggattctctgtaagccccaatagaataaactctgtcacattgtttctattcgccat

SEQ ID NO: 465002 - DNA, 1000 bp, Homo Sapiens; identical to SEQ ID NO: 160017

SEQ ID NO: 465003 - DNA, 1000 bp, Homo Sapiens
ttttttttttttttttccattttaatgttttattttttcaagttctctattaaactacataacatttggcagcaatttcacattgaacactgagttgtaacagcacagttttgttcttgagaagacatattttctaagtgatgaaatgaactttctaccttccccatacttaaggtttcctagcataagttcagtttaaaatgggcctgaggaaacagtctgttttaatttctctaacagaaccaaaaaaaatgcacaactgtgattaagttacttagattcacttcttcattttacaaaatacaaacaggagaatttgagcatatcttgctctagaaagaatcctccaaaatgataaatcccaattatgggggctaggtcataatgcagttttaaaatctttatattaactatgagattctcacagatacattgccacaaaatattttttaaaagccatagatagtcaaaataaaaaatgtctaatttgtgggtggtgacagttatttccccacaggtactgaatatgtatcctggcacaaatcatcagcacaacacaggaacttcccggcagaggtgaacaggtcagtttctgaacagcagcatccgctcggagcacttctgccccaccaggctggcgtactgcagaacagcagcctcctcacttgggtctttctgctgtttcttataaacaccgtaaggcatgatggctctcttgtgaaacacctgcaatcggtcaggttccgtactgcgatcctcatccactgcttctgggtcctggttgaaacggcagtacttggagttttcaagtgaaggcaggcattgctcaatgggtacccaaacatatgtctcagggcacagcaaatcagaaggtctatactgacccttatatttcatcttgggacatgaatgaatgtagaaacccatataataatagctgagttgagaagttttctcatgaagctgcctagtaaaagcaatttctcgtagtgcagagtag

SEQ ID NO: 465004 - DNA, 1000 bp, Homo Sapiens; identical to SEQ ID NO: 335516

SEQ ID NO: 465005 - DNA, 1000 bp, Homo Sapiens
ttttttttttttttttttttttttttccagagaactgggtgacctttttcttcaaattttcatctggcttatttgagggtcatttggtagtgaaccatgtgatcataaaaaaattgttttcaatttagaacatatttgcaaagtattttccaggtgtgacaaaacaaaatccagattaaaacggttctcttccatttcatcttcagcacttgttttcattttcatcattgaaactggttatcaggcaatcaaaaataacagaaaatgtaagtattccaaagtgttaataattcatttaaagatactgctctctaatgtttaagtatgagaacattattttaaaaaggatgctcaccactgtcagtaaataactgaatccttttcaaaatgtggaaatagccaccagatctcattattgtgtaattcatgtacagtaagtcatcttattaatctaccatgcaaggtgagtttactaaagctatttacaaattactgtaacaaaattgcagaaacctagactctgctttagtctggagtgtcagtgatatttcatgctacagagcatagctctctaaaactccttatgcaatttagaatttagtgcagcaatcttcccgactcttaaacttcaaaaccgcatagttatatgtagtagccatcatgtagatcagcagggcaatgacggtggcaccagctcctgcacaggccacaatgaacaggtgataggacatgtagaactcgtttgtgttgcagatgttctccagggcagagccacatatttttccggggaaagcattccaaggaatgataccgtattgtcggatatccacacagatctgctccacacccgtggtcccgttggtctgcggtgacttgatgacttcacaagttgaccatatgttgtagaacataaacacgggcaccgctgagaaaccaaacacacccagccaggccactccaagcacataggtgaggaaaacgaacattccactgatgcatc

SEQ ID NO: 465006 - DNA, 1000 bp, Homo Sapiens; identical to SEQ ID NO: 335517

SEQ ID NO: 465007 - DNA, 1000 bp, Homo Sapiens; identical to SEQ ID NO: 465005

SEQ ID NO: 465008 - DNA, 1000 bp, Homo Sapiens; identical to SEQ ID NO: 335518

SEQ ID NO: 465009 - DNA, 1000 bp, Homo Sapiens; identical to SEQ ID NO: 335519

SEQ ID NO: 465010 - DNA, 1000 bp, Homo Sapiens; identical to SEQ ID NO: 335520

SEQ ID NO: 465011 - DNA, 1000 bp, Homo Sapiens; identical to SEQ ID NO: 157412

SEQ ID NO: 465012 - DNA, 1000 bp, Homo Sapiens; identical to SEQ ID NO: 157413

SEQ ID NO: 465013 - DNA, 1000 bp, Homo Sapiens; identical to SEQ ID NO: 157414

SEQ ID NO: 465014 - DNA, 1000 bp, Homo Sapiens; identical to SEQ ID NO: 335523

SEQ ID NO: 465015 - DNA, 1000 bp, Homo Sapiens; identical to SEQ ID NO: 342528

SEQ ID NO: 465016 - DNA, 902 bp, Homo Sapiens
ttaagttctcagcacccattgtaatttatttgtgaatgaatgggaaaagggtatcagtccaaggggagatcaggtggttcctcctcatcagagtcaaactcaacattttcatcttttacccatcgacctcgtccatctgggatccatccagagaagggtgagataatggtccagggctcgtcttcttgtggggctcatgggtgcaggggctgagacagttgctgactcctcggcctgtgggccagccgcaggttcaggttccctactgatcttcccactttggagtttgacctctgagggtggcataggggaaagggagacagagggaccaggggcttctggtctgtacttccggcggcagcaactgttatagtggggagctctgtgcagagcactctgggtgataagtcgtgtctgagttagcagaggagcctcagctttggtttcttcccttctcaattcattctgatgttttggattctgctttctttcctttcccggctgcttcttgccatagaaaagctgcaagctggacagatgtttcttgcctgcacggtgggcagtcagcatggccagggtgtccagtaccggtcgatgggggcagatggcacaagcaaagcgtccatcccgaagcatcagcgcctcatcctctggaatgtaactggctaggaggtccccgactcttcttttcttcagggagcgactgaagcggctccagatcctctccgctcacgcttactttgagcacattgagttgactccaatcgtctccttccctcttgaaagacatcacgactgtgagtcccagaagtgataaattctctgttccggtttcgccactcctccaggccaccgtagcaagagcgggacagcgccttctcttttttccttctcttcctgtc

SEQ ID NO: 465017 - DNA, 1000 bp, Homo Sapiens; identical to SEQ ID NO: 335524

SEQ ID NO: 465018 - DNA, 1000 bp, Homo Sapiens
cctgagggagggtcccagggccgccgccggcaatccagcaggcaagagcatgcctgaagagcatgccccaggctctaccgtctgatcctgctccttctcctcccagtcatgactcagggtttgacgagggccttggcgtttcacggagatgtttattcatgagagttttcatatcaaaacacaccgagaccacatctatatgccgagaacacaggcacccagaggcctccagcaagatttgagtagtttaatgagttttcacttattggataaaagtgtcaacatagtgatggcaaaacaaacgcagctccagcccttgtttccaccttgttgcagctcaggggcgctgtccccagcagccatcggcgccagcatgaggaaggagtctcaggatgcccctccagcgagagccaggtcgggcctcactccttgaacttccattcctggcggcacatggggcagtgctgctgcacctgctgtgcgtgcagccacttgaggatgcaatgcatgtggaagcagtgggagcactggccccacaccagcgggcagtcgtcgccgggcaccttgcctacaggccctgggcccatctgcagacacttgatctgtgatgccaaaaaggtcacatgaatggtcaaggcaccaaggagacgtgcatctgagtagtgaactggtctcttgatcaagggcaggaggggtggggtctggggacctagaagactcttccctagacatcagggatccggtgtgctgcccaggcgttggggaagctgtgttgatgggcacctgtggatgggccctgcctcccaggacaggcacaggctgcgggcaccagcccaaacacctagaaatgctttctccatggagaggacagtcagggcagcatccgttaaatgccatcctgcagatgccacagttctcatcgttggccacccagagccaagtggccacgccgttccagcacttaatcttcaccttcatggcagcagagccttcgccaacc

SEQ ID NO: 465019 - DNA, 916 bp, Homo Sapiens
cctgagggagggtcccagggccgccgccggcaatccagcaggcaagagcatgcctgaagagcatgccccaggctctaccgtctgatcctgctccttctcctcccagtcatgactcagggtttgacgagggccttggcgtttcacggagatgtttattcatgagagttttcatatcaaaacacaccgagaccacatctatatgccgagaacacaggcacccagaggcctccagcaagatttgagtagtttaatgagttttcacttattggataaaagtgtcaacatagtgatggcaaaacaaacgcagctccagcccttgtttccaccttgttgcagctcaggggcgctgtccccagcagccatcggcgccagcatgaggaaggagtctcaggatgcccctccagcgagagccaggtcgggcctcactccttgaacttccattcctggcggcacatggggcagtgctgctgcacctgctgtgcgtgcagccacttgaggatgcaatgcatgtggaagcagtgggagcactggccccacaccagcgggcagtcgtcgccgggcaccttgcagtcagggcagcatccgttaaatgccatcctgcagatgccacagttctcatcgttggccacccagagccaagtggccacgccgttccagcacttaatcttcaccttcatggcagcagagcctcacgttgaggatatcttcaaagatctcaaatgggcctggccaacatgacgaaactccgtctccgcagctcgtctgcagcggctgccgcccgccgaagccgcgcccgccggaccccaccgcgagccgagcgcacagtcctgggcgggagcggaaacaaggactcccagcagctcccaggcacccgccgcgcccgtagcgcccccagcgcccccagccctggccgatc

SEQ ID NO: 465020 - DNA, 1000 bp, Homo Sapiens
tttgaaagtctatccagggggcctttaatagctgagaagtgctgctctttcagatgggggtgccaagcaggccggtgaccccaacctccaccccctgcccctgagaagagactgggctgggccagagaccaatccacgggggaaaggccaccagcacccatcaggcttcccactggcaccctgaaacctgcccaggctgggccgccagcgtcgtccacaggccttggccagcgggggccctcagggaagcaacccagctcgcatctggaaggccaggcagtcccctcgggtggcttgctggggaagaaagcacacaggaggaggggtacatcacaaacagagctgggggcggatggcaggcagaggggccacacccaccttgttgatctctctgtgtcgttctttggttacgatttcctctaggacctcgccatctcccttaataagcctggtgcgccccgtctcagggtccaccaccttgcggatgatgctctgccgggcatcccactcctccttggtcatgggcttcatggcctggattcgggacttctgctcatccgtcaggactgggccatcctcttcctccccagctgatcggtgccactggtccagcgaggggcccggcagagcctccacctgctgtgcttccgccttctccttgcccttcttcttcagcttcttcctcttcttcttcttcttcctcctcttgtccttgtacttcccccgcttcttccggccatcactggaggaagaggaggaggacgaggaggaagaagaggagctagaagaactggaagaagaggaggaggagctggatcttgttctcctccgggccttctgcttgcttctctcttgggatgtggaggccgagcagttcctcgaggtgtctttcctgctcttcttctttctcttttccgacccccgtccccgggaccggctgcgactcctcgagcgcttgcgggagccgacgtgagccatggcgccgcgggctcgaccgccc

SEQ ID NO: 465021 - DNA, 1000 bp, Homo Sapiens
gactgtttaaaaacactttatggaagctcagggaaaacgtaatctctggcacaagaagtaacaaagacagcagaaaagcagaagcatgtctttggccactgtatacaaatcatcacatgaggcaggcacccaggatagaggcagcagctcacactgcagtaaacacgcaggatgttgtagaccaaattgaccaacgtaatgcaggtaaatcactggaccaaatggcacccacccaagagggatggaatgagagggatgtgagccaaattttgtagcctgtcattgcaacagccattagaccaagagtctgagagacttgccattcagaaggagagttctttatggctgctaaaagccaggcgcctcattttcatcctgagcaggctggctgactctcaaacaaaggccagaattatagggccacacaagtataggcaagttgctgagggaatgacagagaaaattaggcctgagcccaacccattctgttacagctttgtgaggcagaaactgagtgagggctagtgggtagcagagggtatttcgggcgttgtttgctcagggacaggaaatgggtaaaatggttggagaagaaaatggtgtagctctccagtttataaagttcaatcacatccaatattgtttgatcttcccaacggcctttgaggtaagcaagagacagattgttagtctcattttatagaagaagaaaggaggctcagaggtgactgattgccccaaagtcacatggcttgaagttggtggagcttaaactcaaagcccactggctctcaaggccccagtcctactcctgtaggaagcaggactcaatgccagaagatggggctcaatgccgggagatggggctgtttgacagctagagaaggagagacatgcatcccagagccttcaaaacagagtagttggtgcacacgcagttatcagaagatgggctttttattttgtccattgttttcctcaatgctggcaccaaagtgcc

SEQ ID NO: 465022 - DNA, 1000 bp, Homo Sapiens; identical to SEQ ID NO: 335526

SEQ ID NO: 465023 - DNA, 1000 bp, Homo Sapiens; identical to SEQ ID NO: 335527

SEQ ID NO: 465024 - DNA, 1000 bp, Homo Sapiens; identical to SEQ ID NO: 335528

SEQ ID NO: 465025 - DNA, 1000 bp, Homo Sapiens; identical to SEQ ID NO: 335529

SEQ ID NO: 465026 - DNA, 1000 bp, Homo Sapiens; identical to SEQ ID NO: 335530

SEQ ID NO: 465027 - DNA, 1000 bp, Homo Sapiens; identical to SEQ ID NO: 157415

SEQ ID NO: 465028 - DNA, 1000 bp, Homo Sapiens; identical to SEQ ID NO: 338979

SEQ ID NO: 465029 - DNA, 1000 bp, Homo Sapiens; identical to SEQ ID NO: 335533

SEQ ID NO: 465030 - DNA, 955 bp, Homo Sapiens
ttttatatatcattctctgaagagcatattttattaatcttcaagttcctcagcatattaataataaaaacttgatatatattatcaacaagtctgactgttatgcccaaagaaaatccagattattttaaggtgagtttgcttctttttcatctgattcatcatccataacctgttctacgccttctacctccggaatataaaactgcagcatgttctgaattccatttttcagagtaatgattgaactagggcagctggtacaagaaccctggagtttcagctgtacaatgccatcttcaaagcctttgtagattacatcccctccatcttcctgcacagttggccgtattctagtatctaacaattccttaatcattgccacaacttcatcatcttcttcagatcctgcttctcctgaaggtgtttcctcagtaaccaggggtaagccagatgcaaagaagtccatgattgttgcataaatatctggtttcagtaaattccagtctaattcttcattttcctttgtgacagtgatgaaatctggtccaaagaagacactttttactccttcaatcctaaataactgcctgggtgataaaaggctgcaggtagtgggaaaagtggtctttgtacaaactgatgcagaggctgtttcttaatggtgtatggattcttcaacatatgacagaaccgcctgcgcagcccggcggcaacagccgcagctccccagccccgcctggccgtcgccgccatcttagtccggagtgcctaagggtctccctgacagaaccacgaaagatctgcgcagccgcaggctggccggtagctgggcgggcactgggaagagcccaccctaccggctgcgggcggtcctgctgcggataagtgcggtggcctacgcgccgaggtttgcaggctactgcgtcaccctgaccaagagaggccggggaac

SEQ ID NO: 465031 - DNA, 1000 bp, Homo Sapiens; identical to SEQ ID NO: 335535

SEQ ID NO: 465032 - DNA, 1000 bp, Homo Sapiens; identical to SEQ ID NO: 335536

SEQ ID NO: 465033 - DNA, 1000 bp, Homo Sapiens; identical to SEQ ID NO: 335537

SEQ ID NO: 465034 - DNA, 1000 bp, Homo Sapiens; identical to SEQ ID NO: 338322

SEQ ID NO: 465035 - DNA, 1000 bp, Homo Sapiens; identical to SEQ ID NO: 335538

SEQ ID NO: 465036 - DNA, 1000 bp, Homo Sapiens; identical to SEQ ID NO: 157416

SEQ ID NO: 465037 - DNA, 1000 bp, Homo Sapiens
tttttttttttttttttttttttttttttttttttttttttttttttttttttgacatttggatagtgccgtttattgttccagcaccccttcctccaccacgcccaggcctgggacaaacgggcacccgcctcctgcggcgctgcctctgctacccggaatccaggaggggaaggaacgactcgagctctaaggatgggacccggaaggcagaaaaaaataatggattggggcgggcggggagtcaaaaggtgggctgattaaaagaaaattctaaaagagaaaagggcccctggttctcttccctctctgggatcctctaaagggcctggtttctccattcctcgcagcaccccccacccccgccccggacaactgaggaagggcagggaaaatggccttccgcttggggcctggtcgccactcggcctctgcagttctctccattgtctctccggctcgcaggccgataacttaggaagggcgggccaggctgagggggcagagtctcgaggcggagaagtgaacgggccctaatacgccccagtgcccccccacggacggcgcagggacagagggcggggagccggggatgccgcggggtccatcgcaccccgtccgcttctccctgggtctcttggtcttgcacgtcgtcgctcccgccaagcccgaggggccctgcccgcccccccccgggcccctcccctaccggccctccccagcgcggcactcggggcaccgcccgcccgcggcctcgtcgtcgtcgtcctcctcctccccgcccgcgcggtagtagctctgtccgcagctgctgcagaccgagggcgcgcccaccgcgtggatcttcttgtgtctccggagcgcggcgccctgcacgaagccctccccgcactccacgcagatgtgggccggctcctcgccccccgccgccccgagcccgtccccgtgctgggcccgctggtgcgccaggagcccggccccgtgcccgaagcccttcccg

SEQ ID NO: 465038 - DNA, 1000 bp, Homo Sapiens; identical to SEQ ID NO: 335539

SEQ ID NO: 465039 - DNA, 1000 bp, Homo Sapiens; identical to SEQ ID NO: 335540

SEQ ID NO: 465040 - DNA, 1000 bp, Homo Sapiens
ttctttaataactaactttattattcctaaaatataaataaaaaataatgcacatttttcagcatcactatacacatgttcattttttggttttagatattaatctatacccagttcaaactgtggaaactgaactaacatgactgaaataaaatagtgttatattttgttctttagactcttttttcccttcctgagattttgatatgtacttggagagttttgagtcaatatttatttgatttgttttcttttctggagtgatattgtaaatactttaaagatttgtcagtcattctttcatgtaacaacaaaaaaaaatcaggtagtttacctcacaattcaatcacacaagtgcttttcctcaagacaactatcatacttcagacacagaggtactttatgcacactacccatgtcatcacacagaatattttaaaaaacacacattcaagtgtagagagttaataaaactaataacattttaatacttcatcagggattgggtataactgggtaatactcagttgagtaatgtagtttactgtgagtgcacggcaggtgactaatacagaaactacaagtacactttggtggcactaccttgattcacactaaggcaccagcagcttatccaccattactttagcatcaccagtgcaaatgccaacacagtggaaaaggaaaacagtctttgattataatgacaacactgttgaccctcaaacctctgaaagggtcttggggaaccccaggggattgcaaactacaatctgagaactgttcaactaaggcaattctttcatgtctaaaaaagtgtacatttatacacaacatatatgtatgtatgtgtgcatatacatataaactatgggttaggctggattgaaatcccagatccatcaactgccagctttgggatcttgaataaatctttcaacctctatgagcctcagtttcctcaactaaaaaatgaggataataatagtgtttacttcat

SEQ ID NO: 465041 - DNA, 1000 bp, Homo Sapiens; identical to SEQ ID NO: 159653

SEQ ID NO: 465042 - DNA, 1000 bp, Homo Sapiens; identical to SEQ ID NO: 157417

SEQ ID NO: 465043 - DNA, 1000 bp, Homo Sapiens; identical to SEQ ID NO: 157418

SEQ ID NO: 465044 - DNA, 1000 bp, Homo Sapiens
ttttttttttttttttttgagcatctctctgcagaattggaatctttttccactctgcttttattggctgctgagaaaaagtctctctacaaatgctttttcacactgtgtcacagctcccacctgcccttccagactgcaaagccaccttgccaggaaccacagacaaaggccactggtcaggtgacgctttttaattggctggtgtctttggagaatatcaagagtcacatgtgggccagagcagaaagcagaagcccagtgctcagggtgaggccttgggggaaacaacggtctgcgcgggagatcagcgatggctgaagaatccctgaggatggttgtatttaaatggcttcatcctgctaggacccctgaagagccgcagacacatcttctcctggggaaattccttgggcccctccacactgtcgtcatggctctcggtctccaggtaaacatccagcagcacacacagccgctgcagctggttggtcaacagctggtggctgggccaagggccacacagctccttgtagcacacattgacttcgccctccatggcccgaatgttgtcatcgttgctgttggttttctcccctttccagttcaaacagagctggaaaacaggtgggatggaggagtagccagggttcaacaccacagcggcctgcagtttggctgtgcccctttcgatgagcgccatgtagtagagattggtgtccccagccagtcccgcatccacaatgtctttggtgaagtgcagctccatgtaatcctcatgggcaactgtcacccatttcaccaggcgagagacaaccttggcagggaagaggtactggcaatcactggtaactggcacaatgccatgttctagggatgcaaactgtttgtggagggccaggcgggactgcaccctggtcttcagaagtttcatggtggtctccatgtggctggcgctcagcgagtggtcagcaatcactgtttgctggggctgctcttt

SEQ ID NO: 465045 - DNA, 1000 bp, Homo Sapiens; identical to SEQ ID NO: 335545

SEQ ID NO: 465046 - DNA, 1000 bp, Homo Sapiens; identical to SEQ ID NO: 335546

SEQ ID NO: 465047 - DNA, 1000 bp, Homo Sapiens
ccacacctatggaatcacggggatacttttataggttttccatttttgtcatactggtacaccagcatcttgatgcagtgtgagtttgccggcgagatccaggggctacttgttatggaaaagttatgattggtgtagaactgtacaggttgcttctggcacttgaagaaagccttgagcgtggcggctgccatggtgcggaaccgcttgctgatgaagcagtagaggaagaagttgatggctgtgttcagaagggctagcatgttggcaatgtcggacatgatgtgyaccagccagcggttctggatgggcgccccatagaggtggtaaagaatcatgatgatgcggggggcccaaagtgtggcaaagatggaggtaatggtgaacaagatggcggtggtcttccccgtggagtagccacggagacgaaaattgctcttcctcctgagcttgtacacaatgattgagttcaagatgaagaagatggagcagggcaccaggtagacggtgaagcagtggatccagatgaggacgtgatgcacagaggtgctgatgtagtcttcagtccagatgttgggccaccagtaataggggatgctggtcaggaagcaggtgatgtaaacacttacaatgactttccgggtgcgggctgggtatgagaccgtgtggtacttgagcgggtggcagacagcgatatacctgtcaatggttaacggtacagtaatccatatggaggtgtggatggatgagaattccagcacttctatgatcttgtcggggacctgaggcatctgcatgttcaagatgaaatcttccaacaggaagtccacaaacactatgaaaaagaggaccaagatgtcggcagcagcgagtgccaagagatagttgtaggaggacttctgtcttcttgccaccagctgggagaggatgatcactgtcaagatatttgctggtaaaccgaggcacagcaagaggctgtagtagaccacgggcacgaaac

SEQ ID NO: 465048 - DNA, 1000 bp, Homo Sapiens; identical to SEQ ID NO: 335547

SEQ ID NO: 465049 - DNA, 832 bp, Homo Sapiens; identical to SEQ ID NO: 335548

SEQ ID NO: 465050 - DNA, 1000 bp, Homo Sapiens; identical to SEQ ID NO: 335549

SEQ ID NO: 465051 - DNA, 927 bp, Homo Sapiens
tcattttcctactaagaccttccttaatgctttcttcacatccttattcctcagactgtatattaaagggttcagcatggggatcaccgtggtgtagaacacagaggacaccttctcctggtccagggagttacttgaagggggcttgaaatacatgaaggtaatggacccaaagaagatcaccacagccatgagatgagagctgcatgttccaaaagctttggaccggccctctgaggagcggatgtgaaggatgctgtagaggatgaaggcataggagacagcaacagctagggtgggcaccaaggtgttaaaccccgcaatgataaaaagtagaagctcattgaggtgtgtgttggagcaggagagattgaggaggggaagaacatcacagaagtaatggttgataatgtgggatttgcaaaaggacagtttcatcatggcacttgtatgagtcaaggcagagagaaagcccaagaagaaggcagccagcactagcagtgagcagacccatgaggacatgatcgcattataaagcagtgggctacagatggcaacatagcgatcatatgccatggcagtcaggaggtaaccctcagccaccacaaagaccacaaagaaaaagagctggaccatgcactcagagtaaaggattgtattcttctttcctaggaagttcaccagcattttgggagtaatgacagaggaatagcagaaatcgacgaaggacaagctgctgaggaaatagtacatgggggtgtgaagtagagggctgactgcaatcaggagaatcatgcccaggttgcccactactgtgaccacatagattcccaggaacaggaggaagaggggcagctggagctctgcttgctgtgttaaaccatctaagacaaactgagctgccatagaataattttccatggtcat

SEQ ID NO: 465052 - DNA, 573 bp, Homo Sapiens; identical to SEQ ID NO: 335551

SEQ ID NO: 465053 - DNA, 1000 bp, Homo Sapiens
ttttttttttttttttttttttttttaatagtgataaaatatacttttatttactttgttgagtcagagggttgtaaaaaaaattattgctaaagtagatatcaggcaaacagaaaggtgctttagaagtccagttaccttggagtttatttaaactaagagaaaaaagtcataatgttttcatgcaatacatacttggttctccaaataacaactgtgtgacatatagcagaaggaattaaggaatgctgcacttgtgatccatacaaaacaccaacattttaggttgtacataattagagaaatatctgaaacactttttaaaacactgtagtagccaatacatagaggcatgccgtaggtgggcacaggaatgcagtttagaaaagaaaaaaaaaaatcacataggaactactcaatttctttaaaatcactgagcaagaacagcaacattgaactttcatactgattttacacaacttctatacagtaccttgacttaaatccaagagcaaaagttaagactctcctcctctatttttggtaaacaactgcatggtaaacttagatgactcttccccctggattttacctgggagtggcctttttacatttttatttaaaagagggcaggtttggcacttttatactgatgtcaccaatgttaatatttcttgggatctcaggaagattcatattctttacagctgatacagcacgggctggagctcctgctaagccagcctcagatttttccagcttattttgtgcatcaatttgtgtaacaatctcattcatatttgtctccaataccattccccccatcaccatttctgcaagaatattgtgaaccttgtctacatggaaaatcaaatccagctcacagacattttcaaaacatttgtctaatgtttccacaaatacttgaattagatctaaaatgccaagttcactttctgaagaatccacacagaagacaaaatataacgttgcataatgt

SEQ ID NO: 465054 - DNA, 951 bp, Homo Sapiens
ctacaagatgtgtttccataagatcttctttagggccttttttacatccttattttttaaactatagatgaggggatttagcacagggattattactgtataaaagacagagacaaccttgtcttgctccattgagtagctagatgtagggcgcaagtacatgaagaggattgttccaaagaatatggtgacagccatgaggtaagaggcacaggtggagaaggctttgtgcctgccctctaacgaaggcatcttcaagacggcaatgaagatacacaggtaggaaatgaggacaatcataacacagctgatgacaataaaacttgagaatgccatgatcacaatgccattgaagtgggtatcagagcaagagagtttgagcagtggcggggtgtcacagtagaaatggttgatcctattagaaccacaaaaggacaacctaaaagtcatccctgtatgtatggctgcatttccacaacctgctaagaaggaggtagctattagcaaaaagcaaattctcccagacacgagaactgggtagagcagggggttccaaatggctgcatagcggtcatatgccatcatggccaacaggaagcactcagtccccaggaaggagccaaagaagtagaactgggcagcacatccatgaaaagaaatggccttattctcagccatgaggttcaccagcatcttgggagtgacggaagaagagtaagaggcatctacaaaagagaggctactgagaaagaaatacatgggggtgtggagacagagatcaatcttaatcaatacaatcatccccaaattgcccaccatgtttgccatatagatcaacagaaacaatgcaaagaggactccttgtagatctggattgtcggaaagtcctaagaggagaaattctgttacttctgtttgatttctgcctcgaacctctttcataagtctcat

SEQ ID NO: 465055 - DNA, 1000 bp, Homo Sapiens; identical to SEQ ID NO: 157419

SEQ ID NO: 465056 - DNA, 512 bp, Homo Sapiens; identical to SEQ ID NO: 157420

SEQ ID NO: 465057 - DNA, 1000 bp, Homo Sapiens
ttttttttttttttttttgtcattaaaatcaattcttttaattgctgaaattaacatacataattgatgtaggtgagagagatcacaagtagttggatgaaatttatagtaaatcatcctattgctggagacagtcatgaagagctccatcctgttgatctgctgaactgaaagggactgttcattcagccttcaaggacatgcacatcataaaggaggccaagcaaaaatcaaagcaaacaatagctacatgtttggaaaaatatacatcgaattacacagacaggaattatgaccagttgtgtacctgctcaagtgggaacattttaaaatgtgacagtcatctatgaatactgaaatgtgatggtcaagtggtccatcatcaacacaaatacaaatggaaatcattaaactttctggaggggccatttgaataacaatgtcaaggcctgggtttttcccagcgggattttggtcttcttatctggataagcacaggcagagatgggctgggtagtggccggtttctggatgcagctgcacgctggctggacttagcactgcagctcctcctccttggtccgccgggagcctcctgccaagctctgggcactggcatgggccgtggagctgaggacctcctcaaaactgcctccattagggttcgtaccgcctactttcgtcttgaggcttgtgacagttgtctcaaccctctcctcaaatgatttgaaagtaggagaattcctcatagcaggcatacttatggaatggcgaatggagtaactcatgtctccgaacttcttgctgatggccgttccaacgttgctgaaagctgcagttgccttttgccctgcgtgactcagggtttcatgtgttttcttgtaggcagtggtagtctgcatgtcatgccagcttttgctgaagttctgttttaattcattcatcaggttcatgccgagtttttgttttatctcaactagatgcctttctttcgctgaca

SEQ ID NO: 465058 - DNA, 1000 bp, Homo Sapiens; identical to SEQ ID NO: 335554

SEQ ID NO: 465059 - DNA, 1000 bp, Homo Sapiens; identical to SEQ ID NO: 157421

SEQ ID NO: 465060 - DNA, 1000 bp, Homo Sapiens; identical to SEQ ID NO: 335555

SEQ ID NO: 465061 - DNA, 1000 bp, Homo Sapiens; identical to SEQ ID NO: 335556

SEQ ID NO: 465062 - DNA, 1000 bp, Homo Sapiens; identical to SEQ ID NO: 335557

SEQ ID NO: 465063 - DNA, 1000 bp, Homo Sapiens
cgaggggatggagaagagatggcaatccatgttgcatgtttagtgacacaatccagacacaggtgggattgtatcactaaacatgtgacataatcaccctattactcctgaggggtgaggacccctccacaggacctgctctgggctgcatgcgattctgctccttcttctgggagtgctgtagtgagtgtgtggacggcacaggctgtgggggcggcccaacctggccacttgcctgtcctgccacttaggagctgagtgtttgggggcacatgacttactctctcggagcttctcctctgacatctgaaactcacaaaggcatctcccctcccaggagctaaaatgccctgcactgtgcctgggtgaggctgctcttggggctggatgtgtgggtctggggcagctgagggtgggaaccatgctgcctgccccttccttaccatgggaaggtcagcggcgtggcaggctggggtaggctctggcagcagagccatcagactcctgccgctcccatggggacctggccttctcagcctgagatccttggttctgaaactgactcagagctcaacatccaaatcaacagtctccgccgtccacaggacacacccaggccacccacagctcactccggctctagggtcccactctgacccaagggaatgaccaccctgatcccagtgtcacagtttggcactgggagcatctcattgcctctgactttctctgcaagcctgtaattcctgccctaaacacccacagccagggaatgtcctattgaattccgaccgacaaaaggccccaacctggaatgtgccctgcagcctctgaaccaacagccttgtctgcactatgcaggcaaagcccagctttgtcaccaaagggctgtgtgtcaaccatgcacttgcctgcacgagaaccctaattttcagctggctggtgtttgagaagttaactctggccctggtctgagtggccagctggaactatttggagt

SEQ ID NO: 465064 - DNA, 1000 bp, Homo Sapiens; identical to SEQ ID NO: 157422

SEQ ID NO: 465065 - DNA, 1000 bp, Homo Sapiens
ttttttgtacatcatattttttatagaagtgattatatcacaaagaaaaatcctgccaaacaactacaaatcaagaatctgtgggcaaaaagctcaattcatacaatgtaaacacattgaaaaaacaaatgcaaaataaaaaaagctgttgatacatcaccttgaaaaattaacacaactaaattaagggctatagaaaatgtgttcagcttatatatcatacacgtcatttaacttgaattttacaatttttaaactaatagaattcagatttattacttgaaataatggtatacccagctgttcttcataatggcaagcatattccatatacaatacaatttatttagcatagttttatactcttaagtaaaatatgttagtgattaaaagcataaaggaataaatatgccaagcgcaaaatataataatggaatagacttatgtaggtattaaaatactgcataatgacaaatactgaattaatacaactttcctattattcataatcataatatatgaagagaaaactgttcctatgcctgttttttttttctgaaagaaatctatggttttatacatttcttcaaatatttgcttgctcattttcttttttcttaaggcttctactatatatgcactgaactgtcttaaaatttaaatgaacctacatattaagattgtcaaaagaattagatgctatcaatatgaaaacaaggaatacatacaaaaaaaccataaccatagtcaagattacatatgtccttcaaatgatgtgtttgatatatttcatgctaaaatgtcatactcagtaactgttgaaagcaaatactgtaaatgccttccaatgcattcagatagaatatttcactcataattgataagaaatctcatactcatatactattgaaatatgttttgtcagtgagttataaaactttattaaaagtatatccatttaaaaaatttcactatatgcatctttttttaagattttaga

SEQ ID NO: 465066 - DNA, 1000 bp, Homo Sapiens; identical to SEQ ID NO: 335560

SEQ ID NO: 465067 - DNA, 1000 bp, Homo Sapiens; identical to SEQ ID NO: 335561

SEQ ID NO: 465068 - DNA, 1000 bp, Homo Sapiens; identical to SEQ ID NO: 335562

SEQ ID NO: 465069 - DNA, 1000 bp, Homo Sapiens; identical to SEQ ID NO: 157423

SEQ ID NO: 465070 - DNA, 1000 bp, Homo Sapiens; identical to SEQ ID NO: 157424

SEQ ID NO: 465071 - DNA, 1000 bp, Homo Sapiens; identical to SEQ ID NO: 157425

SEQ ID NO: 465072 - DNA, 1000 bp, Homo Sapiens
tttttcaggaaaatataataagaatctatttattttatatttaagttcataagtcacatccacattatgttcctggtaaaaattctgaaaggacacagcaaagagcagaaagggacacctccatagagtgtctatggacccatttttgctttccaactcctaatagaaatgcctgacccagcaccctctgggaaaatcaacctttgattcaaagagatgttgttcagcaatgattacagtcacagtcacagccacatgccatcagcctatcaggaaatctgaggggaggcagacaaccagaaggagagttgcttcctctctcaccaggaagcaactctagctccaaaccagatgggtgattcagcgccacatggagaaagataattcagccattgtgtttttaggattaagaagcactcattcactcgcggaagcctttaaatgtcactggtgcctggaaccaaatgtagtcttcccaagccgtggttcggatggaaggtctgccacatgacagggtcacagtcagtttatggccccggctgggcactcgatagttgagcttgggtcgaaaccaatcttctccacagttgcggtgtccctgtgccatgacgacggtgcccatgagtggaggagcctgaagctcgctaaaggcatcagccatgaatatggctcggaagagacggcgcaaacaagctgctgtgctcaggctctggtccacgctgtagggggccagcagagacaagtcgagttcatagaactccttggggcttagggcattgcccccaaggagaatcagcactcgcggtactagtgtccgtgcaaagaagtcctccaggtggctgaggacactctccagttctgccagggcttgttggcatttcctgctgctcacctcagtggtggcccgaggtttcttcttcagcatctcctctgcctggggagaaggttttcggtaaaagtgcttaagctgttcatagggcagagggagctgctggcgttg

SEQ ID NO: 465073 - DNA, 1000 bp, Homo Sapiens; identical to SEQ ID NO: 335568

SEQ ID NO: 465074 - DNA, 1000 bp, Homo Sapiens; identical to SEQ ID NO: 157426

SEQ ID NO: 465075 - DNA, 1000 bp, Homo Sapiens
gtatttttagtagagacagggtcttgccatgttgcccaggctggtcttgaactcccaggctcaagcgatcctcccacttcagcctcccaaagtgctggtataacaggtatgagccaccatggccggctctgggacggggctatttctgcccactagtgtatcccccatgtccaatgtgtctggcacagagctggcatcagtcaatatttatcagctgaataaatgaatgaatgagtaaacacacagagaaacaagaagatgccaggctgttgggcacccccagccccaagatcccaggaaacaacagggcccaattcaatccaggtctaaacacaaggctgctcttccatctcaagatgccgaggcctcaagctggaggttgcttcaaacctaataactgttccctgtgacactaaaagacactcattgttatgaataatcaaacactgctttttcaaggctgcagcccagagaaagtagctacagatagagaagagaggaaaaccgctggctgccacagccccgcctcattagttaactgacctgagtatcttttctgctggtcccactcccatgtgcctcagaccccacaacaaactgacaagaaacctacagcttcctttgcagaaatgcacccacttctgctgagcccaccccactagctctgtccctcactgccaggtgcccgccccaagggatcgctggtgggaggctgcttcgacctcagcctccaatgagaactattcttaggaagcaaatatctggtggagaaggggctttttctttgtgctacacgccagttatgcaataaagaaacattcacttattcaaagaacagtagccaatacagacataccagcagcgtttattccagcctgctgcctggatttcagaatcatcacatgtagcaaaggagacaggcacgaggctgctcaagaggcagcgcaacaccgtcacctggactccttgagtccacagatgcctggaccccagcccctgg

SEQ ID NO: 465076 - DNA, 1000 bp, Homo Sapiens
tttcagtcaatctatacatgttcaagttttattacaaagtatgatgggcagaaaatacggtacttcttatacaggaggtttgggggtggggcagaggcaggaaatacaaaagcccctgcctcgtgggcacagcgccaccaacactacactctgagtatctccaggcagttgttgtagcagatggcgatccagtcgggctgagttgatgcccactgcacattgttgatctctccttcagctgtgtaggccaggatagggtcctcaatggctcggggcatttgctggatgtcccagatgagagcctggtggtcatccgctgcagtgcagatgtggcaggatgaatgtggggcccaagcaatgccattgacacatgctcgatggttgtttaacctggcgacaggtgtgcagggaacccggacatctagaatcaccacctccattccatccatggccatggtggccaggtagttagggtcctgcttgttccagcagaggcgaagcagtgggtgatgctgtgggtcttcgtaaatgatggtgctgtgttctagatggcggaggtcaaacatccgcaccgagccatcagcacccacagaggcaaacatgtccctgccaccccccggcccggctaaatgcaatatcatagacctctttgtcatgggcgatcagctgggtcttcacgtggccagacacgagattcactcgccctaacacctgccctgtctccagcccccagatggtgcatgtcgtatcaatgcttgaggtacctaaaagataaggatccacctcattccagtcaaaggaggtcaggggagcacagaaatcagagttcttattattgtttagcaaacactccagcctggtctctgtttcaccaaccctccacacacggagatagtcaccgcttgttgccagtaggtctggatagacgccttttgtgtcagggatccacatgagctttgtggtggggtatgggtggtcaaaggtgtttctgcaaataaac

SEQ ID NO: 465077 - DNA, 1000 bp, Homo Sapiens
tcagatactgactggcacagaagataccgaactggcccgggattcccgagtcacgttgttgggcatcgagagggtgcagcaggacacgccgacagtggcctcgggtagctcgtcgtcctccgtccactcgttgagctcggggctgaagcactggatgcacttcttgtacttcttctcgccctcgttccagccccccaccaggtaggcgcggccatgcagcgccgagacgcccgcagtgctcactcccacctgcagcggcgccgcgtagctccactggccggtcgcggggctgtagcactccacggtgagcacgtccacgcgctccccgcgcggccccagctggctgccgcccatcacgtacactctgtcgctcagcgtgaccgcgcagtgccagccccggggtgtgctgaggttcggcagctcctgccacgagtcgctggccgggtcgtaggcgcacacagagcgcgagtaggcgttggctatgtagcctccggtcaccagcacgcggccgtcggcgaccgcgctagcgtggcagcagcgcgccacctccaggggcgtcttcggctgccactgattggtggagggcacgtagcactccagcgaggccaggcttccttctgcgttgcggccgcccgcggcgtacacgagcccgttgaacacgctcaggctgaagtgcgtgcgcttctggttcatgctggccaggtgtatccaggtgttgaagcggggatcgtatctgcagaaattgctgactgcatgcttggcttgatttcttgcatcattctggtcttcaccaccggctacataaagaaatccatccatcacagccacacactgattaaaacttttggctggcatttccgtaagcttgctccatccattttcagggtctctatacaagatgtctctgctaagggacttctcagtaaggcctgggcgtcccccaacagtgacgaggactcggcagccacctcggattcttgttcgcctagattgcaatgtg

SEQ ID NO: 465078 - DNA, 556 bp, Homo Sapiens
ttttttaactgtataattattatttttaatgtccagaatgtgtaatacaagggccagagcttcctcctggactcaattttataaattctcaattggttggtgaggccaatagggatactttttcttgtctaatttggtttctgggaaagcttcattcaagtcctcaatggtcatctgatcaaatggaattaagttcttcatcttctccatctctttctcatattctacaatcctggcctttgagagagacacccactcagcacaagatttcaccttcttctcaaagtcatccaccaagccagccttggccacattggccttgtagtaagcccagtcgatagctggtggattctcaggtaaagcagccaacctggaggtgagggtctcattccaggatttcagggaactagcaatggccttttggttctggggtatgatctctgcaaaagctacccagtcaatggtttttagagcaagttttcgcccagccattttgggatccttcaccgaccctggctgcccacggtcctccgcagcaagtaacggaagtgggtca

SEQ ID NO: 465079 - DNA, 1000 bp, Homo Sapiens; identical to SEQ ID NO: 157429

SEQ ID NO: 465080 - DNA, 1000 bp, Homo Sapiens
tctgttgtgtatcttttactttacatttgctatttacagaggagtgttgtatacataggtattattttatgtcacactgcttcagtgataactatatccatgtgtttgtatccatgtttttatccattcaactgtattaaaaggtgttgggacaggaaaaaaagttgtattactaagtacacacaaagaggttcttcaggtaaacttcaaagtattagataatactttaataacatgggcaaagaggatgcggcagagtaagaagtgatgaaaattatgcagcttcatgtttaaagtctgggctataagagtcctgagagaaggaaagtatagaagaaccttctgagttgaagggccaggactagagacatgagctcctcctttatggatatgacagattctaagccaagtagtgcttgctagcaagactgagatgtaaaaataaaaaagtttcaaagcaaatatatttccccagctcctccatacaagcagctgtacttcactaagctaccaagtttagctgtaagaaagtaagaagtttgctaatgaaaaacaactttgtattttaatttcctcttcagggacattagggatcctttgtcttttttcagtgctttgaaatgttcatgtaatgtcacaagtcctaagacaatggctagagaaaattaatattttataaaattctattagtttgaggttaaaaagaaaaatcaacggcaaatttaccaactttttcttaaaagcacagtgaatccaaaacagataaaagactacaaaccctataaaatgaatttagattcattttctactgcagaaacattaaaagtaatttggatgatttcctaaatcttaaatggtgcaaaaggcggtttgcttaattatgattgctggcgatgtggatgagtcctcctgtctgctatgaaaaatgttcttgctcagggtcccttttatgaagattcctgggaaaaatcattttccagtccaaacagctcaatgtaga

SEQ ID NO: 465081 - DNA, 1000 bp, Homo Sapiens; identical to SEQ ID NO: 335573

SEQ ID NO: 465082 - DNA, 1000 bp, Homo Sapiens; identical to SEQ ID NO: 157430

SEQ ID NO: 465083 - DNA, 1000 bp, Homo Sapiens; identical to SEQ ID NO: 335575

SEQ ID NO: 465084 - DNA, 1000 bp, Homo Sapiens; identical to SEQ ID NO: 158487

SEQ ID NO: 465085 - DNA, 1000 bp, Homo Sapiens; identical to SEQ ID NO: 335576

SEQ ID NO: 465086 - DNA, 1000 bp, Homo Sapiens; identical to SEQ ID NO: 335577

SEQ ID NO: 465087 - DNA, 1000 bp, Homo Sapiens; identical to SEQ ID NO: 335578

SEQ ID NO: 465088 - DNA, 1000 bp, Homo Sapiens
aacttttcatttttttaaatttattttgcttattacggaaaaacacaccacataattcaactagcaaagaagactgcttcagggcgtgtaaaatgaaaggcttccaggcagttatctgattaaagaacactaagagagggacaaggctagaagccgcaggatgtctacactatagcaggcgctatttgggttggctggaggagctgtggaaaacatggagagattggtgctggagatcgccgtggctattcctcattgttattacagagtgaggttctctgtgtgcccactggtttgaaaaccgttatacaataatgatagaatagtacacacatgagaactgaaatggcccaaacccagaaagaaagcccaactagatcctcagaagacgcttctagggacaataaccgatgaggaaaagatggcctccttgtgccaccgtctgttatgatttctctccattgcagcagaaagccgttcttctaagcagacagcaggtgatgatggcaaaatagaccacactcttgaggagcaggaggaggtacatgtaatatgcagaggtgtttgtgagctgcagcagtagtgtatcatttgcatcttttgaacaattgtctttgggatccattgtgatgacatctgtctttattggaggaaagataatttcttgatcaactccgtttttattattctcatgtctgacgatacatctgtgttctttgtccagtgacttttctggcaccgttaaccagctaaatttcatgtatgtgtcgttagtcttcatggtgttcccctcctgggatcccagaatcgtgttgctcttcttttcttgccaatgtatcttaataacatcagggaaaaatttctcaagaagacaaaggtatgttccagccttctggagctttgtttcagcaattgaaggaagaaaaatagtgggcttgggggaaacatctgcatcaagttgtttatctgtaatgataagctttgttccgggaccaaatac

SEQ ID NO: 465089 - DNA, 1000 bp, Homo Sapiens; identical to SEQ ID NO: 335579

SEQ ID NO: 465090 - DNA, 1000 bp, Homo Sapiens
ctcgagagaactgaggacggcgggtgacctaaaggcatcacttctacacaggtgggtttggctttgcccagaaaataaagggttggatctcagtatgaggcagggcgacggcatcaggacagggggcgaagctcggtgaagaaggagatgggcaaacgggtacgggaagtggggggctgaggggggcccggggggcggctcctgcgaggtggacaactacaccgcgacagtggaagtcaccgagctcgggagcggacgggctcggagggggagaggcagccggcagaggagcggccgggggaggaggggacagatgcttggcggcggcggccgggctgcggggcgctcagagccgggtctgcgcctcggggatgtagatctcgatgctctcggcgctctcggtggccgagttctggcggacggacgcggcgcgcttggcggccatcaggcgcttgcgggcctcctggcgctgcgagctctccagcgagcgctcccggatcagcggcgcggggcccttcgccggcttctttggcactggaggaggggcccttctctccttcttgtcaagaggatccatctgtttccaattattggcctttaactgatgaagttcatcaaatttcatactaatattttctatggacaactgcagcatgtcccaaaaccccgccaaatcctgggaggtgggtcttggatgagcattaggattcaggttttcttcacacagttctctgaactggtagaatttctgggccatgagaagttgggcactgcccactgcggttcggatttttcctagaatgtcttcgggcaggttgttttcccgttcttcccgctccatctgttgacaccacccctccatgcggtctcgctctgcctggagaagcttcaggaaccagtggccatcccggtggcacactgacctttgcacggcctccagagggtcttcagtgatagagtcaatccaggggtccggaggaggcagaatagaggggtcaaa

SEQ ID NO: 465091 - DNA, 1000 bp, Homo Sapiens; identical to SEQ ID NO: 335580

SEQ ID NO: 465092 - DNA, 1000 bp, Homo Sapiens; identical to SEQ ID NO: 339441

SEQ ID NO: 465093 - DNA, 1000 bp, Homo Sapiens; identical to SEQ ID NO: 335582

SEQ ID NO: 465094 - DNA, 1000 bp, Homo Sapiens
tttttttttttttttttttttttttttttttttttttttttttttttttttacgtggtcacaggtttattctgagttttaatttattatacaaaagtaaaggttttaatttaatattaatagtagaaaaacactttcttacgtgtgccatatggaaagataaaggatctattctaaaattagctgtgttggttgataagctggtgtggattctgccacatccagcaaggaagataccattaaattacacagtttagctctctctatctatgcattaggaatttgacttccatttgatgttaaagcatatacttggctttaaggacacactaaaactattcaaagtttaattacattcagacaaagatcatctaaccactgttgctacatagggaatatttatttaattatcccttgctatctctattaatcagtttcctcaatttatccttaaaattttcctcaaatgcttagttattttattatttgctttttaaaatattcagtgtcaaaacaaaagtacacagtttaaataattaagcaggcatacttctccctgtctcacctgcttgattctaaattgcaaggtctaccatgtcaaattttagataatcagaacaacactttgggattaaataccaactgacttcatttttactccataagccttctcattgctactttgcatttttcttcactaacctatctgtttgttagtaagtttttcagttccttcttcatcttttctttcccttgtagctgtgagcactccagtagattgcatcactaggttgggtcctgtgagctgttttgttcttttccaagtgtctgattcagcgggccatagaccgcttgccagaaaatcgccattgcttctaggctgacgcttgcctacttgttttgatcgtctgagagaagagactttgtttgccaaaaccacagttgatagaaatagaaaggtacagataagaaaaagcactgcaattataattaagcaaatt

SEQ ID NO: 465095 - DNA, 1000 bp, Homo Sapiens; identical to SEQ ID NO: 335583

SEQ ID NO: 465096 - DNA, 480 bp, Homo Sapiens
tttttttttttcacaaatgcacaaaggtgaaacatttattgattcaagtgctgcgaaaatgttgaggctttaaggaattttattcctgattgaaaagttaaatcctactcatttccatcatctgcaagacacaggttgctcatgaatccacttctataacagcaaattattcttttgattcttgagaatagggttaccttctggcttttcttgaacatctgaaatgtgggtattgttttgatgtgacaagtttcagccagctccggagaattgttcacatccacattagcaaaaaatacattttggtatttcacagacatagcatggaaaacaggaaacatccttttgcagggaccacaccgtttcgaagaaaattgaaccactgcgagtttgtgtccggcagctgtcaaaaatgttttaaattcattcgtgtctttaataatctgtaccatgattacaccaggcctcgtgccgaattct

SEQ ID NO: 465097 - DNA, 1000 bp, Homo Sapiens
ttttttttttttttttgtttttttttttttttttttttttttttttttttttttttaatattttgtaatttatttacccatgaacacaatagtttccagtcttcagcatcaggtaagaccaagttattcaaattaaaatgttaaagatacggctttaacagaaacaagaacaggctgaaaactgccatgaatatccatatccacataatgtacaaaaaagaaagactgatattattccaaatatttctatttgaaagtaaaagaaaatctgtacagctgaatcttcccagtaaacagaaagagaaaatattataacacagtattaatcttccacataagtaaggccatatgcaaacaagaaagagaacacccaaaattgcagtgtttcttcaaagaacccttctctagggaacatatttaacactccaaccatcttctattcttctacgtgcatactaaaaaaaagtacttctcttcccatcataactagtcaacccagtgtaaattctaggcccgattttcccctgaatcatttctgcctttttgttcagttttccctgcctagagcacccatcacaatctctttagttcttctatccactctgaactagaaatcacctttcattccatacagctctgtagtcctttaaaccctctaggaattgctaaagaggggtgaggggctgagaagaaaggagaatgggcaataagaggtctggcagtctattttacagaacagcctgcctctggacatgacaaagagagccaagaaactaaaaagcctgcttctgcggatgtttctgaactactacttttgttttttttaaaggaagacagaagagatttatgagagatgagagaaaagaaagtgtacactcactctggcacttcattaggttcaggaagggaggcaaataaaggtacctagattttgaatgaatccactggttgtggctgagaaagcctggtacttgtcaagaacaccaacatattaaccttg

SEQ ID NO: 465098 - DNA, 1000 bp, Homo Sapiens
ttttttttttttttttttttttttttttttacatatacatatattttttatttatttatttttttctttgagacagagtttcgctcttgttggcccaggctggagtgcaatggcgtaatctcggctcactgcaacctccacctcccgggttcaagcgattctcctgcctcagcctcctgagtagctgggattacaggcgcgcgccaccacgcccagctaattttgtatttttagtagagatggagtttctccatgttggtcaggctggtctccaactcccgaactcaggtgatctgcccacctcggcctcccaaagtgctgggattacaggcgtgagacactgcgcccggccgactttaaatatttttttaaagtctagatgcacccagggctctgggttatgttggtgagcggaactccatgctggaacatggggccttgacgatctgccttgcacgcctctctctgggccttacctttttcccttcagtgtcgccacagtaaaactgttcggctttggtcttgcccatcaccacggggtcagcggcctcaaggtgggaagggttggccaccaaggacaaggtaatgttcctgtcggtgacacgattgatcctgcggtgatacatgcccaggtggtacttcacatctccggagccctcatcagctgcctccagctttgaatcgaattgacagaagatctgttccagctccttcctgatgacatttgcaagcacgttcagccgccctctgtgtggcatgcccatgatcacgtagtccacgccattctcactagacttgtcaatgatggtcttgagggcagggatcagtacctcgcagccttctagaccaaagcgcttctcagaggaccacttccgctgtaggaactcctcaaacctggtggaccgcacaagcctggccagcagggtccgtttctcctcatttgtgaactgcatgatcccaggggtctcaaacttctgccggatccactggcactgctcca

SEQ ID NO: 465099 - DNA, 1000 bp, Homo Sapiens; identical to SEQ ID NO: 335584

SEQ ID NO: 465100 - DNA, 1000 bp, Homo Sapiens
tttttttttttttttttagaggcataatccacaactttaattaacaatgaggctttcaaattgaacacacagaaggaaaattaataaattgtttaattttgtctttcctgtaccttacttgtgtgatgcatatccttctaaatgtgccattacaaatgcatagttttttcatcaactgctgatttcattagtgtttagaaaacatccagttaccatgctaaaagaaagtgaagaggcagcctagatgcttgctaagccagagttcaaggtgccctgcccacgcatcttaacgttactgcccttaacttacacagcttggcctggctgcgccacttaagctgccaagaaagtaatccgggactcttaagggttttcgtgcgggagtctcatttgcaagtttgatttggaatgtgctcttgacaaaggcggttccaccctgtgttcctattgccctggcttggctcagtgcaagagggctactagcagtttccggaagtccccggaggtatctgagcgaaccatgtcagagagagacttctgatacttctcttggaactttgctttgatcccctgaaggtccacctcggccctggtcacgactatgcgaatcaacgtctcctcatcggtccccgcacccttcatcgacttgtacagacgttcagcaaaatagtcctcacaatcctgggcacatctcacgagagttaaataggccttctgcaagtcgcctgatgtttcttcttcaatggcttcttctatgtctttgccaatgagaatttgataggcttgaaaggtggctcgtaactgcttgtagctcctcttggccaggacttcattgaacgcaagctcatcagtgccccagcggccttcccctgcatcatacagatctttggcatcctgaccagctagatctttgtccacgtcatctccttcattgcgattagcctgcagcagagacaccaggattttttttaggtttccacttgtatcacctttgacatct

SEQ ID NO: 465101 - DNA, 482 bp, Homo Sapiens; identical to SEQ ID NO: 335586

SEQ ID NO: 465102 - DNA, 1000 bp, Homo Sapiens
tttttttttttttttttttttttttttttttttttttttttgcattgacctataaaaagtcatttaatgcatattccagatggccaatacaagctggttaggtaattagcccttgaagaattcttttataatcatataaaaatgttttgtcttgtttaaaaaaagtctactctaacaaaaacatccaccaatgggcttgcattttttccatttgcaggtttgtaagatcataaaaatatacacatatgcatctctgggcatatctctgtccactagctaatcagttttggcaatacactgcataggggtatactaccattggtttctgacattaagttagctttaagcttattggctattccaacaactggaggcagcttagaacccaatccctggaaagcacttgcaggattaactacccgtttccctgacaccttgtctatggtggtgagaggtctggggacagacttgctaatccaagggtgtcttaatgcttgagctggggtcaagcgggcagaggggtcccagtgaagacaccttttcaagaactctataaacaagtagtcatcacaccctttcagtgctgtcccccagtctttgctgcctgggggaccccgctttttacccctacgtgagcgaccccccacaagcacaaccctcccatctgcctgggtagtcacagagcagtagcggggtatgcccttggaattaataaagtacttggcacgtttggattgctccagaagttttggtggtggcatccctagaagctccatcatgcaggccaactggtctccttcatcctctccagggaagagaggctgtcctgttaaaagttctgcaaggatgcagccaaaactccatatgtcaattggtgtgctgtagcggcttcctaagatgatttctggagctctgtagaaccgagactggatatatgtgtagagcttctggtactcgaaacagctggacccaaagtcaatgaccttggttgaactgcgcc

SEQ ID NO: 465103 - DNA, 1000 bp, Homo Sapiens; identical to SEQ ID NO: 157431

SEQ ID NO: 465104 - DNA, 1000 bp, Homo Sapiens; identical to SEQ ID NO: 339242

SEQ ID NO: 465105 - DNA, 1000 bp, Homo Sapiens
tttttttgtctgtacactcccaaggcatgttttatttagatgtatttattacaattccaggtgggacgagacgctaacacatgctccttcctggcgccagggtctgctctgtggtccgcaccggggtgctcagcattgcttgggttccacttccttctcactggggaccatggtcaggcagccccctcttctgaagagtctatagaagaagcctctgtttggtctggaaaccggggtatgtatgttcttgtctagatctaatggcaaagcttcctcactttcacttttgttgatgtctttgaaacacccagattcgatcatctcattctgccaggggatggagacacacccggtagcaaaccgagcatagaagtcttcatctgcggtgtccaggtagatccctttcaccaccgagaactgctcgatatccaggacgtccttacagtaaacggcatgaggatcaggacagaaagggggctccagcatgtttgcctccagcctcctgaagttgatgtccttgaacacggggtgctgcttcaccccagccgctccctcgcccctgcagcccagccgcttgcttggattcttggtgagtaacatcctgcagatagatttggcatcctctgaaaacttctcagaatactcctcggtatcattcttgattctttgatcgacctcctcccatttgactttctctttgtattttttgaatggagaatgtccctgaatcatttcatagatcagacagccaagtccccaccaatcgggactaaacgtatacttttcattattgacaacttcaggtgccatgtagccgactgttccaactcttcctcgaaccctctgtccttctgggatctctgtggccaaaccgaggtctgaaatccggatgtgtccacgatcatcaaggagaatattctcaggcttcaagtctctgtatacaattctttccctctgtaaatcttccaagccgcaacacagctctgcagcatagaaaacg

SEQ ID NO: 465106 - DNA, 1000 bp, Homo Sapiens
tttttttttttttttttttttttttttttttttttttttttttttttttccagtgccacagttggattaaccttctgtagctgctcaaactcttttaaggctttcttggcctttcctttcttcacgactttgtgatactttttacttttgattttcttctcttttcgagccttggcctcatagtaggactgcagagcccgagccctctgaagctctgctcggtgcatctttgcctcttccaggctcatggcttggagagaggccttttccatgggagtcagtaaaggatctgtcactggctgcttgttcttatggaggaggttaaaaatttcctgctccaggggagttcttgccttccagccactgagcgcatgttcaatgggagcaatggctggctgctccttccccaggggaaaaaccagctgctctgcctgctggttcttcaggatgatagggtcccatttggagaggacctgtgaggttttactgaatgctacttctctgtggatctgttcaattttttctttgttaagaggtaactccaccaccttctttgatttgactctattcagttgcttttttacagtggccaaagaagatgaagttttaacgggctcaagcagatctgcaaggcccagcttttctcctgatccttcagaactgacactgaactctgacactttcagactagcctcagacctctcagccaatttccgcctattctttccatcaagggaaatgattgcttccagaagcttttgatgctttctctctccatcactgtccccctcatcttcattttcactcaaggggtagttttttggcaaatccactagttcttcctggtggctcaaagccagattctctgcaacctggttcacattcatctcagcagccagcctctctcatgtataccaagaatggaagccgaaggctagtcatccattttcttttcaacacttccttttattctaaaaggaaattttgtctgttttctaaa

SEQ ID NO: 465107 - DNA, 954 bp, Homo Sapiens
ctagacagactgtggctgggccagcctggttcttccaagtgccctcaccatggcctccttaatttccttgttgcggaaactataaatgatggggttgcacatgggggtaatgatggtgtacaggagggagaaaggtttgtctttgtcaggcccatgtgtgctgtgggggttcatgtaagagaacatagctgaagtgtagagaaagatgaccacagtcaggtgagaggcacaagtagagaaagtcttcccccgacctgaggaggaggctttgctgaggatggtggccaggatgtgcacataggaagtgacagtgagcaccatggggctgagaattaccacgatggcatcggcaaagattgcccacagactaaactgagggtccccacaagagaggccaatcactatgggggcctcacagaagaagctttctatgtggttgtctctgcggaagggctctcggaatgaaatatactcgagaaagatgccattgatcagcccaaagaaccaggcagttcccacaagcctgacacagaccttctggcttatgatcgggacatagttaagtgggtagcagatagcaacataacggtcataggccatgaaagccaagaggatgcactcggccacaccaacacagaagacaaagtacatctgggtcatgcaacatacaaaggagacaatgtggtccctgaccacgaggtggatcaacatctgtgggatggtagtggtgatgaagcagacatccaggagagacagatggccgaggaagaagtacatggggctgttgagcttggggtctgtccaggaggtgataaagatgatgaggccattcatggccatggtgaggctgtagagggccaagaagagggcaaagagcaatgctcgtgtggaagtggagctctgctgaaagcccacgaggataaattccgtcactatgctgccattccttagcat

SEQ ID NO: 465108 - DNA, 1000 bp, Homo Sapiens; identical to SEQ ID NO: 335592

SEQ ID NO: 465109 - DNA, 1000 bp, Homo Sapiens
gtaatagcatggagcacaagcacaagacctgtctttattagacacagaggattcgttcacccagttttatctgaaacaatggaaggatagcaatgccttactacaatgccgtttagcttattagagctgactcatggcagctgtcctcgctccaggccaattaggtaggtcagatactcaggatctgaagtgttagtaagaagaaaagacaaaagcagaaacaacagtttgcattaaaatcaaactatttttgaagtccaagtggctccagaggaaacagttgaggtaagataatgggggtagaaggtttcctagaggccagtggtcaccttaaaacaaagcttcagtctgacaacccttcaggggctgtggggtccacaattctgcctaactttttagacccacacagctgaattctaggtgtgattttagaatttacaccctgagtgttgtacatacaaaaggaaaatgtttgatgtggctatgagttgaaaacacaaggaacacttttctcctcctaggccctgtgtttctctgccaactcagcactgacaccaccttggagtcagaccaagagatctggtgtctcagaggctggtgggtcacacctaccgcaatccccccatcaccaagtctcagggaaccagcactcccagctcatccatgcacaggttctgctgggttagaaaaaacaagtctatttacctcccagtccagaaacttgctcatcagactccactaaaactgcagtctccaaggacaaaaacttcagaagacacaagttaatttctgaagaaagggaaaagcttcctgagggctgctttgacctccttgtttctcaaagtatagatgagggggttgagggtaggactcagcacagtgtacagcaggccagccaacttgctcttccctgcgctgtagccagagaccgggcttatgtaggcgtagaagacagcggtgtaatacatgcacaccacggtgaggtgggaagagcaggtgg

SEQ ID NO: 465110 - DNA, 1000 bp, Homo Sapiens; identical to SEQ ID NO: 335593

SEQ ID NO: 465111 - DNA, 1000 bp, Homo Sapiens; identical to SEQ ID NO: 335594

SEQ ID NO: 465112 - DNA, 1000 bp, Homo Sapiens; identical to SEQ ID NO: 246396

SEQ ID NO: 465113 - DNA, 1000 bp, Homo Sapiens
cacttatgaaaacatttttattattcattcattccacaaacgtaggggctttccatgtgcagggcacagtgctggacactgaggcctctgccctccagtgctcatccagggcttggtcctccaagcctacctggactctgcctttctttggaacgttgtcctggacttcagtccatccagtacttctttccagaacttcagaatggaagcacaggtgaaaatcactatatttcaccactgatcatgggaaccacaagggctgcaaggatagtgcttctcctgcgagtggccacacagatgacgcaggaagccgggcttctgcatgaatctcctgctgtactgggcgcactggaaggagcgctcgcccaagtgcactctctggtgcacggtcaggttggccagacgcgtgaaacgcttgtcgcactgcgcacactggaagggcttctcgctgatgtgtgtgtgccggtgctccagcagcgtggacaggcggctgaagcagcagccacattgcgtgcactggaagggccgctcacccgtgtgcatgtgccggtgctccagcagcgtggacaggcggccaaagagcttggcgcactcgtagggcttctccctgatgtgcgcgcagtagtgggtgtgagcgtcgactgctggaggaaggtcttgccgcattgggcgcgggtgtaggtgcactcggccacgtgcgcccgacggtggctggcgggggtggtccgctgcgtgaagctcttgggacactgagcaccagcgaaaggccgggggccacgatgcacgcgctggtgcggcgcactgagctccttccggccgaagctctggccacactgggcgcaaggtgggcactgctccgtgcccctagcggctggctcagcctggctcggggggcctccagactcctctctgcggcccagacaggtctcttcatctgggccgcctgtggccaccgagacaccccttttactatagttgaaagaacaccttcagctgtttg

SEQ ID NO: 465114 - DNA, 1000 bp, Homo Sapiens; identical to SEQ ID NO: 335597

SEQ ID NO: 465115 - DNA, 1000 bp, Homo Sapiens
tttttttttttttttttttttttttttttttttttttttttttttgcagaccataggaagtttattgtgtctttgagacactacaatgcagactcctctacctgaatacagtgataggacttggggagggagaacagctcctactgctcaacaggcatgtcagaagaccccagattcctttgtttcttgagcagctgttagccaacttgggaccagtcttgggttgttcctaagagggcacaaggagagagaacccactttgacttccatgactccttgctcaacacatctgtctcactttaggagtcaatggcagcgaggtagccacataccatctccaagaccgactccccaaaaaaagaagaaaagggcttcatgggccactctcacccaagtttcctcctaaaggcatttgagctgatgccatcaggtgccaatgtgacatgggccatgacaacacccactggcacaactcttccttttcccttgaggaaggaagaggtgccatccactttttggatccagcccttgtctgctccaccccgtttttccttttgtccctacagtgtataaggaagccaaagtaagctcagctgccattcctgaccttattcttcctcaaaaaggaggcgaagtgcaggattgtgaaacactgaggagctactgcaactaaaaacccaatttttggggagagctggaccagctatagtccctactttggaccaggactcttatgcctctggattacctgtatccacagtttacccgctgaagttgcttttggataaacaaaaacaagaacagaacaaacaaatccccttccccaatcttttccatttcagctgccagctggagtccaaggttgtgggagccacacttcagtcttggtcctgtaccttgagtccccacctatgacctcagccaagggtccagggactagctcccctacccaggaatgctgtaagaacttccccgagatactcatagtctcagattattt

SEQ ID NO: 465116 - DNA, 1000 bp, Homo Sapiens; identical to SEQ ID NO: 335598

SEQ ID NO: 465117 - DNA, 1000 bp, Homo Sapiens; identical to SEQ ID NO: 157432

SEQ ID NO: 465118 - DNA, 1000 bp, Homo Sapiens
caaggtgaaaatatctatttattggtgctacagaatcagagtagtaaggtcctagttaggtttaagtattgtcaaagttagcataattctccagaaacaaagccaaagtacaatgggatttcatgttctgagaggccttgatggttgctagggaatatgtgattactgatatttctccaggatatccattttggggacatacatcagaaacaagaagcagggaacagagggctggtaattaccagcagtgatcattgctgaacagttttaacattttagggagttttgcctttctagcataacactacttttgttcagaagcatcaggaatctacacaaagctggtgtgtaccaagagtaaaacataaaaaataaaatcccgacttcctgagttttgtgcacaaatggttttaatgtatgtgccccaggatttttcagatgagatagtgtaggaagttttttgccattcattgttttttaagatcctcaattagatgaaggacttcagaggtggtccataaaggtagagctcaatagcaatgagtagtaatcctagatggtgactacattgaggcttctagagttagaaactactgcagggtctggctgtcagtcttcagtggagatttatttggccaggtcccttgtccaaggcagcaaggacatgctacagatacagtaattatgacacaccatccccaactctcactaaatacctttcagaaatccttatcctagagcatattgacttggctataagacatgctggaacctcaagtagggttgttggagaagagaggaataagttggaattggtgggcttggctaaaagcatacacctgcctgatgggctagcctgcaaagaaaaagggaccaacagttccaagcagtattcaaatgcccattcaatctggtttgtaaatagccaggaggttctgtttgttgggaaagcatgagtctttagatggaaacaaaacatatagctctatggaagggtggc

SEQ ID NO: 465119 - DNA, 1000 bp, Homo Sapiens
ttttttttttttttttttgaaggaatgccttttgtattcggaccgttatttggaccctttaagtttatcctctctgttataacatagacaagaaagagggagaatagatcagggcccaaattgagccactgacgcccaggttttctctatttggggtgcttgaagacagtagcaatgaaaatgtgcaagggagcagctgaacaccaaagactacttcctaaatcaaatgggtgttttgatggcataaaagatgcgctttctgacggaagctcttgttacatttactacagtggaaaggtttttctcctgtatgcgttctctggtgtgtgaggaaatgggaacgctgattgaaggtcttgccacactcaggacatcgatagggcctgtctcctaagtggattcgctgatgggtaataaagtgggagctctgattgaagctcttcccacactctccacatttgtagggtctttctccggtgtggattcgttggtgcttaatgagggcggagctgtcggcgaatcctttcccacagttttcgcacttaaaaggtctctcacctgtgtgtgttctttggtgcgtgaccaaatgtgagctctgactgaagcttttgtggcagtcaggacaactgaaaggcctctctcctgaatgagtgctcatgtgagctacaaaatgagaactatctctgaagcccttcccgcactccgggcatttgaagggccgttctcccgtgtgggttcgttggtgcttaatcaaatccgagctctggctaaaactctccccacagtcattacacctgtaaggcttcacccctgtgtgggtcctctggtgagtgatgaaatttgagcttcgactgaagcttttgtgacattccaggcacgcgtagggcttctcgcctgtgtgggttctttggtgcattatgaggtgtggcttccgcccaaaagtctttccacactctgggcactcatagggtctctcccctgtgtgggttctctgatgttt

SEQ ID NO: 465120 - DNA, 1000 bp, Homo Sapiens; identical to SEQ ID NO: 157433

SEQ ID NO: 465121 - DNA, 1000 bp, Homo Sapiens
cccagattaaaagcaaggtgctttttctcacatgaaagtcctgggtgacaccactcactacacaatgcagagagaaacaagctcccatctagttggttttcagggcagcatagtaaatgtcaggctgaatcatgaacagggtcactgccactagaacaatgcttgcaaaagagtatagaccttaactcactctatagattagggagttgagcatcagagtatttccaaccatgacagtttgaattagttctctggtaatcatttactaatatctgaaataaaaaagtcaactggaaatgtacctttaatgtgaatcatctggtgacatctctggagaactataactctgagaaaaggaaagtcaagtgatttggagaatactcttaatttgcaagcaagagaatcagaaaaaatgggctgaagcatgtggccacacactgctctccctgtgtggtgcctctaatatgtgactgataaccttccttgtctgtgcctatgaaatctcattaagattggctataggtggcagggcgcagtggctcacgcctgtaatcccagcactttgggaggccgaggtgggtggatcacttgaggtcaggagtttgagaccagcctggccaacatggtgaaactccatctctaaaattagccaggcgtgatggcggttacctgtaatcccagctacttgggaggctgaggcaggagaattgcttaaacccaggaggcggaggttgcagtgagccagatcgtgccactgcactccagtctgggcgacagagcaagactccatctaaaaaataaaaaaatttaaaaaaaggttggctacagatgaattgtatcagatctaaatacatctagatttaattgtccattcacaagtagctcttctcaactcagaaaacagttatctcagaggtcctttccctactctttttctgtgtttcaaaggaattaggataactgaatgcatattaacagaatgtgtctcttcatgtctctg

SEQ ID NO: 465122 - DNA, 1000 bp, Homo Sapiens; identical to SEQ ID NO: 335602

SEQ ID NO: 465123 - DNA, 1000 bp, Homo Sapiens; identical to SEQ ID NO: 335603

SEQ ID NO: 465124 - DNA, 1000 bp, Homo Sapiens; identical to SEQ ID NO: 335604

SEQ ID NO: 465125 - DNA, 1000 bp, Homo Sapiens
ggttcattcactcatcaaatatttattgcaaagctatcacatgccggaagctggttacatgtaatgttgtaaaagtttttacagatgtgattaagttattaaaaaaacaaaagcagaagaggtagagtattaatcctttttttttttctcttgagacactctgtctcgctctgttgcccgagcaagaccttgtcttaaatcaatcaaccagtaaagaaaaaaatcccagttaattgaaggcatttacaatagggtttgtggaagtttgtgaaagttcaccagttcctaacacttcctctttctcctcccccatcctttttcgaaccccaggactccccatccccacctcaccccagacacactggtgaggaaggggccggggggcgggcaggctcaccgcctcccgctccccaaagccaggactgtgcagttgatcccaggagcgagcccggcgcggctccctgccggcagcgaagcgaaacatttggacatggccccgattttccgggtgcggttggcaagtcccggcgtgcgcgaaccaaacctgcggctcccggggcagctttgagcgggtcgggtcggctccataggagaatggccccacctgcaggcagagagctccggatagctgccgagtcactttctcagcaaaaacgggcttttgcttactgtttccagaaggatccaagagaggactttcagctctggaattttgaactcaggatctgtttctccctcgcggaaagaggaaggtggacgaagggcaagcccaggccggcaggggctaccgcaggaagacgcccattcctggactcgggttcgcaggagcccccttgctccccagagccggaactgcgctgcctgccacgcaaatcaccatgagacagcatgtgaccttgcgggtggccggggttcggaagaggtccaagattgagttggaggtgcagacacttgcaaactcgctttggatgtaggagctcatcacctccttggtcagcct

SEQ ID NO: 465126 - DNA, 1000 bp, Homo Sapiens; identical to SEQ ID NO: 335605

SEQ ID NO: 465127 - DNA, 1000 bp, Homo Sapiens; identical to SEQ ID NO: 335606

SEQ ID NO: 465128 - DNA, 1000 bp, Homo Sapiens
ctaaaatgacttttaagtaaaagatcatgtggtaaagacacaggttgacataccaagtccaattctactcgtacaaaataatttcctgctgttgattaaaaccgttatctcctgaaatatcttttctaaacactaaaccctcaaaagacgttaacttctcagactctagcggagttcagcaaattagaagccaccatcattatgcagcttactcactaacaaaatgccacttaatgaacttctgatagtgtttcttgtccacagattgataagagtttaatgcaaaaccacatcatttcctatttttgttgcatttccttcaaagtgaaacataatttcttcttggtcctggagtaaaaacttctggattaactcggcaaatcgttaccagaaatgcaattttagaaagatacaatttcagggtagtcaaaaaacacaaaacatctgtgtggtgtttgttaatacataaaaataacctgatatataaagtgtatgccacctaagtggaaaattgagtccctaactagaagcgcaaacagaaatcatcattgattctgttagtattgtggttttaagtccagttagaaaaattttaagaactgtgacaccacggctttctttagtcttagccagaggtcacaaacttcttggcatagacattttgtttggccaatacagtatttgaaaaattacttgactcaaatatctctgggtgggccataccctctatttacctgacaggctcttaaaggcattttattttgcaaaccctggtctaggcccatctttacagagaagagatcaaaaaataattattagttaaatgggtctctccctcatgatggcccgatggtccagagacttggagattaaggatactaatagttatatacagaaattcttctaatttgcttgttaggttcattttaaatatatattctcagtgtatgtatctagcagtggctcatttgttgaggactgctgagctaaggtgttaaaa

SEQ ID NO: 465129 - DNA, 1000 bp, Homo Sapiens; identical to SEQ ID NO: 157434

SEQ ID NO: 465130 - DNA, 1000 bp, Homo Sapiens; identical to SEQ ID NO: 335608

SEQ ID NO: 465131 - DNA, 616 bp, Homo Sapiens; identical to SEQ ID NO: 335609

SEQ ID NO: 465132 - DNA, 1000 bp, Homo Sapiens; identical to SEQ ID NO: 157435

SEQ ID NO: 465133 - DNA, 1000 bp, Homo Sapiens; identical to SEQ ID NO: 335610

SEQ ID NO: 465134 - DNA, 1000 bp, Homo Sapiens; identical to SEQ ID NO: 335611

SEQ ID NO: 465135 - DNA, 1000 bp, Homo Sapiens
gatgcgcggcatctcatttattgaagacgtacatgttaacatctctgaaactgggatgcatctttcagttggatggcacaacatagttggctgtgatgtttctttcttggtaggacatcttacactcaatggcatagagggaagatgatgcgaagagagagtgggaagatggccacaggcaagccggggagagaggcccagagcagaagctcccctcacagctctcagcaggaaacaaccttgcgcacatcttgatcttggcttccagcctccagagctgtgggacagtaaatccctctatgcagagagatctcagacgcagattctggacacccctgtcctcgaggaagggggcagaagcccttccacaccagctatacaatgatcaagcaactgccactcaaagaggcaccatatcacagacaagtttttattatcctgcaccccctggccctgcagctggagcactcgtgcctgcagggcgctgatcccgctgaggagggcctctcgatgttcagccaaagagatgcctaggctcaccaggtcctgggcagtcatctcggccacggcctccaggctcccatagccagcagccgcgaagctgtccttgtagcggcacaggtccagggcctccagccacgcgcccacagagccaaaggaggggaaggtggagaaggcacagtccgctagtggggtgggaggcctgggacaggtagtcagggcacacttggggggctctgggtcctgcaccatcttgctcaggatgctgtggatctgggagaacctgggccgctcacctgggtccttctgccagcagtcgagcattagtcggtgcagaaggttaggacagttcctggggggtggcagccggaagccatcctccacagccttgatcacgtcttggccagacatgtcccagtaaggccgctccccaaaggccatcacctcccacatgatgatgccgaagctccacacgtcactggcagagctgaagtggcca

SEQ ID NO: 465136 - DNA, 1000 bp, Homo Sapiens; identical to SEQ ID NO: 335612

SEQ ID NO: 465137 - DNA, 1000 bp, Homo Sapiens
acagtttgcaagggcattttattcatggtcacagtggagtattacagagcagagaaggccagtgtctccccaccccacttgcctgggtcctggggaaatggagagaggaggaagtgcctgcatgggacaggggtttctagggtctcagaaatcagagggatgggagagaagttgcatggaggggtgagaaagggactggagaccttagcctggaatggggagatgggccccagacaagactcagggaacacaaccacccctgtcctctccccaggctagacccttaattttcccccttatgtgggcaggatggaaattatagaaactttattctcgtctccctgaagaaaagttgagattaggaatgtccccttagtctgcttagcaatatggtgaaagaggaggggcaccctgtcttggtttttcccatttccacattcacaccttccctgcaatgctccccaccttgggtccaactccaccccttcaaatcctgcaatttcagcccatgtccagccaggggaagggactaacccagaggcggtgggcaagaggagagatggactttggaggactcctccccaacttcccaccttcctctctagttaaggaggatccaagggccacactgctttgaggttctccagattgggggaagtaaggctttcctccccagttttgagtctgcgggtctctgggcagaagacctccctgggatccaggcctccctttgcctccatcatgggagcaggctttacttccagcccctcgggcctgagggacaagagccaaagcctctcacccgcaccctgtcccagccctgccaagagaggaagccctggaaaatgccaggcccctggtaggctcctaggtcctgggagcaggatgtctggcttaaaagcccctgggagctgctgctctgacgggagaggaggcaagaagggccccgagagacaggtccagttggagggcagagggggcgggaggggaggagtgaagg

SEQ ID NO: 465138 - DNA, 1000 bp, Homo Sapiens; identical to SEQ ID NO: 335613

SEQ ID NO: 465139 - DNA, 1000 bp, Homo Sapiens
ggacacctgcccacatgcagggagtgaaacccactccttaatggccctcccacatataccacagaagacacttaaaatattatctctagctcattacacaaaaccatcacacaagccaaccatttcttatttagaatacggttatatggctggatgcagtggctcacgcctgtaatcccagcactttgggaggccgaggtgggtggatcacctgaggtcaggagttcgagaccagcctggccaacatggtgaaaccccgtctctactaaaaatacaaaaattagcctggtgtggtggcatgtgcttgtaataccagccactcggggggtggaggcagaagaatcacttgaacccaggaggcggaggttgcagtgagccaagatcatgccactgtgctccagcctaggcaatagagcaagaccctgtttcaaaaaaaaaaaaatgataattatataactttcaagagcagcccacatttttcttagaaggacacaagaacacggagcacaaaaactaaactaggaagagccaccactctgctgccactggttggagctgatcaccccaggcatccctgcttctcagactcctccactgtatacacaggagaaaaccaatcccttctgccagcatctgacacgtctgtcagagcacacatccttcccgacatgggctagagaggattgcagggtctgtcctcaaggctgctcccatccctgggggctgctgactccaggcagccaaatgtctcctgggaggcgtaggtcatgtacacgaagccatcctcatccttgtagtctctgtagatctctgccatggttgcgctcatgctgaccaggctcttgttgttcaccagcaagtaaaaggcttccgtggctctcaggaccatgcggctccggatgatgctgaggaactgggtcatggtcagctcctgcgggaccaggaacttggttttgtccagcgggggcaggaacgtctccctggggtagcgctccactac

SEQ ID NO: 465140 - DNA, 744 bp, Homo Sapiens
tttttttttttttttgggatggaagaggatgggtgtttattgggattaacacttgtgaaaagatggtggagagggcagtcaactgctatgtggcccaagaatgcctcagccaccaggtggtgctcccatcagccagaattgcccatcatggtgtccactgtgcttttgtagccccctggcagatgggagcttccccagaagggacgggacctcaggcaaggcagctctctgaagttgctgatagctggaggccacctgctgccgcactcgctacagccagggcagcaagccctgcctggaaagaggatgtgggtggtgcatctccgcctgccataaagctgcctaggtgcctgacccaggctgcaggacagctgaaggcagagatcggggggagctggtgaagccacgggcctggctgcttcccacacctgccagatgagccaggggttagtgactgtgtcttccctggatctggtcctaaggccatgtcctctcaaggcctggtcgctcttcctggaggggctgtctctgctttgcggacttgtcctatgtccccagtgggcttcagtgggctggcttgccattccctcctttccactgaggtgagtgagttcccatgcactcattgcccatttgggtttcttctatttttcttatcggcttagagaatttctttacatcctcttgaatcagagcatcttctagagtccagacagtgctgcacatgggggtcggcaacccgct

SEQ ID NO: 465141 - DNA, 1000 bp, Homo Sapiens
cctgcaagaacaaaaggggttctttattgctttttacataatttccttttgtagatggcattctgagtagtaacaagcaaccaggcttcaatgccgtcttcctgttggagcctacattcagctctcaccctgggcgaccaaaaagtagggcctcaggatcctgaacttcacccagtcctccaaaagcgttgacccacttcctgcgccctccctactgcagttgtgtgtggaagcctttgcaacttttcaatagctttgagctttcacatgtcacctccagttacagggaactaaaatcaaccttcaagccctctcccgaaagaacagcagacaactggtgacaattgtcgaaaggaaagaaccaataaatataagctgcaagctcaaagcaattcagcaaaatcaagctcatcaacttcccagcatggattttgttttattctaaatcagatactcattaatggggaccattctttgaatcatcattttatttacactagagaaatgcaagacatattgcctggccacagaatgaagtggctctctcgctgctcaattataggtatttccttctgtagccttctgaattttcatgctaatggaaaacacccaggccagatgctcactagtaacaagttaaaatgacactggaaagtaaacaatttttttttttttgagacgacatcttgctctttcacccaggctggagtacagtggggaagaatttggtccatgagagatgggagctggtagataaattccttccttctcctcccagacagactgtctggctacacagtttgtgtggcttccttggggcacagtcaaacatcgacgtccagtaggatgtttataagacatgcaggatgcaggacagttccctgtagcctaggactgtcccacaggactgtcttcacattgcaggctgctcctggctgctgatcactgtgacaaccagaaagtgttcccagacactcccagttgctcccagcctttggtc

SEQ ID NO: 465142 - DNA, 1000 bp, Homo Sapiens; identical to SEQ ID NO: 335614

SEQ ID NO: 465143 - DNA, 1000 bp, Homo Sapiens; identical to SEQ ID NO: 335615

SEQ ID NO: 465144 - DNA, 1000 bp, Homo Sapiens; identical to SEQ ID NO: 335616

SEQ ID NO: 465145 - DNA, 1000 bp, Homo Sapiens; identical to SEQ ID NO: 335617

SEQ ID NO: 465146 - DNA, 1000 bp, Homo Sapiens
gcatcattgccctgcctctgtttccagtctcatgtccacacttcagccatccttgtatacacttcagaaattattgtttggtacctccatagaagctcatctccttcttttcacaggcagtatttttccagctggcaccactgtcttgcaacttgcttcccccttagtcttggtgcacaagtgccaatctcgactggcagctctttgggcaaccatttggtgccagcctccttccaatgcatgtggagcgccagtgagtgcccctgaactattcccagctgatttcttgactcctggggcttgccaaagttttcttcaaagcagctaagtctctaatcttcagaaaatttctcaattactacagatagatctttattcctcatgggatttgtcctttcagaatcactacaaagcagaactatgcgaagaaattaggctataaaatgcttatgaggagtccaatttggtgttttgttgtgtttatgaaatatattatttagtagagtttacttttgagaccgaacaccaaagatctgctttgtctctctactcacatgaagaggcaagagtgcatcccagattcatagtaacttaaaaagagtcagattggccaatagcagatttttcccagcctactcaaccttgtgatatgggtactacaggataacagatatgatgattttagatttgaaaagacttagggttgactcccagcaccatcataaactagctgtgctatcttaagaaactacttaaatttttctttctaggttttctatctgtaataaggggtagaggaatttctttttttgtagttctgttgtaggaattaattgaggcatcaaatatgtattgggtatgaatccagatgtatccagggatcgaagcaaacaagctttcttcattttctttaactcattgtaatttctgactgaaatcttctattaggctggtagggataaaatataaaaactcaatataatttgtacctgaaatttta

SEQ ID NO: 465147 - DNA, 1000 bp, Homo Sapiens
cgggaaaaccaacagcatctcagtgtagcggggagatgggcagatgggggatccaggctgggccagccttgtccacagcccatagaagggttggccagccagaagggtgcatcggggtgcccagagggtcagaaggccaggctggggccccaagtcccaggggaggcctgggaaagccccgggggaggccatggttccactcggtggccgggccaagcaggttgtgcccagctggctctagagcgtgcagaaggggcctgtgtcgtggcgcttgggtctgcgtacaccctggatgaccacgccaggcgccgaagggaagcgtgagttgcagtcctccacgtggtaggcggctgggccaggggttcgggctgccgaaagagaaggctgggagccaggtgctgagccaggaggtgaacgcaggggagcggctcatcgagaaggccggcgagcgggggctctgcaggcggctcccaggaaggatattgtaggtgttggggccagggcatctcttgccaggtgcctgcaaagaggcctgaagcagggactggggctgcaccctgaggcccagccccctagccccaggcagccctaggtgggtgtggccttcaggtgtcttggaagcggagtggcagcctctgaagctgaaggcggggaaggccggccggctgagcagctggtagtgggctggcgagggccacttttgctcttggtcgaagtcagctttctgcgtgaaggggctttcgctctggaaccacaaagtctgccatgccctgcggccaccgccctctcggccctggtgcttgcagccgatgctgtagtgggggtgtggggaggactctcgtacggacgggcttggcacctggtacctggtggggctggggacttccaggtcagccgtgatcagggggcgttgctccagcaatagttccctcagggtctgggtgtaggtgggcagggactcctggggggtgcccgtctgtaacctgaggccaactgggat

SEQ ID NO: 465148 - DNA, 1000 bp, Homo Sapiens
tttttttttttttttatgttaatattttatattctgtcataaatgttatgacatttaattgtggcaaatccatttactttttttaaaaaagtgtgcaaccgttaactatgatagaacgcactagaaaaggtaacgaaccttcacccacccccccgtgtccccgccaccctcgagcgccagcgagcttccaggatcctggggaaactgcaaaacaagccggtttggggggatggtggcctcatccaggaggggcgggggagagaggccctggggcttccaaaactcacggatttgagggagagggagaaggagggagggggaacagaacggggtggggaggtagacgcggggagaagggaagggggagggacagcacgggaacaccatcaggctgggcggtattttcagtgcaaccaagaaatggtagactcaagtttttagttttaagactagaaaaaaatgcatcactcccccccataaccacattgaccacgcagtgttttccaaacaaaaaaaccaggcgcacaaactccacccacaaatgtacacacacaagataaatagtttagaacaccagcaacagcgaacagccgagcgtctcctcggccgcgcgccagcggcgcggacctcggacctcggggctgctcctcggctgcagccggcatcggcgcgtcccgggcctgcgggcgggtcctgaaggcggcggcggagcgctccgagtccgccttcggctcccgccgcccgcctttcaccttcgggagaaaacattttgcgcagaggatccggtatctcgggattccgaacttgctggttgcgagactcaaatttcaaaaggggctggagcccgcgccccgcccccacccgcgaggcggcgggcaggcgagcgggtgggggccgtgggaagctgctccggcccggccgggcccggctaggccgcagggaggcgctcggccggcggggctgccggaccctggggccgggacgcacgcgccgtattcgc

SEQ ID NO: 465149 - DNA, 1000 bp, Homo Sapiens; identical to SEQ ID NO: 335618

SEQ ID NO: 465150 - DNA, 1000 bp, Homo Sapiens; identical to SEQ ID NO: 157436

SEQ ID NO: 465151 - DNA, 1000 bp, Homo Sapiens; identical to SEQ ID NO: 335620

SEQ ID NO: 465152 - DNA, 1000 bp, Homo Sapiens
gagctatctaatacaattccagtttatttcaaatgaagtacagagcattatctcttaggatgatgtaatggagaaaattctagactaaaatacttagattttagaaccattttcttgctaattcattctgtgacctcaattaagtaactcatcggctcctctggtttctcattgtgtaatgggtaaatcacacctcccactgtggtcggattatatgaagaaacggctgtgaaaatgcttagaaaaatgtaaagagtgatgtgtacctacgttatttctgcttattgaaaaggttgtcacattaatcgagtgccttttgagtcgctgtcgtgtaaataaaagcaataccttggtacacaggagaaaagtcaaacagcataaacatccactaaaaataacattagcagtgtatttctaagactgacctattttcgaaagagcatcaagagcgcggtcgggtctctctgagaatgtgaaatattctatatttgccaaagggtgacggacgccaagggagggcaagcccaggagggttctgagggctggtgtggagggtcacaggcctgggaggtctaggctgcgggggccgcgcgggtggtggtgtagccgcagcacccccaggactgcccccgtcttccgcagccccttcatctgcccctgggctgtggctcctctaggacctacaggacggcctgcctcttcgggacagacggtggctgctgtcttcctttctgggctcacccgggctctggcagagcccacccgtcagagcagacctccgttaaggcttgaagagttaagaaccgagggatgggtggaggtgcagagagacactggggatcccgggggagcccaccagggaagctctgaggttctggaggcagcttgactcacggcgaccttcctgtcagcctgcgcctcctattcgtagaacacctggtagctgaagttgttggactggattttaaagttgtatctcccattcattctctggtagcgc

SEQ ID NO: 465153 - DNA, 1000 bp, Homo Sapiens; identical to SEQ ID NO: 157437

SEQ ID NO: 465154 - DNA, 1000 bp, Homo Sapiens; identical to SEQ ID NO: 157438

SEQ ID NO: 465155 - DNA, 1000 bp, Homo Sapiens; identical to SEQ ID NO: 335622

SEQ ID NO: 465156 - DNA, 1000 bp, Homo Sapiens
ttttttttttttttttttgtttcctatggacatttcttttttaccaaaaaaaaatataataacttagtttgcattttacagcatttccaatcggccagggcatccttggctggaagctcatggggttgagtgtggcgagaacgtccacagcttcggtaccagggtcaggcctgggcccagggcatgcggctcccagcgcgcggccctcaccgcacggccccaccaggaccgcagcgcccaccgcagcctgtgactcatcaggagaggaagggcagcggcccacggagtcagtccgtgccaacctcacaagggttcagccccctctcctgggcatccctgtacatcctctggaagtccttgaagcgtggggcacagccgagccgcgcctccccgaagtgcatgtggccagtgaagaggaagtcgccatgccccggccgcacgccacactccagcagcgtcctgacgcgcccctgccagtggccgtcaccctcgggcaccggctcgaagaccctgcttttctgccgatagagtctgctcacgcgcaggtggatggctgagtcctgccgctcaggctcgtgggtaacttgctggatggagcctcgaacggcgaagtcgctggtgcagacggctaggagcacctcggtgtcactgcagggacggcacggcgcagacagctcgtgcaggtccgacgccctgtgcctcctaaccagctcgtactggaagcctgtggtcctccggccgatatcctgctgcggcgtggcctccacgaacaggccgccctgctccaggccaaaacactgcacccggccgggcctgccgtccccgtccggtaccagcagtctcagttctccagttttttccaaataaatattggcccccgaggagtccgtgaaggacctgatgcacacggtcaggtgccgggcaggcgagaaggtgttgggccgcaggttaacgatgagagcacctgttgggtacatccactccacggcacccgccgcac

SEQ ID NO: 465157 - DNA, 1000 bp, Homo Sapiens
ttttttttttttttttagtttggttatgggtctgaatccgattataaaaattttatttgaacttggtaatatggatcagcgacatgaaagaaaattttaagttcctcaaaaacacattaaaggcagcaattaagctaattctcatttctcccttgggcatcaactttttcattgagttactagttgacaactataataaatactttaaaatatgtctaattaaagagaaggcagtctagcttatttatttcacaagaattaacactcagtgttatgcattctgctatcccaggaatactcttttctggtaaatgctgcatagatcaatgcaatcatatgaaagaaaattcaaacgaaatttggaaaaataagtaaatcattatcaaagcactaaatgaaaacagctccaactatactgactctaaaagacagtatatgagtatttgtgtcatacttcaggaaactgaaatattccctcacttccatggaaaaaaatgtattatatatttaagcatttgaaacattctatagctgcagttcagttcacagcagaaagtaaacattagttttctctcacctcacaaaatgtagagatggccaacgccctcctactaacctttacctcctctagaatgttctgagaatattttctaccttaatagttattcattttatatttattcaaaaatgaatcaaagaaaaaagatatttcttcagtgccagaaatacttaacttgcctcttttatgatcgttaaggggattgggaaaaatacagctattgtggtactttagttttttcaatgtatttaagctatgatctcacctgagcattagctagaagttctaatcagtttagaaacaagaacttctttgaacactgtatccgcagctattgagccccagtcccagactttaatgtccctgatatatacactagtgcagtttgctttagaaaatgcatgttcaagctgaaacagtcaaagagcagcatgagacacc

SEQ ID NO: 465158 - DNA, 1000 bp, Homo Sapiens; identical to SEQ ID NO: 335623

SEQ ID NO: 465159 - DNA, 1000 bp, Homo Sapiens
tttttttttttttgggaagttatttggctttatttttactttccttccgcaagtcaatccaatcccatccaaatgagatactgctggtctggcataaggggagagtgttttcctgcaacatgttaacagcttgctggggattcagaactgatgcgaaagagggaggtggtgggtgctgaatgtgacctcttgtttctatgccctgtggccacagggtatctgaagaactgtgggaatctcattcccaaacccccatcatgccatagcatgtggcccagaagccgcagtctggtatcaagtactttaacctaaattatctaaattgtctgtcatcaactctccaattcaactggacattccttaagggcaggaattgtgtgttgaccttcgtgtctccagaaaagcccagctccacattaggtatgtgattgcagatccatccatatctgctgagcagcttaactgaaatgccccggaaagactgatgctgcatttgacatgaggcatgtaagtgaatccccatctttcctggctgatgactggataccattcttcagttcacggctcagtcaagcctttcttgtccaggccgtgacccccaagagctatcgtgtgaccttggtggttttgactttgtgtccactgctgcagctccatcccgacaggtccgggagcaccttacactcctcccccggcaggcagggctccatctgacaccaccatctctgcaggacgatggaggctgtgggagcaggaggcggagtgcagctctagggtctctacgagcacagtgggcagccaagagcaggtcgtccacgcaggagggctttgcccgcgtggtgccggccacctggccagaaaaacaggagcatttcaccgtctgggagcgctcctcgatgcggttccggttgcagcagcggtgagccgcaatcacctcgcaggtgccctgctgcacaagcactgtggcagtgggaggctgcaaggcagccaaggtcaggtg

SEQ ID NO: 465160 - DNA, 1000 bp, Homo Sapiens; identical to SEQ ID NO: 335624

SEQ ID NO: 465161 - DNA, 969 bp, Homo Sapiens
tcagcctcccaaagtgttgagattacaggcatgagccactgcgcctgacctactcaagagttttcttagggctcccttaatgtctttatttctcagactgtaaatgaatgggttcaacatgggagtgactgctgtgtatatcactgaagcaattatgttcttgtcattggtgttgctggatgggggaagaaaatagagaccaataattgtccgataatagatagtcaccactgagaggtgggatccacaagtggacaaggctttgcatatgcccttggtagagggaatctggaggatggtgaccccaatgtgaccataagaaaccaggatgcacaggaatggaagcataatggctgtcaatgctgctgtaaagattgctaactgattgagggaggtgtctgagcaggacaacttgagcagggcaccaaggtcacagaagtagtgagggatgatgtggtcagcacagaaggaaagctgggccaggaggagggtatgcaaaagagcacacgcacaagcgatgacccaggacccagccaccagcatgacacactggctctgagtcatgatggtggcataatgtagaggatgacagatggccacatacctgtcatatgccattgaagtgataaggaaactgtctaagtcagcaaaaaatatgaaaaaatatgtctgtgaaatgcatcccttgtaaaagacggctaggtgctgagtctgcatgttcatcagcatcttagggacagtgacagatgaaaaggagatgtcagtgagggccaagtggctaaggaagaagtacatgggggtgtgaaggtgagagtctagctggatgagcagcatgatgagcaggttccccagcaccgtggtcaggtacatgcccaggaacagggcgaagaacacggcctgctgctctggccggatggggaggcccaggaggaggaactcggacacgctgctctggttctcagggctcat

SEQ ID NO: 465162 - DNA, 1000 bp, Homo Sapiens; identical to SEQ ID NO: 335627

SEQ ID NO: 465163 - DNA, 993 bp, Homo Sapiens; identical to SEQ ID NO: 335629

SEQ ID NO: 465164 - DNA, 939 bp, Homo Sapiens
tcacctggaggcccgactcctgccccacaccttcctggcggcctccttcacctccttgttcctcaggctgtagatggtggggttcagcatggtcgtgaccatggcatagaggactgtgaagacctcatcagagatgtgggcttccttactcttgggcttcaagtacatgaagatgatggtgccgtagaaaagcagcactacagccaggtgtgccaagcaggtggagaaggctttgcagcacctggcggccgagggcaccctcaggatggtggccaggatgagcaagtaggacaggcagatgaatgccaggggtacaggcagcagcaggatggagcccgccagcaggaagtcttcgctgaccgacgtgttgccgcatgccagcttcagcactgccaggatcttgcaggtgaagtgactgaccacgtggtggccacagaagggcagcctcatggagatgaccatctcagtcaccgacttgaggaggcagaggacccaggcagctcccatcagcagcacgcagagccggtggctcatgagcacgtggtacctgagtggctggcagatggccaggtagcggtcataggccgtgatggccagtagcaggcactccgtggagcccgtggacaggctcagacacatctggatggcacagacagcaaaggagatggtcttccgggatgacaggaggtggaccagcatcagaggcacaaaggtgggcgtgtagcagatgtccagggtagagaggttgcccaggaagaagtacacgggcgtgtgcaggtggatatctagcacgctcaccgccatgatggctgtgttccccaggagggtcaccaggtacatggctgagcacagagggaagagcagatgctccagggctgggtagccagaaaatcctttcagaaagaactcggacacctctgttctgttgagcggctccat

SEQ ID NO: 465165 - DNA, 951 bp, Homo Sapiens
ctagagcgtggagtgtgctggcagcatgtattttcccaggaccctcctcaaggcccgcatgacctccttattcctcaggctgtagatgagtggattcagggctggagtgacaattgtgtagaaaacagagatgatgttgtcttgtctggtgctgtggaaggaactgggcaagacatacatgaatgtggcagctccatagaacatcccaaccacagtcaggtgggaagagcaggtgacaagggctttcttcctcccctcatttgatggcatatggagcacagtgagtagaatttgtgtataggaggccagtatagcagcaagagagggaatcaggaaggtcacacccatcacatataccatgagctcatatctggaggtatcagcacaggccaccttcagcaagtgtgggatctcacagagaagatgcctgatctcctgggccctgcagaagggatagtgcatggtatacacggtatatattagggcacttagggatgccaggatccaggacgtggccaccatgagccagcaggctcttgagctcatgagggtcatgtatgtcagaggatgacaaatggccacatacctgtcataggccatgaaggccagtaggaggtcctcagcaccacccattgtcagtgccaggaacatctgaagggcacagcctccaaaggagatggtgttttctctgcgcagaaagtccgcaagggccttgggagtgacaacagatgtgaacaggaggtccatgagagagagctgcccaagcaggaggtacatgggcatgtggagccgggcttccatggtgatagccaggagcagtaggccattgctgatcagggccaacaagtataggattgtaattgtagcacagagcagttcaggagacccactgtcattcagaatccccaccaaaatgaagccacttcccaaggtgaagttccagagctccat

SEQ ID NO: 465166 - DNA, 951 bp, Homo Sapiens
ctagagcgtggaatgtgccagcagtatgtattttcccaggaccctcctcaaggcccgcatgacctccttattcctcaggctgtagatgagtggattcagggctggagtgacaattgtgtagaaaacagagatgatgttgtcttgtttggggctgtggaaggaactgggcaagacatacatgaatgtggcagctccatagaacatcccgaccacaatcaggtgggaagagcaggtgacaagggctttcttcctcccctcatttgatggcatacgaagcacagtgaataggactagtgtgtaggaggccacaatggcagaaatggggagcaagaggaaagtcacacctgtcacgtatattataagctcatacctggaggtatcagcacaggccaacttcagcaagggtgggatctcacagagcagatgcctgatttcccaggacacacagaaagggaggtgcatagtgtacatggtatgtcctatagcaatcagggatgccaggatccaggatgtggccaccatgatccagcagactcttgggctcatgagggtcatgtatttcagaggatgacaaatggccacatacctgtcataggccatgaaggccagtaggaggtcctcagcgctacccattgtcagtgccaggaacatctgaagtgcacagcctccaaaggagatagtgttttctctgcgcagaaagtccgcaagggccttgggagtgacaacagatgtgaacaggaggtccatgagagagagctgcccaagcaggaggtacatgggcatgtggagccgggcttctatggtgatggccaggagcagcagaccattgctggtcagtgccaacatgtataggattgtaaatgtagcatagagcagttcaggagacccactgtcattcagaatccccaccaagatgaagccgcttcccaaggtggagttccggagctccat

SEQ ID NO: 465167 - DNA, 993 bp, Homo Sapiens; identical to SEQ ID NO: 335630

SEQ ID NO: 465168 - DNA, 939 bp, Homo Sapiens
ttaatatggaggtttctgcacgctcagcatttttttcaaagcccttgtgacatccttattcctgaaactgtaaatgataggattcaagacaggtgtaaggatagtgtagaaaaaggatgacatcatatctttctcaggagtttggtaggagctggggagcatgtagttgtaaatagcagctccatagaagaggctgaccactgtaatgtgggaggagcaggtggtgaaggcctttttccgaccctcaactgagttcatcttatggatggtgaggatgatatagtagtaagacactgaaatgaccgtcacaggtatcaggagcatgatgacacagcacaagtacatgaaaatcttgtaaagtgaggtgtctgagcaagagagcttcaaaacagcagggacctcacagaagaagtgctgaatctcatgggatctgcagaaggggaagctcatggcgatgggagtgagcatgaagccatccactgagcccacaaaccagcagcctgatgccaggaggagacataccctatggctcatgagcacagagtaacggagaggatggcagatagccacatagcggtcataggccatggcggctagaaggcagcactctgcacctcccaactgcaggtagaagtacatctgggtgccacacccaaggaccgagatggtcttgtctttggccagctggttcaccagcattttggggacagtgacagaaatatatgtcaagtctatgagtgagagctggtttataaagaagtacatgggagtatgcagagaggagtcaatgtggatcagaagtatcaatgtaatattccaagacacagccatcaaaaatatactgaagataagcaagcagaggcggccagggtgtgagatctggctgaagattcccaacaggaaaaagtcaccacccagggtctggttggccagccgcat

SEQ ID NO: 465169 - DNA, 963 bp, Homo Sapiens
ctagagtgttcccctcgttgaggctccccagcccctttctcccaccccagaagtttcttcatggtccccttcacatccttgttcctcaaagtgtagatgagggggttgatgctgggaatgacgatggtgtagaagagagtcaggaacttcccctgatcttgggagtagctgttggccggcttcaggtacacgtagatgatggttccgtagaagagagagaccactgtgaggtgagaagagcaggtgtggaaggctttctttcgccctgctgctgacttcatcctcagcaccgcggctgcaatcacgccataggagatgaggatgagggagagcggcaccaggaggagagccacccccagggcaaaggtgaatcgcttctaccagcatggtttcctcacaagacatggcaataagagcaggcatctcacacaggaagtggtccaccctgcgacgtccacaccgggagagctgcatcgtctgaggacacatgatgaaggagtttaggaagccacagcaccaggccacagtcaccagctgcaggcagagatgtgggcgcatgactgccatgtagtgcagggaccggcagacggccacatagcggtcatgggacatgacaaccaggaggacgcactcggtggagcccagcatcatgtagatgtagagttgggccacacagccgtggtaggtgatggtcttctctggaccccccaggttccacagcagctgaggggcaatgcttgctgtaaagcagagatctaagaaagacagattcccaagaaagaagtacatgggtgtgtggagcctgacatccatgaccagcaagaggatgatggcagtgttgcccaccagggtcaggatgcagaagatcaagataacagcaaagagaattttctccagtccaggccgatcagaagagcccaccaggatgaatgcctgtaggtaactggcattgtcctttcccat

SEQ ID NO: 465170 - DNA, 1000 bp, Homo Sapiens
ctaagtatcttctctagaattcacaaaagctctccagagttttttcatggatatcttcatttctttgtttctcagagtatagataattggattcaagataggagtgatgatggtataaaacacagcaaggaacttatctacagagtggttgccgaagggccaaatgtagataaagatgcatgggccaaagaagagaatcaccactgtgatgtgagcagtcaaagtggaacgggctttagattgcccagtaggagagtggttcttaatggttatgaggatcagactgtaggagataagcaaaataatgaaacagctcagggagattatgccactgttggcaacaatgactacctgtacaaaatatatgtctatacaggcaagcttagtaaccaaagggaggtcacaaaaaatgctgtctaccacattgggaccacaaaagggcaagttcacagcaaatggtatctgaaaccctgagtgaaggagacccaagagccatgaggtcactacaagcaaaacacataccttcttgttcatgatggtcatgtagtgtaggggcttacaaatggccacatatctgtcaaaagccatggagaccaacagtaccatttcaaccccacccagtaagtgaaggagaaatatctgagtgaagcacccagcaaaagaaattaccttctgcttttttaacaagttcagaatcaccttaggggtggcaaaagaagcaagggtcatatctacaaaagagagattaccaaggagaaaatacatgggagtattcaggttaggggtgttaaacactgtgactataataagaaggttacccaaaactgtgaccacatagataaccgagaagagggcaaagagaagaaactctacatcctgggagctggtcagtcccagcaaaatgaattctgacacttgagattgatttaatagtttcatggcctccatcctacagctcgctcttggatgacctgtagagagaaagaaaagatcactcata

SEQ ID NO: 465171 - DNA, 1000 bp, Homo Sapiens; identical to SEQ ID NO: 157440

SEQ ID NO: 465172 - DNA, 936 bp, Homo Sapiens
ctaggagtgaattttggagcccatcacttttctgagagctttgttcacatccttatttctcaggctgtagatcagggggttcagcatgggaatcacaactgtgtagaacacggtggccactttgtcaacatctccactgttgcctgaactcggcctgcaataaatgtaaaggattgttccatgggagacagtgatggctgtgaggtgggaggcacaggtggagaaagctttgtgcctgctctctgcagagtgtatcttcaggatagtggtgagaattagcaggtaggaggtgaggatgatcatgatggtaacactctcattcaaagtggccaccaggaacagcagtgtctcattcacagtgacatcagagcaagcaagacttaggagagggggtagatcacagaagaagtggttaatcacattagatctatagaagaggatcctaagagctaaggacgagtgaatcagagaacacaccgtcccacagaagtagcagcaagaggtcagctccacacgcagcttctgagacatggtcaccatgtacagcagggggttacagatggccacaaagcggtcataggccatcacggccagcaggaagacctcagtgactccacatgtgcaaaacaagtagaattgcaccatgcaccctaggaaggagatggctttgtccttgttaaagatattagccaacatctttggcacaattattgaggagtagcagaaatctacaaaggacaagtggctgaggaaaaagtacacgggggtgtggagccgagagctgacctgaatcagtgcagtcatgcccagattggctaacaacgtgactccatagatgagaaggaacagcaggaagaggcagactctcaactcagggacatctgatagtccaaggagaatgaactcagccacagtggtgcagttttccttgcccat

SEQ ID NO: 465173 - DNA, 924 bp, Homo Sapiens
ttaacatgatctgctgatcactttcatcatggcctttttcacatccttgttcctcagactgtagatcatgggattcaacatggggatcactgtggtatagaacacagccaccatcttcccctgctccacagactcctctgtgggacgtctgagatacatgaagatcagagtaccatagaatataatgacagctgtcagatgggacccacatgtggaaaaggccttctgccttccttctgctgagcgcattcgcagaatggcaatgaggatgaataagtaagagatgataattacagtcagggaatatgtgaagttaatgccggcaagtatgatcattgtatattcttttacaaaggtcccggcacaggccattttgatgagaggtggatctgcacagtagaaatggttgatctcaatttttccacagaagtacaagccgtaagtccataatgttgctgccagactcgtcagaaaaccataaatgtaagggaaagtaatcagtcgaatacagacaacccttgacattttactgccataaagcagaggattcccaattgccatgtatctatcaaaggccatcgcagcaagaataaaaatttccacatggacaagagcaatgaagaagaaacactgtactaaacaaccagcataagtaattgtttttttatctgaaaacaggttttccaacattttaggggtgacattggaagaaaaccacacatcaacaaatgacaagtgactgaggaaaaagtacatggggttgttaagctgaggactgaccttgattaacaccatcatgccgatattgcccaccatggtgatgatgtagaccacaagaaagatgatgaagaagagaacttgccattctcgacggctcgttagccccaaaagaatgaactctgtcacatcggtgaaattgagcat

SEQ ID NO: 465174 - DNA, 933 bp, Homo Sapiens
ttactgcctcacatatgtcttggtgattgctttgttgactgcttcttttacatccttatttctcagactgtagatcatgggattcaacataggaattactgtggtgtaaaacacagccaccattttgccctgctctacggattcctcagtgggtctcctgagatacatgaagatgggggtcccataaaacatagaaacagccgtcaagtgggacccacaggtggagaacgccttcctcctgccatcggcagagcgcatgcgtagcacagctactacaatgagagtgtaggagatgaggaccaccgagagggaatatgtgaagttaattccagcaataacaatcattgtgatttctttgatgtgcactctcccacaggcaatctggatgagagggggatctgcacaatagaagtgattgatttcaaagtttccacagaagtataagccataagtccatagtgtgcatattaggctgacagagaatccatagacataaggcacagagatgagccgaacacacacagtcctagacattttactgccataaagcagagggttgcagccggccatgtacctgtcaaaggccatcacagccaggatatagacctccacgtggacaacggcaatgaaaaagtagcactgcaccaagcatcccacataggaaatggtttttgtctctgataataagttttccagcattttgggggtaacgttggaggagaagcacacgtccgcaaaagacagatgactcaggaaaaagtacatgggactctgaagctgaggactgatgctaatcaaaatgatcataccaatatttcccaacagagtgatcatgtaaaccgctaggaacaccacaaaaaagagaacctgtagctcctgacgacaggtcagccccaggagagtaaattctgtcacatccgtgaaattaggcat

SEQ ID NO: 465175 - DNA, 975 bp, Homo Sapiens
ttaataaagttttcttatttttaaaaatgttaatatctgtaagttttcacaacctttatccaaggctttctttgaggcatctttcacttctttgttccttagactatagattagggggtttaacatggggatcaccactgtgtaaaatacagaagccatcttgtctgtgtccaaggagtgatttgatttgggctgtaggtacataaagatcagtgtgccatagaaaatagtgacagtcaccatatgggagccacaggtggaaatggctttgtgttgcccctgagtagagcggatccttaggatagcggcaataataaagatgtaggaggtgaggacaatggaagaggaagagatcatatcaaagccagcaaaggcaaatatcagaatttccttcatgtgtgtgtctgagcaggacagagctaagaaggggaggtcatcacaatagaaatggttaattaagtttgggccacagtaagtcagacggaaagtgataacggtgtggaagagggcaaccaggaagctgtatatatatggaactgccaccagttgaatgcagactcttcttgacatcagtgttgaataatgcaggggactacagatggcgacatagcaatcgtaggccatggaggctagaaggaaacactcagtgatcatgaaggtgagaaaacaacccagttgggttgcacaagcatggaaaggaatggtgttgcgttccacaacaaaattcaccatcatcttcggtgtaatagcagaggagtaacaaaggtcaacaaaggccaggtggctgaggaaatagtacataggtgtgtggagtcgagtatcaatcttgattaaagtaatcaacccaagattgcccagcactgtgaccagatagataactaaaaacaccccaaagcacggggcctgaagctctggccggttggtaattcctttcagaatgaatacagtgacataaatgatattaacttcagccat

SEQ ID NO: 465176 - DNA, 954 bp, Homo Sapiens
tcatcttgaatgcatatttttgagggaaaggaaatttaacattccccattggatctgcttgttctttacactgtaaatgatggggttcatcaccgggggtgccagcaggtagatattggccatgataacatggaccagtggagaggcatgcttggcaaagcgatgagtcatagatacaccaaccatgggaatgtagaggaccaggacagctagaatgtgggacaggcagttattgagggcacggagtcgctcagcccaggtggctgtgcccaagatatttttcagaataagtgtataggagatcacaatgagcagaggatccacgataataatgagcaaggcaagagcaaatccataccagctgttgagcctgatgtcagcacagaccaggcggatcatatcctggtggaggcaataggagcgagagagaaggtgggagtggcagaaaggcagtcgcttgagtaagaaaagggagggaagaaccgccagaacacagcagcaaatgatggctaacccagttctaccaatgacttcattggtgaggatggaggcataatggaggggacagcagatggccacatagcagtcaacggacatagccaggaggacagaagactccataaaggagaatccatgaaggaagaaaaactgagcaaaacaggcctcagagctgattctacgaacgttgaaccagagaagctgcatgactgtgggtagggtggtgagggtgagacccaggtccgtcagggccagcatggagagaaacagatacatgcgctggtggacagatggctctgtgcgaatgacagtgaggatggtggtattgcccatgatggagatggtgtagagacagcagacggggatggagatccagatgtgggaggcctcaaatccagggatgtccgtgaggatgaagtagatgccttcttgtgtggtgttagtcacctgggacat

SEQ ID NO: 465177 - DNA, 855 bp, Homo Sapiens
tttttttttttttttgtctttgtacaaaattttattaaaggtctttagagagcaacatccagactccagaatacagctgccaaggagaccctgttatgctgtggggactggctggggcatggcaggcggctctggcttcccacccttctgttctgagatgggggtggtgggcagtatctcatctttgggttccacaatgctcacgtggtcaggcaggggcttcttagggccaatcttaccagttgggtcccagggcagcatgatcttcaccttgatgcccagcacaccctgtctgagcaacacgtggcgcacagcagtgtcaacgtagtagttaacagggtctccgctgtggatcatcaggccatccacaaacttcatggatttagccctctgtcctcggagtttcccagacaccacaacctcgcagcctttggccccactctccatgatgaaccgcagcacaccatagcaggccctccgcacagcaagccctcctaggagtttgtaacgcagagactctgcctgggcaatggcacacagacctctagtggccaccttttcagcataaagctctacactgccctctggaaagccaaacctcttctgaactacagcagtcagttcccgaatccgccggcccttctcaccaagaacattctgtgttctggtggctaagataatgatttctgtcctggttggtgtaactcgcacctcaactccagagtagccatcttcagccagctcccgagtaagaaactcattcagttcagctttgaagatgccatcagcgacaaacttcctcttcttggatatttgcactgccatcttgccgccgcgctccgctgaaaggaaagg

SEQ ID NO: 465178 - DNA, 1000 bp, Homo Sapiens; identical to SEQ ID NO: 159526

SEQ ID NO: 465179 - DNA, 951 bp, Homo Sapiens
tcaagttacttttttgaagaaaaacactttcacaatatggtcacgaatttgcttggtcttcactccatagacaatagggttgagaaaaggtgggactaacaggtaaagatttgacaagaggatatgaatatatggtggtatgtgtgaaccaaacctgtgtgtgaagaaagagaagaaggcaagaaggtagaactgtaggaagacacaaatgtgggcaatgcatgtattaaaggccttgaatcgtgcctccttctggggcagctgaaagacagtgataaaaatttggacataggacaaggttataaatattatgtcaaaccctaggattgcaaaggcaacgaataggccatatatcttgttgactcggatatcttcagtagccagcttcacgatggccatgtgctcacagtaagagtgagagatgactgtagttcgatagtgtttcagacagcatttgatgagccctaaggaaggtattataagaatggcagccctgagtgtcaccccaagtccaatatgagttaagaactgctgggaaaagatggtggcatgtctcaaggggatacagatggccacatagcgatccagggccattgccagaaggatacccgattcaattgcctggaatgagtgaataagccacatttgaaaaagacaggcatcaaaagaaatctctggcaaatgaaaccagaagatgcctaacattttgggaagaatgcaggtgttaagtgcaatgtctgtggctgccaacatggccaaaaaaatgtacatgggtatatggaggctgttttcatatttgattataactaaaattagggaatttccaatcacaccaataagatacatggcagagaaaggaatcccaatccaacactgcactgactccagaccaggaatcccaattagtataaacgcagagggcatgaagactgagccattgaatgtcggcat

SEQ ID NO: 465180 - DNA, 942 bp, Homo Sapiens
ttagtgatctgtcttgaagaaaatcctcagcactgtctccctaatatgtttggttctgaccccatagattacaggattgagggtgggaggaacaaccacatatagattagccaagaaaatgtggatatattggggaatatcatggccaaagcagtgtgtaaagaaagagaaaaatgctggtgtagaaaaggctaagataacaccaatgtgagagccacaggtgttgagagctttgagtcgagcttcccaggagggcaggcagaagacagcatagaggatcctgatatgggagagaataataaggagcacatccaataacaagagagaaatactgccaagaccaaacataatgttgactttgatgctggcacaggccagacgggcaatgcccatgtgctcacagtaagtatgagggatgatacgatgtccacagaagggcaaccttaagaggagaaacaccagtggaatgaccatgtacaagctcctcaggacagcaatgcctgcaatgaggctgatgattttgctggtgaggatcatggtgtaccaaagaggtttgcaaatggcaatgtagcggtcaaaggccatggccaccaatacgatgctctccatgacagtgaagaaatggatgaagaacatctgagaaaggtagcctccaaaagatatttccttgatattgaaccagaagatgcccagcattttgggaatggtggccgtagacaagctcaggtcaatggaatccaacatggccaggcagtagtacatgggctcatggagactctgctcagtttggatcacaaagaagatagcagcatttcccaggagtgcaataagatacacagagaaaaaagggaatccaatccagatgtgcacatcttctagccctgggatacccagcagtaggaatgaagaagtatggaactgggtgtcgttagctataggcat

SEQ ID NO: 465181 - DNA, 966 bp, Homo Sapiens
tcacatgctgtaggatttggtatccttagaacctgaaaggatccttatgacacagtctcgtatctgtttggttttcaccccatagacaatagggttcatagtgggtggtaggagcagataaatattggctacaatgatgtggcaagaaggggggattatgtgttccccaaagcggtgggaaaagaaggagaagaaagctggagtataggagaaaacaatggcacaaatgtgggcagtgcaggtattaaaggccttctgccgagcatctgctgaggagaggctgaccactgcccggagaatcatggtataggagatggtgatacacagtatgtcaaagcccccaatcaggagggcaaccatcagaccatagatggcattgaccttgacattaccacaggacaatttggctacagacatgtggtcacagtaggtatggggaagtatattgcctctgcagtagggcaggcgcttggtgaggaaagtaaagggaataatgagtaatacccctctcaggaaggtggcagtcccaacctttgcaattacaggattggtgaggatagttgaatagcgtaaggggtagcagatggccacatagcgatccagggccataagcataagcaccccagactccatccctgtgaaggtgtggatgaagaacatctggacaaggcattcatcaaatccaatgtccttgagatgaaaccagaagatgcagagggctttagggattgtactagagcacataacaaggtcagtaaaggaaagcatggccaagaagtagtacatgggtttgtgcagggcatcctcatagtgaatgaggtagaggagtccacaattccctaccatagccacaacatacatagagcagaatgggaaggaaatccagagttgtgtgtcttccagtcctgggactccattcagaataaatgaagctggtattaggtctgttttattcagtgttagcat

SEQ ID NO: 465182 - DNA, 853 bp, Homo Sapiens; identical to SEQ ID NO: 335637

SEQ ID NO: 465183 - DNA, 939 bp, Homo Sapiens
tcatgccaatatcccaattctctttagctgcctcctcacagcctccttgatctccttgttgcgcaagctgtagatgaaggggttgaggaagggtgtgagcactgagtagaccactgccagggcctggtcatagtccagtgagtagctcttcttcagctgcacatacatggaaaggatgctcccatagaagatgagaaccacagtgaagtgggaggcacacgtggagatggccttcctcttgccggcagctgagggaattctgagcactgtgcagatgatctgcacataggagcagaggatcagcaggaaggtggctaggatcttgcaggaatttataacaaaatctactaggacatttatagacgtatcagtgcaagccaaactcagcacaggagggaagtcacaaaagacgtgctgaatgcgattggggccacagaatgggaggcgtgaaatcaaggaaatttcaactactggcccagccaagcctcccaaccaacagccaatggcaatctctgcacaaagtgttggggtcatgagggttgggtagtggaggggccggcagatggctaaatacctatcgtaggccatagctgtcaggagatagcactcagtcgctccaagggagtgaaagaaatagatctgcaggagacacccagagaatgaaatggtctttttctcactgagcaagtttgccagcatcttagggatggtggcagctgtatagccaagctctgagaaggagagaatgctgacaaagtggtacatgggtgtgtgaagccgggagtccaggcagaccaccaggaatatcagcaggtttcccaacacagtcatgaggtaaatgagaagcaacaagaggaagagataaatctggacaccctggagatgggggaagcccaagatgatgaattctgctacctggctccagttccctgtgtccat

SEQ ID NO: 465184 - DNA, 981 bp, Homo Sapiens
tcaaaacagtttacccctcagcgttttctgcacggcagcctttacttccttgttcctcaggctgtagattaggggattcaacatggggattaccgtggtgtagaacacagaggccacattctcctgggtcaaggaactgattgtggagggttttaagtacatgaatgcagttgatccatagaacattcccacggctgcaaggtgggagctgcaggtgctgaaggctttggatctcccctctgtggtgctgatgccgaggatgctggagagaatgaaggtgtaagaaacaagaactgttaagctcgtgactatgatgttgaatccagccgaaaagaagactgtcatctcaacatcataggtgctagagcaggacagcttcatgagagggaggatgtcacagaagtagtgactgatgaggtgctcacaatagggcagttttaacatgaggccagtttctattgtggagccaatgagtccgatggcgtagaccacagccaccagcagcaggcaggtgtgatgagacataatgatgttgtaaagcaaagggtggcagatggcaacatagcggtcgtaggccatcactgtcagcatgtaacactcagcaatgacaaaaacaaggaagaagtagagctgtgacatgcaccctgcgtaggagatgatgtttttctctgacacaaagttcaccagcatcttaggggtaatgacggaggagtagcagagatccatgagtgacagattgctgagaaagtagtacatgggggtgtgcagctgagagttcagacaaattagagtgatcatgcccaggttccccacgatggtgaccaagtagatcccgaggaagaggagaaagagggggagctggaggtctgctctcttcgttaaacccttgagaatgaactctgtcactgtagagtgatttcctgcagccattctcctctgggtgggaggcctgcagggatgcatgggagacaagaaccccat

SEQ ID NO: 465185 - DNA, 939 bp, Homo Sapiens
ttaaacaaaaatattacataagttattccatgtccttcgtagggcatattttacatctttgtttcgtaaactatagatcaagggattcaacatggggataaccagggtgtaaaatatggaagccactttatcagtgtcaaaggaatgactggacttgggctgcacgtacatgaaaagcaaagtcccatagaacactatgaccactgtcaggtgggctccacaggtagaaaaagccttttgtctgccagcagaattcatcctgagaatggctacaaggatgagcaggtaagataaaagaactatcagaagagatgaaatcaaatcaatagctgcaaagatcagaattatcaattcaatttcatgtgtatttgaacaaagcaaaggtaacaaagggagactgtcacagtagaaatgactaatgacgttgtagccacagaaggataaagtaaaaatctttatggtgactagaagagaaatgaatgtgcaatagaggtaagggattgctaccagcacctgacatacccttcgtgacatgattactgtgtatagcagagggttacagatggccacatagaggtcgtaggacatggctgagagaataaaaagttcactaccaatgaacacaagaaagaaagctagctgtgttgcacaaaaataataagaaattatattcttatccacaacaaaatttactaacattttgggtcccacagttgttgaataaccaagatccatgaaagccagatgtctgagaaaaaagtacataggggtttgcaacctggagtccaacttggtgaggacaatcatgcccaaattgcccatcactgagatcacatagatcatgaggaacaatgcaaataatggtgcctgcagctcagcgatatctgtgattcccgtaagaatgaattcattcaccgttgttagattgtgttgttccat

SEQ ID NO: 465186 - DNA, 1000 bp, Homo Sapiens; identical to SEQ ID NO: 335640

SEQ ID NO: 465187 - DNA, 1000 bp, Homo Sapiens; identical to SEQ ID NO: 335642

SEQ ID NO: 465188 - DNA, 1000 bp, Homo Sapiens
gaaatggccagcagagattttatttattttactagaaggtttcaatctctatgacagctccaaggtggtgggatggggagggcaagagagaaagcagggagcctgggggaggcacataagatagtggtctctggcaactaaataagctgaggggactcctggaccgagctcgtctgggtttgaaaaatccgcctgctgacttccaccctagtcccggcctcgtcctcatcttcttcactcgacttgtggcgggtgttctggtagagcacagcacacacacctgtgagccaggcagccacagttcccgcggcgaagatgcagaagccgatgagcagcaggaagatgtagtctttgtggtctaggtgcgtgatgcacatgtatcggagtgggttccccacccgggtgatgggccaccctgtcagctctgtgggctccacacatgtggcatttagatcatctgaggggtccatatggaacactattaagaagatggcgaagtccaggaaagagcagttgcacttccaggggtttccactcagaaacagggtctccagagtagtgaggtggtataaggcagcactgtccagggtctgcaagccggtatttctgaggtccaggtacctcaaagaggtggtgttggcaaaggtgaacttgtgaagcgataacaggtgagggttgttggcaatgttcagctgcaccaggttgctgagcaccgagaaagtgaatggggagatcgaggttaggttgttggagctgaggtcaaggtagatgagtttgaagaccccgatgaaggtataatccatcacctctcgaatccggttgttctgacagtccaaataaacaaggtcactgaggagtcctagatgcattgctggcaaactagtgattctgttctcgttcaggaacagcctccgggtgttcaggggtatgtcaagggggtattcggttaactgcttccctgtgcagattacttcttgggcttgacacagacaattatttg

SEQ ID NO: 465189 - DNA, 1000 bp, Homo Sapiens; identical to SEQ ID NO: 335644

SEQ ID NO: 465190 - DNA, 1000 bp, Homo Sapiens; identical to SEQ ID NO: 344712

SEQ ID NO: 465191 - DNA, 930 bp, Homo Sapiens
ttaatcattatctgaagtcactttttttctccaaagcttccttattgcactttttacctcagcatttctgagtgtgtagaccacgggatttaacattgggaccaccatagtataaaatacagcaacagctttatcaatgggcagagtggtcactgagcgcagatacacaaatatacagggcacaaagaataagacaactactatgatgtgagaaatacaggtggagagggctttacacctcccctccaagctattgttctttaaagatctcaagatgatcacataggataccaccaagataaggaagtttaataagcagataaacccactgttcacagcaacaaagagaccaagggtatgagtgtctatgcaaacaagttttaacaatgggtacaagtcacacatgaagtggcctatgacattggggccacagaagggcagccatactgtaaagagaatctgaatagttgcatgaagaaatcctcccacccaggccactgccaccaggagaatgcacaggctgtggctcataatggttgtgtagttcagaggtttgcagatggccacatagcagtcacaggccatcactgtcagcaggatgatctcagtagcaccaaaaatgtgttctgcataggcttgagccatacacccattaaaggagatgattttcttctcttgaaaggaatccacaatcaacttaggagctgaagaagaagaataaactgtgtctatcaaagaaaggtgggtcaggaagaagtacatgggggagctcagagcctggctggtggtaatggtaaccacaatgagcaggttgcctgaaagtgttatcatgtaaagaaccaaaaatactacaaacgtgactttctccattatggggttctgtgtaagacctattaaaatgaattcagtcacattctttttcttctccat

SEQ ID NO: 465192 - DNA, 948 bp, Homo Sapiens
  misc_feature (847)..(849): n is a, c, g, or t
ctacatgaggacggacactcctcctataataaatatagttaactttttacccaagagtttttctatagcatttctcatctctgaatttctcaacgtatatattaaaggactcagcatgtgtgtgataatggtataaaacacagtcatgaacttatcagtaggaaagtttgaaacaggtctaacatatatgaaaatacagggtacaaaaaagaggacaacaacggtactgccggagctgcaggtagacaaggctttacccctcttttcctgactgtaagttttaagggagcttaggatgactccataggagattaacagaaggttgaaaatgaccatacagattgctccactattgacaacaacagtgaggcctataaagtaggtgtcagtgcatgccagttccagtaatgggtgcatgtcacaactgaaatgaacaatgacattgggaccacagaaagggagactgtacacaacaatttgaaacgcagaatgtacaaaacctccaatcatggccaccaccaacagaaggaagcaaacctgtcgattcatgatggtcaaatagtgcagtggcttacagatggccacatagcgatcacaggccatcaccaccagaaggaagacctcagccccaccaaagaaatggtctataaatagctggcccatgcaaccttggaaggaaatagtctttttatcacagaataagcctacaattaacttgggagaaatggtagtggaatatgcagcatctataaatgacaggcaggcaaggaagaaatacattgcggaacacaaagaagggctggagaatatatccaccacaatgagcaggttccccaccactgtcacnnnatatgtgagtaaaaacatgacaaataatgctttttgcacaccaggatcctgaaaaaagcccaggaggacaaattctgtaatattgttattctgtctcat

SEQ ID NO: 465193 - DNA, 1000 bp, Homo Sapiens; identical to SEQ ID NO: 335645

SEQ ID NO: 465194 - DNA, 936 bp, Homo Sapiens
ttaagaaaagtatatcttcattgacagctctttgattaatgcttcttttacatttttatttctaaggctataaattataaggttcagcatagggattactgtggtataaaatacagctaccattttaccctgttcaacagattcctttgaggggggtctgagatacatgaagaaaagggttgcatagaatatagtgacagctgtcagatgggagccacaggtagaaaaagctttttgcctgccctctgtagagcgaatctttaaaatagcagggaaaatgtaaaggtaggaaatacatatgatgaagagagaaaaagaaaggttccagccagccacaataaacattgacaactccttgttgtaggtgtcagaacaagccagcttaatcagtggtgggtccgcacagtagaagtgattaatttcattggggccacagaaggctaggttgtaggtccacatggtctccatcaggccagtgagcgctccatacacataaggcaccgtgatgaggaaggagcacacactcttggacattctgctgccataaagcagagggttgcagatggccatgtaccggtcaaaggccatcacagccaggatgtagatctcaacatggaccaaggcgataaaaaggtaacactgcacaagacaggcaggataggaaatgcttttcttctctgaaaggaaaatctccagcatctttggagtcacattggaagagaagcacagatccacgaaggataagtggctcaggaaaaagtacatgggcatgtggagccaggcgttggcctggatgaggacaatcatgccaaggttccctgccaccgtgaccatgtaaatggccagaaacagcgtgaagaggagaatttgtaattcccggcgactggtcagtcccaggagaatgaactcagtcaccaacgtgcagtttcttctcat

SEQ ID NO: 465195 - DNA, 1000 bp, Homo Sapiens
ttttacagagaatataaaaatacattcactttattttagaaaaatgaagactcatagagtaagcttatcacaaactggcctattaggagtcacagaattcacaggaaacaatttctgaagaccaggtgcctgctgccacctctccaagcaggccagagtccagtagagaatgcgattcaggaagatggctcctcagagggcagggaggttagctacggaggccgctcacgtggaaatgtccagtgaaccaatgccaaggaagaagataaaattctctggggctgaccacaacagtgggggtggataaagacaaaccacttgcctgtacttctcatcttctatttgttcatttcactgctggaaggtgacctcttttcccctaatcttctttcaacccagagagtttaagtcttctccagctcaatcctaatccaccccatttcccatggtctctactcctgggagaccagccctggtggcatctcttcctcctgtccctgggccagaatctgctggagtcagggtctgctgggtagaggcgagtccaggtactgactgtagtggtttgctactgaagtcttgcttgctgtcctgatctctttacctggtaggtcctgggactgccactttcctggggggctgcagattgctgcgagtggcacccatgacaggaagatttagtcgctgggaaacaggaaccttgtgtccactttcccgcactctgtgtcctgcagtgcttggtcttggaagcccttttcgagttgacagagaatccggaggtagggcacctctgccaggtggcacactccggctggtgagtggcattcggctggcaggcccgcaacttggctgctctggtctcctcactggctgctgctctcccactgggcccggctctcccccggactgggggagtcgatcgggtaagaggagaagatgctgggcttttggatgcagggaacagattgcaagtgggtgactccctcttcatgttggaggg

SEQ ID NO: 465196 - DNA, 1000 bp, Homo Sapiens; identical to SEQ ID NO: 157442

SEQ ID NO: 465197 - DNA, 1000 bp, Homo Sapiens
atagatacaagctgaagttgtgttctgtaggcaaaagcctggacacacaaagtgagggctcacatttccgtctccacttgggccctgctggtgcgggctgtgtctgggtgtctcctcccctcctgcctcctttcctacaagtggggagtcgagtaggactgtcagccctaacttgcaacatctcggggtggtttgtgtgtgggggggtgcttgtggctcggtttcattggtacttaaacctggcttggtgcgtgagtgtaaatttttaattgcactgtaatttcttcagtccccagcccgccctcgtcccccaccgcaagtatcccccactactcccccccacccccgcggccctagctagctgacttgactggcacgcgccgggagcccgggctcgggcccctcggagcgtctgattggctgcggggcagctccggtctgctctgcctgcgccctcattgggcgagaggcgcagccagcggcacttcaaagcgggtgctcctcgcacttaggctgagtttagccggcgggagcctggagtccgctcggcacgagcgcggggacgcgggagccgcgcgggacccaagcagtttttccgagcagccgccaggctcagccccgctcccagcctcgctgcgcagccagagacctgctatggccacgtctatactcggggtaagtcgcaagcgcggcaacgcatttgcttgttttaaccggagtaatttttcgttatggcttctggggtctgcggctccggagaaactgttgctgctagactgcagcttcagcttctattagcactttccacatttctgggactgatttttccccaagtttttggaacccagaaagatgcctttgcaagaaaaggccttcttaatcaagtcctttttcatttggtttcaaaaaaaagctagaggtttcttttcttcccctcgtgatttataccccatcccccgccttgctttggggattttgttgcaattatgcgacaatggtg

SEQ ID NO: 465198 - DNA, 942 bp, Homo Sapiens; identical to SEQ ID NO: 335650

SEQ ID NO: 465199 - DNA, 1000 bp, Homo Sapiens; identical to SEQ ID NO: 335652

SEQ ID NO: 465200 - DNA, 1000 bp, Homo Sapiens; identical to SEQ ID NO: 335653

SEQ ID NO: 465201 - DNA, 1000 bp, Homo Sapiens; identical to SEQ ID NO: 335654

SEQ ID NO: 465202 - DNA, 1000 bp, Homo Sapiens; identical to SEQ ID NO: 335655

SEQ ID NO: 465203 - DNA, 1000 bp, Homo Sapiens; identical to SEQ ID NO: 157445

SEQ ID NO: 465204 - DNA, 1000 bp, Homo Sapiens; identical to SEQ ID NO: 335658

SEQ ID NO: 465205 - DNA, 1000 bp, Homo Sapiens; identical to SEQ ID NO: 335659

SEQ ID NO: 465206 - DNA, 1000 bp, Homo Sapiens; identical to SEQ ID NO: 157447

SEQ ID NO: 465207 - DNA, 1000 bp, Homo Sapiens; identical to SEQ ID NO: 335660

SEQ ID NO: 465208 - DNA, 1000 bp, Homo Sapiens; identical to SEQ ID NO: 157448

SEQ ID NO: 465209 - DNA, 1000 bp, Homo Sapiens; identical to SEQ ID NO: 335662

SEQ ID NO: 465210 - DNA, 1000 bp, Homo Sapiens; identical to SEQ ID NO: 157449

SEQ ID NO: 465211 - DNA, 1000 bp, Homo Sapiens; identical to SEQ ID NO: 157450

SEQ ID NO: 465212 - DNA, 1000 bp, Homo Sapiens; identical to SEQ ID NO: 157451

SEQ ID NO: 465213 - DNA, 1000 bp, Homo Sapiens
tttttttttttttttttttttttttttaaatgtataaccttaaatatttatttgagaaaacaaataaagatccaaatacgtgagttgatcatctgataaaagtaagagttgacaaaaaaggtacatcttctccaatccgaaaacagaaagtgggaaagatcaaggtatcactagaggtcaatgaaacaaaacatacaatagtggatgacaaaagccaatctctgaatctttgaaaagaatataataaatgaacatctgaaaccagtgatcgagaaatgttttagataaggcacaaaaagataccaagaatgttaacactaggctgtacatcctaaaacagtcagatgagctcactgttataattctggttcaccgcaagaaccttagcacaaagaaaggactcaacaaacatttggatccatgaataaaattatcttcccacatataaccacctgcctaaaacattctcctcctccttgaattaaattcaccatgtctgcatcataggaggcccaaggccagtaccccctccccatctgcacaccctgtgttcaaaccagtcccagctcctgtcatgttattggcttctgagtatctgtattaatagttgttcctgccagcatatgaagatgaacaaatacacaactgagagagatccagggattttaatccacagatgccagagcttgctgggatgtagtcagaaatcaagctgaactcaggagttcacagtctttcctgtaatgatggttgggaggtgagggaagtcagaggccttttctaggatctttctccatgctgctgtcctccaggaagtcatggcaaatttacatctccagcaggttgtagaccaacagccttgaaggacacaccagggtctctccccatggtgtctcctgtactctgctcctggggtcgagtcggctgctggggtttatcatctggaagattctctgcctcagcctcagcctcagggaacaacagcttaccctgcagggta

SEQ ID NO: 465214 - DNA, 1000 bp, Homo Sapiens; identical to SEQ ID NO: 157452

SEQ ID NO: 465215 - DNA, 942 bp, Homo Sapiens
tcaaacctcactcggagttcttgggcttctgagcattcttttcagggccagcttcacctcttggttccgcagagtgtagataagggggttgaggaaaggagtgatggccgtggggactagggcagctgccccatccagggggctgttggtttcaggcctcaggtagatgaaggcacagggcacatagtacacggtgaccacggttacatgggctccacaagttgaaaaagcccggcgccgcccatcagctgtgtggattctcaggatggcctgaatgatctgtatgtaggagaggaggatcagggagaagcaactggcaaccaccaccccaatgtctacaaacgtcaccagctcgttgactgttgtgtcagcacaggccagtctcaacactgcagggatgtcacagaagaagtaatccacctgattgggcccacagtagggcaggcggaaggttaggatggcctggagagccccatggatggatcctgccatccaggctccagccacaagcaaggcgctcagcttagcagtcatgagcacagggtagcgcaggggctgacatattgccaggtacctgtcataggccattagggtgtagaggaagcactgggtgctgcccaggaagtgatagaaatagagttgagcaacacagccaccaaatgggatgggtttgacacctaaagtgaagttcatcatgaggcgagggacaatgatggaggagatgctcatatcaatgactgagagaacaccaagaaagatgtacatggggcgggcatggagccttgggtctgcccagacagtgattaaaataagcaggtttcccagctgagtcaggatgtagattagaaaaaagaacacaaaaaagagtgtccttagcctgagtggatacggaattcctgtcaggataaacgcagtcaacagtgtgctgttgattctttccat

SEQ ID NO: 465216 - DNA, 942 bp, Homo Sapiens
ttagaatatatttctcctctgaattttaatcagagctttcctcagtgcaactttgacatccttgttcctcaaactgtagatgaggggattgagcatgggcaccacattagtgtagaaaacagaagaaacttttccctgctccatagatccagaagaatatttaatatacatgaatgccgctgacccaaaaaacagagacagagcaatgacatgagagctacaagtactgaaggcttttgatcttccttgagtggatttgatatgaagaatgctagtgacaatgaaaacataagaaatgaggatggtacaactgggtaccgtgatattagtacccacaacaatgagaacaaccacctcgttgacataggtgctggtgcaggaaagctggaggagggggagtatgtcacacaagtaatggttgatgatattagcactgcagaaggtgagtctaagcatgcacccggtgtgggccgtggctccagccaatcccattatgtaagcagcaaaagtgagcatagaacagacctgatgggacatggtgaccttatacagcaatggattacagatggccacatagcgatcatatgccattgaagtcaacatgtaacattcagagatgacgaaaaagagaaagaaaaacagccgagtcatgcacccaacattggagataatattcttttttgacacaaagttcattagcattttgggagtgaaaacagaggagtaacagagatcaatgaaggagagattgaagaggaaatagtacattggtgtgtggaggtgagaatttagaccgaaaagagtgatcaagccaaggttgcctaccatggtgacaatgtagatcactagaaacaggaaaaagaggggttgccggaactctggatgatctgttaatccagcaagaataaattcagtcactaaggagttgtttctagccagcat

SEQ ID NO: 465217 - DNA, 930 bp, Homo Sapiens; identical to SEQ ID NO: 335667

SEQ ID NO: 465218 - DNA, 1000 bp, Homo Sapiens; identical to SEQ ID NO: 335668

SEQ ID NO: 465219 - DNA, 978 bp, Homo Sapiens
ctaaacattgcttttgaacatttttgtgaatgaagctattacttgcttgtttctcaggctgtagatcatgggatttaataaaggaactatgacagtgtaaaatagagactccatcatatcttggtcatctgcttgcggagatgcagagcccagatatttgaaggtgagggggccatagtataaagatacagataagagatgagccccacaggtggagacagcttttcgtatccctttgatagacttcttttctaagattgtaaagaggataattgtataagatataagaatagttccaatggtaaaaacttgaacagaacctgcgaaaataaaaaccattagaaagttaatagaggaatcagtacaggaaatctttaacaatgggataatgtcacagtaaaagtgttgtattatgttggaattacagaaggttaatctgaatgaaaaagcttcatggattaaagcatgaagaaggccacctataaatgacaagactaatagctgaatgcatagttcattggtcataatgactggataaagtaaagctttgcaaatggctacatagcgatcatatgccattgttgccaagagaaaacattctgtggttacagtggttacaagggaaaaaaattgtaccatgcattcagagagagatatcatcttactcttagctaagaagttgatcagcatcttcggagtcactgtggatgataacgaagcatccacaaaggctaaactcccaaggaataagtacattgggatatgaaggtgagggtctttccagatgagaacaattagaccaagattccccatgatggtgatgagatatattaccaagaatgccaggaagagcggtattttacagtcaggttgatgtaaaaatcctgtgagaacaaactctgtcagcaatgttgcattttcctcttccatctcctcactgcatgtcctctgaaaaatgaagcaaaggtaaaggaacat

SEQ ID NO: 465220 - DNA, 945 bp, Homo Sapiens
ttaaaatggtcttttagaaaaacacaaattcttttgtaatacatcccagaagacttctttcacctgctggtttctgagagtataaatgaagggatttagtaaaggggcaattgaggtatagagcaaagctacacctttggatacagtcactctttcttttgcagatggtttaatatacataaagatacagctaccgtatgtcatggagacaacaatcatgtgggaagtacaggtggaaaatgctttgttcctttgctgtgcagaagagaatttcagaatggtcttaataatgcaagtgtaagagagaatcactaataccagtgtgaccacaagtgtcaccacagctaaggtaaaagacatcaattctaggacatgggtatctgtgcaggagatctgcagaataggagaagtttcacacataaagtggtcaatagttttggaagcacaaaaatccagcttgagtcccatgaccaatgggggaaatatgattaagaatccagttacccaagagctaagtacaagttggtagcagactttgctgctcataatgattggataatgcagtggtttgcagatggcaacgtagcggtcataggacatggcagccaggaggtaaaactcagtaactcccggtaaaaggataaaaaataattgagttgcacaattattataagaaatggttttgtctctagtcacaatggttatcaagaatctaggaatacacactgttgtgaatattacttccaaaaaggagaaattacggagaaagaaatacattggcgtcttgagccggggatccagcagggtgaggatgatgatgattaagttccccatcaggctcaaggtgtagttgagaaatagaaacaggaaaatcacaatttgcaactgtgggtcatctgtcaatcctaggagaatgaactctatttccattgatttgttcttcat

SEQ ID NO: 465221 - DNA, 1000 bp, Homo Sapiens
acttgtgtctccccccttgttctctgcccccagaccatggccaaagcctttcccacaatgtcccatctgagagccttatggatgggctcacagggcagaggtaggaggagaaagaggaaggggcatggtgggcacccagccctgggggcaactgagggcacagccacgtccccagcaagggcacgctccagtagtagtgggggagaaggcaccagcagaggcagcgctgaggacctgggaagaaaaggaccctgccccaggagatggtctcagcaaggagcgggatattaggaactgagacccaagactcagagaggcaggtgccttgggtgtgcctgagcttgggtcaggatctcacaggcctcacgccccagaaaaaccccgccttaaccaaccatctcacgcggagtcagcctcgcctggcaggggggcacccaggtccagagcccgggccctgtcttgggtctctggctctctggcacacagagagcgctctgcagagggcagccctcgcaggcagaccctgttccagcagggctgaggggcagccgtgtggcccagcggtcagtgcagcacctggtccagctcatacttctcgcagaagcggctggtgaaggggaagcaggtgaggtgctcgatccagggccagttaatggggtagatgtacagccacagcacgagggcggcgaagaggccggcaaaggccagcagtgacaccaggatgagtgcccgcttgcggtacttgtcgctggtgccgaaggtgatgtagggcaggaaggcgaaggccagcagcaggccactgaggaagccgaagatgtgggcgatgttgtcgatccagggcaggaggccacagatgaacaggaagagcacgatggccgagaggttgaggaaggccttccagggcctctccagcagcggccagctctggaagagctccacgaagaggcaggcgaggaggccgaactgtgagccggccgggcccacctctgcccggtatggg

SEQ ID NO: 465222 - DNA, 939 bp, Homo Sapiens
ttacttgtctgaagcagaaaatatctttctaaatacagctttgaaggcttgtttaacttgctgattcctcagagtataaataaatgggtttaacaacggggcaactgaagtattgagcacagttactcctttgcttaaagcaactctttcattcgctgatggctttatgtagataaacatacaactaccataagtgatggagacaacaatcatgtgagaagagcaggtggaaaaggctttcttcttttgctgagctgaagggaatttcagaattgtcttgatgatgtaagagtaagaaaggattactaaaaacaatgtgacaataagtgtcatcacagctaataaaaaggcaatcagttccagtaaatgtgtgtctgagcaagaaagttgtaggataagagaaatgtcacaaatgaaatgatcaatgatatttgaagcacagaaatccaagttaagacctaaaatcagtggagtgaaaatgatcaggaatccagttacccaagaactgaatacaagctggtagcaaactttgttactcatgatggacatataacgcaaaggtttgcagatggcaacatagcgatcataggacagagcagctagaaggaaaaattctgtaacccccaagaatatgtaaaaaaacaactgagatatgcaaccattacaggaaatggtcttttccctggtaacaatggtgattaggaatctgggaatgcaagcagttgtgaatgaaatttccagaaaagagaaattacggaggaagaaatacattggagtcttgagctgggaatccagcagaatgagggcaatgatagtgaagttccctatcatgctcaacacacaatttagaagtagaaataagaaaattacaatctgtaactgagaattatccgtcagtcccagaagaataaattctatctgccttgtatgattcttcat

SEQ ID NO: 465223 - DNA, 942 bp, Homo Sapiens
tcacttctcttcacacaaaatatatttggtgaccaccttcctcatggctgcctttacttccttgtttctcaatgtgtaaataatgggattaagtaaagggaatattacagtatgaaacacagacaccactttatctagggaaaatgagtcaaatgggcgagcataaatgtagatggatggcccaaacattagcaccacaatggtaatgtgggaatagcaggtggacatggccctgttggtattctcacctgagcctgaatgtttcttgagcaaggccagaaggaaggcataggacattaacagagcaatgaaacacaccacagagatcagaccactactacagatcatcactaactcctctgggaaggtgttggcacaggcaatccggacaacctgtgtgatgtcacagaagtaactgtctaactcattgggcccacagaaaggaagtcgaacaatgagagccacctgtattatagaatgaatgaagccccccatccaggagagagccaccaggatacagcagagacgtcgattcatgatggtagcatagtggaggggtcggcagatagcagcatagcggtcataggccatcactgtgagcaagaacatctccgaagccccaacaaagtgtaagaagaagagctgtgcaatgcatccaccaaaggaaattatcttcctctccacaaagaagtctatgagcattttaggggctgtaatggaagagtaccaaatatcaaggagggccagattagccaacaggaaatacataggagaagtcagatgagggtctagcctgatggtgcaaatgataaggatatttcctggtaggatgaacaaatagaaggatagaaatataacaaataggactagttggacctcccgagtctgggataggccagtgagaacaaattctgtcaccttggtgtaatttgcagtttccat

SEQ ID NO: 465224 - DNA, 945 bp, Homo Sapiens; identical to SEQ ID NO: 335672

SEQ ID NO: 465225 - DNA, 1000 bp, Homo Sapiens; identical to SEQ ID NO: 335673

SEQ ID NO: 465226 - DNA, 1000 bp, Homo Sapiens; identical to SEQ ID NO: 335674

SEQ ID NO: 465227 - DNA, 933 bp, Homo Sapiens
ctaaacatcatttcttttgaacatttttgtgaatgaagctattacttgcttgtttctcaggctgtagatcatgggatttaataaaggaactatgacagtgtaaaatagagactccatcatatcttggtcatcagcctgtggggatgcagagcccatatacatgaaggcgaggggcccatagtataaagatacagataagagatgagctccacaggtggagaaggcttttctcatacctttgacagacttctttttcaagattgtatagaggacaaatatgtaagatataagaacagtccctatggtaaaaacttgaattgaacctgcaaaaataaaaaccattagaaagttaatagaggaatcagtataagaaatctttaacaatgggataatgtcacagtaaaagtgttgtattatgttggagttacagaaggttagtctgaataaaaatccttcatggattaaagcatgaagaagaccacctacatatgacaagattaatagccggatgcacagtccattggtcataatggctggataaagtaagggtttgcatatggctacatagcgatcatatgccattgttgccaagagaaaacattccgtggttacactgattgcaaacgaaaacaactgtatcttgcattcagagagagatatcatcttactcttagctaagaagttgatcagcatcttcagagtcactgaggatgataacaaagcatccacaaaagctaaattcccaaggagtaagtacattgggatatgaagatgagggtctttccagatgacagcaatcagaccaagattccccatgatggtgatgagatatattaccaagaatgccaggaacaggggtattttccactgtggttgatataaaaatcctgtgagaacaaactctgtcagcaatgttgcattttcctcttccat

SEQ ID NO: 465228 - DNA, 727 bp, Homo Sapiens; identical to SEQ ID NO: 335676

SEQ ID NO: 465229 - DNA, 1000 bp, Homo Sapiens
tttttttttttttttttgccatcagcaggatgaatttttttacttattcatatgatcataacaaatattcaaaaattacgccaacaaatctttccattcctttccattccctctgcaagaataacatcaaataactgttaggctataaagtatttattttccccctataaatgtgaaaggacagggataattaacttggtgcagaaactatgtttttggcatttcttaatatataaaattcatcccatatttttacagtagtatgtactttaacaacattatacatctaaaatctgggtcagtcattcttcatctgtttcatacgtttccgcatgacagcatttgagaatatgtggagacatgtctgctgcaaaatcattaagccaatcaggactcagattttaaagaaataagatggctaacacagaagtcacagaagtagggaaacagctaagttaagaagaactcatttacagtctaaaaattcagcactgaaagactcctgtctcggagttaaaatcttttcatataattggcataaatttgatctaagaaataacccttgatctaaattgagattgttttatattttaaatgatttacctacatgactacacaaaagccgtaaaaattccaacaagttttataaatatgttctgatagagctttggttataaaatattggaattgatatgcttccttagcactcagtaaaatggtacattgaagttaaaacgctctcattttatctctgctaactggaaaatggaaagcaaaaaaaaaatagaagtaaaaatacaatgcacacacaataatccaactatgtccttctattcttcaagggttataaaataaacgttctttaccagttaatcagttgatctctagcagtaattttcttcaccagctaatctacatctgcaaatatgttttgccaaaatctttttagacccctttaaaaccactttaatacaaggacaaaaggaaaagttcaaaagag

SEQ ID NO: 465230 - DNA, 1000 bp, Homo Sapiens; identical to SEQ ID NO: 157453

SEQ ID NO: 465231 - DNA, 938 bp, Homo Sapiens; identical to SEQ ID NO: 157454

SEQ ID NO: 465232 - DNA, 1000 bp, Homo Sapiens
agatggagtctcgcactgtcacccaggctggagtgcagtggcacagtctcagctcactgcaacctctacctcccagtttcaagcgattctcctgccttagtctcccaagcagctgggactaggcccggctaattttttttgtatttttagtagagacagggtttcaccatgttggccaggctggttttgaattcctcacctcaagtgatctgcccgcgtgggcctcccaaagtgctaggattacaggcgtgagccaccatgccctaccaagaaggtagttcttaaaaggatacttttactaacaaataattcagaagtgataaaggatcaactgagtagacttaccatctgctccttcattgcttttgcttcttttattgcggcgaacacgcctactttcttcttcagagtatggcttttcatcagggaagaagaaattcaatagggccatatgtttaaacaatctttgcttgttcttctgtcttacatctcaaattttccttctgggatcattttcttcttctgtgaagtacatcttttggaagtttccttggtgaggatctataagtcataaactcagttctttgcctaaacacatctttatttcacttagtggtttcagtggatataaatgtccatttaacagttattattgaagatggctgactagatgacgccaggtgaaacagctcccactgagggactgagacgactcgtgtgcttttaacagatcttcagagtgaaggtgctgagagtggacagagggaagacacaactcattggtgtcctgctttcttttttctcagtgaaaaagaaacatggagctggtgcccgtcctgggagtcagagtggagtgcggcttctcccggttccaatggctgctgcttaggtgacggctgcccaaggtgactggtgatggggctgtcagggtcgaggccaccgaggctgcttagggtgccagaggtgccaggggtgcccgagccgccaaggcgggactcgg

SEQ ID NO: 465233 - DNA, 840 bp, Homo Sapiens
gcctaaacacatctttatttcacttagtggtttcagtggatataaatgtccatttaacagttattattgaagatggctgactagatgacgccaggtgaaacagctcccactgagggactgagacgactcgtgtgcttttaacagatcttcagagtgaaggtgctgagagtggacagagggaagacacaactcattggtgtccctggtgcccgtcctgggagtcagagtggagtgcggcttctcccggttccaatggctgctgcttaggtgacggctgcccaaggtgactggtgatggggctgtcagggtcgaggccaccgaggctgcttagggtgccagaggtgccaggggtgcccgagccgccaaggcgggactcggctccacgttcccgccgcaactccgagcgcaactctaggtagcagcacaacgtcagcaggtggagggccagcgagaggccaaagaaacccaggaagagcaggcagctgttcccttcgcccgcccgggcaggggccccgccacacccgcagccctggctccctcgctcccgcggcgctgctgcaggcaggagttccctgcgctccacctccgggtagcccatggcctccggagacacccactctcttgaggcccgggagccgctgcgtctgcctcagccgttcacgacctctgacaggcggctactgtcctgccatcggctgggggctgcagggacccgttcctgcgcgacagtggctgggcgggacggagcagggagcagccgcatgtgcagctctactccgaggggtgggaaagggaggaggaggggcgggagagaggggaggctcggcccgccgagggaat

SEQ ID NO: 465234 - DNA, 1000 bp, Homo Sapiens; identical to SEQ ID NO: 157455

SEQ ID NO: 465235 - DNA, 923 bp, Homo Sapiens
atgaaaacaacagctgctatgtgcttgagattagaagttaaaagaaggtctgttcagtggaaaataatgcacagcaatcagttcctcacatattagctcccctttttattttttaaaaactcttcccattctgacctcagcctcctccattaagttttctgcatccgtgcgacaagtctggggccatggctgctccttgaggctgctgcctttgaggtgctcttgtcatcaatttggatgtataaactactaatgttgactcatggcctagggaaagctaattcaaaggcaaggacagatgattccacagagtagtcacttgaggctcacaaatcatcagacacctgaaatggttttctcctatgatcactttcttcacttttcatatccattttaagtttttccctttgcagctcagtagtaaaatgctctctgatgaatttttatggatgtccatttggatagaatgcttgcaatttatttggataattatcccagtaaaattcctgaagatctggtttgcagaacgttgaactgtctccagatgaagaactggttgggccttgctatttcttctcatcttcacatcaccatgggcaagctaaagaaagcaatgatgtcactgattggctgagctgcagagctggcttcgagcatggccggattggctgctagctcttctggtgcctgcctgctcgggcagcggttgaaccagatactttctgtctctcttgttgtcgtttgaagcaaatcttgttcagcccagctgtgtctccatagtagtggcaccctaagagagagtctccctcctgcttcccacagctcgtctgtgaggcggtcgctgctgtgaaataccagctcttggtaccaagcccagacagcgttctcagatccataggctctcccctagacaagtcctttat

SEQ ID NO: 465236 - DNA, 1000 bp, Homo Sapiens; identical to SEQ ID NO: 335679

SEQ ID NO: 465237 - DNA, 1000 bp, Homo Sapiens; identical to SEQ ID NO: 335680

SEQ ID NO: 465238 - DNA, 1000 bp, Homo Sapiens; identical to SEQ ID NO: 157456

SEQ ID NO: 465239 - DNA, 1000 bp, Homo Sapiens; identical to SEQ ID NO: 464748

SEQ ID NO: 465240 - DNA, 1000 bp, Homo Sapiens; identical to SEQ ID NO: 464748

SEQ ID NO: 465241 - DNA, 1000 bp, Homo Sapiens; identical to SEQ ID NO: 335682

SEQ ID NO: 465242 - DNA, 1000 bp, Homo Sapiens
ttttttttttttttttgtataaaacacagtatttattgatttcaaggaaactgtcttgaggatgttctatcagcgcatccacccaagtccctgggagcagggtctgaaaggctggcaccagcctgagcacagttgtggggaggaagatgggagcaccactgcctgaggctgagggagtaggatttggggaaagagggcttccactgagccaagtgatgacctgggggacctctgggtatctccagaacctctagtcaggttcattctcagccctccagacctgctgctgctggaagacctcctctccactgcaggaatctgggcggctcctctggagggagtagagatgccttaggtctgctgaggctagcccagggcgagcatcactttttgtgtggcctccagacctctgtgctgctgttgtgtctgcttgggagcacttctcacctctcttacacattatgtcctcagggaagcctctcctgatcatcccttcctgggttgatcccttcctggttgaagccctgctagcagtgccctaagtggccccttgcaggcagcgtagatagttaattcgcttgtttcaaagtctatgtcctttgagggctggcactgggcctgtgggttacctatacccggctagacagcccagttcccagtgtcaaaaaatatctgccaaaacgaaagttgcataacttagtgaactcagagtggggtcactcagcccctgtaggacctctccacctgccacaccgccctgcatgtcccattggcagcccgcatgttgccccacccctgccctgtggtcagatgggggtcaggttgggtgctgaagcctgcagcttgttattgcctgggtctggatccacctccccagcctccaccagcttgtggtggcagcggcaggtggaagctcggctggcggaggacgaggggctgcaaccccctcgaggcttgtccttgtgcaggcctcgcaggaccctgtggcagatgaggtagc

SEQ ID NO: 465243 - DNA, 1000 bp, Homo Sapiens; identical to SEQ ID NO: 157458

SEQ ID NO: 465244 - DNA, 1000 bp, Homo Sapiens
taatgatcgcagttagcatgtatttatttagcgtttagtatatgccaggcagtttcaagcatgttacgtgaatacatcacattcaatcttcatacactcttccggtaatttggaggcaattttcaactctgctgcagtttctataacatgggactaatgatagtacccactttcagggggctgttgtgaggatggaatgagctgaaacatgttatttggtacatgtaaaccttagctgttctagcattattctgccacttaagctgtcttcgagctgcagtgtcttctgctgtaagggggcattaatactgccctcacagggttgttgcaagacatgacggtaagagtgacattctgtaaccgataatgtaagtgtgttttacagagttggcatttggcctactctagaggcaagttagggctatttgctggtaggaaacttgaacagctttgaacttgaactttgaagtgtggaggctgagggtgatggaggagcggggggaagcgccccaaaagccctgcatgctgtccatacccatcactggggtttgttaaatggaaagatttgaggccggcctctcccacatttctccatggctttgcccttaatgttgctctcactgtggagactgttgtctcctgggatccaggtcttggggtttggtcgggggaggaagctgcggggccttgggaccctgggggagatgtgtgtgcgctgggggtgagttcccagatagagcttccctcccagtggaccctgcttagcaagttggaatgttcccacaagttccaaccctaaggatttcactccagggacagagtcaagtagattcttttgtaaatcattggccagaaaagagcacaaccactgctctttttcactattttacagctatttttgccgtcccctgaatgtacatcaatttccatgcagcaattggatgtctcagcctattggcttttcatagatgcaaactttcctttagggctttgtaaagaa

SEQ ID NO: 465245 - DNA, 1000 bp, Homo Sapiens; identical to SEQ ID NO: 158170

SEQ ID NO: 465246 - DNA, 1000 bp, Homo Sapiens
tgaagaaaaaaagtttatttttattcatttatgcaaagacagtatcagcaataggtagtaggaacatttttctcagtttagaattaattttccattttgaaagggacttaatatcttctttaccttactctattaaatacttcaacaaagacaaaaatttattcctttacttttccttaaggtcatatcggaataattagaattaactctttagaatgtaggtatcatttacagaaatctggagatttaatcacagaatgatgtatgtcggaatgttaaaagcactaaaaaaactatggataattttttaatggacaaagtcatggtgctttcaatttctgaggtgtaataaagccttcttgggaattctaaagtttaaagactgtatccttcggattccgaatgaaaattttgagaaatcatagaccccagtgggcattagtaatatggcccatagtaacgacattaacttagagtctccacgttttagggaagaagccattgaaagaagggccagaaagccactttaaacacatgtccatggcagatcaaatgatactgatacaaatgtttcccttagaaaggtattatatcccattgctaccattccacggcttggcctttgaactgctcatacagctacttccattctttacatcaccagttctaagagcaaacctcctgaaagactagtaaaagaggctgggaaaacaagactgtgagtatagcaaaagggctctggtgctctagctgtgtggtcacaatataaaatgaggacactacctaatctagaaacaacatgcctcttctggacatattttattttacagaaggaaatataacaggctaaaaaacaaaaataaaaatctatttatagcaagtaactaatacttcaatgtttttataaaaacaattcctttcagatactccgattaacctttgagtgacataaaaaagctgcagcgttctttaataccagtattttgcaaatttcacatac

SEQ ID NO: 465247 - DNA, 1000 bp, Homo Sapiens; identical to SEQ ID NO: 157459

SEQ ID NO: 465248 - DNA, 994 bp, Homo Sapiens
tcattttaaacaagaagtttatttaaacaacaagacgcttgacttgaagggaaaactatctaggattcttttttgttttagagtaatttatccctacttaaagacagattgccctacatgtaacagctacgtacaaaaaagttataaaattgtccttggttttacaatgataaatgaaaaacattaaaattctccaattgaacaaggtatgcaaggatttttatgttgttgttttttttttttgttaaaacagtgagagcaaaataacttactggaatataaagataagagctgaatgagcatgccactaatggagaaagggggtattttcacagaatcagtatttttccccatcccgtctccacttgatgtcaatcaaaacataccattggctgtttagttaaaaaaaaaaaaaatgcaatatgcttgtgcacatataccagttactttatgtacaataaaggaatggggaagggggaaatgaaagaatagagaaaactatacggtagtagtcaggatgtggtggaaccaaattgcagttttctaattgagaatgtaatcttggtctttaaagaacagagttctggagtaaagaagcaggttcccttttcagtagacacctcccgtctgctgttggaacacatcaattgtatcttcatcctccatttccaactgtcgttcacaataggctttcattagtttactaagtggtgtatgcctcttaatcttaaactgcaccacagaaccatcctgccccgccaccttcaaattaatatgatcgttgttctcagtcttgactccttccttgggcttttcgtcggccatggcgagcgccggagtctcctcagctgccgcttcacaaaagaggtaccaggtccgcaccaaacgagcacacaagcagcaccaggagcggcagaagaaggaggcggcagcggtggacgaggggagagggtgcgcgcacgtcgtgcgctccctccccccaccctgcgtgcgc

SEQ ID NO: 465249 - DNA, 1000 bp, Homo Sapiens
aatgtttcacaaaacagaattttggcatttatttaattataaaaatttcccatgattcttcaaaaagttctgtatcttttccattatttgctttacaaagtctagtagggtttccctgttgagaatgtttccatagtctccaaaaaaagaattttgtttcaaatcgtatagttcaaaacaaactcttctatagaagaggtgaatttccaagatcagcatatttcttacagagagctgccagcttctcctctggagtcgaaagagtgtttagggcttgcatcaataataaaacttcttttcctaatgattaataagattttaaaaagtaccagaagaaggctgaaatcaatccaatctgtaaattttatgtaaacttctatgttaagacattcagagtaaaatgatatagctctaattaaaaacagatttacctattaaattcaggtaacttttgaaaatttagcaggtacttcctccagctgtacaaatttcttcaattatcaagcaccactactagctatttagcccttaaatgtagtgcaagataattactgcacgtttaagaactactcttgcctaaccactatttagacagtaacattctaagttaagatatgtaaaagggcagggaataaggcttcctgctagtgaaggacaactataaaaggatattcagttactattcactgcctaagacactcataactctttataatatgtaacttttgctatgaacaatttaaacaagttatgattgttttgggatgatctgctaagcatattctgggtgttaggtttagatcaaagaaaaggaagtcaaaatagctcttcccttgaagaaaagttttaaaagagtactataataactttgcaagggacaagcaagtagctgaaatagaaagagtcaaatggtgcttcaaaatacatactaatgttctactggtaacgatggagataggtaacttttgatttgttctctctaatatgtaacacagttctt

SEQ ID NO: 465250 - DNA, 1000 bp, Homo Sapiens
ttttttttttttttttttttttttttttttttttttttttttttttcctaattcatcttttatttgtgatggcacctagcacacttctttgtacacagtaggcatgtaataaataggtgctgaataaatcaatatttttttttctctaatacagtcccaagtaccaggaaactgtggtaaaaagtttgctctgcccacaaagataaacagataacatcaaatgtttacagtacaggaagaagaggacttctcgttacttctcaaggacttcatcttcatagaaaagaaaagttctatgggaccgcctgactccctggagagaccccaggtcagagaaggcacatacctgacatagagtgaaatgggcacaacggtgttgaggatgatgatgtaggaccagaaggagaggaagccagagaagaaggcactgtccactgcctcatcccacggcaggtagacctggaaacgcatccccacctcgtgctcccagatggcattgccaatggccaggatcacccccatgcaaaccaggaatccaaaaatccagagcaccagggtattcattaggcgatcgatactcgttcttttgaactttgttctgccgctgttttgcatcagcttagtgtcgggacctgcaaagatgaccagcccgaagcaccactcggtgtttcgcagcacacagccccgcagcagcatgttctggttgctcagagggaacttattttccttccagtagagggttccgctgaatttgtccagtttgttgttgggaggttcacagatcacttcaccgtcaaacttggcaagcttactgatgtctcccaattctgaggtgactggaatcgcctgacgtactttcatgttggtctcgccatcaagttctgctgtctctatgtaacacagcccatggggctcactgctggaaaggaggaggagatccgccgccacaaactggttattttctagcttgataatatcaccaacacagacattcatccac

SEQ ID NO: 465251 - DNA, 1000 bp, Homo Sapiens; identical to SEQ ID NO: 335685

SEQ ID NO: 465252 - DNA, 1000 bp, Homo Sapiens; identical to SEQ ID NO: 157460

SEQ ID NO: 465253 - DNA, 1000 bp, Homo Sapiens; identical to SEQ ID NO: 335687

SEQ ID NO: 465254 - DNA, 1000 bp, Homo Sapiens; identical to SEQ ID NO: 157462

SEQ ID NO: 465255 - DNA, 930 bp, Homo Sapiens; identical to SEQ ID NO: 157464

SEQ ID NO: 465256 - DNA, 1000 bp, Homo Sapiens
ttttttttttttttttttaccaaatacaatttattcaggaaaaaaataaattttaagaacttatttttattttattttagaacttaaaaataaatttttaagaactaaaaaagtgaaagagcccagtggctgagcagaaaacagcttactacaaggagtaccagatcagggcagagacttcccagctgggtaaggcatgctttgagggaagactccaccagccctgccaggaaagggcagcaggcgcagtgcccctatggggcccacatggctggtaacagcagcaggacacctcttccaaagctgtccaccagccccactaggggctcctactcatggcaaaaaagactacatgagcccacaactgtcaactaacacagtgccacctcctcccaaagcaaacacatatacatacaatgttaagaacctattatcagaacagcagtgcagcagaccctggccttggtctctgaaagtcctgtgtcactggctgtaaggacgcttggccacaggttcctcctccttctcccgcttcagccattgctctaggagtcctgcagtgcctctcttggtggggagtggactcttctgcaggaactgactggaccactggggaacatctgactcttccttttgaggtgtttttgagtcttcctttttgggtgactttgtggccaaccactgcaacatcctctggctactgccacttgccctgagctcctttttgaccaccaagtcgacaggagccagacactcaggagtgttgtttcgcgagttgttcaccacagaagagactgcatggaaggtgatgttctctgttgggtggattaatttcagagcttcctgagttgagacttcaccaaagtcaagccatttagaaactgcctcctctccatctaatatggcaggcatcctgtggtggatgtcactcaagcctttgcaggaatccactgtgatgatggtataggaatacaggacatctcctccctctgggggctcc

SEQ ID NO: 465257 - DNA, 1000 bp, Homo Sapiens
tttttttttttttttttttttaatggtcttttgggatgtttttcagacttttgagttctggcaacctacagactccacctggacctgagactcatgactcagctgatcccgtggctccacgcagaggcggactcaggggacaaaaatcgttgacaccccatggtccgtctgcagccgatcagcagcaggcattccctagcccctgcctgccaaattgcctgtagaaactgtagcctctgagttctctgggagattgagttgaataataactccagcctttctgcttggctagctctgtgttaaactctttctctactgcaataccacaattgcagtgaattggttttgtctgtgcagtgggcaggaagaacccataggtggattacactgaggagaaacagatctggaaggtggtggaggctccaacttctgtacttctggcagctcagaaagaagctgattcagcaggtctgtgttagctcaacatagtctgctctactccagagataaaagctgagaaggcttctctgggagcttctgtgttttcacagcgtgttctctccctccttcaactgtggcatggggcatgcagtccctacccagcctgggtgctcctcacaccctgcttacaggttcttcccccagtagcccttacggtacccacggacacacatggatgcagggttgtgatcttgacccctttgcaaggcccatgttccatgagccaggttatatgatttcagcatccccgcttacagtcaggacgtcattgtaatcttcattttctttacactgatggaagatatactccactcctaggaaaatgtctcccaaattgtagtcatctggaaaatcaggctggggaaattcacctgctttcagatgctcatgaaatggaaaagaaagcacatcggttgggacatttctatctctgtagattctattaatgtgctgaatattcttgttgtcaacacagatgatccccaggtcaaatttctgc

SEQ ID NO: 465258 - DNA, 1000 bp, Homo Sapiens; identical to SEQ ID NO: 157465

SEQ ID NO: 465259 - DNA, 1000 bp, Homo Sapiens; identical to SEQ ID NO: 335691

SEQ ID NO: 465260 - DNA, 1000 bp, Homo Sapiens; identical to SEQ ID NO: 335692

SEQ ID NO: 465261 - DNA, 671 bp, Homo Sapiens; identical to SEQ ID NO: 335694

SEQ ID NO: 465262 - DNA, 1000 bp, Homo Sapiens
tttttttttttttttttttttttttttttaaaattattatctgtttaataatctgtatctgtggctcagatacagatcaggcaaaccaaccaaggatgaagcccctgctgtggatgaagtctccagctgtagatgaagcccccagcctatggatgaagtctccagtcgtggatgaagtccccagtcatggatgaagcccccagcccgtggatgaagcccccagcccgtggatgaagcccccagtcatggatgaagcccccagcccatggatgaagcccccagcccgtggatgaagcccccagtcatggatgaagcccccagcccgtggatgaagcccccagtgatggatgaagcccccagcccgtggatgaatcccccagcccatggatgaagcccccagtcgcggatgaagtctccagacgtggatgaggtccccagtcatggatgaagtccccagcccatggatgaagtccccagctcatggatgaagcccccggccatagatgaagcctccagccgtgaatgtcccctgtgttctccaggaggtttcttgggtgtgtcccgcagctgctccgtcaatgtggcagccccgtcttgctcatctgggggcatgtttcaaacccgagaagaaatcataagcccttgaggcctgggcgcccagtctatcctgtccagtgagcgagctcaatttcagatgtgattagcctcaattcctgattctcaccaaggtgtgtaatgtcatccacggcccagtgcagaggaacacaggtgttgccgtcaaactgccagggtccgatcccgcctccgtcactcaccccgggagctccctttaagctgcaaaatcctcgtcatcagacatgctctccacaatcaaatcattctccagtgtcaatggctccttggtagcatcttttttacagaggtatcgtacagcatcctcattagtgatgtcgtatacagtgtcctcataagaaatgtcttctatagtgtcctcattaga

SEQ ID NO: 465263 - DNA, 1000 bp, Homo Sapiens; identical to SEQ ID NO: 157466

SEQ ID NO: 465264 - DNA, 1000 bp, Homo Sapiens; identical to SEQ ID NO: 335695

SEQ ID NO: 465265 - DNA, 1000 bp, Homo Sapiens; identical to SEQ ID NO: 157467

SEQ ID NO: 465266 - DNA, 1000 bp, Homo Sapiens; identical to SEQ ID NO: 335907

SEQ ID NO: 465267 - DNA, 1000 bp, Homo Sapiens; identical to SEQ ID NO: 246398

SEQ ID NO: 465268 - DNA, 1000 bp, Homo Sapiens; identical to SEQ ID NO: 335701

SEQ ID NO: 465269 - DNA, 1000 bp, Homo Sapiens; identical to SEQ ID NO: 335704

SEQ ID NO: 465270 - DNA, 1000 bp, Homo Sapiens; identical to SEQ ID NO: 335705

SEQ ID NO: 465271 - DNA, 1000 bp, Homo Sapiens
tttttttttttttgccttagaaaagacactgtttattccacatgtgtaaaattcagtgaatgactttcagaaaaatcaaaagaaagtaaatgtaacatccatacagttgtttaagctttatttttaaatgcatgcatgtttcaaggaaacaaaaatttcaagatacagaatacaacatatcagattaaataattcagaattattttaatgtatacacaaataacaatataaagcacatacataagatacattatataatttgaggtttcaaaaagcagtaatttggttttaaaattctgacaccaatatctaatgtaacattcaagtaaaacatatttcaaaagttaagactcctgagactaacacataactctatgacagcctgcctttaccacgatcttcaaaatagtgctgttcaattctcctacagaaagcaaggaggttgctatagtttttcaccttctcagaaagttcatcatttgtcaattgtgtggtaagaatggtgtatagatggccaaataccagtgcgtcaagttcagtaggctgcttattgaagaaatacggttgtgttcccagtctttgagagagagcttgacagcactggtctacatcctctaagacctggtccagagtcttctttccccatccaatagctttcatcttacgtttgacttcccactgtttttgataggccaaaatatgattcagaggccaagggtaaggagatccatacctagcatgagtgatctcccctactgtagcttcatcacaccactgaagatacagctctgcagtcaacagcatattgttgactaattccatgtaagctttcatttctgctttttggacttcctccagcccatcactaagagaatggcccttggctttaacaaattggactattggaccaagttctgatactacttgatttcccacatgaataaaaggtactttaccagatggagacatatattctgcatttgccctacaaactactttg

SEQ ID NO: 465272 - DNA, 1000 bp, Homo Sapiens; identical to SEQ ID NO: 335707

SEQ ID NO: 465273 - DNA, 1000 bp, Homo Sapiens; identical to SEQ ID NO: 159378

SEQ ID NO: 465274 - DNA, 1000 bp, Homo Sapiens; identical to SEQ ID NO: 335710

SEQ ID NO: 465275 - DNA, 1000 bp, Homo Sapiens; identical to SEQ ID NO: 157469

SEQ ID NO: 465276 - DNA, 822 bp, Homo Sapiens
ttttttttttttttttttcgagcccatacatttctgtttattgtaaatgtccccatctcagtcctgctgttgaagcatcatcacaaagtgcaccaagacatgagcttcccttcgtttggaagttttcccagccctgttcagagcctcatgcgtgaattctggcatccattctcccaggcatccattcaccaggcatcctcagcccctgctgtggcctggccctctagggtctgccttgttccctgcctgcggtcagctggggaggccactggacctgcgctgtcccatgtggtggggcgcactggccaaaggggctactgagcacttgaaatggggctctgatgaaagacctgggcacctggcctcgaaagatctttgcgtccaaacggggccttgagggaccctttgttttcacttcgtagcacagccagacggtattccgacgagaaaggatgggtctattataaaagttgtaggagaatgtgtctcgatacattcgctccactgtgtttctgaagtgaggcttcatccttggccggctagtcccgactaagatctttgtctggagcaccagggtttcactttctgctccaggctccaggtttcaggacagccctccctaaagtgacctcccagggcctcgtagtcatggcccctcccccttcctgctcaggcgctggtgtaggaggccctgggacgctttatcttcctcagtctctcaccctctttctggttttctctggggccctccccctggcagagggacctctgataaagacaggccgctctgtgcggcaggacccaaggcaattgcaaagggaa

SEQ ID NO: 465277 - DNA, 1000 bp, Homo Sapiens
tttttttttttttttttttcatgtacacacaagtttgtattttttagagcaaaacaacagttaatgctggcaaagatgtttagttatcagggattccataagctttcaatacactgaaaggcaacattttttgcatgtctacaaattatacatttgtttccacacatgtgccaaattttaccctaacagttaggactttttcaccaaatcgtagacatagatatggaaatcatcatcaaacttgatgaaatacacagagggtttggcttccacttggtgaatgaccatgccgatccttttggagccatcttctttggtatattccacatgcttacctattaggccatctacaactcctcctggctccctctctgttggaggagactcactggattctggcatgatgcggaggtcaccttccttataatcatctagaagctggtacatgtacaagacaggatctttctcataggtaatataaaaccaggctttcatgataggtgcttgagctaagaccatccccctccattcatccttagaaccatgctctccctcaaacatatgttccactgctttgccaattatggtatttgcaaggttggcatcactaatgtgagatgatgccaccctgtcagaaagaattttaagagacaaaaccctttcatctctgtgaagttccagtccatagacacagtcaattccatcatatttcaccagataaagagagggatttataggcacctgatccagaacggttcctttccactgcgtgatgggctcatctccttccttccatccatgagaaattctgcagcccacgatgttcctgcggggctgggatgaaggtcggcctctctgcttcttttgggagacttttttctttgtcatgtttgcagacccagtggcccgtcctgcagctgccctggtttgttgcccttcggcttcctgtgcgttgggggtcttcatgccctgcctggcgtccaccgccggggatcgcggg

SEQ ID NO: 465278 - DNA, 1000 bp, Homo Sapiens; identical to SEQ ID NO: 335712

SEQ ID NO: 465279 - DNA, 1000 bp, Homo Sapiens
ttttttttttttttttttttttttttttttttttttttttttttttttttttttttttttttttttttttttttttttctgcaaactgttctttatttatttattttttacaatgtgtcatgaacatcttttccatgcacatgggtgaaaatcctctactaaaatatagagcgctgtagttgggtcaaaaggctgctggtaacgagattgacatctaaagcaaaaatatcagcttaaggttaaagcattgggcctggcaaatatctaccagggaaagcagggttgacaataatctcatcagagaagtcagaatggaaggccaaaggcattaaaggtatgggatatcgtgtaagcctctttggcccctacctccacccctcactcccctgacaccccgttgtccccttggggcgaatggatcctgtacatctctttgcatccaatgaaaaccacccattttctgttttttccttagctcctcctgagcccttgacacatctccacattctctcatcatctcctcactgctcagatgcctttcctgtaagtcctcctgagagtccttgggggaatcgtccgtccccctgtctgtttttctttttgctttccggggcacataatctccagccgggcgcttttcggcggcccgcggctggccctctggctttgcctgggaggctggcttgccctcgccttgtggcttgccctcaccttcggacttgccctgcttttcctggcttcccttatcttccagttgtccctcatcacctggctctccctcagcctttcgctttccctcgcattctgtcttcccctccgcgtctggcttttcttcctcgtctgactttccttcatcatcaggctctacttcatcttctggctttccctcgttttccaggtttccttcatttttattgtagggtttctccatgtcgagatttctctttttcctgtcctgcggggagtctggacaggttgctcttcctttgcaggcctccaa

SEQ ID NO: 465280 - DNA, 1000 bp, Homo Sapiens; identical to SEQ ID NO: 335714

SEQ ID NO: 465281 - DNA, 1000 bp, Homo Sapiens; identical to SEQ ID NO: 335715

SEQ ID NO: 465282 - DNA, 1000 bp, Homo Sapiens; identical to SEQ ID NO: 158274

SEQ ID NO: 465283 - DNA, 1000 bp, Homo Sapiens; identical to SEQ ID NO: 335716

SEQ ID NO: 465284 - DNA, 1000 bp, Homo Sapiens; identical to SEQ ID NO: 158096

SEQ ID NO: 465285 - DNA, 977 bp, Homo Sapiens; identical to SEQ ID NO: 157470

SEQ ID NO: 465286 - DNA, 1000 bp, Homo Sapiens; identical to SEQ ID NO: 341569

SEQ ID NO: 465287 - DNA, 1000 bp, Homo Sapiens; identical to SEQ ID NO: 157471

SEQ ID NO: 465288 - DNA, 1000 bp, Homo Sapiens; identical to SEQ ID NO: 157472

SEQ ID NO: 465289 - DNA, 1000 bp, Homo Sapiens; identical to SEQ ID NO: 157473

SEQ ID NO: 465290 - DNA, 1000 bp, Homo Sapiens; identical to SEQ ID NO: 335719

SEQ ID NO: 465291 - DNA, 1000 bp, Homo Sapiens; identical to SEQ ID NO: 157474

SEQ ID NO: 465292 - DNA, 1000 bp, Homo Sapiens; identical to SEQ ID NO: 157382

SEQ ID NO: 465293 - DNA, 1000 bp, Homo Sapiens; identical to SEQ ID NO: 335721

SEQ ID NO: 465294 - DNA, 1000 bp, Homo Sapiens; identical to SEQ ID NO: 157475

SEQ ID NO: 465295 - DNA, 1000 bp, Homo Sapiens; identical to SEQ ID NO: 157476

SEQ ID NO: 465296 - DNA, 1000 bp, Homo Sapiens
ttttttttttttttttttttttttttttttttttttttttttttttttttttttttttttcagtgaccataccacaggaatatttattatcatccagacatctccatgtcccattagcaacaaaatcaacactgaagtatgatctaattcttttgaggaataaagaaaacagtttagtctatttaccaaaggcagaaaatagttttaaaataatgtctgtgtagcattgggcacaacatttacatacagatacggtaccttgagggtgtcacgctagaaaacaaattttctttacaaattaaagaacagacacttgatgtatttgtatttctattaaaactgcaattgatggctaccgataaaagctagtatagggctgaagatttgcagtggtgtcctctccaaaacatagcttaggaatactatcatatgattactaatgttgtataaatgcatgagaatgacagataccaaattcaggatattgattacctcttggtgctgggggaggagagaggggaatattattgaggaggcatgcaggagtcttcaatcatattacaaatgttttgtttcctaagttgggagtcctattttgtaacggattatgatccaaccaatgaagattcttacacaaagcagtgtgtgatagatgacagagcagcccggctagatattttggatacagcaggacaagaagagcttggagccatgagagaacagtatatgaggactggcgagggcttcctgttggtcttttcagtcacagatagaggcagttttgaagaaatctataagtttcaaagacagattctcagagtaaaggatcgtgatgagttcccaatgattttaattggtaataaagcagatctggatcatcaaagacaggtaacacaggaagaaggacggcagttagcacggcaacttaaggtaacatacatggaggcatcagcaaagattaggatgaatgtagatcaagctttccatgaacttgtccggg

SEQ ID NO: 465297 - DNA, 1000 bp, Homo Sapiens
ctccttgcacatttactattatttgcaggagcttgacaacaccaatatcaagtaaccaaagatggccactatacattgcttaaacactctcaaaagtgtctccccatatgtgtaactacacatcagctatatgatccagatgttcataattctaactagatagaagaaagttggccttggtcaccttctgagtccccacaccataattgtggcatggagcactctacttccccattgtcagatttctgaggcatactgagttgtggcttccagtttaaggctttccccaagtcactgcacttatagggtttctgtttagtatgaattttctggtgtttaataagatttgatctgatggtgaaggcctttccacactcagcacatatatatggtttctctcctgtgtgaattcgatgatgctcatggagttgtgatttcttaatgaaagacttgccacagtcactgcattcatagggtttctctccagtatgaattctcctgtgtctatttaagtgtgacttctggatgaaggatttcccacattcattacaaatatagggtttctctcctgtatgaattctctgatgcataattagtgttgattttcttgcaaaggctttcccacattcactgcactcataatgcctttctccagtatgggattgctgatgtatatggagacctgacttcctagtgaaggctttcccacagtcactacatttataaggtttctctccagtgtgaattttctggtgtgtaaagagatttgatctgtcagtaaaagcctttccacattcagcacacctatagggtttctctcctgtgtgaatctgctgatgtacgtggagctgtgatttcttagtgaaggatttcccacaaatactgcattcatagggtttctctccagtatgaattctctcatgtgtaataaaatgggatttgtggaagaaggccttaccacattcagtgcaaacatatggtttttcccctctatgaattc

SEQ ID NO: 465298 - DNA, 1000 bp, Homo Sapiens
cgtttagtctgagcctttattttacagctgggcctggtaatgactatcctagcagcacacaggtagcagcacacaggactagaatccaggttgggtgaaatgagcgctagcacaccagtcagataatagcatgagccataaattgtgctgggcacatggtgcttaagtgccaggttcagccagctaaggcgtgagcagctgcgagaggggtaggcatggaagacaggaaactggacatcagaatgttctaatagaaagtgacatgttttggcattgaaatgccattatgtacctttagacacccaggcttttccaaagaaaaacagggatgcacaaattcgtgtagctgacaactaaatgtatatagatgctgagaaaggtccacattgaaaaatgacaactttgaatgttcatagtctaatagaatgccaatcttctttggtggaactgttattcttatatctggagttgttctgttgtgcagaaattcatacttatgccttgatgatgcaaatgtgtgcctcatgcaccaggagaggcaatttgctcccagatcctcctgtttacggacatctgcaaaggccacaccaactctgtagtccaaatgctcatccacctccacctcccagtaatggtgccctcggactggaattagatttcccatgacagcaacacacctggtgaagtgagtgtcgctgggtgacagctccctggcgggggttctcctttcacttcgtacagccgtaagtccgtcttcagaaatggtcagccagggatggcaagtgtccttgtttaggcgaaagtagcttcctatggtgtggactgtagctggctcgctcctcacgctggggccccccatattgagggctcgcacatagataatgtagctccgccccggctgcagctgcaccacggactcgcaggtcgggatgcccacaacagactcagttacacccgaggcttctggactttcagcctgggtcagctccacagtgtacga

SEQ ID NO: 465299 - DNA, 1000 bp, Homo Sapiens; identical to SEQ ID NO: 157477

SEQ ID NO: 465300 - DNA, 1000 bp, Homo Sapiens; identical to SEQ ID NO: 335726

SEQ ID NO: 465301 - DNA, 1000 bp, Homo Sapiens
gagacaggatctcactctgtcacctaggctggagtgcagtggtgtgatcgtggctcactgcagcctcgacctccctcgctcaagcagtccttccacctcagcctcccaagtagctgggactatagggatgtgccaccacacgcaactaatttttatatttttagtagagatggggtttcgccatgttgcccaggctggtctggaactcctgggctcaagcaaacctcccaactcggcctcccaaagtgctaggattacaggcgtgagccaccacacccagcctgatgggtattagcttatactttctggctatgaagtataatgttactatgaacattcatgcagaggtttttgtgtggatttttcatttcttttaagtatatacctatgagtagaattgctgggtcatatgataatttcatgtttaacattttgaggagctgtcaaactgttttgcaaagtggctacagtactttacattcccacaagcagtgtatgagggttccaacttctctacatactcaccaacacgtgctattgtctgtcttttttattataaccatcctagtaggtttgaagtgatatttcattctgatttgagtttgacttgcatttccctatggctaacaatattaaggatctttcaacgtatgtatttgccatttgtatatcttctttggagaaatatctgttcaaaatctttgcccatttttgaactaggttatttgtgaggttgtaagattttttttttttttgagacagttttttgctctgtcatccaggctggagtgcagtggcgcgatcttggctcactgcaacctccacctcccgagttcaagtgattctcctgcctcagcctcccgagtagctgggattacaggcatgcaccaccatgcccagctaatttttgtattttaaatagagacggagtttcgtcatgttggccaggttggtctcgaactcctgacctcaggtgatccacctgccttggcctcccaaa

SEQ ID NO: 465302 - DNA, 1000 bp, Homo Sapiens
ttttttttttttttttttttttttttttttgtattaacatttattattttctaattacgcacaatacttgtcatattagaaaaattgggagatatggaaaaatatattaaaaagagaatgaaaaacgcccataatcccatctccagaaatagccctgtcagcattttggtacagttccttccagtctatctttatgcatatgtaactttttaatacaactacgattgtaccatatatggtgtattatgctaatttttaatgccataatataattttccatgttattaaatattatttaaagtcataaattttaaagtctatacaatgaccaattgattagctctaatatacttaatgatacatatgctatttccaaccttcattcttttaaaaaaattgaatttttacaattattttctaaaatttcgaattcaatgccctttaaaccattatgcgaaacattgacaagtcagttttaaggcataataaataaatcactcaacagacagaaaaagagtctaacttaagtttttttaataaaaatgatataaaaaatgaaagagctactttatgtaagtcacaacatttgaagacatattactttaaaagggtgtcttgtttctaaaggcacacttttcaaagatgcaccaggtagcaagtgccacttccagcgatagtctttgtgttgagaaaaatgcctaaactttttttatatcagtggctgctgtgatcttgtctcataaatgagatctcagacacatttctgtcttcttacaatggagaagagtcctggaatagctggggcgctgaaggggagctgttcatgtatggaccactgcagcaggcagaggatcttgattgtcagaatcaactgttcatgccagtagcagacagatcttttattctcacatttgaaagcacaggttcagaatggaaaaacgatttaaaccaccaggtggattctgccacttcaggcaacccttgctgtggtttgtcgtca

SEQ ID NO: 465303 - DNA, 1000 bp, Homo Sapiens; identical to SEQ ID NO: 335727

SEQ ID NO: 465304 - DNA, 1000 bp, Homo Sapiens
tttttttttttttttttttttttttttttagtcacatgaaaaataaacatctttatttttttgcctactttatttcattttttcaaataaaatttaaatctgtacaaagtatactgttacagtatatattttgtaagaatcaatgcctaaaataatcacaatacttcaataagcagtacagcagacctcgctagttttcagctttgatattgaacaaactcaagccggctgatgcacaacacgtttgcttggtttccacatggtgatttcccagcactgagatgggagaacatgacagcaaatatggtaatattacagcccgacacactgcgtttcttcatgtgataataactgcacatatttaatacagaatgctcaaatttactttttaaattgcatttgcttacttcttagttggcaaaattcagcattcttaaatggggtccccaaacagtgcaaattaatgatattctaactgtatattggcacatctccaataaggattaacttgtaaactcaaagaatatcaacaacttagtcctaaattttaactaatatacatctggtccatttaaccaaagtcattttggaaagatattaaagaacaattctatttctgaaaggatattgttttgaccattctttagagaagataaatttttaaattgtcattaaaatgtttcactataaaaattttacaaacttgattagaaatttcaagattatgattcacagcagacaaatacaaactgtatattccaacaatacctattcttagactttcaaacagagcacaaccatgtcagctgtgttaactaaaattctgaacagtgtactaaatttataagtggtgctgggtctagcaagtgtaaatacacagtatatttcaatgaaaagaattgtcttctttatactttatttgttttcccataaggaaacattaatgtttacattctttaataaagttaatcttacatcagaatataacttaatactgtca

SEQ ID NO: 465305 - DNA, 1000 bp, Homo Sapiens; identical to SEQ ID NO: 157478

SEQ ID NO: 465306 - DNA, 1000 bp, Homo Sapiens; identical to SEQ ID NO: 335728

SEQ ID NO: 465307 - DNA, 1000 bp, Homo Sapiens
ggagacaataacatagaaattttattacagcatttcatgtttaagccagattccctgccaggatattttctgcttgaattaatgaggcaggatttggtcataccttaatgagtttcacagaaaaagagttcaagcattagcgcaaactgccttctgacattaaaataaaataaagcaaacatgggattttcacaaagttaaaagcctcctgtgatgcacattttggatagtaggagacattgagccccaaaatgtttaacataaagcatggttaattaaatgaaaccactgaaaaatgtgaatacatgaagaagaaagaataaaataattttgatgttaccatttcaactactatttttgatataatcattcttggcaaaatcattcttaaaggtggaaacgagcaggctgatagtacagcaagtaagagaaagtcaatactgatggcctccacttgctgatcctctgagactgcatcttatagttcataaaatctgctgaaggtcacaactgaggtacaacgacttgtgttacttgtactgtagcaatgagggctttcccaggccacaacatctgggatcaaggaacacattttgactaaataaactatacagaagtctgttttaggattttatgcaaatattaacctcattttaaaacatgaggaaaaatattacccacatttagggctaatttagctgtcaggaatagaccatacagttgaaaaaaacacagtctcatttaaaaagtttcagcagagacaaaaaggtactaaagatgatattcatccttcttcatcactgctgctccaggcatcttcaaaggccggatttaattgtgattttgttgtagtctcatcatcatcaggaactggttcatataaggatggaacccaagccagaatgttgcagtctctgctaccactataaagttcctggaaatttgactgaaatacacagcagtcaacagttttataatgtcccttaagcatagttatctg

SEQ ID NO: 465308 - DNA, 1000 bp, Homo Sapiens; identical to SEQ ID NO: 246399

SEQ ID NO: 465309 - DNA, 1000 bp, Homo Sapiens; identical to SEQ ID NO: 157479

SEQ ID NO: 465310 - DNA, 672 bp, Homo Sapiens
tcagggaaatcgggactcagcccccaacgcccccacctgccgctctgcccacctcagcgcacaccgccagagcgcccagcccgcgcacgtgcttccggcgcgcgccgaagtcctcacgcgccccgccccggcctccccgtgcgcacgcgcgaacgcggggtgggccgggcctcgcgtagcccatctcctcttcctcctcgcggtcgcggccggacggagggtggagggccctggcgcctgcgcggagctggagtccggctgggccgcagccgctgggaggaccggcggttgccgtggggaccggtcgggcccctccctcctccggtcccccgccccaggtccttccccaccgagacgcgccggcggaccgcgggcgagtgcacggtgacccggcgagaggcggcgccgctcccaagatgtcgcagacggccatgtccgaaacctacggtacgaggcccgggctggcggggcgcgcgggtcgggccgcggggggcgtcggtggcgcggggccgggcctgggctgcgggggtcttgagggtggcggtggcgcggccggagccgcgggacggatctcggaggtgtctgggcttgggaccgggatgggggacgcgggccgctgggggctcgggtggggtagcgggtgcgcggggcgggggcgtgtgcacagcgcat

SEQ ID NO: 465311 - DNA, 1000 bp, Homo Sapiens; identical to SEQ ID NO: 335731

SEQ ID NO: 465312 - DNA, 1000 bp, Homo Sapiens; identical to SEQ ID NO: 246388

SEQ ID NO: 465313 - DNA, 1000 bp, Homo Sapiens; identical to SEQ ID NO: 335732

SEQ ID NO: 465314 - DNA, 1000 bp, Homo Sapiens; identical to SEQ ID NO: 157480

SEQ ID NO: 465315 - DNA, 915 bp, Homo Sapiens
ttaggctatagattgggggttcagcatgggcacaacaatagtataaaacacagaggacactttcccctggtccatggagctgacagatgatggctgcaggtacatgaatgctgcagacccaaagaaaacagcaacagccaagatgtgggagctgcaagtgctgaaggctttggacctgccctcagtggagcgaatgcggaggatgctggcaatgataaagatgtaagaagcaaggatggttaaggcaggcgtcaggatgttaaatgcactcaagaccagaaccagtaattcattgatgtaggtgctggagcaggagagccccaagagagggaagagatcacaaaaataatggttaatcacattagtcttgcacaaaaagagtctcaacataaagccggtgtgaattgtagatccaaggatgcctaaaatgtaaactcccactgtgagccagaagcagtggtgataggacatgatgacattgtacagcaaggggctgcagatggcaacatagcggtcatatgccgttacagccaacatgtgacactctgcaatagcaaaaatgaggaagaagtaaagctgagtcatgcattcagggtaggagatgatgttcttctctgtcacaaagttcaccagcattttgggggtaatgatagtggaatggcagatatcaatgaaggacagaccactgaggaaatagtacatgggggtatgcaggtgagaactgagcccaatcagtgtgatcatgctcaagttgcccaccactgtgaccacatagattcctaagaacaggaggaagaggcgcagctggagctctggctgttctgagagcccagccagaatgaactcagtcactgaggaatggtttcctgctgacattttcctttggtcagtttctacggaggaaagaaaaaccat

SEQ ID NO: 465316 - DNA, 1000 bp, Homo Sapiens; identical to SEQ ID NO: 335734

SEQ ID NO: 465317 - DNA, 1000 bp, Homo Sapiens; identical to SEQ ID NO: 157481

SEQ ID NO: 465318 - DNA, 1000 bp, Homo Sapiens; identical to SEQ ID NO: 157482

SEQ ID NO: 465319 - DNA, 1000 bp, Homo Sapiens; identical to SEQ ID NO: 335739

SEQ ID NO: 465320 - DNA, 1000 bp, Homo Sapiens
ttttttttttttttttttgggaaaccagctcatgtttaattgtgacattttaaaattgtacaggtattttgacatctgccccccacatttagtctctcaaaatgacaggaaaacaaccaatcacaggtttaatacattgaccccttcagttcctatatgcagcacccaatattcctttgaaatatgaaatagacctggcagtggccaacagtaaatttctgcccgctgcctcccaccaccaacggagttgaaaagttcaggtttagtgttgttgtagtggcacttgtccagaattggtacctccccatagttgggggactttaaatgtaccaatgaaaatagctttttccccttcaaggggaagaaagaaaatcactcctcaaaacccagcagatctggctgtgaggtctttcctcctatctcatctcttcaggctttttttttttttttttttttttttttttttttgcagtggagcaagagagaccaaaacctaacctgagttacaagaaacaagacagtaatggctataaagggagtgaccaggagcaactgggacactcctttacctcccatatccaatgtatgtgtttcacagaaaaacaacaaaattaacaaattcacaaaatacaacagctagaattacaaaatccattcatccaagggtggtagaaggcaggatggaaaggtggaagggtaaatggcacagggagaaaaacaaagtgttccaatcagtccaggcacagggactggcaaatgctagaaaatagctgcagaaaaacctgtggtcctttcagactcacggtgatgttaaaaatccacacactggtgtcagggaacattctgccttacgtgcaccagagacaaaaatttcaattcctcagagagaagggaatacgcagagggcccttggcagagcgggtcctgccttccctggcaggcgggaggtgaacagggaaaagagctgccacagcttcttccaatcccgcccatccccttt

SEQ ID NO: 465321 - DNA, 1000 bp, Homo Sapiens; identical to SEQ ID NO: 335741

SEQ ID NO: 465322 - DNA, 1000 bp, Homo Sapiens
ttttttttttttttttatatttgaaattttaaggtcagtttattaagttcaatgatgaaagctatcagaagaatattctcctgaaaataattttttcttagaaaaaaagaaaggaaaatcataaccctctgagcatagccacagatgctgtggcagtcaagcctctctgcagatggggacagtccattagtcagctgagtcactctctgggtcagcaggattatagtctggatcatcttcatcatcctccagctccaagtcatccatttcttggaacaaagactcatctacctccacgttgtttccagcatcctccaagaactggatatcagatgtgtcaagattatgatctgtttcaaatagttgtttcccacttaatttattttttcctgcttgttcttcttctttcatccttttctttttaatttccaagagttctgcatcaaacttggctttccaatttaagaaattctcaattgtaactggagtaccatggaataattgcttttcagcttcttctgcttctttttctttttgtttcttttcttcttctcttctagtttttatctgatctactatttcatttaatttttcttgcacagctgtcactagagtaaaaatcatcaccataccaagattttcttcagcctgtaatgctagtaattttaaaatgtctgagacatcattatcttctagattttcctgggagaatatttcataaaggggagcttcatctgggtatttttcactgtatgtaaacttgagggtagtctggacagtttcatcattttctccagcctcagacgtcacagtaatggtgaagctgggtggattttctgataatacttagcaggaccttgtcaagtgaagcactactgaaggagaatgtggtatcaggagagtccatttatattttggaagactagttgttaggagggttggatcaatgtgcaatcaagctgtgaaggagtcagggtagatggactccagggcctccagc

SEQ ID NO: 465323 - DNA, 1000 bp, Homo Sapiens; identical to SEQ ID NO: 157483

SEQ ID NO: 465324 - DNA, 1000 bp, Homo Sapiens; identical to SEQ ID NO: 157484

SEQ ID NO: 465325 - DNA, 1000 bp, Homo Sapiens
tttttttttttttttttcttttcctcaccctttttattatccgtgtagctttcatagaatttcccacttcacaggacatttagaatatgtttctctgttcttcaccacagccctcccatgacagacattttttagacaatttgttcatagcttgttttgatttgaggtcttggttgagctactgaaaacataatccactcataccctcgtttccaaacaggctttagggttcttccatggggcctggaaagttacctacccgccttcttctgagtatttatgcccaaaggccaggatgtccgatgcccgtccactcccatcacagacaaccactggcacgggaggggtgtctcgaaggtactccaaaacaatcgagatcacattgggtcctccttccactatgagtgccaccacaggaacaccttgaccgattccaactgagtctaactggcaactaccccaaaatgaataaaacaagcgggagtcaagagagaaaaacggcaggcatcttgtgtttatcttctggagtgaaatatgcttttccagttgtcttcgaagtttcacctctgctccatattttccagtggtcccgttgtcagccagaatgaagtgggaatgcatgctgttgagaacagtgagcttgctcatgggattggacatggtctggtatggccggacaacatctcttccaatgaggtcctcctggttttccacaattccccagggggcaatacctatggtgcatatctttcctcgagacttagaggcatgatccttcaaggcatcgccaacatgacgaataacacctgtgttaacccctccagtgaatatccacgctccagttgtcattgctgctttgatgagccctttcccaaagacttgcttgagttttggctggagttcaaagttctgcaggcccccatggacagagatgagaagcttgggaagctccaactgccattccttggtcatcaggtgtaagaggagatcaggttttgta

SEQ ID NO: 465326 - DNA, 1000 bp, Homo Sapiens
tcagactccctgtcctgagggggagatggtttcttgcagaacgaggtgaaggaggtggttctgctcagcagtcaacagtggccacatctccacctgcagcgacttgatggcttccgtgtccttttcgtgggtagccatgaccaaagactggagcagcagaaagagctcctcgggaagctggccgctgctctcctgcccgtggctgtcaaaagcctcccaggagtacttctccagggtctgggcgtgctccggcagcagcttggcgggcggtggttgcaggaggagcagcagcagcacgcgggacacctcgcagcggaccagcacgtccgagaaggcgcccagggcggcgggagagggcgccgccgagccggagttcggaggaagcagcgcggccggtagggcgggcgtcgccccgggcccgggctggggtgccggcggcgggggcggcggcagtgactgcaccgggtggctgccgtgctcccgcgccaggcgctgcatgcgcgtgaagaccgccagggcgccggtgtagtcgcgcgccagcagctggcaggaggcggcctcgccaagcgcctgcagcgcggccaggggcagctggggcagctggagctgggcggcgcgctggaagtgaccggcggcggcggccggctggcccaggtcgcgcagggcggcggccagctcgaggcagagggcggcggcggcggccggctggcccagctcgaggtgcagacgcaccgcggcgcccagggcgctggcggcggcctgcagcggctccccgtaggcggcggggcagaccaggcgctggcgcgcgtcgcgctcctgccgcaggaagaggcgggcggcctcggtgagggccagcgcctccccgggcccgtggaagagcgcctgctggcagcgcgccaccgccagctggcaccaggccgcgtagggcagacactcctgggcgcgcagctcccggcccagctgtccgaactgctcgccggcctccgccacgttcggcttc

SEQ ID NO: 465327 - DNA, 1000 bp, Homo Sapiens; identical to SEQ ID NO: 157485

SEQ ID NO: 465328 - DNA, 1000 bp, Homo Sapiens
tttttttttttttttttttttttttttttttttttttttttttttttttttttttttttttttttttttttttttttgcagtacatgtcaaattttattgtgaaaattttaaggtagatattacatctaaacacttttcaaatagcatcaacaagtatgaaattactttgaaaacaattccttttcctttgaatacctcaaaaaattcatggaggaagttagtatctacctctctccacaaaaccaacatgtttctttcagtaatatgcaggtaacaatgcagaaataacatttcaatttttgatttgcaaacaaggattggtatgcaataactattattttcaatgcttgctttaatatctgctcgagtctcctttttcagatcgactctccccaccatctactatagatgccacataacttgagctaccacatgcttcacgaggatcagggagcaccctacccagagaaggcggattcctttggtcttttctgcaaacatgctcacgatcacaataatgaaaatcaccacagctcgagtaactctcccaacttctgccatatctatctcgtgtattactatatgcgtggcaggtgcttccaccataagacatccgaggccctcttgcaggtggtgcaccatgagaggtcccgtatctctgaagtgcatctctataagaacttccacttagatgttcagaatgatctctaccaagggcctcaccgtagccatcatgataactatatcctctagaggaatgttcatcccaactagaatgaccataatcacggtatgcatagtctctatgtggtggagcataatccctggtttctcgggaacttggatgatttctatatcctctagaataactttcatgtcgacgagaatgaccataatcacggtatccatggcctctagatggtggagcatactccctagtttctcgggaacttcgacgatttctgtatcctctagaataactttcatcccgacgagaat

SEQ ID NO: 465329 - DNA, 1000 bp, Homo Sapiens; identical to SEQ ID NO: 335745

SEQ ID NO: 465330 - DNA, 1000 bp, Homo Sapiens; identical to SEQ ID NO: 335746

SEQ ID NO: 465331 - DNA, 1000 bp, Homo Sapiens
taacgagcgaaaaaaaactttaatagcttttaatctttatgctgcaacatatactcttgtatatgcacagaatgtatattctgtatataagacaccaaaatatatatttttgggggaaaggtgtcaggggctaaagtgaaagattcactttttactaactctcctcctataatggttgaatatttttaaaaccatgtgcacatattactttttaaagttaaaataacaaaaaataagctgctaaagatatctcaaaagaagctttttcctgagggacttactaatatggtaagtacagtagcactgtaaagccttttaacacttttggtcacataaaatttttgttgttaaaattcctgctgtgcaacaagtaagtccttacttgtcatctttctcttttgtctttttgtgcaccatctctcggaaactggctaaaatcttactttctctctttcgtctctcttcttggttaaaggatgcaagagctctcttctcatcagcactgtagatctggttctccttacgcagtcgtacagcctccattctgcgatgcctgctaccactcatgacataacctgagcattcaaaagaaccgatctcttcacttgtcaacccaatttcacctcttcgtgggattcgctttccagcttttacatactcagccatagctgcaccttcaccgggaagcaaagcatggccatacttcaaaggtttttcatcttgagaggtatgtattataggtgcttctggccctattaaatccatagtatctgccacatttggctgctccatccaggtagcttctgacaagtcctcttctgagtctttacagcttgagtcactggattcttttttggttttcttattcttctttttctttgttttgtgtttctttttcttctttttcttcttggctttaactctctttttatcatcatcagagtcagaatttgtgtcagactctgagttactgtcactatcagaatatttcctatgcttt

SEQ ID NO: 465332 - DNA, 387 bp, Homo Sapiens; identical to SEQ ID NO: 239938

SEQ ID NO: 465333 - DNA, 797 bp, Homo Sapiens
  misc_feature (32)..(32): n is a, c, g, or t
tttttttttttttttttttktcacgtgtgtanacccaggccccctcacctgggagtcacgtttattgaaaaagtaaaaagtgtcacagtaaaaaattcacctggggacaaagcmaggcctagraggggtggcggggtcgtgraggracgggtccggccgcccctggcccamsggtggggcacgtgbtggcccatgggcracgcgcggtttttccarggaggcggccctgggcgcgggggcgggcgggcaaagctggctcagtccatcgtggtccctttgaagagctccaccagctccttgtagtccgggtcgatgaggtcggagggcaggtcgccatcgtcgttggttgcatccctgtccgctcccagggagataaggtacctggctatgtcagggtacccatcgctgcaggcaatgtgcaggggtgtccagcccgcctcatctcgctggtgaatgtcagccccgtatttgaccagcagcttcacgcattccaggtttccagagagcacggcttcatgcaaggcggccaggcctgaggggtggatggtggccagggagactttccgagtccggatgaagcgccccacctgctccaggtcaccctgccggatgtggtccaagaacaggacatcattagggaaacgcacgctgcgatcagccagcatccgccgccgccgctgccgtgggctgtagcgggcatagcgggcagttctgctaggcatcttgggcgctgtggggcaggttgcccctggggaccctactgcactggggttaataatgtatccggtcccgaccag

SEQ ID NO: 465334 - DNA, 1000 bp, Homo Sapiens; identical to SEQ ID NO: 335748

SEQ ID NO: 465335 - DNA, 1000 bp, Homo Sapiens; identical to SEQ ID NO: 335750

SEQ ID NO: 465336 - DNA, 1000 bp, Homo Sapiens; identical to SEQ ID NO: 335751

SEQ ID NO: 465337 - DNA, 1000 bp, Homo Sapiens; identical to SEQ ID NO: 335752

SEQ ID NO: 465338 - DNA, 1000 bp, Homo Sapiens
ggttgctgttgttccctattctatctttattgtttagaaaaatgaatggcacacagtacatattcaataaatacttcttgtataccccagtgagtgaattttacagtgtaaactttaaaaatcatttaaaaatccacataaaaagcaaattcctgaggttcactccagaccctctgaataaaaactctgtggggaggaatctccctgcacatatttatgtacttagaagttttagaacatttctctaaagccatgagagtaactcaggctcttcagtttgaatagccccattccccatggtgcgttctcttttgggttctgtggtgttgtttctggtcagtggacctcagttgggaccatctcagttcatcagcaaggatgtaatgatgttaaatctaaaagtgagccgttcttactgaggccaggggtatgtggagtggcagcttttgcaaggacacagaaggacctgtccaacctgcggcattgttcatctactcgtaacactaaaagggagcattcaagggactctcttagccaatatgatctttccttaggcaactgatttccatgtctgtgttgccagagtagggctactagtgtctctcactagctatgttaaggtcggcctcatctaagtccagtgccacctgtacagcggtttaaggaagaacaagacacggcctagatgtgaagttgtttacaaagcagttaactgtctgaagtttcttcttgttgttgttttgtttttttaaagacagagacttgctctatcacccaggttgtagtgcagtggcacgatcacagctcactgcagccttgacttcccgggctcaagcaaccctcctgcacagcctgccggtaactggaaccacagatgtgcactgccatgcctggctaatctttttgttttttgtacagagtctcaccatgttgcccaggctggtctcgaacgcctgtgctcaagcgatccacccgcctcggcctcccaaaattctgggat

SEQ ID NO: 465339 - DNA, 1000 bp, Homo Sapiens; identical to SEQ ID NO: 335753

SEQ ID NO: 465340 - DNA, 1000 bp, Homo Sapiens
caaataaaataaaatctttatttccaaatggttcaatacttggacctgttttttaaggggttgttcagaatctgatctactacatttgttacaaccacatttattgtttgtatggaaacaggaatggctaaagttttgagaagtgtgttcttcctaaaaacgtaaaacattcaacatcccccagcaaccatgctcacacagttcgctccttggtagagctttttcttcccagatcatgtggaagaaaaccccagctcaggctgctcccggctgctctggttctgagtgagtgtgcagaggtttgcaatatcagcccaggtcaagccctgaaaaatctctccagactccagacttgatctgtccagacccatccgagaattaacaggctccccatcgtgcccacagaagcaagactgtcatggaaacactgattcaaccataataactactgacagaaaaaccacacaaatgaactaaacaattcttccacccaatcagggtccaggggagtccatagcctcaggattaaaataagtagggctgtttttattatgtggtccagctcgtttgagcctctcccattgccttgttttcacagctcccttttatgagaaagaaagtgggggtgggggagttgggagggagactagagctatgcagacgggaatgccaggctgggaataccaacaaacagtgtgctgcatgtcaggcaaattaaaacttctagcctggaggaggctgtaatcgtgtttgcggttagtctgaaaacaagctacactgaacttctatctcccaggaaaacagtcgagtgtggactgaagtcaaaaatgagtatttttagcaagcattctctctcttccgtttattttcttccttcttctgtctttagatattagaaacgctaattacatgaagtatcattattattcgaagaaagcacagttagaagggttaaaaataaaaagatgccaaaccaacggaagcagtacaatcctaagga

SEQ ID NO: 465341 - DNA, 1000 bp, Homo Sapiens; identical to SEQ ID NO: 157486

SEQ ID NO: 465342 - DNA, 1000 bp, Homo Sapiens
gattgcaggactgcagggaacggggaacaaggcagagaggaaggggccagcccagggagcttcatcaagttgtcactgcttccacaatggcgctccatcccagggcctctggacccggggaggatagagcttggagcatcctcctaagggctcactgctggctgagggctgttcccaagaggacaggatctaattctctggcactttgacctgctgtgtgcacaagagcacctccgggaggcatcgtgtgtgatgccaatgggatgtcagaccagagggcagggaggggaaagagcgacggcacaggcagggcccccagctgctctagggagcccctctgctgctgtctgctctgctcagcacctgggatgccaggatgagactctctgcctccatgctcgctggaggatggttttctgacatggcctttctttccctgctcagtcttgctcagaagcttctgcaggggtcacccaggcccatgcaggaccttggccacaggacctctggggaacattgctttagctttctgagctctgtggcacaagagggcaggaggtgcttggagtggtctcgagtgagggggcctgtggtatctactgcacccacctcagggcctttgcacgcactgttccctctacttgaatgcttttcccagtctttatgtatctgagtttctcctcgtctttcaggttctgcttggatttcagcttctcagagaggctgtcacggccctctctctcattcgacctctctctgttaccatctagcacatcatctgattgcattttctccagaatgatcttgcttgtttccatgtttattctccatctcctcttctcgacagaaagttctaggagagtcacatccttacctcccttgttcatcgaggtgtgcccagtacctatgcccatgctcggcacacagtggggcctcaggaagtatttgctggtgagttattgatgaacccatctctggggttgctgtggatttctcatgg

SEQ ID NO: 465343 - DNA, 1000 bp, Homo Sapiens
tcatggaacaattcatttcaaaagtataaaaaagccacatgcaaatccgtttctcactgtttgccctgctaaaaactacatctgcatacagatctagtttgcatctaatttttaaaaacacacaaaaggggtcatctacacacacaggttttccaactcttcatgaagcacaaagatccgttatttgacttttccatcatcccatgatcaatgtttctaagaccatttctccatcacatgcggtcatcgggagctgggaagtggaagctcctgtatttactcagatctagaaccgtcactgtgctgtgggactcagcctctcccaccatgttggctgcatggcactggtacacaccctcatcctcctttcgcagggggttgatcaaaatccaggccgtggcctcatggtcagaagggccccctcgcacttggacagctatattgacatggtccccaggcagctcctccagtgcttgggtgccctcaggggacttcgtgacctttctccacgtgatgactggggtaggcacagccctcacttcacaggacaggcccacctgcgccccggtgacgttgtgaacacttcggggaggaacgacgaccacaggagcgaactcgcaagggccgtcgcgcgccttgtgcaggtgaccggggtgcgcgcggggcgtgtgccgagcgcgcaggcgcagcgcgcagacgctggggtacgagcgaccgtcggagccgcagacggtgccgcgctgcgcgcacacgcagagcccggtgccctcgggcgctgccccagcggcctggctcgcgcataccaggccggggccacagcgcccgccggcgcggcccccgcagctcgcgccctcggctcccaggcagcgggcgcagcagccgcactcgtcgagcgccgagatcccgggcgccgggcagggcgcaggcgccgggcagccctctggccggcacggaccacacttggggcgccggccgcccacgtcgcggatcccaaggctcg

SEQ ID NO: 465344 - DNA, 1000 bp, Homo Sapiens; identical to SEQ ID NO: 157319

SEQ ID NO: 465345 - DNA, 1000 bp, Homo Sapiens; identical to SEQ ID NO: 157487

SEQ ID NO: 465346 - DNA, 1000 bp, Homo Sapiens; identical to SEQ ID NO: 335756

SEQ ID NO: 465347 - DNA, 1000 bp, Homo Sapiens; identical to SEQ ID NO: 157489

SEQ ID NO: 465348 - DNA, 1000 bp, Homo Sapiens
gctttgcggatttgcatttaattttaaattttacaatttagattcagcatgaattgcaataaatggatcttcagcagagttactaatagaaaaatgagctttgccatcatcagaaacgtagattttaatgcctgtgcagttgccattaattttatctccagaaatgacatcacagtatgtgccagcaggaagaccagtttgcaaagttaaagaaaatgtccagtcatcattgttgaaaacaatgaatcctctgtttcctctcccaaaagccacttggttgctcccattatcataccagtttgtaaaaggctggccatccactacattgcggaaattaaccatgttccttatttggcgccatcgatgttcacagacccagtcattgccacaagtagtgtctggattaatagtaacttctttagttactccattatcatttggtggcccaacccaatcattaacatcttttccattttcaaaatatcttggccaacggtagcttgacattactcgtgtaaatccataaggatgagcaagcataaatccaactgccattttgtacagcctagcatcccagaaggtaagtatagaggctcctccagcgccatgtcctcgttgattgtcatggttatccacaaagacaagcgctctgtcagaaggcatgaaaccccaaccttctccccagttctttaagtaagacatcttctctccattccacttgcgaataactgtgccgagttttgcaccatacttgaattctgtcacccggccattaccaaagtagtcactgcttttaattggctcaccacccagatcaattacctcctggtaaatgaaaggtttactaccttccgggaaccagttactgtttagattatgcagtttgtccaaaattgcctttatgtctccaggccacatgtgcttggaagcatcaattctgaaccctgcaacaccaatgtcaatgagatggttcatatattcggcaatcttagaacgcaca

SEQ ID NO: 465349 - DNA, 1000 bp, Homo Sapiens; identical to SEQ ID NO: 335762

SEQ ID NO: 465350 - DNA, 1000 bp, Homo Sapiens
gcttttcacatacaatgtttactccgtattcaagtttcagataagtcaactataaactgaagttctgtttttgaggcatttcctggtatactaggcagtgcattagaaaagagattatattgcatttaggctacaataattatcttttaaccatctatgcataattaacaaccattcaaaaagaaagtgcaaaagtgcaaaagagagagaacaaaacagtttctacacatgtaatgcatattataggatataaatctagacaactaaaaacaatcgccaacaatatccttctgagcattaaatgacaccaccaattttgttttatatgtattctttcttctcaagtattcaaagaatgcaatagacattatcttgttaatttgcaaatttttcaggagattaggatattattttttcacaaaccagaaaacaagatactaccattacctttgtataatttttcaataatagagccaaaataacaacaattctagctaatctcacctgggatcttagtactacaagtttatttttatgagttagaaatagtatcactcatgagaaacaatgccaaaattattacactaataaattatgttaaaggcctaatgaagaaatacttcaacaactatgaggtaacacgctagctgtaggcatgaggaacgtttatattggctcttctgggtgtatacattaaaagcaaaatcataaaggaatcatgcaaaaatccagttgcccatgcaagcaccccagagtctaatcctctcctctcagttctgttgtcaggccacagtagtgtggagacttgtaggctgctgtccttgttgtaatgaatgggaagaggttgacagtggcatggtcgaaaccttcacctcttcttcccctgctacagggatccctcccagacctgtgttgtgctgtggcgggagattcaagtccaagaaattactatttgaggtggggtttgctgtgtggttcaagtgcatgatgctattgcgtg

SEQ ID NO: 465351 - DNA, 1000 bp, Homo Sapiens; identical to SEQ ID NO: 335763

SEQ ID NO: 465352 - DNA, 1000 bp, Homo Sapiens; identical to SEQ ID NO: 157491

SEQ ID NO: 465353 - DNA, 1000 bp, Homo Sapiens
ttttttttaggcttacatagtaacttttatccatcaacttacctatcgatgcttaacagaaaagcagcccccttttacctagcccattttaacatttaaaaaaaaaatacccatagtagacatattctttaaaagacaaaagcccaataaaacgtcaaacccttctgtacatagttgtaacaggttttcattttatggatgtgctcttgtcagtttgttaaaataggggaatcagctagtagctgttctaatgaacaccataattcaataacttacaaacttttttcacctcaggcacaaattcttgtttcgagaaggcacaggttttaaagctcaagtgatcctcctgaagttacagatgcacaacatttaaaacaatgttgaaattcttctaggtatttaactccagttagcataaagcttttttttttttttttgaatcttcagctaaaccgggaaccattagtcaagacttcctgttacactggctataaagcatctcaacaggtggattccagaaaaggtcacagcacttacaggaaacaactgaggaaaacatccttgagttttcatgttaacaaatttctggatctgaagcacttgttttaaaagatgtcccttggaagatttgtcaatttttgttaatacaatcacataaggtaatgcaaattcttcacacatttctatggcaatattgtctgttttttgaattccaacaacgctatccactaataaaaatgttctcttcaagctctggccgcggaaggtccggggcgtggtcgatacggacggcggagctgacgtagtcgatgcggttccgttcagtggccgtgaagatgttgtccgccctggctatgtcctccgggcttgggtcaaagatacgcaggtgaaggtcttgcctcccgtagggggcgaggaaccgctctacttcctgcagcgggtacagcagcttcctcagctgctgcttcggcagccgcagcacctcagcaaaagcttggga

SEQ ID NO: 465354 - DNA, 1000 bp, Homo Sapiens; identical to SEQ ID NO: 343938

SEQ ID NO: 465355 - DNA, 1000 bp, Homo Sapiens; identical to SEQ ID NO: 335766

SEQ ID NO: 465356 - DNA, 1000 bp, Homo Sapiens
tttttttttttttgagatttaaaaatcattattttgccacactctttaaggagatgggggcctcaggtacaccgtcacaagtcccattttgagaaaaagcagcatttaaagacacaggctgtttctcgacagccaggattaaaagggagaaaagaaggcaggctgaacaaagcatgaactttcttttctgtggctggagcactggcccgcatcatgccccctgcccagcaggaggtgagatggcagccatggagcacagggctttccgctgtcagtcactgaaaagtcagggtcaaggtggccgagagaagcagaggcagccagactttcaggagccccaagctgctaaaagcccttgagactgtggcctggacacctttccgtgtgatgggacccaagttcaggacacgggattgatctatgacactcccacttcggaatctggtcccagagcaggtaggcttgcacttttcattcatggtgtcacagagatagacttcacagtgcaggtagactaggtcatagtttccagcaaaccggaacatctggacggaaaatcggccctgggaggactccccattctccaccacttggatagttgagtctctagtgtgtgggcatctgtcctggatgatgaagtacttcagggggtccgtggcattgctactgggtgtggcatagcagttggtcatgagcagtgcaaatcgggacaggtcgcccccatccaacatggtgcccacgtagagaaaagcctcagtggacagtgtcacggaggagccttggtagggctgcgtgtaggaaggggtctggaagagcgccatccgcacggtgaacatgccggtcccgcccactctgatgtttagagcactgaccattggctgtagggcggtcttcaggctgactttcatgtccagggggtaggagcatgcaaagttgattttgatgttgaggtcacggatgatgatctcatctgccaggtagagggtgttgctgtaagtgg

SEQ ID NO: 465357 - DNA, 1000 bp, Homo Sapiens; identical to SEQ ID NO: 335767

SEQ ID NO: 465358 - DNA, 1000 bp, Homo Sapiens; identical to SEQ ID NO: 335769

SEQ ID NO: 465359 - DNA, 1000 bp, Homo Sapiens; identical to SEQ ID NO: 335770

SEQ ID NO: 465360 - DNA, 673 bp, Homo Sapiens; identical to SEQ ID NO: 335771

SEQ ID NO: 465361 - DNA, 1000 bp, Homo Sapiens
tttttttttttttttttttttttttttttactgaaaatgatgaagactttttcaaatgttataatacggtcatttataaatgactatttatatatgtcagttacatacatagtgacagttatagtaaaacactaggaacctgtacttaaaaagaaaaaacaaaatcctgtacacaaaacaagcatacatatataaggatttgaatctatgtatatatattttacatttttcaacatttgtgttttattccattaacataaccatttacagttattccagaaatttcagtcatacacagtgctcttgaatccaaagagtggtctagtgtgttggcattttcatcaagtacagtcctagaaaatgtcaagttgaacaataagatattgaggcacattggtcactgtgtattctgaattctttagtatggtcagaggaagtagttaatatatttcatgttgattctttggctactcttgatttttgctttgggtaacatcctcatcctgggaacattcattaccacttaatagcaagataacattaaaaaaaaatccttcattgccacatttaatagcatgtttaaaaaggcagaggttgcaatgagctgagaacgcactactgcactccagcctgggtgacagagtgagacactgtctccaaaaaaaaaatgtttaaaatgagaccaaaccctcatggagacatttctctgttctattagaaacgcaatggcattctcatagatcctctttcttttttatgatcacttgtctaaccagagctgctatgtcaggcctgatgacttcaatgggctcctctggcctccagaacttcacaacttgaccctcagggttgacaagatacttccaaaaattccaccttggttccttctttgaagaatcaacaagaaatctaaatgcaggttctccttcagatcctagaatcttaatcttgtggaagatggggaaagttactccgtagttttttcttgcaaaagattcta

SEQ ID NO: 465362 - DNA, 1000 bp, Homo Sapiens; identical to SEQ ID NO: 157494

SEQ ID NO: 465363 - DNA, 1000 bp, Homo Sapiens
gacagtagaggatgtaatttttaattaagatcccaacataaaaggcaaagatacaaaggttttgtgctgcataggacaaacatatttatggctttttattatgtctaggatgttgagacaatgcattgtagttagctggtgtcattcacagcaattcaggacaggtgtggtgcttatggcgtcagggacacagctccttgttgctccactttgcatggcctcgacctcatgatctaagatagcagcatatgtttcaagcagcaggacagaggaagaaaaaaaagaaactggccccacatgacagtcctatttccacttacatacaaggagatggaaaatgttatctttatgcttgacagctgtttataaaaaaaaatacaaaactggagcatgtattaacacaggtgaatgaaagaatggatactggggtacaaccagtaccctctgccacaagcatctactgcaggatgtctccaccttggcaacactgacattctgagtgagagatcattctttgttccagtcctgtgcattgtggaatgggtttaacagcctccctgacttctatccactaggagcattcccctggttatgacaaccagaaatgtctctaggtattgctaaatgttcccctcaggatgacctcttcacttcctgttgagaactactgatttactgtgtgcaggaactgtgttaatcactgaggagacaaaccataaatgagatcatttcagatggtagtaagtgctatgatgaaaataaaatagggtaagaaggcagacaggcctgggatgcaacatgtactacacatgcaaacgtactgacaggggaaagaatttggcttgttccaagaagaatcagaatgcaggtatgccaggatctatatcctagggaaagaacaacaaaaagaaacaggtgtgattggcagagcaggtggactgagttgaggctgaaaagtagatgggagcctggtgaggtcttggtggtttgatcttaactg

SEQ ID NO: 465364 - DNA, 1000 bp, Homo Sapiens; identical to SEQ ID NO: 157495

SEQ ID NO: 465365 - DNA, 1000 bp, Homo Sapiens; identical to SEQ ID NO: 157496

SEQ ID NO: 465366 - DNA, 1000 bp, Homo Sapiens; identical to SEQ ID NO: 345232

SEQ ID NO: 465367 - DNA, 993 bp, Homo Sapiens
ttttttttttttttttttttttttttttttcgacatattaatcctttattagaaattgtaaatgagaaattatatcaacacctgaggaccaaactacaacagaatattccataggctcaagattttgagacattctggaaagagttttctgtaaggtatatcctttccgtggcatggcaacatcatcattctttaaaaaggtgactggacagacatcatttccaccatcaccaatataaacaatttgtgtataattcactccctgttgtaactgtttatctacaaattctatcaaaactacctttttgcaaagattctttgggcatctattgcaagaatgagtatgataattttcaacagtgagatgaccattgctattaaaagctgctggatttgtaaacactttatcaaatatgtcatgaaaactggcagcttctaaaacccaatctatgaagaccgaatttgaatctgaaataataatgcagtcaaatttatccttattctttcttataaagttgaagagttccaccatccctggagtgaaaggcaatgatgtcactgctcttttcatttcatgttctcttacacccttatctcccaaatacttaaagactctgcccataaattctgtccaaaatccttttcgataagaatcacgtagttcaataggaagctttttgttgggagcacattgtacaatccaagtgtcactattgtcatctatgattgtattgtcaaagtcaaaaactagcaaaattttcatggttccagaaatagatttggattaccccaacttagtatttccaagacaatcttacttcagcattgggattaggataaacaatcatgacaatcttcagttttaaacatcagccagttgttttcaaatattactcctattctatatacagggaacagagtcttctggtttggagcaaaataatggaaacttcttaactccagcattattacgtggaacatctgatagaaaac

SEQ ID NO: 465368 - DNA, 1000 bp, Homo Sapiens; identical to SEQ ID NO: 157497

SEQ ID NO: 465369 - DNA, 1000 bp, Homo Sapiens; identical to SEQ ID NO: 335779

SEQ ID NO: 465370 - DNA, 1000 bp, Homo Sapiens; identical to SEQ ID NO: 335781

SEQ ID NO: 465371 - DNA, 1000 bp, Homo Sapiens
cagtgttgttacttttatgtcttcctttcctgtcctttaacaaaaaaaagtttcaaaaataaagtaaacgtagttttccaagtagagtttacttgttcacagatgtactctctctgtgacgaatgccccatcttttcaattcttagagtggccctgcttggggtggaaaatgttcagtcacgttcagctgtgagatctctgtcacatatttgaaagggaaactgcaagccaaaccctgtcagttctcctctctggaaaaatcagtctgtggtagtattgagagtagaacatatcactctgaatctctcctgtgtccaatcaaaaacgatgagaatttaatgctatggacctaggaaaatatttcagacatcctgcttcaaaaggaagacaggcttacacgttgtggtttcattagcacatcaggtcttcttctgcaggtcaaaggtaaaagagacgagttgacaaggaacgattcggttcctggtgaatggactgccccacgaggtaagccagcttgtgggcatagtggcaaggcgctggaactcggatgatgcctggcaaattataatacatgtggcatagacaatatgttaaacgctgtactgtatctgggctcaagccaatcgtgtcatagatgacgttataatgagtgggggtaacagtcccatcttgcacagactgactcacaataaaaaagtcataccattcattcctagtcaactctacatcaataactgttcctggaggtggattttgaaaattgcttccatgtttaagaaaaaatctagtgtttattcgtttcttcaccacaatgaaagctagagtgaaattgttaggagagatggtttttaagtaggtcgacatctttttcgcttcatggtcaagcaatgcttgaagctgaccatctcccactccatcccgatacacaataacagaatgtggcatcgatgattcgtttttacaccagacatccagggcagctttcaagcagatctccagc

SEQ ID NO: 465372 - DNA, 1000 bp, Homo Sapiens; identical to SEQ ID NO: 157498

SEQ ID NO: 465373 - DNA, 1000 bp, Homo Sapiens; identical to SEQ ID NO: 157499

SEQ ID NO: 465374 - DNA, 481 bp, Homo Sapiens
tttttttttttttgatctgctgagagtctctttattgttcttcacaccggtgtaccatgctggagtggtcggcctaacttaccgaaaaatattcgtcaatttgtttaagacccttttccacagtgaattcaccgtgagtcatccacttgatgtttttcaaagggtttcgctcctcttccacaatcttaacagcataattgatgacatcctcaaccagagctagagctacttgagtcaattcatcctcgtagttcttgtcttgtgtattcggcattgtttggcttgcggctttgttatcctcatccattgctttctggcttgttgaattttgagtctcactcattttctttttccggagtgagcagatcttctttgcttggaacaggagcagtggtaggtggctggggatgtctcaggattctctcagtagcttctctcagattgccagatggaatgtttgcaagtgctagcttctcttcag

SEQ ID NO: 465375 - DNA, 1000 bp, Homo Sapiens
atcatcaggttgtttaattatcaattttaatttaataccctcatcaaaccatataggtaaacacttagtagactcactggatggttggttacaagagcttcttataaaatcaaacatactttagatttgtgttttctctcataattattcttgattgtttatttgagccaaaagctatgaaaagtttgtgtaaggagtgggatttaataaaaatttgttggatgagtaattgaaagaatgaatccatggcgatagattcagctgcacctgaacatgagcagagtcataaatttactttaatcaagtgctagaaaatcataattaagttatggcattgtctaaaattattttgaaggataaaattttaggatgaacttgaaatacttctaggaaatgtcatgaagcagagtaatctatatatatgaattaatattttatgattatgagatattattgcagagtcttataatttcctactgctctattttaaattcaatgaatcagttggaaaaactggcacctgctaaagatatggaaggaatttttccatttttaatgacaggtacattgagataaactgtctcatgacaaagcccattttggcatttggaagtagcattgtttggtaggagttttactgactgtatttgtttgctcagatgtttctttagtggtgtcccccactgctgaatattttattatttgtttttgtagaaatttaggaagagaatttaaaagattgttaatctgcatctgaatgtgtacacgtgagtattgagggtgattgggagagaaattgggggcatgttgagatgataatgattcattgctttgtggtgcttgcctccctttgtagtaccagcctctctctctgagggtgaccttgcttatcttccaaggcctggggagctggtgtttcctgtgcaccagcaggactctcatcaagtggaagtcccctggtatatggttgtgatgcttggctgtagttgaaaaagacaga

SEQ ID NO: 465376 - DNA, 1000 bp, Homo Sapiens; identical to SEQ ID NO: 335784

SEQ ID NO: 465377 - DNA, 1000 bp, Homo Sapiens; identical to SEQ ID NO: 157502

SEQ ID NO: 465378 - DNA, 1000 bp, Homo Sapiens; identical to SEQ ID NO: 335788

SEQ ID NO: 465379 - DNA, 1000 bp, Homo Sapiens; identical to SEQ ID NO: 335790

SEQ ID NO: 465380 - DNA, 1000 bp, Homo Sapiens; identical to SEQ ID NO: 157503

SEQ ID NO: 465381 - DNA, 1000 bp, Homo Sapiens; identical to SEQ ID NO: 157504

SEQ ID NO: 465382 - DNA, 1000 bp, Homo Sapiens; identical to SEQ ID NO: 335792

SEQ ID NO: 465383 - DNA, 1000 bp, Homo Sapiens; identical to SEQ ID NO: 345738

SEQ ID NO: 465384 - DNA, 1000 bp, Homo Sapiens; identical to SEQ ID NO: 157505

SEQ ID NO: 465385 - DNA, 1000 bp, Homo Sapiens; identical to SEQ ID NO: 335794

SEQ ID NO: 465386 - DNA, 1000 bp, Homo Sapiens
ggatcatgccattgcactccagcctgtgtgatgacaacagcaaaactctgtctcaaataaaataaaataaaataaaataaaataaaataaaataaaataaaataaaataataaaaaaaagattccattggctccctaacattcctaaaatttataggggacacatagagtatgagttctttcatgtcttcgaagtgaatggggataactgaaggcctcctcacattctttgtaccaataaaatttctcttcagtgtgaattcaaatgtggtaattatggtatgagaaattcctaaaagatttccacattccttacattcagagtttttcttcagtgtgtttttaaatgtttagtaagtaaataaaatctattgtaggctttcccacattcgttacatatatagggtttctctccagtgtgaattctaacatgtttctgtagatgtgaagaagcacggaaggttttcccacattccttacatatatacggtttctctccagtgtgagttcttatatgttcaatgagttgtgaagatgtagcaaaggctttcccacagtccttacattcatagggcttctctccagtatggatttttacatgattatgtaagcttgaggaaacagtgaatgctttcccacactccttacatttatagggttttattccagtgtgaattctaaagtgattcttaaggcatgaagagcttctgaaggattttccacataccttacattcaaagggcttctcctctgtgtgagttttaaaatgttcagttagtagataaaacctattgtaggctttcccacattcgttacattcatagggcttctctccagtgtgtattcgtacatgtttagtaaggcctgagcgcccagcgaaggctcttccacattccttacattgataaggtttctctccagtatgaattcttacatgttcaactaggtgtgaagaaacagtgaagcatttcccacattccttacattcatagggtttctcc

SEQ ID NO: 465387 - DNA, 1000 bp, Homo Sapiens; identical to SEQ ID NO: 335795

SEQ ID NO: 465388 - DNA, 1000 bp, Homo Sapiens; identical to SEQ ID NO: 335796

SEQ ID NO: 465389 - DNA, 1000 bp, Homo Sapiens; identical to SEQ ID NO: 335798

SEQ ID NO: 465390 - DNA, 1000 bp, Homo Sapiens; identical to SEQ ID NO: 335799

SEQ ID NO: 465391 - DNA, 1000 bp, Homo Sapiens
gctacattttatttgaatccccagtaaaagatgatttgattgcattgagacaatatataccttcctgtatgtatagaccttttgtatgattaccttaaagaaggaaatatatgtctgtgtgtgtgtgtctatatatatatatagacatatatgtatactttgttttttatccattagttcatgtaaaacatgaacaaaatataatgttctttgtaagcatatgccaagaaggtagtaaaaactgtgatttgtattctacacattccaaaacaccatattgcaaatcttcacaaaacattctgggctatgtctatacaacttaaacaaagtgaacatacacactatttagtgaatttgggtctaactataaaatggaattttctcttgcttcaaaaatgcatacatacaggttggctggtcccagattcttgaacagctaacattctattttggtttggtgttaggttgactaaaacccggagaggcagagcttgttttccagagaaatctcagcacattcttgaggctgcctgttatttttatattaataatgatgtacgtagttgcttctaaaattctatccagcttttgaattcttaggttacttagatgataaaaagtcccatggatgctattttttgagtgaaaaagtagcactcctctaatcattcgttcagtgacgttctctaaaggcaaggctttctgaggatttaggtagacagaggagtattcatggtcaaatacaggacctccttatggaagttagcctgagcatgtacaagatggaacaaattcaaaaagcttctgtcatcttcatcacggtctccagacataattgattgcagcatttccattataacacatgcaaatgcatttgccacattctgcaggaagttctttctttccactggagtgctaaagactttgcagactttttgcatcattttaactgtccaatccatgcagtacagttctttctcacacaccaaagccaaaaaga

SEQ ID NO: 465392 - DNA, 1000 bp, Homo Sapiens
tttggaaggtgagattacaagtaaatttattttcttcttgaaacccttttgaataaaataaacatttcaaaaaaatgattcaggctcttaaaatactgaggcttatggtgcattagttttcaacttaacataggtcacattaaaaatctgtttaggtgggtcaccacaaaacaaatatggacacaagacaaaaagtaactgaaaggggagaaagtttcaagattaatttaactcatattgttggagtatataaattattatgtatccccgccagaaaggactgactagagctcagtaaacaacatgcataaatctaattctggcatattactaaatcataccttcagaaccagtataagcttgagaaggatcacctattatgtccattgacagtgagttgtatgagtcctgagaatgtttttctgtcacccctgctgtatgactggataaagatgatgatgaagacaatcccagtctaacatatcttctttttttaccacagagtgaacaatctactggtgtggcactaggtccccggggcagctgaacttcatctctgttgtagtttctgacagctccactgtgatgaacagaacgttctctttgccagatataatgggttggtgcaatggccataacctcctcacaacatcgcctgcttacaatagccctatagtcaattctatcccagagctggtcccttaactttaagaaattagggaacaattttctccagtttttccctaaagcccatggaaaaatttcgtacttggtttcttcttcatcttcttcaactgtattagccagatacagagcaataaagaaatttatcctggtatgctcacttatagtaaatttagccctcttgaaataaacaaaggtcatagccaaaagatacttgtctgcaattttacagcagcagtccatccacaagaaatcttgaattaaatcgtcatcaaataatttaaagaaagcagtcatatcctgacgctgtataacc

SEQ ID NO: 465393 - DNA, 1000 bp, Homo Sapiens
tttttttttttttttaatagttagactcatactttattttgacaaatttaagatagaaaaatatcataatgtgaatatagcagttgctctttttgtaacatggtttgggatgtgcagtgaaacttgaaaggacttgctttacaggtggtccctcttctggctgggtttcagttaattctgaattatattccagccattgcatttgcttgaaagaatattggacacagtaaaaaaaagaacaggtttggcattcaataataaatattataaagcaatgaaccaaaacaacttttaaaataattactgaaagcaaacttcagacttcatgattaaagctaagaactcatattttcaaaatagctttaacagtttctatcaatatataatacaatagtaggacacttatttttaaaaaacaagtgagtagaatcagagtaaatatgatatttcagatgactataaacagtaaacatcaattcaatatatttatatatcatttcagcaatatactctttgcccagctggcgataaaaactgtagttctatcatcaaaaaatgcatccctgaatgtcatctttgaacttactaagtgctgtcatcatttctacactccatctttggagggggtggcttagggactcttggtacatgcagatatttagttatggttataatgacaaaaagtaaatgtgccaggagtctgaagcagaaacgttgccttactttgttaagtagcttcacattcttttgtctctgtgatgcctcaggtgaagtcacactaaataattcacacaggtgctaattttgttgctctgtgtcagtacctttcagcttctttcttttcttcccttccccactcctcaaagaataaaacggggaggcctctcattaaaacacgtcatttctaacatataaaataagtgtatgcacataggtacgtacatgcacctccttctcaaggactgggtaactcctcgttttctatcaaataatccttctt

SEQ ID NO: 465394 - DNA, 1000 bp, Homo Sapiens; identical to SEQ ID NO: 158697

SEQ ID NO: 465395 - DNA, 1000 bp, Homo Sapiens; identical to SEQ ID NO: 157507

SEQ ID NO: 465396 - DNA, 1000 bp, Homo Sapiens; identical to SEQ ID NO: 157508

SEQ ID NO: 465397 - DNA, 1000 bp, Homo Sapiens; identical to SEQ ID NO: 157509

SEQ ID NO: 465398 - DNA, 903 bp, Homo Sapiens
ttttttttttttttttgctgctcacaagataattataaaatttattaaaaggtaggaacttacagtgctccacaggcacagtggcctggtaatagagtacaggtttaaggatatacaaggagggtctttgatcccatcagccagtggagccgacataatgtataaccttctttagagataatgttgaaagcctaaattggagaccctggccaaacggctcttctggcctctttcccagtgatgacaggctgtcctgctgcttctacacacagtaggtactcattgtttgagaaggaggcaggcagccaagctgagcccggggagtcgtcctgggcgccaccccgcccccgccccgcaggcctgcgggtctgagacctccgggacctgcccgtgctctctagaatcttcctgaacgccaggtctgagagaacgctgcggctctggaacccgttcgcggtctctcaggttttggagacgacgatctagtggatcttttgcgggacaggaggtaagtctgttcgtcccccactcgggttttcggcttcctaccttcaaccggacagggactgctaacatcctgaaggcccgcccggatcagggcctcagacgcccagggtcccttcggtgcgggaggccgctgggagcccctgtagcagacaagccctctgggacgctaaggagggcccgccccccccgcaggggcctggctatctcctccttacacgccctacaccgccacccgcttctgagtcccccagggttttcgcctccccgccgctggacgccactcagcccgccgctcgaggggcgcccccttgagaaggacgcagtcgcacgcccctacagggttaaagcgccgaagccaagacaccgccaggctctactgccgaccgcactcccgag

SEQ ID NO: 465399 - DNA, 1000 bp, Homo Sapiens
tttttttttttgaattttcacaaaggtgtaaatttattcctaagcagttaaaatgaaaatttgagtttgaaagggtagcatgctgatacattaagaggaaaaagacaagtttaagattttaaactgtgtccacagaagaataaacaatctaaatcttttctcccccgttaggtcaatattgaaggaggggctatagccttgggccaccctcttggagcatctggctgtcgaattcttgtgaccctgttacacacactggagagaatgggcagaagtcgtggtgttgcagccctgtgcattgggggtgggatgggaatagcaatgtgtgttcagagagaatgaattgcttaaactttgaacaacctcaatttctttttaaactaataaagtactaggttgcaatatgtgaaatcagaggaccaaagtacagatggaaaccatttcctacatcacaaaaacccaagtttacagcttgtactttactttaatgtgtaatactcaactcaaggtacaagacaattgcatttaacattgttataaataaaaggaacatcagatcaatcattaagggctccagagtgaacagcatcttcataacttccatgtttatcatctttactttctggatgtaatttaataagatcatcaattcgaagaatggtgattgcagcttctgttgcaaatttcaaactcttaactttaactatggttggttcaaacacccctgcttgtttgttgtctcgaggtttaccattgctcaaatcaagaccaatccattttagatttttacgttctgggttaacctgggcctcattatgaaaagctcttaattttgcaaccagatctgtggagtcctgggcagcattaactgctagtgtattgggaataacaagaagtgatcttgcaaactctgcaatcgcaagctgttcccgagaccccatgctggttgcatagttttcaaggtatatggaaagggctgcttctacagcacccccaccgg

SEQ ID NO: 465400 - DNA, 755 bp, Homo Sapiens; identical to SEQ ID NO: 335803

SEQ ID NO: 465401 - DNA, 1000 bp, Homo Sapiens
ttttttttttttttttttgcagagagcaaatcccatttattggaatttcactgacaacaaattgagaggaaggcttccccctcccctgaaacatgccatcctctctgccctcagggctcagcacagggataagacccccactccgcatgtccccagagggcagcactccaggggggtgggggggaggggaggggtgctctacgccaggctggggagctgggacaggagggaagacgtgcaccctcacctcttggctcaatccctctccccgggacctggtgctgcccccagtccctggggtgggctggcagacagggctcatgcaacaatgagtagacaggaggtggcacggaaacgtggccttggtgccccttggcgggggcgggaggactaaaggggccatgctgtggccacagcgggtccaaatggaagtatctgcagtgtacatacaggagggttggagagaggcatccttttccctaggctgtgcctggggacaagagagaggggaagtacagctggcactgccgtgccaggggcagggtccaggccagccgtgccacctgagcgggcacagcgagctggagctcggctactccttggcgcggccaatgatggtgaggatgtacaggaagatgttgatgatgtctgtgtacaggttcagcgcagcaaacacatactcttctgggctcagggacagctgcttgttccccagcagcagctgggtgtccactgcgaggaagcaggtgaagagcagagcgcccagtgaggcgtacacgatctccaggatgcggttccggatgaagatgcagagaatggcgaagatgaagagcaccaccatgctcaccaggagcacgcccatgcatgaggtgaagtcgtagcgggtctgcatggagaagatgacgacggtgaagcagacggctgtggtgatgcccacggccatgatgactgcctcggtgttgtagaagctggcgatcatccccaccatgtacgacaggct

SEQ ID NO: 465402 - DNA, 1000 bp, Homo Sapiens; identical to SEQ ID NO: 157510

SEQ ID NO: 465403 - DNA, 1000 bp, Homo Sapiens; identical to SEQ ID NO: 157511

SEQ ID NO: 465404 - DNA, 1000 bp, Homo Sapiens; identical to SEQ ID NO: 335807

SEQ ID NO: 465405 - DNA, 1000 bp, Homo Sapiens; identical to SEQ ID NO: 157512

SEQ ID NO: 465406 - DNA, 1000 bp, Homo Sapiens
ttacgatttaacttcaaagttttctgaaagcaagtgaaggacagtcacctgataaactgcagaattaatgtttgtcataacagtcaccatactgttctgcaatattggcccattgggtagaatttggttcccagatgtctgggtttcattcctttgtacctggcagatcttggttttgagaaaaagcctaggaaaggcagacttaggtgcctgctgtgggtgaaaagatggaagagtcaagttaccgttattgcacatctggaggctacagaaaggcacttggattcctttgcaatgctggcaaaactcagtcctgttggaatcagcattttattatatgaagttgttatattatgggtatacgatcttgtgggtgggatatccaatcagagcagccaaagagttgcgtaacgatttgattcaggtgtgtttggaataagatttttgcaataatcttgatattttcatagttctatggttttattacatcaattaccaatatttattaagctagacaaatacaactacaccagtacaaatgaaaggtcttggtgtccaccttgtctcactttgaaaggcagacaaacaaaaacaaaaaaggaattatttttatagcactttaacttttgagcggaagtacctgttggcgtcttctgtttcttccttcattacgtgcttttcttttaatttgggcctcttgaaaagaatcaaagtaggagctctccaggagttgggaacaggttaatctgtcatctggattcatcttcagacaccccttcatgaagttcagagccacaggatgaacatctgagaacttttcctcaagagtttccatgtcttctggctcaggtatactgatgccatggaaaaacccgttacttttaaagattgattgatgtcttgggattaattttcctagtgttctgattatcagataaagttggtccacatctgattttccaggccacagtggctggcctgtcaggagctctgcaaaaac

SEQ ID NO: 465407 - DNA, 1000 bp, Homo Sapiens; identical to SEQ ID NO: 335809

SEQ ID NO: 465408 - DNA, 1000 bp, Homo Sapiens; identical to SEQ ID NO: 335810

SEQ ID NO: 465409 - DNA, 1000 bp, Homo Sapiens; identical to SEQ ID NO: 335811

SEQ ID NO: 465410 - DNA, 1000 bp, Homo Sapiens; identical to SEQ ID NO: 157513

SEQ ID NO: 465411 - DNA, 1000 bp, Homo Sapiens; identical to SEQ ID NO: 159840

SEQ ID NO: 465412 - DNA, 557 bp, Homo Sapiens
tatttccttaggcaggagatttttattttttatttttttttaaccagaaatctctcaggctcagctttccagctgagacagcagtctcgctgctttctgtgggcagcacatggagaaaggacacgatcacatggagattcgtcagcacgggtaaggcttggctgtggctgatccatcattaccccaaaatgaaacaatccgtacattccgacctgtaatcccatcacgaagaagggcatcagctggatgagggtctccttcttggggctggcagcgaactcggggaccatctggatgactttgttcatgacgctgcgcaggtaattctggagctgctttctccgttcctccacaaacttggcatcctgaagattcagaggaggcaatgcaggaagcagagaggccagcaaggatgctgctgcagtcatccaggcaggagatggtggcggagtcagctggaaaagacatgcaaagcgatcattacaaaacagtgtgacaaagccacaacacacgcctgatgaagggctacacaaggtcttccataggggagaatgagg

SEQ ID NO: 465413 - DNA, 1000 bp, Homo Sapiens
ttaatggcctctttcgtatttctttcttttcttggttgggctgttctgaattgtagataatctttcagtgtttgtggctaagccggtttgctgtgcctgccctgggttatttttcataagatgtctggaggagagactttccaaaacatgcaactcttccttagacgtggtttttgccaaatcttgtttcaaaagtaaccctggatctgacaactctgaagctggcaaaaccctgacagctttgcttttttccactattatttctctcgggactaatcgatcacttccaagagaaactctcccgtggtggtcgaagtcttccgcagagctgcagttcctgcgtttctgttgggttttggccactcgtggactttgttttggacatggtgatgctgactcacagctacagacggggctcctgcttagaagccctgtctttaaccgctccccaggatgaggtttttgctggccactagtgtcttctggctgggtctgattaactttttccagcttttgaacaggaagcccccagtggctctcagctgcctttatggaatcctttgcttgtcccatggattctgatgggggactggaggaagcctgaccatcattcctcctccttgctatctctgcaatcactgagtcactagatgtttccacagtgtctcttctggtctgcgatttgctcgtgacactgctttttgtttcagttcttttcacaatttctttcagagcatttctccggagctttgcactgggaggaagtgaactctctgcacactcagcaaagtaatcagacactccatggagaactctttctgtcaaatcttcattctgacttgctaaaagatcacgactgaatgcaagctgactgacacaaaccacaaatctgtcagggaatacacagagttcagcattctgtgtgctcctgatgcagcgaaggcgtatccctctcttgaggaaataggctgtgatttgaaagccataaccttttaaggac

SEQ ID NO: 465414 - DNA, 1000 bp, Homo Sapiens
tcagctcctcaaacttgattttattgtaatcatcgccattggtagtgaggatttgtccaatttggtttctccatgtttgactagtcctccccaccctcctgtgaagatccttcagatgagtctaggtcttcgtcctcctgtgaagatccttcaggtgggtccaggtcttcgtcctcctgtgaagatccttcagatgagtccaggtcttcgtcctcctgtgaagatccttcagatgagtccaggtcttcgtcctcctgtgaagatccttcagatgagtccaggtcttcgtcctcctgtgaagatccttcagatgagtccaggtcttcgtcctcctgtgaagatccttcagctgagtctaggccttcgtcctcctcctcttggacgggattgatggagttctctcgggactggtccttctccagttgatttgaatttattttcgtatgcttcctgtagtaatacactattattgttagatattctattgtttttgtcttttgcaagctctgtttgggggctaagaccctgttcggtgcctcctgcatctcatcattttttttgttattggattcacaggggctcttcctcttctccccattggtgcttgaagtcggctgttccatgattctgcttggttgtagaatgtctatagtaggctcttgtagactgcagacttccacagctatattgaagcttgccaggaggatgtcccagagctctggccctccctatgtataccttcctggtggcaaggcaaagccacactcttgagctttgtttgatcatacaggcagtgtcccagccaatggcagtcctagggtggcttagacatcacaaagcaccactgctgaccactccctgggcttgtgggggacggatgacaggggtgtagaggaaaccaaatgctgttgttgtttcagcatcccctgaagatgcatcccaaactaatctgctgctgctcatttctccatgtttaatgttcatggttcacatggaagtg

SEQ ID NO: 465415 - DNA, 1000 bp, Homo Sapiens
ttttttttttttttttttgcgctgaaaacaacggcctcctttactgttaaaatgcagccacaggtgcttagccgtgggcatctcaaccaccagcctctgtggggggcaggtgggcgtccctgtgggcctctgggcccacgtccagcctctgtcctctgccttccgttcttcgacagtgttcccggcatccctggtcacttggtacttggcgtgggcctcctgtgctgctccagcagctcctccaggtggtcggcccgcttcaccgcagcctcatgttgtgtccggaggctgctcacggcctcctccttcctcgcgagggctgtcttcaccctccggtgcacctcctccagctccagctgctggcgggcctgcagcgtggccagctcggccttggcctgccgcgtctcctcctcagaggctgccagccggtcctcgaactcctggcggatcacctgggccaggttgctgcgctcgctagaaagctgctcgttcaccgcctgcgcatcctccagcgcccgctccttctgccgcacaaggccctgcagacgcagattctcgccctcggcctccccaagctggcccttcagctccgagcaccgctcctgaagcttccgctccgactgctccagctcggagagctcggcctcgtacttgtcccgtaagcgcttgatgcggctctcggcagccttctcactctcctccttggccagcgccatgtcggcctccagccggtgaatgaccagctcaatctccttgtcccggcctttccggatttcttccctcagctcctgttcccggttcagcagccacgcctcctccttcctggtgcggccggcctcccacgcctgcctctccagctccagctgctgcttcagggtattcagctccatctggtgccggcgctcctgctcctccctgcccttctcaaactcagccctcagggctcgggtcagtgcagagctgctctcctccagctgctgcctcagctcttccagctccg

SEQ ID NO: 465416 - DNA, 1000 bp, Homo Sapiens
tttttttttttttttaaagaaacaaatatttccctttatttattacatctactcatgggacatacataataatcaaaattttcaatttacaggcctataaataatgctatttaactgaaaagcagccagcaaacagcaacatatacatgtatttgaaaagcttactcatggaaagtaatttccatagcaactcagttttgtagaatggaatgataaatcaagaactatcagcatttaagaatcagaagagtactgaatttgccttactcctttgccagctgcacactggtaggctttgctccgataggtatcccgtatttgtgtaaagtgttaatcaatatctccctcatgtcattgttgtaggaatcaaagtcaaacacatttcgaactacactggagagaccttcagtcggaaatttctgtaaatgtttgactatgttgacaacttctctggtagaataaggatagttaataatcccttggtcagccaaactcctcagctctccaaaggcagccacaagcttctgaaggatgggctcaggcacatttggtccatactgtctgagcatctcgagctccgagtggggtttggggttatcaactgcatggcagctaaaaatatcacctaaggtaccgaagaaatcattgcctaggaaaggaaatccaggtctatttgccagaacaatcatcctaaaatcaggatgaatcactacaacattttctcttccattcacattagcagaatttgcaacaatgcgtcttccatctgctagaatcatttctccattttctactagagtttttaaaatacacgtgacatttgttggagctttgtcagcctcatctactaccagaatatgacccaactttactgctttaaccaaaggtgagtcttcatatacaataagtccgtctttaaccgaaggctgaagcgtaagagtttgtactgtggtatccctgtgtagctgaatatattctcggggtctgttgagcaggtgaa

SEQ ID NO: 465417 - DNA, 1000 bp, Homo Sapiens
ttttttttttttttttttgcccactatcaacaggaaattaattttatttttaaatccaaggggccagaacaaatgagacacctacccttggaggacaaactcaagtggccaaggttgggggaggggatgacagcaaggggctgggcaggaacgcgtccaaacacagcagatggagaggacgacctcttcactccggcgcagcctccatcaaatacccattctccggagccaggtagccgtcgccgccctcagactccatgtacatgtctcggctgtcgttgcccagaccctccagcccgttgtcctggccaccgcccccacctcgggcctcatccctgccccgctcactgccccgctccccccgtttgtgctcgcggtcacggtcacggtcacgatcccggtcccggcgccgctcgcgctcgctccggtggctccgccgtcgctcccggtcacgatcccggcccttttcctctggaccgtcagggccgtcaggcccgagctcccctggaggcccatcatcagggggcgcgtcacccgcctcggagggctccgccatgtcgccaccgccgccacgcagctcctccttgcgctcccgctcccgccgggcccgctcccgactccggctgcttcgccgcttccggtcccggtccttgtccttgctccgctccctggagcgcctccgctcctccttgtcgcgactccgtgagcgcctccgccggtcccgggagcgggagcgtcgccgttctcgctccttgtctcgctcccggctccgctctctgcgctcccgctcacggtcccggtcccggtccctgtgcggaagcggggaggggccgggcctctcatcgtagcgggaggtgtcatcgcggcctgaatgccggatgttcacatcagcccctcctcttctggtaccaccgaggcctcctcctagccgccggggcctccagcccttcacggttcggcccctctccacgtccacaaggaccctcctgccatcaatctt

SEQ ID NO: 465418 - DNA, 1000 bp, Homo Sapiens; identical to SEQ ID NO: 157514

SEQ ID NO: 465419 - DNA, 1000 bp, Homo Sapiens; identical to SEQ ID NO: 157515

SEQ ID NO: 465420 - DNA, 1000 bp, Homo Sapiens; identical to SEQ ID NO: 335816

SEQ ID NO: 465421 - DNA, 1000 bp, Homo Sapiens; identical to SEQ ID NO: 335818

SEQ ID NO: 465422 - DNA, 1000 bp, Homo Sapiens; identical to SEQ ID NO: 335819

SEQ ID NO: 465423 - DNA, 1000 bp, Homo Sapiens; identical to SEQ ID NO: 335820

SEQ ID NO: 465424 - DNA, 1000 bp, Homo Sapiens; identical to SEQ ID NO: 335821

SEQ ID NO: 465425 - DNA, 1000 bp, Homo Sapiens; identical to SEQ ID NO: 157516

SEQ ID NO: 465426 - DNA, 1000 bp, Homo Sapiens; identical to SEQ ID NO: 157517

SEQ ID NO: 465427 - DNA, 1000 bp, Homo Sapiens; identical to SEQ ID NO: 157518

SEQ ID NO: 465428 - DNA, 1000 bp, Homo Sapiens; identical to SEQ ID NO: 157518

SEQ ID NO: 465429 - DNA, 1000 bp, Homo Sapiens
ttttttttttttttatttacatggattttcttttttaatagtaaagcatcatttattggtcccgttattcccgacaccaaacccatctccactttacagttgaggaaactgaggctcagggagtctacaaatcctggccaaggacagtggcagaggcgctatctgtctccaaagcccaggtgtggcccttctgcttggagctcagactctgtgatgggagtctctggtctgccccactggaggaggcaggagaggcagggactggggaggatggaaggctcacccgcacagccagtgcgaagatgcagcgtcggcagaaccaaggtgtgagcaggggctggtcagcactgcccgctatggggatgtggcactgctggtggtaacccaggccacacttcccgcagatgaggatctcattcagcggccctgatgtcttccctaggcagatgttgcacttgggctcctctcctggaacaccggcatgctgtatgtccttccataggacccagtatttggaattatcttcgaaagtcacgaggcagctttgcttagagctgctgaccctcttgatcttcccgaggtagtacaggccatctgtccaccggcacagcacatactggccctccgtcagtttggacatcaagtctttgaagttgttcttgaccttcgccagggcccccttgttggggaggtggctggtggcaccataggagtcccgagtccctggatccagagctcgattctccatcagcttcccctgacacgcgaggctgcgtgtccgccggtcccacttggagtctggccaccaggcgcatcggtggcggaggcggctgcgctcggcccgcggctgcccggccgagtgtccgcccgtggggccggggtcggggtctcggcgggggcggggcggggcgggggcgccgcggggaggagggggaggcggcggagggaggggccggggcgctcaggaaggggccccccgggcgcggggcgccatcttttt

SEQ ID NO: 465430 - DNA, 1000 bp, Homo Sapiens; identical to SEQ ID NO: 335827

SEQ ID NO: 465431 - DNA, 1000 bp, Homo Sapiens
tttttttttttttttttgaaaacacttgagaaaagtaactttaattttcttatctgaactgttatatacaaagatgatcactttcagagtaaaattaagaatgaccagaataattttacaaaactttccaagaaacaacacagttaaatttatagaatatgcctaaaatataagaatattcaagtgaagaaatattaagctagtgctcagaataccagactatggagtggggggcgttgcagggcagaagttgctttttgagatctttcttgccttaagcctgaatgcttcatgttcccaaagaatccaattatgggaacaaaaattccctcatattcagtttcactttaaaatacaataaacaggttacattctcaattgttattaagttgcttatacaaacttaaagtcaagagcataacttcaggatctgcactttttatgtcaagcgctttaactaagcagtttagggcctcctggatttttccacactcttttagttcttttccacgctttacaagagtctcatagtcatttgtagcctctgccgccttatcctggggagaaccaaccaactgttcaccagacaaaggctcaggggcaccaagagaggtctcttgagctagagcactaggcttagacgtcattaaccagctggacttgttttctgaagacagtgtttctccggaaggatcctcttctgtatacttggaggcttcgccactgctttcctccaccccttcttctggataatcttcaggaccctttgcttcactgctgtcgtcaagtctttcctccatgtcctccacgtggtctaaaaccatattaataagagacctcctagaagccagagatcttctagagttcatagacttatttacactactgggtatttgagatgaaaagaaccttcctggtggactgatgtcatttttgggagttgaagcatcaaattgtttcacagatgagaattgaaagagagatgtgttgaatggattta

SEQ ID NO: 465432 - DNA, 1000 bp, Homo Sapiens; identical to SEQ ID NO: 157519

SEQ ID NO: 465433 - DNA, 1000 bp, Homo Sapiens; identical to SEQ ID NO: 335828

SEQ ID NO: 465434 - DNA, 1000 bp, Homo Sapiens; identical to SEQ ID NO: 157519

SEQ ID NO: 465435 - DNA, 1000 bp, Homo Sapiens; identical to SEQ ID NO: 335830

SEQ ID NO: 465436 - DNA, 1000 bp, Homo Sapiens
ttcagtcttcaaatattttattgattatctaggaaaaaaaagttagcttttgctctcttcatagtcacaagctcatcttgtgacttttctaccaatttaaagctcttgcatccagccaaagtttccgtcatatagtaggatcactctaacttttacctactactatcacttctattttgccaatgcagatgcagaaactgaagcccaaggtcacatcaacagtaaaggatggggatggactcttttattacggttaccttggtcaaacaagacacaagactatctagctatctagctatctagctatctctcttacttctctttggcgcccccatgtgtcatgagaatgctatttagaggtcacaccctagttccaaatcaggtggaaaccaagagaaattcagatttggcattctttggtggcaattttaggaatatactaaaggtactcccccaaaaagggcactataccttcttatggaatatcttatttaacttcagtaagatgagaagtgccgtttgcctatgtgcaccaaggacatctgtggagtcatagattcctcacagttgaggttcagctaagaactactgactttatacagatcactatacacatcaatacactttgcagaatggctgttagtaatgcaaactttgaaataacctcattagataactgtgagcacgtaggcttccatacctggttttaatgattttgaaatgcagacaagccaatggcacttgggcaaagggtgttttgttcacttcaagtcaagactaatgattcagacaaatttaaatgaacccaaacggtttcatgaaccatggtcaaggctttgtggagaaattatatatgtctctctgtaaatgggccaattgctttgtaaatatcacatatgacttaagccctcagagtgcaaacaggaaaagaggcagccagagagaaggcatatatgaatttatatgaattctgtgggtgagactcgggttagatctactt

SEQ ID NO: 465437 - DNA, 934 bp, Homo Sapiens
ttttttttttttttttgcaacacaagtcaatctttattgaaaactgcagtattaatacataacaattcttgttacaataaacgtgcttttgagatttttaaatctgagctcatctcatcagattgcataaaaaattaaaatagtatcaattgacacctaactgaactggctcaggatggaaattccattccttggcatggatacgtaagttcaatgcagaggtgagggatgcctttaacactggaagacaatgctgacttagcttaaaaaaagtaccgagagaacggtgtaaaaaacggtatttaaaaatcatttttaaaaaaacaaaaaggaaccgtttcttctttagttacaatccatgaggctctctagggcctctccgtgtggccagcacagcaaccctgctaggagcacaaacggctggcctgagatctggcccagctgccttgcccactggtctgcacagggactcatgggcacagcctgtggtgaggaggagtacggtggcacagccccgctggtgggggaacaggacactttgtaaggtgtgccaggagtgtaacctgtttggaaggtaggattcgctccaggatacatgttaggagaataggcaggagctgctgctgcatagcccatgggaaaaccagctggataaccaattcctttggcatttgcatagggaaccccagaagatccaggactataaacaggattcatgatttcaaaaacgcgccgcggcggcgacctgggcctcagtgaccagcgcacgccggcccgcggcgggcttggccgtggggcgaaacaaggggggcgtgccgaggagacctgctacgataagaggctgaccctccgagccccgcgtctccgccgcctcccggacgccgcgctcccgctcgcttggctccgcttggcccggcccgcctctccgcagccc

SEQ ID NO: 465438 - DNA, 664 bp, Homo Sapiens
ttacaaaatatttcattttattaataatttatatacaaataaattagtttaaaataattatgatacatttgtacactaaatttaaaccccacaagctttggatataatcaaaagtagctaatcagattaattttcacaggtcagatcctcaatttcatcttcgctatcagaatcttcataaaatgaaattgtggcttgaattggaaaatttttcagaagagcttctgcttcttgatataagtaatcataacattttgattttggccaaaatagtctgactgggtgcctgaattggtaaagctttcctgaggctgcggtcattccagggccatcgggcatcgcctccgcggcgtggttcggcgtctcctcttctttcttgcctccggcgtccacccagggtctccagaagcctgcgtatccggagtccgcgcccgcgcgccgcgtagggccgtcggtggccgcgcacgccgcagctccactctctgtaccctctgcgcctcccgcgttctccatgacgccgcagagctgggcggaaggccgctgccagctcgcgggcaatcttgaccagttccagtaggtccgagacccgagctttatatagccctcgcggcctgctgcacattgagaggttcgctgcctctccgcccctctccctgctagccgc

SEQ ID NO: 465439 - DNA, 1000 bp, Homo Sapiens
gtggggctagatgggggcggggacggaacaagaccacagggtggagagtgtggtggcagaaggccaaagagggaatctgagacaagctaccaaaaaccaaaaccagcttccatttatttatgggccccaccccctgacgtcctggggagaggggccccccaaagagcctttctctctgggacaaaatacaaatggcaggaagggtccatacagaaaagaacgtctctgaggtccttgcgtttttaataaaatggtaagagtctttcgtgtggggcctcccagctgggcaagccttgattggccaggagtccaggtgcccgaggtgtgacctcagcccctcgccctgagcaggggcgctgggcagaagcctaggcccgcagagaggcccggggctgccgccccatcacacgctcatggtcatccctggcgagtagctttcgctcgggaacgggtgcaggaaggtcccggcggccgccatctcgccgtcgtcccgcggggtgcccggggcgttgctcaggccggccacggcgccgggggaactcttcggcaacccgtccatgtcgcccgagcccagggatccgttcacgtggtgaggctccatcgcgctcatggcggccatggggccctccgggccagggccgagcgggaaattagccctgccggcgccctgcccgatggggttcatgatagtgtacatgttttcgctggagttggtggaatctccagggctaggcatgatgggtgttccagggggcccacctcctcctgggggtccggtgtagctgccgggggatgaggaggagtaggggatcgagtttccactggggctggcccacgggccacgaactcctgggcccatgttcatggcaggcaggcctgggccggcgagggagttgggtgggggtcgcatgccacctccatagctctggggccccacgctggccatgccacgaggaggcgtcaccctctgcattgggccgcccatgctcggatgcccctg

SEQ ID NO: 465440 - DNA, 829 bp, Homo Sapiens; identical to SEQ ID NO: 157520

SEQ ID NO: 465441 - DNA, 1000 bp, Homo Sapiens; identical to SEQ ID NO: 157521

SEQ ID NO: 465442 - DNA, 1000 bp, Homo Sapiens
aaaacttatattcatgttcttccataaagaatctcatatcatcataggaaggccaagggcccaaagggaaaagaaagagaaagaagaggggaatccaaatgaatgtctcttagatgtctcactgcgcacgggcttttccggacatcttccactccttgtctcgaagcttggctcgttgaattttccctgtgacagtcttgggcaggttcaagacaaactctatctttcttgggtacttgtatggggctgtcactgacttcacatgctgctgcagctccttggtgagctgttctgggtcatgggacaggaactgcgaggccaggaccacaaatgccttcaccacctctcctcggacggggtctgggctgctgatcacggccgtctcaaccacagcagggtgctccatcagtgcattctctacctccgagggtccaatccggtacccgctggagttaatgatatcatctgcccgtcccataaactggaaatacccatcttcatctttgattccccggtctccaaggagccaaaagtctcctcgaatgttggctgctgtcttgtcgggattgtccacatagccagagaagatgcctataggcctgatgggtttgaccctgatgccaatgtctccttctgtgccggggggcaggacgttgcccttatcatctatgatctgtacatcataacaggaagcagccgttcccatgtatcctggtttgattttcattgtcttggaaaccatgcaagttaatcccgtttctgtctggccataggattctcggatgtccagtcctgtctgggccctccagttctccagagtttctggaagaagggactcccctacagtgacgcagttctgtagatgggggaacttgtaactggaaagatcctgctgtagcaacatccggtaaacaatgggggcacccatcatactcttgattggataactggagagtgtctttagaataaccagtgggtcaaactttggcaagagatgaac

SEQ ID NO: 465443 - DNA, 1000 bp, Homo Sapiens; identical to SEQ ID NO: 335834

SEQ ID NO: 465444 - DNA, 1000 bp, Homo Sapiens; identical to SEQ ID NO: 335836

SEQ ID NO: 465445 - DNA, 1000 bp, Homo Sapiens
ggttcaggccaaggaaagcctgatgccttgttatatattatgctacattaacatgaataagtcggtttccagctggtaattcctctacagtgttgtccctgttgctgaaaaccaatactttccatttctaatccatgaaggggatgtagagaagttattagtccagagaaagcaatggttgcatgttttcttcctcatttttatccatgcgttttagtactgtaggatccactactgattgagatctcttcatggactttggggagagttccttctctacttccttcacaggcatgctgtaggagtctacattgtactcgctgtcatcgtcatattcatggtctagcagtgttcttgcccatgtccccatgtcataaggaggcagcattcctccaaactcagagggcaggatctcaggatgaattagttggtgtagactgttcaggttgttaccatgcaaaaatatccttttccgagttttctccttcaggaaaggccggatcacggtgtacagggcatggatataccatggttgattgacaaaatgaattcctccaaatcgcgctgggaaactatcctgcaggccttcaatagctaatcgcagcatacttggtgtgagtttagaggcttgcttgaaagtgaagttactccagtctatgatcaaaacaaacccattcacttgaagctcaggatcttcaatcatggcttctaaagaaagtaagatggcacgcaaaatatccaccagtgtgtacctgctctgatcccaattggcagcaaaaaggactagaatcttcctgccatagtggtccagattggccaggcccccagggaagccatccttcagtgcctgcttgatgccagggtcggtggccttaaagcttttgaacatgtccaggttctgctgccggtactcaaagtactgcgccaggaggcggaaggcctcaaagtgatgaaacttcctagcccgcaagaagcgtaagatgaaggcatcatccgtgcg

SEQ ID NO: 465446 - DNA, 1000 bp, Homo Sapiens; identical to SEQ ID NO: 335837

SEQ ID NO: 465447 - DNA, 1000 bp, Homo Sapiens; identical to SEQ ID NO: 335838

SEQ ID NO: 465448 - DNA, 805 bp, Homo Sapiens
ttggaacactaaagccggagaagtcctagaacctggctgctgatgggttcattgagccgagaccgtgccatcttaacccagcagaggtaatcttcatatctctcctttgccatctccggtgtcatgaggtcttcaagagagacagataggctttcactgagacctgatgtcatgaagtcttcaagagagacagataggctttcactgagatccgatgtcatgaagtcttcaagacagacagataggctttcactgagatcttcgaccaaatggtggtcgtgcttggcctcagatatttcaatatctgacgttatattctcctccacaccgccgtgtgcagacacctgcacatcttcagtgggacggtggtcgtgcttggcctcaggtatttcaatatctgatgtcatattctcctccacaccgccgtgtgcagacgcctgcacatcttcagtgggacctatattttctagaggccaaatcccgtgccgtctccatattatttttaaccagcgcttggagcgggcgtccaaacctttggacatcttcagcatcttcggcgtcttcgggaggctgaggtactgcatgagttgggccttcttagctttcaaatccaatttggcaggctttgcagtggtggatgctggtgctgtggctgccacagtctcaggaatctcacactcatggcagggtcccacatctggcctgcagcagtcacagttgaggcccccgctggggcccaggcagcaagtcagtttgctccccattgggcacctaaacacacaaaaaagtccaagaggcacaagga

SEQ ID NO: 465449 - DNA, 1000 bp, Homo Sapiens; identical to SEQ ID NO: 335839

SEQ ID NO: 465450 - DNA, 1000 bp, Homo Sapiens
caattgaatttttaaatttttatttgaaaaatacaatacacagcagagaattatttcctcccctactgttctttcacaaaggaaactgtatggtaaatgtaactgagatatttggctaggatagatcctgagaaaagagaggcccagttagaagtggaaaatacaaagtctgtcaaagaagattcacctctcttttaacataaaagagccttttaagttatcacaggaatcagataaaacatgtgcagaatttctgccatgcaaacagagactaccgaaattttcaagttgactaaattatactgacctgggccccaagtaagtagaataaaaaggagatgtttttatcagaaagatatgtgtttgcctgcttttactagactacatatgtacatatttacatggtaatattttctgaaatatgattttcattattctcagtaacagcatcatgaataagggctattttctggcttttgccttattcacatgtatcttgcctttttcatctgaattttcttcatgacagcatcactcactgtacaatcttgagcctatgatgtgtaaatagtagaggtgactttactctggttctgggttaaatctgagtttttgaagaatttaaaactcctgcattcgtatcaggtttagcaaggtgcaaagaagcaaccttgacataagaatatatggctaaggcttccaacaggaaaaacattcctgcttggctgcttggaagtctgatgtagaatcaatagaactgatagaagtctggaagccttactagtaatctagctttctaagacattaggatcatccccttcactttcattctcaataagtgaattccctattactgttattgcctaaaaaatctttaaaaagggtcaagacattcaaagtttcttcatgttctaaatttccaacaggactgaattgctctagaggtctgaaattagtagaaattttcttttcttttctctttttggccctagtagaagtg

SEQ ID NO: 465451 - DNA, 1000 bp, Homo Sapiens; identical to SEQ ID NO: 335840

SEQ ID NO: 465452 - DNA, 1000 bp, Homo Sapiens
aaccatcccttttactctagatgactgtaggcccccagctaaggagacaagatagaccagagcccggaagggatctcaagaagcacgagaggccagaccacttttggcgcgcctaaatgacaacttcccacactggaaaccctcaaggggagagagttatcgcagggcacctagctactgctgcaactggaatcacctggactaagataaagttaccactcaaggttttccacagtgttttaaccaaaaagtagtgataacatgacaaactacatctcacaaaattgctagtcacattaatagatcagaaaatcatagaattaaaaagaacctttttagaagagttaacccctttattttatttttttgatttttatttatttattttgagatgaagtctcactctgtcacccaggctggagtgcaatggtgccatcttggctcaccacaacctctccctcctgggttcaaacttaccccccacctcagcctcccaagtagctgagattacaagcgggtgccaacacacccagcgaatcttttgtatttttagtagagatggggtttcaccatgttggccaagctggtctcaaactcctgaccacaagtgatccacccgactcggcctcccaaagtactgggattacaggcacgaggcgcgcagatcacctaaggtcgggagttcaagaccagcctgaccaacatggagaaacccggtctccactaaaaatacaaaaattagccgggcatggtgacacatgcctgtaatcccagctactcaggaggctgaggcaggagaatcgcttgaactggggaggcggaggttgcggtgagccgagatcgtgccgttgcactccagcctgggcaacaagagcaaaactccgtctcaaaaaaaaaaaagtgatatatgtaaatttctctctgtcccaaaggagcaccagaaatctccacaagccagtttggaaaacaggactcttggaaaggcctgagtagaatcaca

SEQ ID NO: 465453 - DNA, 1000 bp, Homo Sapiens; identical to SEQ ID NO: 335841

SEQ ID NO: 465454 - DNA, 1000 bp, Homo Sapiens
taaaagcagggccccagaggcatttattgaaaacacagcatccaaaacacgacatctaggccaggcgcgatggttacagtgatgagagggtcactagacaattatccacaattctacgacatgagacagagactcagcaacagtcacagacagaagggtcatgtgttccttcctgggcagggctgaatgtggcaggtgcggcgtggaggctgcgtcctggcggtttgctcccaggcaaggggtacggggggccggcttggcctgggtggggacctcaagtctgagggtgaggatggctgaatctacctcgcttatgtctcagggacggtcacccatacctaggatgaccccagccagaccctagaaggtctgatggccatcccaagtcccccgcgaggagaagagttccctggcaggggtgacacattcccggtcaacaagccacaacacagtggtgcctgcactctctcagctgttgccacaacacttggtgctggaattttctccacgtagtgaaacttttaagggacacatgaataatttaaaaagtcacacaaaactctacgaaaggcaggaatcctcactctgctgagagctacctcctgagatgtcgcttccggaccccggcagagggcaggagcgacatcagctcggcaggaggatcctggccagcgcgagggctggctctggttattataaataatctaatttaaatacgcacatacacacagatgtcctgcttctacccaacgccaagaaaagcagacattagcatcacactgtcaacacttcctcgagaaccgaagattcgagacgcaagcaacagcatggccagccgacaggacgctttcccgtcctggctccaccacgtccttctctcagatgggctctttgtgggctggggggtggcgtgagtgcacaggcaggcggttccctgcccctcaggtagacaccatggggggccgctttggctcacccgccccaactcctcactgcagaa

SEQ ID NO: 465455 - DNA, 1000 bp, Homo Sapiens; identical to SEQ ID NO: 335842

SEQ ID NO: 465456 - DNA, 1000 bp, Homo Sapiens; identical to SEQ ID NO: 335843

SEQ ID NO: 465457 - DNA, 1000 bp, Homo Sapiens; identical to SEQ ID NO: 335844

SEQ ID NO: 465458 - DNA, 1000 bp, Homo Sapiens
tttgcattttaatagctatttatttttgtgtataaagtttccaaacttttgcataaatcctcgaaacttgttctcattgggttgatatgagcgataaacaccagtgttgtaattaagcaatggactagacctgccataactgttgcccatagtcgcagattttatttctgggcgatttatactggtatttggcatgttgcttgttggctgaatagagctctcaatcttacaaaacggctcaaaacgactgtaaacacgccgatcagttgaatgagatcgtagaagctcactggacgttggccttggagaagaagtaggtcttctttcaggggtaacaactgcattaatctcccttgaatctcggtattggatctgttcagtgttaaatcttggggcagaggcatctcctgccctttccaagaacttgctttcaactggacctggagaaggtgttcttttattttcatctggtggagcatttatctcttgagatgggctaactgttacatcttccttactcttgtggatgctgccttgagaattcgatgaggaagaatgctttcttctaggagatgaatcaacttttgtgtctgatttctttggtttttgattttcttcaccctcagaaactaatgtgtcagagctactacacaatctataaaaggcaggtgctttatttttggatagattttctttcttatctggggtaaggctaagtaatgaccttaacttctgagacccctttttcaaaaaacttggggaacccttaacttccttctttgaagcaagttctttgttagattcctctttattcacatcaagtaaagcagcaatggaaactgatttggtagtagtgccacttggagagtttctcttggtaacttcctcctcatcctcctccaagttatgagtcacattgtgcatgcttttagaacttttcagcaaatcttctttgggcttttctggttgtctaactcgattcctggtaagtgtactatat

SEQ ID NO: 465459 - DNA, 1000 bp, Homo Sapiens; identical to SEQ ID NO: 157523

SEQ ID NO: 465460 - DNA, 1000 bp, Homo Sapiens
gtgattgataaactcttggaagtaaatgtgctcactgaaaaaatagtgaataagaaggtaaaggacaatgtctttggggaatctcacaattaagggtcaggaaatcaggaataactaatataagagacagaaggaccagcctaagaggtaggaaaaacagaaagtaacaccagaatcgttatactcaggcactggtcaaaatactgactactgaggtctgagaaacagtcactggagagagggatttcctactcccatcaagttcatgggtactccatacttgatgttttcttttcttatgtccagtaagatttgagctcactctaaaagcttttccacattcctcacattcataaggtttctccccagtatgaactcgcttatgtccaatcagagctgagccctgacggaaggacgtgccacactcactgcaggtgtatggcttctcaccagtgtggattcttttgtgctgcctcaggactgaactatgatggaaggccattccacatacctcacatttgtgaggcttctctccagtgtgaattcttcgatgattggtcaagtttgacttcccactgaaagctttcccacactctaaacatttgtaaggtttctctccagtgtggattctctgatggatggtaaggcagtgcttatcttggaaggttttcccacaatccctgcattgatagggcttctcccctgtatgctctcgttcatgagccctgcgcttacagttatgacgaaaggctttcccacactcctcacacctgtaacgtttctcttcagtgtggatccttctgtgtttggtgagttctgccttgatgctgaagtcttttccacactggggacacccatagtgtttctcccgagtatggattcgtttgtgtttgcttaggtctgagctccgactgaaggcccttccacacttgctgcactcataaggtcgttccccagtgtggattcttatgtgtttggtgaggtctgaactcccactgaa

SEQ ID NO: 465461 - DNA, 1000 bp, Homo Sapiens; identical to SEQ ID NO: 335848

SEQ ID NO: 465462 - DNA, 1000 bp, Homo Sapiens
cagtatgaccatgcttcccacagttaaaacaagctccaggaaatggagtactttctgtatccactctcagtcctgccattgcccgtgctagcaggtggcctgatgcagattacctctgataccaccacaggccttgatataatcaactaaatgtgctttccctctgataggtcacagagcagcctggcaatcaggattagcattgttgaaagctaataattgcaacactatatcctgagcagccaaatctgcagtcatctttttaagagactcctgtaactgagctataaaatccacatatgattcttctggtccctgttttatagcactaaagaaagggtattgttctccacttgaagtgattttttttccccaagctctaatgcacgctcctctaagctgttctatggcatcatcctgcatgaccatttgtgcatctaaaccagcccaactgccaacccccaaaagttggtctgcagttatattaatttgaggttggtcctgcgtgttgtgagaagcctgaatggaagcttcatctgcccaccaagttttaaattgtaagaactaagcaggagttagacaagcttgagtaagagcgtcccagtcagtaggaatcatctgactggaaacagcaatgttctttaatagtcccattacaaaaggagaacctggtccatactgattaatagcttgtttaaattctttgagtaatttaaaacaaaaaggctcaaatgtagctacaatatttccctgttggtctgggcagtgtagtctaacagggaactgccaagcctcttaatcaccttctcatctagcttgctgaattcctgactgaatagaactaagagcagtcgctcgaggtgctgcttgaacagtcactggggcaactaatttttgcccactgtcctctggaaaagaaagatctggagggtcaggccactctttttcttcaaaataataatgagggggtgcagaagggtagggatgaacctctccctcc

SEQ ID NO: 465463 - DNA, 1000 bp, Homo Sapiens; identical to SEQ ID NO: 157524

SEQ ID NO: 465464 - DNA, 1000 bp, Homo Sapiens; identical to SEQ ID NO: 335854

SEQ ID NO: 465465 - DNA, 1000 bp, Homo Sapiens; identical to SEQ ID NO: 335855

SEQ ID NO: 465466 - DNA, 1000 bp, Homo Sapiens; identical to SEQ ID NO: 335856

SEQ ID NO: 465467 - DNA, 1000 bp, Homo Sapiens
tttggtaagaacagacactttattgcacactatggtgggggagagaggaagaggggtctagggtgacaatgcctcatcccctcccctgggctgagtggttttgacccagggctctgaccagccatgggacacatggacttgaattgttctgaacttatgccagaacccaaagtgacggcctggtgtgtatgcttgggtctgtataaagcagagctttcaatgagaagaggccctaggccccctcccccagccaaagtcatcgggccccagtgaagcagcagacctcacatctcagggcctatttgaaggatccagggatgctcagggagccaggttcattctaaccagtttagtttccagctcttttcacagtggggagtactctgggggagtggggtggggcgtgggggtgaggaagggcagaaaagcagcccctccgcctggtaatactgcaggcctgtgcagtgcctgggaccgtgtctcctgggccccagcctcatgacccacacaggctgactcggagcgggggttctcctggcactgggaaagcagcaacccctgcacatgtattgctggagggcagaagctgacctcactggcattaactgatgtgccctacctgttcagcccccatctgggcctcgggcttcatgttgcctcagtgaggagggcggaagtctccctgagcaagaagctggtgatggggctggagggcaggcagaggtaggggatcaggggactgttgactctttcaggcacatccctgccctggagttccctctgccttctggtgggcactgtgtggacagcaccaaagccagtgggggtggggaccctgtgaagggacttggggacctggtcctctcctgctacctcctgctcctccaggattctggggctggatcttagctcatcaggtgaccccacctgcctttgactccaaaggcatcaaaagcacagtggggagggggcaggcggcccttttcaaacactgtcagga

SEQ ID NO: 465468 - DNA, 1000 bp, Homo Sapiens
ttaaatcaagggggggttttattatcatttaaggagaaatgcgacttgctacctctggttcaatggcccaaagatagtagagccaaggtcttggatttttctgagtctggggcgctttttgaggacactgtgtggtcctgtcctgcaggagggctcacttgggaagacatcagctgagcacatatttcaacatgcgtgtgagccagcggtccctcagtgtccacctctgtgcagtgggctctcgagatgtgctgggttccatcttctgctccaggatggagtttctgttttcctggccagctcccagaggccttgctgcctgcgagaagtcactgacagagctcccccagcccctgcccccatgcttggccatggatcctaccagcaaggaggcttcactgtgagggaaaccagagccgggcatggtgagtccctggtcttcccaggcaccgtggacatgctctgggcacactgtgaagcgaggccatccatctccctcatttggaagctctgtgaccacacacagctgctgcagctccagccagccgggcccgtgcctctgccagggaatgtgcttgtctgtatccctgcagccgtgttgaacgcagtccaatggcagactccccttgcctctgcggtgcttggcatgtggatgatttccaggtgaatatgcagcagaggcagccccgtgcctggtgcagggtggaggcatcccaggccgggctttgccaacatctgtggcagccacttcaaagagttccagctgctgctgaagacgacttggcaaaggtcagagagtgagacaccggggctatgagaccctttctaagggtggcctgaggttcatacaagcaaagagatgacctgggtgaagccacatggatatttttttgcctgtctggggctccaaagcaaggtgcacaacaagtgtcctcattccaggccctgccagtggcagccaagagcacgtcctggtagacacatgtccagcatggaaaca

SEQ ID NO: 465469 - DNA, 1000 bp, Homo Sapiens
ttttaacttgaatgcatttaatttaagtttttaatacatgtacaagatcttaacaaataagcataaatcaaaaatatcagaaagaataaactacatggtcatgatgacattaattttttgaaattactgattgtcaagttcgagtttttcatttttaattcattaatcatttcctgaagtttgaagttaaatgtttcaggagttatttccataacttctagagctagattccgaatgatctctatatacattagatttttctgtacaaagataacctatagatttatccacattgtcaagcatatttagaagaaccaggactacattctgaaaagcagtaaagtcactgatgaaaggggctacatcagtattaagaagaattcgtggtggcatgcccttctggaacttatatgatctaatcaaggttgtaggaaagaggactgcagctaaatgatccacagccagtacccaacttctctcaaaatgcgcttctgctttagaataataatcatatctgtcttcaaaacttttgatattatctgccaaggttgaagtgtgtgcagcccataagtacttcaacagatcatcaaacttactaaaaggtgactgcaaatactggtaaaaggtgttccacttgttcattgtctcagggaaggatgaacgacagctagaaacatcataacaaaacttcctctcattcttgggtgggggcaaaagcctgacttggtctgatgatatccccattacaccagaatcaaccgcagcaagaaagggtaatgaagacagaaaataattcaaatcagcccaccaactgtccacagagatgcacatatgatctccagattcatagccacagtttgtccttcgggttggatcagctaatctgcctgtcctatattgccagccatactgcagaggcaacccccataaaatattctgttcattatctggtgcaaattttgcaaaatacctggctgtctgattcaatatgattttatac

SEQ ID NO: 465470 - DNA, 1000 bp, Homo Sapiens
gaatctaaatgtattcagttgacaaaatggacacataagggctttttctaaataccgtacataattacacattttcacacttagagggtaatcctatgatacactgtcaatctctatttttaaagactatcaccagaaaagagagaaaagaaaattcatataagaaaaagaaaatgtgaaaaagatcataggcttgggaattccctcaaatccagaaaattccaggttaaggcttgaagttgaatcattcccaggtctagctctaaggttaacaagagtacaaggcaaacaatttctttggggacaagcagcattatttcaattagaccttctcctgcagggcaaaaatcattcttccccacactatgaatggactccaagtatcataataagcaggtaaactcacaagaaccaaagctgacatatggataaaagcagcaagatcacagtacaccaaagtatcatatatatagaagaaataattcaatgtcttagatttgtctataaaaatttgtgatctatataggacttcattcacatggacactaacgataaggagtatttgctttggcggtagtggatcacacatctgcttatcttgctttgatattttttacataatgtttctgagtgatacagatgtgagtcaggtagcatttgatttccccacatatacacaactgaggtgccctgccattggcatcccctgggatccttgattcactgacgttagccatacgaatccagtgttcaaactcagaataataagcttagtttctgcattatcagtcagcataaataataaatccagaaaacgtgctgtatttgttgttgtttcctccatgggctttcccgccatctaatttgatatagacttcatctcccggctccaaatgaagaaccacactgttactggcatagtcgtaattctgatcagcatcttgggcaattgcactagcacgcacctggttgtttttgcagagatcagcccacatgctgg

SEQ ID NO: 465471 - DNA, 1000 bp, Homo Sapiens; identical to SEQ ID NO: 157525

SEQ ID NO: 465472 - DNA, 1000 bp, Homo Sapiens
tcagtttctgtctttcccagaaagcgggctttttattgaggggaaacttagctgggaaaagtcagctcgtacgtttgttttggtttttcgtctatttgcttcccaatttaaaagtggccgcctaggcgacaggcctgcggttttcacagtgtaaaacggatcagagggaaagctccagcccctctcgactttcgcttgcggtttgcaacccctggggtgggtctgaccccgcgcggcacttgcccaggcgagcttccctcgtcgcggcccgacccgcgcgcggactcggcttccccaggtcaggacccactaggtgggccgctcggccccaagcctggcagggcggagcctaggccgcgcgccccggggttggaggttcccacggagccgggaaactgcgcgccccaggtccgcaggccgcctcccttccctcgcgccctcgcacccgccctctgctctgccgctcccggtcctgggtgtgcgggagtcccgggggtccctctcctggacgcagaggaggaatttggagcaaaaggaagggaatttactgcggatggcaccggaacctgaattgacttgtgcgtttcctgctctgggcacgtaggtttcccctaggaatctggagttcgctgaggacacttaattccaagagatgatgggttcacataaacataccatttagttaagaaaaatatttaaaataaagaaaaaagaaaaactgaacttcgatcttcttctccacgttccctggtgtcaccaaataaacaaagcattcggacgagagtgggctgctgggggctcgggaggtgcgcgagacaaggttaccctgcgggtccgccactgcccccggcctccagcactgcactgcccacgagtttgcggggtgtgagcgccgaaggagaaccccggaccgcccagtctcagcctaaaaacttggatccaagagtcctacggttgtggatgtgccagtcctccgcgaccctttcctgctggccttctg

SEQ ID NO: 465473 - DNA, 1000 bp, Homo Sapiens; identical to SEQ ID NO: 157526

SEQ ID NO: 465474 - DNA, 1000 bp, Homo Sapiens
ttttttttttttttttttcttgctgtatggcaaatctcaaactacagagttctttttccaattcaagtgtttcatgctttaactgcgattttatttcttctttttcagatagtctcttttgtagtacactagccttatttttcagttttcgaatttttactctaagttgctcacagtgattatctttaagttctgttaatcttttacataaacaaaatgtctttttaattttcaataggtgaacacaatctgtggctggttattttcatattcttcaagcctcttttgctctccctctgatgccatttctaagtcttgttctggtgtggatgtttgtacatctttcattttggtggctgtattcagaacagaatttttattttcaattgtagccttcaaggtaggcagattctcaggatactctgttccagatttccaactgcccgttattcttgtggcaatattcaaaagagaaactttctttttaaatataaccttctgggccgattgtttctgaggagacactgtcccagatttttctccatcctttatttctctggctatattcgaaacagaatctttctcatcacctgtagccttcaaggctggttgtctctgagaagacactgtcccacgtatttgtccatcctttatctctgtggctatattcgaaacagaatctttcttgacacttgtagccttccaggccggttgtttctgagaagacactgttccagattgttgtccatcctttatttctgtgggtatattcgaaacagaatctttcttgtcacttgtagccttcaaggctggttgtttctgagaagacactgtcccagatatttgttcatcctttgtttctgtggccatattcggaacagaattttccttgtcacttgtagccttcaaggctggttgtttatgagaagacactctcctagttttttctccatgcttttttcctctggctatattcaaaacagaatctttctcgtcactt

SEQ ID NO: 465475 - DNA, 1000 bp, Homo Sapiens; identical to SEQ ID NO: 335861

SEQ ID NO: 465476 - DNA, 1000 bp, Homo Sapiens; identical to SEQ ID NO: 335862

SEQ ID NO: 465477 - DNA, 1000 bp, Homo Sapiens; identical to SEQ ID NO: 335863

SEQ ID NO: 465478 - DNA, 1000 bp, Homo Sapiens; identical to SEQ ID NO: 157527

SEQ ID NO: 465479 - DNA, 1000 bp, Homo Sapiens; identical to SEQ ID NO: 157528

SEQ ID NO: 465480 - DNA, 1000 bp, Homo Sapiens
ttttttttttttttttgaaatgtaatataatttaatatagggctacaatttagggacacaaggtataaattgttttggtgaggttaaaataacatttaatttgtggtttactcattattaagaaaccaacatcagaaagcagcttagacagattaattgattttttttcccatgaaatctttatcatccagcaaatatacctgtgtgtttttttaatccattcaagtatcttcaggagatatgttattacacttgcatgtaccttaattcacttcaacattgacaaaataacactgacaaacaaaacaacagaaaacacccataaacattaatgagaatttcaacaaacatgactctccagtagttgtcttaggattgttgtaagtgacattttaaattccacattctctgaaatcttcatgtaaaagacagttgtattggtgggtgcttcagacacacttacttcagctatgactgtggtaccttatatgttaaaataattttgtgtatccattttgcataatatgctactcggacaaaaataccaggacgatttggaatggcacatccacgaccaggaacaatgacaccaagaaccattctcattttatgttgctcacaaacaagtgggccaccataatccccctcacatggtcctgatccaatcttttcagccccagcacatatttcagactcattcagagtcaccttccctcgatgatgctggctgcatttctcatttcccattatatagagatgtgccactcgtaataggccatcatagttgatcaatccagtgtagccccagccataaacactgcaactggtcttttcaggaattgtgcatccataattaggtaaatcaatcgtactaacaaaatcatccaggacagcaggcctggcaagcttcattaaaaccagatctgatccttcagggccatataccagctgggaaacattgagaacctgtttgcatttctcatctcctcttccgtggaca

SEQ ID NO: 465481 - DNA, 1000 bp, Homo Sapiens
tacaagctgtggaagatctgaaatagtaaaagttaaaccctgatacagtattaaacttatctttttacatataaaaataatatacagtgggatattcaataagatacaatctttaagatcaagagagaatatacaaaactattctatgttgtctgatgtattttactgtatagtaggaataaatatatttagaacagaaagtgcgaggtctgttcctagagaaatcaccagttacttagtatagtttaaagccagtgttctgcagatactaggcagaaaggagctactgtcgcatttaaaacaatgtggtcattataaaataaacgctttaatctataaacaataacaaaaacacacaaaccaaatgaaaatgtactaaaatttaatcatccataaaagctgtaatttaatctgacagtaaaacacaagaagcaatattagagttggtttagtatattatatattttagctttgaaagccatagaaatcagttatcccagtttttttcctataaaagacccatttttccaaagcattatgcacaattttaattagaatataatgacagatgatattccataattttttaaatataaaatgaagtcaatgactcaaaaaagttatctgctgcaatgagtttgaggggacatttcataatcagtatcattacagatataaagtataatggttcaactttttagtgcttgatagggaggatcatgataaaaagatcaatatgaaatcatttgattatagtagcaatatctaacatttgaaatgcatccatgctcttttgtataatcatattagagtcaagtatattttcacatctgttataactgctattgcaaaggagaaatactattgtcttattttccaagagatatacacagagcaatttttttctccagggaacttgtgcaaaccaatataagatctaaattcttcacataatatataaaacaggagaagcctcttcagattttttatttttgaagtc

SEQ ID NO: 465482 - DNA, 1000 bp, Homo Sapiens; identical to SEQ ID NO: 157529

SEQ ID NO: 465483 - DNA, 851 bp, Homo Sapiens; identical to SEQ ID NO: 335866

SEQ ID NO: 465484 - DNA, 1000 bp, Homo Sapiens; identical to SEQ ID NO: 159423

SEQ ID NO: 465485 - DNA, 1000 bp, Homo Sapiens
cagacaggcaggagataggagtgggggtcaggaagacaggatggcaggtggaggccctcaaagctggtccttgtcttcacaagggttagggagcctcctgagacgcaggtggattccatttttggatttcaacacaagtcgtgccatggggatggggatcctggtgggatcaggcagcagctcaaagcggagcagggtcagggccctggccaccttcagctggttcatggcaaattgtttcccgatgcagttccttgatcctcctgagaagggcaggaaagcgtggctgtgttgagcagaacccggtgcaaaacgggaagggtcaaacacctctaggttgggccacacttttgggttgtggtgaaggccataaatggagaggaggaccatgatacctttgggcaaggagcgcccatcagggaaggtgacgggagtgctgagctctcttccaatgcctggcaccggtgggtagagcctcagtgcctccttaatgcacatggtggtgtagggcatctggtccaggtggttccaggtgatggaggctccatcacccaggaggccatggatctcctcccggcacctctcctgatgcttggggtgtgtggccagagcatagaggatccaggagatcccactggctgtggtgtcgtggccctcaaacatgaacgtgtccacctcagcacggaggtccttgtctgacaagatgctcccattctccattttggccaagaggaggatgtccagaaaatccaagtgcctcttcctcttgatcttctccagctccccctccttctgtagttgagccttcctcagttggatcacttggtctgtgtgctgatgggccagctggcaggcgcggtgtgtccagcggccagcagaggtcaggctgtagatggtgtcattctcatgaaaggcattcctcatacagcaaaaaaccaggctgttcaggtcactaatggcctggatgtaggactgagaattcctgtccacctggatgctg

SEQ ID NO: 465486 - DNA, 1000 bp, Homo Sapiens; identical to SEQ ID NO: 335867

SEQ ID NO: 465487 - DNA, 1000 bp, Homo Sapiens; identical to SEQ ID NO: 335868

SEQ ID NO: 465488 - DNA, 846 bp, Homo Sapiens
tttatgtctcatagaatgtcgattttatttctttattcagcaattatttcctccatgcctggcactgtcctcggtgctggggacagggcaaggaacagaatagccagctcctgcctgcccttcccagagggcacatcctcatggatgagacagacaaagaaagcagggagaggggtgaggaactgaggggactatggcaattttagacttggtggcagggaggctgcacagagctggtgacatctgagcagggatctgaaggagagaggcagagtttggggatctgtggaaggagtctggggaggaggtatttgcctccctggctggaagctgccctccaggggtgagggcaaagcatgtcttcttgttccattcttgtccccagcacatagtaggtgcttcataacacagttgtcactgctgttcctgtgggcccttggaggattatacactgcccgaggtccttctcgcatggggcctgtacaagtgggccccgggaagcacagtgctgtgaggagagtccgccaggcagcctgtgagggtggcgtggagaacaggccacctccagggagatgggggcagatgtttgcacgctttggggatttacaatccatgaagaagccgcccttctccgcccttctcttgcctggtgagaccttgggcaaggtgcttcatgctccctgctctctgcagtcttatccaccttctggggtctctctcaggtacttccggctggaaaaggagatatgtgttcctgagatcatgttctgggcacccgtcacagctcaggcactctcatcctgttgaatctctacatctgtgacatcctgtcccgctatacagatg

SEQ ID NO: 465489 - DNA, 785 bp, Homo Sapiens; identical to SEQ ID NO: 157531

SEQ ID NO: 465490 - DNA, 1000 bp, Homo Sapiens; identical to SEQ ID NO: 335870

SEQ ID NO: 465491 - DNA, 1000 bp, Homo Sapiens; identical to SEQ ID NO: 335871

SEQ ID NO: 465492 - DNA, 1000 bp, Homo Sapiens
ttttttttttttttttttttttttattgaaaaatgtaagttttatttacagatcaggccacaggttacaaaattaaaaccaacagcagttttgaattatctgtaccagctagctgaactagccatatcagttcttctttccagtcattcagcattgtagtaagaaaacacttggtaaggcagatggagacatatttatagtctatagtctgtctgggaagctgactgccagacagggcagtttgtcatctttacctagctgacacatctttttccatggcttgctaccgataggcattgaagcctagcaactgttacttcccacgcatgctatcttccaggacttcctgagaaatgcttgcttacagttcaaattctgtttcactttatgtttgagatctcggtatatcttcggattaggttgaatttgcctgttgggtctggaatataccatttttcccaaacatcagtatatgaagcagtccttccccatggcttcaaatgtccattccaatggagtaacttggcagcctttacaaactgaggtgaatatcgttttccagcactggaaccaaggtggcggacattccacataggatcgatggtagagtgctgttgataaaatacgataagcagaggaggtgttgtgatgctaccagccagggttctgctatacagtccctcttctacattgagtttcatccatttttccagttggttagttatattctgtcgtttccattccgtcaggtttgcaacaaaaactccaggattaaatgagcaagtgctggctttcatggaaagcttacgaattctttcctttttatagtcaagatagccaatgtaattgtactggtttcctgctccacggatgacaactttagtagaggctgaatcacaatcttctgaaaatgcagctgcatgtcctggcttcagtgctgtattgtaaagggcaagaatatcaccttgcacaattacatcatcatccatgtatatggcct

SEQ ID NO: 465493 - DNA, 1000 bp, Homo Sapiens; identical to SEQ ID NO: 335872

SEQ ID NO: 465494 - DNA, 1000 bp, Homo Sapiens; identical to SEQ ID NO: 335873

SEQ ID NO: 465495 - DNA, 1000 bp, Homo Sapiens; identical to SEQ ID NO: 335874

SEQ ID NO: 465496 - DNA, 745 bp, Homo Sapiens; identical to SEQ ID NO: 157533

SEQ ID NO: 465497 - DNA, 1000 bp, Homo Sapiens; identical to SEQ ID NO: 335878

SEQ ID NO: 465498 - DNA, 1000 bp, Homo Sapiens; identical to SEQ ID NO: 335880

SEQ ID NO: 465499 - DNA, 1000 bp, Homo Sapiens
tttttttttttttttgagacagagtctcactctgttgcccaggctgtgtgcagtggcacgacctcagctcactgcaacctctgcctcagtctcctgagtagctgggattacagcagtgcaccatcatgcctggctaatttttgtatttttagtagagacggattttcactatgttggccaggcttgtctcaaactcttgacctcaagtgatccacccctgcctcagcctcctaaagtgctggccaggctggtctagaactcctgacctcaagtgatccgccttgaggtcacttggcctcccaaagtgctgggattacaggggtgagccactgcgcctggccatttatccactgattcattcatttattgagcaccgacatgctgagggtatcctgtagatggttgatttggatgcagtcagtaaaccaaatttctcttcttgaaactaccatgaaggaaaaatgcccacatcatttttggaactaaatccacagatgaaaaatcatcttttctctaactgcatcagaactaatgctactccctccagctcaggaagagcctcctatcccagcccctgtgctagggcctccattccagtggaagtaaatgtgagctacatgactgatagtttactacttctgaatagctttgtactggaatttggaaggaatgtgtatagtgctcaatatgaagctcagtttggcttcagggaccattttaattaaattaattatctctaaaagaaacacttagagttgtttaagcctaaacaataggtacttgttctcatttctaataggagtcacattgttcagagagttctcttggtgagctgaggacaatgttaccaccagctatttaaggaagaccttccccttcttgccccatgccttccctctcacacacaggagagaggctttcagagaagtgggatggagggcctggcacattaatgtaccaaatctacaaatgcactccactgctttcttttttgttgttt

SEQ ID NO: 465500 - DNA, 811 bp, Homo Sapiens
ttctggtatcaaagccagcgtctgttgtttccatgtcgtgctgagcctcctcagggaagttctctgacttcagatccctgtggataatttccttctggaagcctcactgcatggaatatcctatttgctggaacttgcctcaggcctcttcccccttcaagaagaattcgagggtgaagtcggatagctctcccgagctggcttaatccatgactaggaacagcctgttctcggtgccagccacgtgggtctgatgatcttcgggtgattaagggccttcatcatatggtccctgcagtacagaccctgggggctgcaggagccctgctgccctgttggggtgacctccacagccatcttggtcccagtgagaatgtgctgggccagctgccttgacttctgcaaagctgccctggctgatgaccttgaggagcctatgatcatcagtaagggactcctcggaggcagaagtggttccaaggccctgcagcgtggtgacctcccggctacacatctcagctaggaatgccaactgagaatactacccctacaaactttgctaaccaggaacacgaatgacacggctggaggtgtctgctgacatgtgagggtggcctctggtcacctccatgccagggacaacgttcgaggccaactctaccatggctgcacccaggaaccggatgatgtcatcaggaatcatctctcccggcctcttggccctgctgacttccctctgagttgatgtcattctcaggtgggctcttcctccaacgtggcaagatggcacccacagctccagcagcctaac

SEQ ID NO: 465501 - DNA, 1000 bp, Homo Sapiens
ggttatcaagtgtgactttattaataattacatcagaatggcatgggtccttattaaagacggtatacaagtgagattttgcatatgctttgtgcagataaatcatgagctccatagtaaagttatgtaaatggagatgcgtttttgcttttatgaaatacactgggttataaatactctgaccttgtttatggaggaagctggtttgttcacttaatgaagacattaatttgccattcagtttggactgattactcattagctgccatctcctgaccaacagctctgacttacaaacccaggctggtgatcggatcgtaggtagtggtgtgctgccatctatagtgtaatcattttccaagtcagctactgcttgcctttgcccagaattcatgtcaggatttctttttccactcttcagtctttttcctactccaggatgccgccatcagcaacgttcaacaaacatttttggagaccctactatgttccagccattgtcctgcttgagatgcagcacagaccaaacgcatctcctggccttgcgatgattacattctgtagtcccagttacttgggaagctgaggcaggagaatcacttgaacctggcaggcaaaggttgcaatgagctgagactccagccttatcttagcagctatgtgctctacttctcattcctgtgttaaacttcatccttgattccacattaagcttccctcccagatgttactgtttagctgaaacagagctgtctgagcaggtatccagagttctcagaatggtatggaacacttcttggcacatcagattttccacagaacccagcttctcaatttctgattcaagattctgtatacagtcaagttttctcttgcgacagcgctgtgcagcaattctgtttttacttcttcttcgaatatcatggatacaatccagctgttctggagtaagcttgtgcattttcaacaaggactgaaaatcatttcgagacagtgaaat

SEQ ID NO: 465502 - DNA, 1000 bp, Homo Sapiens; identical to SEQ ID NO: 338969

SEQ ID NO: 465503 - DNA, 1000 bp, Homo Sapiens
aactaattaactcaatacacatttattgaacagctgttattttctgggtacaaagtcacttgggatatggcccttggtccttgccccctggagtcttccatctcagtgtgatcagtgctgtgacagaagcaggtcaaggctatgggagcaggagtgggaacttgacccaggtctggacgttgcggcagcttcctggcgaagggacacttaactggggtcacagtgtattccaaggtatgcggattcatggcaagcaaagggagaaggacagagaagcacaggcacagtggctcccaggctgtttgtgctgcccgctgtggggcttacccttaaatacagagtaacatgtcttgattccttgaggttttaacaagtcatgtctctccaactgcttctcaaggccatagagagtttgtgcatatttgggttagagagtaggaagaggcagaatttaaatagtgctttggatagtccattgtctaagagctttctgcccaaaataccatctgtcaccatgcttaaagtccacccttggctccccaccccttcgggtctgacagccaccactgtggagccaccaatggaaatataggactctcctgggtaaattcatgcaacaaagagattattggtgagaatagaaagatagagaggtaggggaactagaaaggggaagaggaaggaggataagggggagcaaaggtgctcttggatttttgcaaatttcttcctgctccttttcttgtatcctccatttttctactctcaagacacacattcagtaaaggctactgaatacattcaagaagagggtggaaacagtgtgtttgaggtaggtctgtaaggcaatatatcagaaagagtggggaaaccccgtgtgacaccttctgggtggtcctgaacaaacccagtgctctctctgggcttctgtttctccacttgtcaagtgtgcaggttgagttggattctcttcaggggagcttgcagtcttgacttctgt

SEQ ID NO: 465504 - DNA, 1000 bp, Homo Sapiens; identical to SEQ ID NO: 335881

SEQ ID NO: 465505 - DNA, 1000 bp, Homo Sapiens; identical to SEQ ID NO: 157535

SEQ ID NO: 465506 - DNA, 1000 bp, Homo Sapiens; identical to SEQ ID NO: 157536

SEQ ID NO: 465507 - DNA, 1000 bp, Homo Sapiens; identical to SEQ ID NO: 335883

SEQ ID NO: 465508 - DNA, 1000 bp, Homo Sapiens; identical to SEQ ID NO: 334976

SEQ ID NO: 465509 - DNA, 1000 bp, Homo Sapiens; identical to SEQ ID NO: 157537

SEQ ID NO: 465510 - DNA, 1000 bp, Homo Sapiens; identical to SEQ ID NO: 335885

SEQ ID NO: 465511 - DNA, 1000 bp, Homo Sapiens; identical to SEQ ID NO: 246565

SEQ ID NO: 465512 - DNA, 1000 bp, Homo Sapiens; identical to SEQ ID NO: 246565

SEQ ID NO: 465513 - DNA, 1000 bp, Homo Sapiens; identical to SEQ ID NO: 157538

SEQ ID NO: 465514 - DNA, 1000 bp, Homo Sapiens
tttttttttttttttttttaggttaaaatacatttttattaaatgttagaataaatttatacacaattcacaaattctttacaaagaattgccaatctttttccaattttgtagtagtctctacacattcagaaattctgctgttaaacaggatttataaaatatttctttcagaaagcatcacaatgctaattttaggcaaataatgttttaaaactgaagtctttgcatggaggtgagctcaaacacccttattctttattgcagtgatgaaataatgagaaaaataaacattaaactgacttactaagaaaacaatgaataagtaattctgtaaacttctcaaattctcctaaaattttttattactttcagaagcaatactattgcaaggtatcaacaaccacactatgtacccaaataaaatgaatgtcagaaataaaaatactgtcacaaagaagcaccccttattggaagatgtattgaagaagtcttattacactgaaattttatggcacagatcataaactcagagtctcttcacacataataacaattcatccattttgaaatgagtaacttctcctttgtagtgttgctagtataaaaaaaggtacaagttcaaaatatgctggcaacatacaaaagtggccaatagttttggtctttgagagtacaccctgcagtttaacaaagactggctttgaatcttccactcaaaagcacacttctcttccaaaaagatgactgcccaactgatgccatcccagagagcagatatcccaaccaccaacttgaaatggctgaacaaagaaaactaaccaattacttcaaagatgggaagcaaaatcaatgtcaaggtatttaaaatcataagaaattttaaaattcaatttttgaaaaatttcccctgagctttggctgctttttatatacagtctctagtaacagatgcattccatcgttccaagttgtacttataaacgctataattcttggt

SEQ ID NO: 465515 - DNA, 1000 bp, Homo Sapiens; identical to SEQ ID NO: 335889

SEQ ID NO: 465516 - DNA, 1000 bp, Homo Sapiens; identical to SEQ ID NO: 157539

SEQ ID NO: 465517 - DNA, 1000 bp, Homo Sapiens; identical to SEQ ID NO: 157540

SEQ ID NO: 465518 - DNA, 1000 bp, Homo Sapiens; identical to SEQ ID NO: 335893

SEQ ID NO: 465519 - DNA, 1000 bp, Homo Sapiens
ttttttttttttttttttttttttttttttttttttttttttttttttttttttttttttttttttttttttttttttttttttttttttttttttggcaaactgtaaattttcatgtttatttcaaaatagctttggaagatacaagcaagggaagacttatggcaaagcaatgcaaataaaaaataacaaataataaaggggttatggcattttagacttgaactaccctttcagtacatttgcatatactaaagttctggaaaacaattgaaaaaattctgttaagagtgtcaagaataaccgctcaggttgagtgtaaaaatattttatggtcccatcagcatcaacctgccttaatgcttctttggttgtctcttcagctagttcttattttacagcacatgatatatgaagtgatttcacaccatgcccaagatacgggccacccaccagctacatggcatgatgactctgcaggccgaacggcagccttgataattataaggccatgggtaatagccccccaggggttcacagatcttctggcagtgggtgtagctccgcctacattctatacaacagattccttcgtgatccagtctagggtcgaatgtcatgctttccccttcctgatgataaggattatcaggattgaaggcttgtgagtcctcttgaacactgggtctggtttcattattcagtcttccagcgcctgggttgctccgtggtccactgtgtggtctttttgtggtagttggaacaatttttcttaccacttctcttctttccctctggatttcttttggataggttggtttaagccagaaaataggaaggtcaccgcagagttctaacaccttagaactcaagaagctgttgtccttcacaggctgatctacagccacccagataagagaattttcttcatatttgactggcatgatcttgccttccagtttggaggagatgctctgtttggtcacggcgcccacctcag

SEQ ID NO: 465520 - DNA, 1000 bp, Homo Sapiens; identical to SEQ ID NO: 246402

SEQ ID NO: 465521 - DNA, 1000 bp, Homo Sapiens; identical to SEQ ID NO: 335896

SEQ ID NO: 465522 - DNA, 1000 bp, Homo Sapiens
ttttttttttttttttttttccctgggacattttatcagcctagcactctagaactcaatctagaactaagcctgcttctggatcagttcctctgataactgtgctaaaacctcacctgcacttgagcccagagatctttccagacatcttatctgctgtgttgaagacctgtatctagaagccacgttccaggtgcacatctagaacaaaaaatggctccttcaaacatttcacctgaggtgtgtggaacttcatccttcacagagcccacaacacaacaagagacgtctcctaaggagttcattcttgttcgctatgctctggattgcaggttcccctcccccaagtcttccacccctccatgcttctgccagcctagaccccccccccagttctttctcctatccatctccagcactgccagccccccaccccaacaccctgccccaccccaactcccttcttcagctccctcttgccctggctccaggcctcagatgctacaggagccacgccatccctgtccacacaatgctccaacctcaccccatcccttccacggccacctccatccttctcagagatcttttcccaccatagaggcagcccactctccacaacccctgaggagcacagggtctaggtcatggaccccagacagtgccctttctctggcaagtccagcaggggcaacacatgggcaacgccaggcaggggagaggtgtggaggccccatgaaagcagggcagctcgaaaagtgtagcaccagatgattccccaggccctgggtcaggggaatttagggaatgggccacaaggctgaaaacggggcccagggctggggcctccgcaaggctgccccctcccctgaaagaacccaagagtggggccactctacccttggaccaacagatccactcccccttagcctggtggccctgaaattcggggcacaacactgcggcggatgtgggatcagccaagcctgtcccttttgtg

SEQ ID NO: 465523 - DNA, 1000 bp, Homo Sapiens; identical to SEQ ID NO: 335897

SEQ ID NO: 465524 - DNA, 705 bp, Homo Sapiens
tgtgggaacaaaacaataaacacctttattacatgggtgaagacaaaacaaggatttatttgcctttgcgggccttgattttcctaagatagaactccaactctttgccctctagcacatagccatctgctcggccacactgtcccggccttgaagcgatgcacgcaagaagcttgccctgctggaactgctcctccaggagactgctgattttggcattctttttcctttcatcatatttcttctgaatttttttagatcgttttttgtttaaaatctcttcttcctcaggagtcagcttggctcccttcttgcggcccaggggcagcgcatagtgggactcgtaccactgtcggtacggtgtgctgtcgatgagcacgatgcaattcttcaccagggtcttggtacgaaccagctcgttattagatgcattgtagacaacatcgatgatccttgttttacgagtacaacactctgagccccaggagaaattccccacgtccaacctcagggcacggtatttcttgttacctccccgcacacggactgtgtggatgcggcgggggccaatcttggtgttggcagctgggcgccccaactcatacttccgcttcttgtggtagggctttctcttgcccccggttttgcggcgcttgtgccagttgtcccgagagatgcccatcgctcggcgctggctggaaagag

SEQ ID NO: 465525 - DNA, 1000 bp, Homo Sapiens; identical to SEQ ID NO: 335898

SEQ ID NO: 465526 - DNA, 1000 bp, Homo Sapiens
tttttgttttttttttttttttttttttttttttttttttttttttttttttttttttttttttttttttttttttttttttttttttttttttttttttgtgttattaactttttattttgaattgattatgggttgacaggaagttacaaaaaatggtacagagggggctcgtgtgcccttcacccagtttcccccaatggttacatcttacatactcagatgtggttttagaaatttatgttcgattagagccgggcctgcctcattcgctgcctggtcaggggcagactctggagtctgggggatttgggaggagcttctggaagagaagggaagcaggaacctctggggaatgggtgagagaagataccttgaaatgccagtgagccaaggtaagaagactggaagaaaaagaggttggaaaaaggaaggcagggtgactacggttgttgggagtgtgggggagacagtcctaggctccatggtaagaggaagcaggagaggacagttatatgaagggagaaaccatgatttcacagagagaagcaggctggaaactgggggttgtggggaagtgaggctaacatgagtctgagggcctcagggaggttcctatagctagccatatcccctgagtaggtgggtgagtggagggaattataagggaactgggggaggctgacatgagaaggctggtggggatggggaggtgagactcggagctggtgcctgttgccatggtgtgagctgaggccctgggcctccatccaggacttaggatctggcccagtgggtggacagtcactgccaactggacacagtcaacttcttgggtgggttttactgtctctgggagagggaggatgatgaggaggtgggggcgaagagggggtaaacaagctggaaagaacctagaagatagcaccactttgcatggtgatcaaagccctggacattttcgcacccacctggtctcttgggaggggaccctgcctgc

SEQ ID NO: 465527 - DNA, 1000 bp, Homo Sapiens; identical to SEQ ID NO: 335899

SEQ ID NO: 465528 - DNA, 1000 bp, Homo Sapiens; identical to SEQ ID NO: 335900

SEQ ID NO: 465529 - DNA, 1000 bp, Homo Sapiens
cagaccatctttgtgattcgtccttataaattcactttgtcctaaatcggggtaatttggggaagattctatcactttctctggaatggtcttctcatggtaaagatcaatgatcttagcactttcattgatattgattttcctccaaagctttacttcccggcaaagctcttctattttcttctgcataatcttccattgactttcccattcctttctttcattgtcaaactggtccagtaattccatcttttccttatgccagttagtctctgtgttctcccactgcttatgtaggtccatggcaacagtgtaagtgtcagcaaagaagtgtttctgctcttctctgcctcctcttaactgtttcttggaagcttgaagttgttttatttgaagcagtctcacttgcctttaaaataaagcctgaaatattttagtgtttgggcttcttattgaatttggtcttggtaagatgagttgtatctttttaaagaaataagcagtcttcagtgtttttatagcattggttactacagaaattatacttcttttacttcttgtcttgaagggtgaacaaaataaacaaactgaaaatactacaatgaatggtaaatgatgaaagatttacagtacaaaaaacagtgtaaaaaggaagacaagtttaaatattgttgtgtaagaaagtgatgaaaataatacaagaatgagaataagtaaaatgataggctggaacatctgactcacggaaatgggctcctcggcgccgcggtcgtccgcagacttgggcacctcgaggcggtcgatgaaggtctgcagctccttgcggaaggccttcatctgagcgttgatgcggtagagcagctcgtgctcccggatgcggctgccgtcgtcctcctcgtccatgagtccgaacaggtccccgttggccacgtagatgcgcgcctcggtgatgatggtgctcgtgtcggcgatgagccggtcgatggtcttgcccaggcgc

SEQ ID NO: 465530 - DNA, 1000 bp, Homo Sapiens; identical to SEQ ID NO: 335904

SEQ ID NO: 465531 - DNA, 1000 bp, Homo Sapiens; identical to SEQ ID NO: 335905

SEQ ID NO: 465532 - DNA, 1000 bp, Homo Sapiens; identical to SEQ ID NO: 157541

SEQ ID NO: 465533 - DNA, 1000 bp, Homo Sapiens; identical to SEQ ID NO: 335756

SEQ ID NO: 465534 - DNA, 1000 bp, Homo Sapiens
ttttttttttttttttttttctgatctcacatgtttgtttattagtgtgtaccagttgtacaagaaaattgattttaggtggtatatgggtttatcattctgaagtacaatcacctctgtatcttcctttaaaattgccaaaattgtgctgttactccagccaaaccctggggttttgggtaaagtcattcaccgtgattaaaccatcaggaccaattacttcctgttcaatgtagtttagcatcctgctgacatgtgatgcacagatctccccatccacttcggcaatatacgtgtagagaaactggaaggtgctgaatgggattcggggcaacccaccattgtggtcacatgataagacctcacacactatcttgagagttttggtaatagtaactcccagagcgctgcaagcaagggctaaaaacttcagccactcgatctcctccgtgaagcgacccacattcatcacactattaaacagatctgttgggagattcaccactttccacatctgggccagctcctctgcacggatgatcagtctgccagcaacctgagaatgcaggatctttaacagctcaggtgttagctctgcccagttacacaaagcgactcgctcagaccgctctctcaccggaggcgtctctccacgggacagggcctcaaaataatcggccccccactggatgaggtcctgcggctgcgcccgaatggcggctttggcaaactccttcagcattttcggcagctccggcgggatgcatgttggcttatctgtctgagccattgattggttgacctcaggctcgctcccaaaccggctgtctggcttcaggcgacacctggcgcctggcctcaggcgagaggtgtggggagagaccgagtgcctcccacccttcttaagaaggagagcagtagaacctcggcggggagggcagcagcggccgggggtgacagcagcggcggggcacgaccgccgttagcgttagacgttagc

SEQ ID NO: 465535 - DNA, 1000 bp, Homo Sapiens; identical to SEQ ID NO: 335907

SEQ ID NO: 465536 - DNA, 1000 bp, Homo Sapiens; identical to SEQ ID NO: 335909

SEQ ID NO: 465537 - DNA, 1000 bp, Homo Sapiens; identical to SEQ ID NO: 335910

SEQ ID NO: 465538 - DNA, 1000 bp, Homo Sapiens
ttttttttttttttttttttttttttttttggggagtttgtgcattttattttttaaccatcagttttgtattattagaaagataaacattccaatatacatctaaaattatatatattgattataattcaatatgttcttgtattaattagcatatttatatgtacatattatacagaaatacatataattacataccttacaaatgtaattaaaattttattatggtataggaacatatacataccctacacatggttggcagcatggctataatcccagcactttgggaggtcaaggcaggaagatcgcttgaggtcaggagttccagaccagcctgggcaaccatctctgtagtcccagctactcaggagccagaggcagaagaatcgcttgatcccgggaggcggaggttgaagtgagccgagatcgtgcaactgcactccagcctggtgacagaaggagactccatctttttcttcagttccagtgatttcctggtttgcatagttatgactttttcaattagttccactctctccttccacggtgcattgtattcctccagttttttcctatgataggaggcagccttctttatgggccaaacacagtgatgctggtgatcagtggacaaactgcaccttggacataaaagctctaggtctttctgacagaagaaagtcaaaacctgattatgcttcttacacacatgcttctcttcctgcctcttcctcttcttgcttcttatctggagttgcttagcaatttcagtcaaactacccagctggggattgcttataaatttcctttctggacagcaaaagtggcaaaaggggcaggggaaactatcatgtagatccttccaggacataatgatgcaggagagacagaagttatgcccacagctgatggtcactgggtctttcaagtagtccagacagatgggacagctagcctctgctcggaggtcagccagggccgtaacaaattccattga

SEQ ID NO: 465539 - DNA, 1000 bp, Homo Sapiens; identical to SEQ ID NO: 335912

SEQ ID NO: 465540 - DNA, 561 bp, Homo Sapiens
tgcaaaattcaggggacacaactcctggagctgtgggacagccagaactgaaatgcagcactggtcacttcttgggtggtgtggatatgctggactcacctgaggtccaaagtcagagcctcagattttgcactggcagcaaatggggacacagcagctggcctgggaacagcagggcttgcagcagctggactggcagcaggatgacccacagcctgaggaacagtagcagggcttgcagcaactgcactgggagcagccacaagagccacagcctcccttggagcccccacaagagccacagccccctttggagcccccacaagagccacagcaccccttggagcccccacaagagccacagctggtgcaggaacaggctggcacacagcagcacacgggcttgcagcagcagatgggcacacagcagctggacccacagcccccacagccagagccacagcccccacagccggagccacagcctccagagcagccacagcagcccatggttctggtggattgagggtggagcaggtagaggagcaggtgagagggagg

SEQ ID NO: 465541 - DNA, 941 bp, Homo Sapiens
ttttttttttttttttttgaatgaggagaaaaattcaccttgtttgtattttattttgcacaaaatctgtaggcttcgtaactgctttgttatacagagatatcattaggacccacaccaggcatcagcaacagcaaaattctcatatttctagggtttttaaggagtgctctcagcttcctcagtaacagatgtaagatcattttgtcttcgaaacaaattggaacagctgtatattgagtgtgtaagtgcaatagaaaattccaaaccgtagaagaacagtaaaatacgtgatacttccctcccaagttttacttgtccataattcctgtatgacacagaattaaaatgagacaactctattattgttagagttactgcagtaattgtagtaattatgcagatgatgtttatgattaaagtacttataattccagatcgagtcggatactttgttactcttattaggaagactcctgcaatgataaaaaaaattccccataaagtacatcctgttttgtaagttacaggttcatacgttccaaaggctcctttaatttgtcccatatacaaaaccaatagaaagtaccacatgaaaatgtgaaagatgccaatcataatctggatagtccctaaaacgagagaatctgctgtagagatttgttaaagaacacatgccatactgccagcatttcctctagatgattttctctttaacctttggtgatgtctttattagcaaacttcctgcattttacttgttcaaggttccaaggagtttcggggggcgctcgtccaggacccagtccgagttctcacgccagcgcccaggcctagatgaagaggaagatcccggctggcaagccgctcagcgccaggtccccagatctcgctgagctaccatcacagggatagccaggagcccagcacccggccggctc

SEQ ID NO: 465542 - DNA, 1000 bp, Homo Sapiens; identical to SEQ ID NO: 335913

SEQ ID NO: 465543 - DNA, 1000 bp, Homo Sapiens
ttcaccttcttttaatcacatgtacacatttttatttattactgaattcagtgagggatgcagaatatgttctcttcctgccaaattggtattctcttacttacacaacagattcattccaacattcaatcatctcagaagctcaactcagcctcaaagttcctaacatattcaatcacctgttcaaatccttccaacagattcctatctcagaataaaagtaaaattccaatggcctttgaggccctaggtaaaaaggcctctacctccctctctgacttcaaagctcctacaactccctcctgtaattactccattcccactgtatgtgaagcctgccacccctcagtctgaaaatggagatgtagtgcctaactcgtaaatcacagacagctacaagtatctttgtactgaacaaaattatattccaatgacagtcattgagccttgcaataaaaattatgagctaattattaatataaatattcaaagtaaactataaataccagtgggaaaactaaaccaaatatagttttgctaagttttaccacatttatcctaaattatgattttataacaagtaggtgcctttaaaacattacatggtcataaaaacacgtaatttgacatattttcagatttgttaatatgaataataacaaagctataccaactaaaatacataaaaagctagttaaagcaaggtattacaagacacagcaatacacttcaattcatctggggaatctagaattaagtgtcgaagaaaatcacttaattaaattttaatttgaaaatactcacttcaggtgtaaacatttccatttataactacattatggtcttaacatgtggcaacataaagacattaaaattactatttcagcaatacagaactatctaccttaaaatatgactctgtgcctaataaaatttcataggtgacacaatgtcttttctcaaagtaaatcatctctcacctctatcttttatttcctag

SEQ ID NO: 465544 - DNA, 1000 bp, Homo Sapiens
ttttttttttttttttgcaacaacttaataatttattacattacagtagcatcacaccagcagtcaataatgccactttaggcaaaagtctttcagtatttccgttttacattccgcttacaagaattcataaattggtaaaattcattctaagaaaacttggcaaataaagctttggactggaattggcatttctttctctacttttccttcccaccatttatttcctttacagtattcatattttaaaatgttttaacttatttcagaacattaagatagcagttacattgtttaatagttattttaaaatgactctttcagataaagttttagagaaactatagtatggatagggctgatttacattttcaaattttctaaaaatcagctttggttttagagctgatttttgttcatttctggaaaacctatcagatttaatccaatactttaaaaatgattattatatattgcactctttaaatcggtgatttgattcttcctacagaaattcaaatttattgaattgaacttacattttagaattctgtttctgatgaactctaaccttccaatgttgccttctaagcaaattgaaagctgccttataccgaatgaggaagaataccaatacttggctgaatgaggtatcgcaaaagactgcatgcactttgaagaaagacttaagttatagtcatgcgatttccattctttttagctttttcttaaatatatgacaaatatctacacaaagagtggtatttctgttaatacagtcaatttattttccagattgacattcagcttaaatatgccagtatgtgatttaatccataggcacctgatgaacacattattgtcagattggttacagatgctcgtagttgtctttaaactgaactcaaagaatgcaaaaacatcaagttcagaaaataaaaggcaaggacaggactttaagtgcattttaaagccacgggctagaaatcgtaccactgtt

SEQ ID NO: 465545 - DNA, 1000 bp, Homo Sapiens; identical to SEQ ID NO: 246403

SEQ ID NO: 465546 - DNA, 751 bp, Homo Sapiens
taaaataaaatcacttttaattgtatatgttattatttcaaattaatataaatgtctttaaatagatatttgaatattataatttaacaggtctaattattttcacattcttcgagaaaaacattaagttggtactctaatttgggttaactgaatcactattcagttttatcttctgaagtgttttccaaacaggactttgctcaatgatgtaagctttagctgttatcattctgtagcaaatgctatctatgtatggtttggaggtagtctttgctatagtgcacataagattaatagcatttactgtgttgtgtactggaagtattcgtaagttacaacccaggaatctctgctgaatcctgaacatcagtttccattcttcaggcccatggagggcagcagacaaaaccaaaaaactattttggtgaatgttaataaatttctcaattttggctagaaatatttcttcagttgacagaagacattccttagtatccattaataaaaatgcaactccagaaagagaaaatataattgatccattttccactgaatctgaatatcgaactttgtggcttcgattttctagggcagttgcaacttcataactcttaagagatgagctaataataatggtggttgtccattttattttttcttttccactttcagccatctgtctgtggatcaacctagcttctaatggtgcaacaatctgctcaccaggtcctcagagaccgctcagggt

SEQ ID NO: 465547 - DNA, 1000 bp, Homo Sapiens; identical to SEQ ID NO: 157542

SEQ ID NO: 465548 - DNA, 1000 bp, Homo Sapiens; identical to SEQ ID NO: 335917

SEQ ID NO: 465549 - DNA, 1000 bp, Homo Sapiens
ttttttttttttttttttgaaagtgtacaaactttattgaaacgcacacgcgcacacacacaaacacccctgtggatagggaaaagcacctggccacagggtccactgaaacggggaggggatggcagcttgtaatgtggcttttgccacaacccccttctgacagggaaggccttagattgaggccccacctcccatggtgatggggagctcagaatggggtccagggagaatttggttagggggaggtgctagggaggcctgagcagagggcaccctccgagtggggtcccgagggctgcagagtcttcagtactgtccctcacagcagctgtctcaaggctgggtccctcaaaggggcgtcccagcgcggggcctccctgcgcaaacacttggtacccctggctgcgcagcggaagccagcaggacagcagtggcgccgatcagcacaacagacgccctggcggtagggacagcaggcccagccctgtcggttgtctcggcagcaggtatcggaggagggacagctgctgacattatcacaggggacatctctcttcaaggcttgtgggtctggcaggctgaggtgagctggggccttctccatccagggcacctggtggggcccctgttcacaggtacccttctgcgtgtcacacgtaaaccccgcgggacagcagtgtatgtggtcctcacagcacacagcctgggtaaaagggcagcagccccaggcccccgactgtagacggcagcaggtatagccatctgggcagctcacctccatgtcacatttcacatcccccactgtgtgcgcaggcagcttagtgaggaggtccgtggtagcgttctccttggagaggcacttactctggatcaggtcacacacagtgtcttgggggcagcagtgcaggtgatcggagcagcaggtggcgttgggcattgggcagcagccatacttcccactgggcagctcacagcaggtagaaccatcagggcaccg

SEQ ID NO: 465550 - DNA, 1000 bp, Homo Sapiens
ttttacaaaagaagtatctgttttattgtatagaacaagtacagcattttactacatagtatacaagtttttaatgagcatttaaaaaaataagtaaatctaggctatttgaaaaatacagttgagccagtgagcacattttataatttggaagacacaaatcaaatgtgaaggatttgattttctacatttaaaatgaagaaccaaaactctcttcttgattttcagctaaaggcaggagactactttccaactccttttgcttctggagaaggccctgtctcagttctgaaagtcccttaaggattgcttgctgtcgatccctatttttcaccatgttaggattaagaagtggatccctgacacagtcagaatcaaatagctgtcgtttttggccacagtcttgtgaattttggtactgagggtcctgggttgaaggcccagacaatggtgcatcgggatcaaggtaatagatctcatttgttcgaacatacggaataaaatgggatgattcagaaatcccagatgataattctgtttgattacttcctgagatcaaattctctctctcatagctactgttttttagtggtaaatgtaatgtattttgagtttgttgggttctgtttttcactactggaactggtgatgatggagacctttccttgctgaatgaatgaatattcagaggctcttcttcctttttgactagatgccacctcaactttgactccgtttcttgatgagatgaatgaaaaatttctggtgaaatgcctctgttttgagagaggtgcccaggattatttttttctaccaaatgaagcaattccatctgcctccttacttttttttcttctctctgcttttgaagctgtttagggtacttttctgatgctggaatataccttttaggtggcttatttatattccaatcaggccttttaggatatttcttcatgtgttttgtttgtttctctattcttgtgaactgattacactg

SEQ ID NO: 465551 - DNA, 1000 bp, Homo Sapiens
aacctaagaaatgagcaggttggcagctagggtttgtgttggaggctttcggtccagtgtcttgcagtcctacaacaagtgagaggcttgctgccatcagagaggtttatttcacacttacaggcacacacagacacagaccagagactcccagcagcagagcccaagcactggcttcgcccctcagtgccctggggcatgttcagggcagggttgagggggacgccctgcacatggctttgctgtgcaatgactggaaggccgcccggcatgggcagtagagacccctggcctctgagcaccttctagctcacgggtagtgggattctgcattagtggggctgagagatgtgggggcccctccagccccattatagtgcacctgaaggggtccacagcctgtgtcctagaagagggaagaggaaggaaggtgggtggggctggtagtatggactaaggtgctgcaggacctggggccagggacatcctgtgcagaagctccggctgcctctttgcggtggtggcctgaccgtcccacagcagcctccaccagggccctggtgctcagtggcccctctttgctggctggctgcctctgctgccccataccccacacactcatcagcctgaagttagcccctgagtgccacctgcatcgtgccataaccctgaccgcctggggcaggaagtattcaggttggctgtgtcagatgctaatgtgctgaatcaacagtcattgcagatcacgaagtgtccatcataactggaacattccatcagcttgcagtgctgtggtgtgtgagggtctggtgcagctcagcccattttccaggtgggcatctgcaaagttgagggggctccggtgggtctctctgctgtgaggagactcagaccaccccctgcctcctgggggaaatgtcagaagggcttctctgcctatgaggatctggggcagggcttggccttggcctgctggtcttggaggcgttgagcttggtct

SEQ ID NO: 465552 - DNA, 1000 bp, Homo Sapiens; identical to SEQ ID NO: 335918

SEQ ID NO: 465553 - DNA, 1000 bp, Homo Sapiens
aaattttgagtgcaaaaatttattgtgatttttaaaaagttaagtagttcaagaatgcatattctttagaagagcactatacatgcagggacctgggctttatcatcaccctggcaagctaaactgcctcatcaacactgtccctgcaaaagtttctgtagaagttgattcatcaattaaaagccagatccgtatatacacagctgaagaaactgccagcagttcattgctaattaccagggcaaacatttgtatttcaaagttgaccaacaggatgacaattctcaaagctctaaaaagattttgtcctaccaaacactagcctaatgtatgaccgttacccatccgtggttagtaacaatcaaaggcaacacttcttacagcaacaaatgccatgagcagtgatctcaataaattcctctttgcctgtcactataaaagccagtctggtcccaactcagtatcaaggacattattccagacagcacagtactgctatcaattcaggtttccttagcaaataagtgcttcagatatactcgcaagggctcctgaattggagttttctgcatcatctccataaaaatattttttcacctctaaagtcatcaaagaattgaagcaggcccttgggaaatatccttaaggggagagagtggctccaaaaataaccttccttccagcaccacaccaccagctcagagaattcacttcacggtgggacggtcactcaaagtctactgtgaacctcatccccaaaaaggtaatggcaaaggctagaggaaaatcctaaacaatcacctatgccttgtatctttctctagaaacacaatctactagtagaaaaaccaatttgaaattttaaaaatgtggatgctactcatgagggctgtcatcaacgtaggaaaactattaactcaagtggatgacatgtttcttttcctgtattaaaaaagctcctcacatttaataattctgatttagatcagttttgatttaa

SEQ ID NO: 465554 - DNA, 1000 bp, Homo Sapiens; identical to SEQ ID NO: 335919

SEQ ID NO: 465555 - DNA, 1000 bp, Homo Sapiens; identical to SEQ ID NO: 335920

SEQ ID NO: 465556 - DNA, 919 bp, Homo Sapiens
tcagttaaacttcttttctttatacatcacccagtctcaggcattctttatagctgtgtgaaaacggactaatacggcaacagatcagccttgccctgggaaacccacctccgcgatcatggtatctcccctgccagggaagtataagcaggttttattaagatgccagggcgacagcaccaggtcagagctgcggcaggaacgccaggcagggggactgagtgtgcgggagagggcggggcacaggacagctgagggaggggtcagggtgggtgcgcggtgacggggagggcaaaggtggtgtcagtatcttcattttgaggattggggttcagagcacttctggggtgtcagctcctccttgtccccccgtggggctccgtaggacttgtcacaaaagctctccccaggctcctcggttgcgggatcctcaacatccgggacaggggatctgttgcctcggcaccgtaatccatctctttctttttcaagtagaggagtgagctctgggtgctgctcctcataataagccgccactgtctccaggtagccctctttgaagtcgtcctccagctctgccaggctcgacatcacctgtccacgtcctgattctgcattttgcattttatcataaaatctttctatggcctggtgcattcgggccttcagcttcttcatgtcatcagagaggaccttcgggaagcacatggcggccaaaagttcaaggagccaaggcccgagagagacagaggtctggggtccctgggaggaatgagggtccgtccctggctgggcccctgctccctctgagctggggtgggagtctctgagcccaggaatgggctgctttccccaccccaccagcctgagagtggggaggggcagagggaaagtccagactcgggacagctggctgggg

SEQ ID NO: 465557 - DNA, 1000 bp, Homo Sapiens
acactagaaaaatcaagttttttattttaaaatattttcaaaggctaaggccatagcaaaacaacccaagggtggttgaatcaaactcagggaattagaggagcatcagccaatgcaagcaggtctatataaaatacacatcatttataaatgcacacagcagaaagcacagtggccccagaggaccaggcagggggacaacagagagaaacagagcactatctggagggacaggcacacccgcaacactcaaagccctgggccccaagtgcacctccaaagtcacctacgctgcagcatggctcttgccctttctgagcctgggtatagctgaagaccaagttcaccagcatcttggcacatccacctataactggcacctctcatggcctctgacaaccaagcaaggctcagagaatggatttttatctctgtctttcagcaaggaccagggagaagtgctgaagcaagaagggttattttcctaaaaaaaaaagacggatgaaagggtgaaaggggctggttccaaaaaaaaaaaaaaaaaaggatgaccattcatggaacagtgagtttcacctgagacatacagatttggtgcaagcaacacaaaaggccaggctctaaatttcatcctaaaaactgggatggggagagcatgaagagaccacttactggtagtccctccaattctcatttgggtttgtcataaacaggacagacagtcgtctgcttcacaataaataatttccacctggatttcattccctgattaatctctcagtgtctgaagaggggaaaacagtggctgcttctgacaccgcccaccccatcaccagcaactttccctgatacttctggcctcctcactaagcccttccagaacctccaaagccactatcttagcagatgggagtcccagggcgatgaggccagagttgtgggacacagagaagaagagaaggccttgatagaggaagaggaatatccaaggcaaagccac

SEQ ID NO: 465558 - DNA, 1000 bp, Homo Sapiens; identical to SEQ ID NO: 157543

SEQ ID NO: 465559 - DNA, 1000 bp, Homo Sapiens; identical to SEQ ID NO: 246404

SEQ ID NO: 465560 - DNA, 1000 bp, Homo Sapiens; identical to SEQ ID NO: 157544

SEQ ID NO: 465561 - DNA, 1000 bp, Homo Sapiens; identical to SEQ ID NO: 335924

SEQ ID NO: 465562 - DNA, 1000 bp, Homo Sapiens; identical to SEQ ID NO: 335925

SEQ ID NO: 465563 - DNA, 1000 bp, Homo Sapiens
ctgtttcttaatgttcatttattcaacaaatactaattgagcctctattgtgtgccaggttccattctaatgctggagacacagacaacacaaaacagatgtcccctactcaaggggcacatggcacacagggaatagatgcctcattacatctgtttaagaaacaacatagccactgcagagattcacagcaggctgaacacgtgtttatctccactcctcttgcatccactaaaatgatagtaaagttgtagaccacccataaggacaaaggaaatcggagacggtagaagagagattgatttcagcaatgttttgaagataaaaatctagatggacaacaacttcagccatctttctctgctctgacaagggcctgcacggggagcacgcagctttgggctgcagaagtccatctggaaaggcttggaaactgaccaccccaggcaggaagaacaaccaaattcactgcaggccagaactgtgtgtggtattaaatgcgcaggctctgcagagagattgcaggattcaaattccggtcgtctgctcactggctgtgtgatataggtcaaggttctaaacctctctgtccctctttgtcctcatctgtacacaaggggcagcaaaagtgcctttctcacagtgctgttctaagtgcgcctgagaacccgctgcaagcactcggtgtagccccggacacagagtgagcactcagtaaggggcagctattagcatagctatttcttctctctcagctcagagcgtctcccagagcagccagtcctcacaccctgcccccagaatggaagaacaggtggaagctaataccatcactgcacagtatcgttgggaagttgtatggcatccctttgtttgagttaataaagctctttccctcctttagattaaaaaaagaaagaaatggaatgaacagcgctctgcctggcttctcctccacatctctgaggcgggacacttccccatagacctgcaaatcact

SEQ ID NO: 465564 - DNA, 1000 bp, Homo Sapiens
atgggttagtccttctgtgtcatgttaacagattcagtcatctcccagctcctgggtctctattgtaagttgagggcctctggagaggaatgaggcagaagaaactcagtagtcaggctgcgtgccggccctactgacgggccaggtgcagaggccttgctgcgcactgccgcacctgtcacttgcttccagccttccttgtctaaatagcatgcatgggaatggagatgataataataataaatgagaggaaatggtcgatccagtggaccatttcaaggaaaagccctattcttttaagtggaagcattttattcaacttgactttcttcacagctctgcttctgttatccagagcttttagaggaaatcaagtgcctgcagctgggttgaccaacactgtctttgatagaattaatctagaacaacatcaggtgactcacaggaactgttctcagaagtggaaggccgcctctgattgttcttcaaaccctaccaggttttcagctacttttccaccctggacctaggaaccaccctcccagattttccacgatagttgtggtttaaaatattctcagtgtgctggtacttgttagaacttttttgttcacatggatgtttataccatggaggtggcgagcccctggctggagaggccaaaccctccccgtgtcccctgactggtcccccttgagcatctgcatcccttgctcatggtaccgcctctgccacctccccagggaaacagggctggccacagctgtctcctacatgcacagcaccagcagaagtaaacacgacccttccagaaagcagattagctctgaggtgtagtccagagacacagccagcctctgtgaagtggagccaggagagaaggatgtggctggaatgtcactggctggagctccaagcctcacaataccctctgaaacatccatccagtatttcaagagcaggagctgtgttctgcttctgcattgtaagagagaaacat

SEQ ID NO: 465565 - DNA, 1000 bp, Homo Sapiens
cttacagagttttgctcttgttgcccaggctggagggcaatggtgcgatctcagctcaccacaacctccacctcccgggttccagccattctcctgcctcagcctccccagcagctgggattacaggcatgcaccaccatgcccggctaattttgtatttttagtagagacgaggtttctccatgttggtcaggctggtctcaaactcccaacctcaggtgacccacccgcctcagcctcccaaagtgtcgggattacaagtgtgagctaccatgcccggcaacaacatgtcttaagtacagggataacaatggtgtgttattggtgggagatgtgagggtttgcttttgttttttgtttttaagggaaagcttgacatttctctgctttatcccattccccagcagactaacaccaaccaagctcctgctgccgggacaagcactgtactgagccacatattaatgaacaggaattcaggacatttggaaaccaaattccaaaggctccagggtaaggagagagagatgacctcctgggaccccgccctcctgcctgagcccagaaccctagaagccagtcccagctgcggacacgtgcccacgccagccccccacacacggtgctctctgagtccaggcatgctcatggtcttttgaggagagagattgattgcgttagggaccttgcacctacaaaatccatcagcctgtacatggacggacattcgctcaggacaaacaaaacccagcaaactctaatatccacgtgcagggcctctccggcagtgagtgacggcagttttggtcttttggcgagacatcaagcaagacactttccatgcaggaactcaacctgtccccatttcacaagtgaggaatccaaggttcagagaggtcaaatgagactcccaaggccactcagtggcagggccaagctctaaccctgagagtctctgattataaccccggtctcaccaggacacctgcttaaacccctc

SEQ ID NO: 465566 - DNA, 930 bp, Homo Sapiens; identical to SEQ ID NO: 335927

SEQ ID NO: 465567 - DNA, 1000 bp, Homo Sapiens; identical to SEQ ID NO: 335928

SEQ ID NO: 465568 - DNA, 1000 bp, Homo Sapiens; identical to SEQ ID NO: 157545

SEQ ID NO: 465569 - DNA, 1000 bp, Homo Sapiens; identical to SEQ ID NO: 335931

SEQ ID NO: 465570 - DNA, 1000 bp, Homo Sapiens; identical to SEQ ID NO: 335932

SEQ ID NO: 465571 - DNA, 1000 bp, Homo Sapiens; identical to SEQ ID NO: 341389

SEQ ID NO: 465572 - DNA, 1000 bp, Homo Sapiens; identical to SEQ ID NO: 335936

SEQ ID NO: 465573 - DNA, 1000 bp, Homo Sapiens; identical to SEQ ID NO: 335937

SEQ ID NO: 465574 - DNA, 1000 bp, Homo Sapiens; identical to SEQ ID NO: 335938

SEQ ID NO: 465575 - DNA, 1000 bp, Homo Sapiens; identical to SEQ ID NO: 335940

SEQ ID NO: 465576 - DNA, 1000 bp, Homo Sapiens; identical to SEQ ID NO: 335941

SEQ ID NO: 465577 - DNA, 1000 bp, Homo Sapiens; identical to SEQ ID NO: 335942

SEQ ID NO: 465578 - DNA, 1000 bp, Homo Sapiens; identical to SEQ ID NO: 246405

SEQ ID NO: 465579 - DNA, 579 bp, Homo Sapiens; identical to SEQ ID NO: 157546

SEQ ID NO: 465580 - DNA, 905 bp, Homo Sapiens
cagaatagttttattagtttgcatacagtttgtcaacactcaacttttttctctcctgacacacaaatccattcagctagagctttcttctccccatatttcacagatcgtgacatggtatggatctgcaggcatctctgactttcgaagcctgaggttactgccactacctgttgccatggcacgtttaagattccgcactttggacacaaatttcataagctccacctcgagttccattaaggtattgaatgcacagtctttgttgggggaagcatttctttttttctttaatggagagtgaagttggccgcctcgaaggccaggaggactctgctccttattcttctcactgtctctttgacactgcagtatcacaaacggcacaacaacaaaaagaagccagagccatttgctcccaagccagccttgggtgtgctctggtagattctgccgaatccgaaagtgctctccgtattgcaccttcccctggggttcgctagttttctgtctcagagaagagaacataaaggcatagctgcaggtgaggcacagaagcaggaccagggacgatttcagcgtccacatggtgagcagagatggggaagggagttgctcatgacgggtttgcttgccctcgcaactgggagactgggcacctggtgccaggcccttggtgatgtcacagaggccctgagctgaggccactctggccattgtgatgatttcaggacagaggttacaggtcacaggggttgcccgggaggaggactcaaagggagatgggggcatttccagcaggcagtcagagagagaggatgggcacgacggggtgccaattccctgccaggggactctttccaaccctggagctttgctgggagaggccatcatgtttttgtttt

SEQ ID NO: 465581 - DNA, 1000 bp, Homo Sapiens
ggagttcataaaatcttttccgagccagcgggttgcagccagagctgccaagttcaaaggcattgccgtgggttcaagtgccccccaaggctgttgctcagtcacagcttccagagcttccttcccaccacactgccaggagctgccagagcccccatgcagcccctgaccccagttccctcccaagtcccagggcctgaccctgatatctggggcaaggtgctcgggacatagataagtgaaatggtgtgcagaggcccagtggagagtcacatctcggtctcagccaacagactgtcccctagtcctgacgtcattagcaccatctgagagctgggatcgctggggcacatccaggagctgctgcctctctggtgggcagcaggctcccgccctctctcccattcctgggtgtcgccagcccctcctgccacttcctcctcctcctctccctcagagaggaggtcacagatctgttgctgcagctctgggctaatgctgttctcagccaacaccaggctccgcaaagctgtggggtaattttctaccatgtccagcagggtctgagctgactggttggtgagccctgtgccctccaagtctaggacctctagggtacgactagaggccacagctacagccagcattcctgccacatggtcacccagggggttgtaatccagattgaggacgcggacctgggagctgtgggccacggcaatggcaaggcggctccagcccttaggggtgatgccagggttggcactcagcgttagctccttcaagccagatttggccccatctgggggcaggaggccacagatgaggttgatggcttcatcacccagcatgcagtcccccaggtccagagccacgagggcagggtggagggccagggctgggttcagcaaggccagccccgcatctgtcagggggctcccatgcaggaagagggactggatggagcggttggtccgcagagcctcagccagctgcttga

SEQ ID NO: 465582 - DNA, 651 bp, Homo Sapiens
tcattgtccagttggtaactggcgcttcatgtcattacaggttataataatgtgcttttttataacagaagttaggtaattgcagttaggagtgacctggtctggttgggacagctcgcacaatgtcaaatcaaaaggtcgggagcttttgtgacattttccccccttgagctcacaggcaatgacaggactgttacagacagctttgactgtgtttagatcctcatggatgaatgcatactgggctatgcaactctgactgggctccttcatcttgtgtgccatcatatcattgcattctctatctgtctggtcaagcctaagatagtctttgttgctctgaaagagagctgaggctctgagcatcttgttacccccaacctcatcttcaccgaggatgggatcttctggccagccaggttgcaccacttctttgttgctaagcaccagcgtttctgtggtttgggtgccgtctccctcctcagtggcctcagctttgtcctgtgagtcactggaccaaaattcattgagcggttgatcactctcctccaagactgctgtagccatatgaagtcccaaccccaggcccatccccaggcccagcagcagcatcagcaacatgaaaaagatctgcaccagattcagcttcat

SEQ ID NO: 465583 - DNA, 1000 bp, Homo Sapiens; identical to SEQ ID NO: 335945

SEQ ID NO: 465584 - DNA, 1000 bp, Homo Sapiens
tattttaaaagtatctttaatgacatgaaatgaagttcaagaatatgtgtgtgtataaatatacacacacatgtatgtgtgaaaagcagatataaaaacagtctgtacatcataatatacatatatgatatatgcataagaaaaaaactagacctacagacaaaaatgtttcaggtagttctagaaaatatcagagaggtgtgcatgaaaatgtttctggaatgtgtgtgtaatcatcagaaatgattactggtgactttaattttcttctggtaacttgtctgctttgtgatttttttttcttgcaatgacgctgaattacttttctgacaacagggaaaaggacaggaagagggcacaggggaatggggtcataagcagtgtttgtttccagcaaaactaccgaggacagcgaaacaccctttgtagcccgccaagctggccaagacacacacacacacacacacacacacacacgcacgcacacacacgatcaattacagtgaccaggagactatgcaggggaaacgggcatactctttactagctgcgctggccggcacgagtgcaaatcggtacaatgcttatgaagggggccttttggcaacacacaggaaaagtctttaaaatgtctatatgtggatcttgcaagtccgcagttaaggagaccaccgggatgctagcaaagatttggcttgacaaggaaggattcactcatcaaagcacagagcacgcaatgttggtcttaaacacagggaaagaactaggcaccacctgaatgtccaacaatgcgggaatgattacagaaatgttaaggtccacggatacactggagcactctgcaggcactgaagatgacgtttcataagcctgttgataacatggaaagaagttcaatgggttgatttttgtttggttttagttgctgaaaaagcaggttaagaaacaccacatacatgaaccattctataacggtgtgttaaaagggaaggcggggtgg

SEQ ID NO: 465585 - DNA, 1000 bp, Homo Sapiens; identical to SEQ ID NO: 157547

SEQ ID NO: 465586 - DNA, 1000 bp, Homo Sapiens; identical to SEQ ID NO: 335947

SEQ ID NO: 465587 - DNA, 1000 bp, Homo Sapiens; identical to SEQ ID NO: 157548

SEQ ID NO: 465588 - DNA, 1000 bp, Homo Sapiens; identical to SEQ ID NO: 335949

SEQ ID NO: 465589 - DNA, 1000 bp, Homo Sapiens; identical to SEQ ID NO: 335951

SEQ ID NO: 465590 - DNA, 1000 bp, Homo Sapiens; identical to SEQ ID NO: 335952

SEQ ID NO: 465591 - DNA, 1000 bp, Homo Sapiens
tttttttacaataacaaaaaatattttagtaaaacataagatttacagaagtttccagacaagccatacaaaatggtcacaagcttattttgaaggggggactctacacttgacagcaaagtcacaatgttattagtgagggcagtgatgcttgttaaatgttcccattttggttcaaacaatcaagcttgtccatctacagtgtctaaataaagttagacttggatagagagcatatttctaaagaactggttagctgcttttaaccaatccaattagatcaccaaaaaggcggggaaaggagcccataaaattaaaataaaactacttacccccctcaaaaaaataaaataaagaaaaacacccacacccttgcagctaacctgacaactaccttcattcacagtgctttatacttaaaccaggatgggggaaatgaataaaagcagggagggaccactgcttttaaacgtttcacaacaatccggatgatacgtctagcctctgctcatgctttatgacagtgaatcaggacaagacatagatttgctaatgtacatttaatcaccaaataactgaagatgtctgggtttttttattctgtaatgtttctaagactatgtccattaaatgcaagcaaaaaggaagaagtcttggcagaacaggagaagtgatgcacacttaatgattggatcaatttaaatactattcatggcatatagcctagtccatgctctagctgtttcaatggcttgggcttcgttggtcttccactgctccactacatcatttgctaatggatcatctggattgggagcatttaacaaggcctggatcgatagcagaactgtgcggatctgcagggctggggaccacttatctttcaaaatatctaaacttattctttccaacttgtctacatttggatgataaattttggtcatgaaacgtactttaggggctgccattgggtattcttctgcaagtaatagttcacgtt

SEQ ID NO: 465592 - DNA, 1000 bp, Homo Sapiens; identical to SEQ ID NO: 335953

SEQ ID NO: 465593 - DNA, 1000 bp, Homo Sapiens; identical to SEQ ID NO: 335954

SEQ ID NO: 465594 - DNA, 753 bp, Homo Sapiens
ttttttttttttttttttttttttttttttttttttttttttgtaaagcgctgatcctgtttatttggcaggaaaacgagacaatccagcagcccaggagggacaggtggacttaatcctcctcctcgtcgtctccagccccagccccaccctggcccttcttggcattcttcctcttcacgcggcccgggcggccacccccgtagggagagcgcagagagaagtcgatgtgcttctgggaatccaggcggacaatgaaggacgggatgttcaccacctgcttgcggaccctgatatggcgctggcggatcagcacgcgagcgtggtggatggacttggccaagcccagcttgaagacctgggtctgcaggcgtctctctaagaaatcctctatcttcaggcccaggatgtaatccagcttcatcttgccctcatccagcaccccaatgcggaccagccgccgcagcagggcgttgccttcgaacagacgccgtgggtccttctcatcaagcgtcagcagttcccgggcggccttgcggatcttggccagggtaaatttgaccctccagacctcacgtttgttccggagcccatactcgccgatcagcttcagctcttggtcgagacgagatttctcgaagggtctccgcggggtcacataagttttgcgacaaacccagctccgggccactggcatgttggctccgcttccccgtctgcgcctaagcaaaccacccggtcactgagaaagag

SEQ ID NO: 465595 - DNA, 1000 bp, Homo Sapiens; identical to SEQ ID NO: 335955

SEQ ID NO: 465596 - DNA, 1000 bp, Homo Sapiens; identical to SEQ ID NO: 335956

SEQ ID NO: 465597 - DNA, 1000 bp, Homo Sapiens; identical to SEQ ID NO: 335957

SEQ ID NO: 465598 - DNA, 1000 bp, Homo Sapiens; identical to SEQ ID NO: 157941

SEQ ID NO: 465599 - DNA, 981 bp, Homo Sapiens
ttagattatgttggaacttcccagaactttcctcagggctgcctttatctccttattctggaggctatagataaggggattgaagagtggggtcaccatagcatagaacaaagtttcaattttctgcatccctgtagaatgtccgagtcctgggctcacatacatgaccataagagagctatagcacagtgataccacagccaaatgagacccacaggtagagaaggccttatgtctcccagtgcttgaaggcatacccaacacagctttcaggacaagagtataggatccaataataaagaggaagttaccaaaaataactaatgagcttagagtgtagcaaaacagttggattcttggggcagaaacacaatccaatgcaaatcgtggccctgggtcacacacaacatggtcaataatgtttgggccacagaagggcatctgagagatgagaacaatggggatcaggaaccacagaaatccacaaacccagcacagtatgaccagtttggcacagagatgcccagtcatgatattaggatagagcaagggacggcagatagcaaggtactgatcaaaggccatcacagtcaaaagcaagcattctgatgtacccaaagagaagaagaaataaaactggagaaaacatccagcaaaggagatgttttttttctctgaaaggaagttgaccaacatcttgggaactgtagaagagacataccatatctctaaaaaggagaaatttcccaggaacatgtacatgggagtgtgaagtcgccagtcacaccacaggacaaaagcaatggctccattccctgttatagtcagtgcatatgttgtagtaaagagtgagaagaggaagatctgaattgtccactcacaagtgaaaccttggagtataaattcatttacaaaagcaaagctggaatttggctcagagacattcattaggccagtgacctgcaaggtcaagggacacat

SEQ ID NO: 465600 - DNA, 1000 bp, Homo Sapiens; identical to SEQ ID NO: 335961

SEQ ID NO: 465601 - DNA, 1000 bp, Homo Sapiens
ttttttttttaggttttgctgctttatacacaggaatgatttattttacatactagtcagttacaacattagcctgtaaaatgaaatccattttttaaggtctcataaggcagaataaacttcataatattatgctttcacattagccagtctgataaagcataaacaacttaagactatggtaacagtttaaaataaaatttacagaacaggcactttgaagtcagctactgtgtgtaacttcacagttaacgttacttggacatatctcatttcatcaaaggttatcacccagtgaagcaaatgttcctttgatgcagacgcacaaacagatttaggttccaaacactgtattctggttgtaatacatgcaagacagaccctaagttagaaaaatcttctgaaagaaaatgaaaaacaaaaagcagccagaaatgaaagcatttacaagcacttgaataaggcctttcaatgttaaatcagtgttttaaatcccttcattctcaggtaagggattaagaggccgagagagatatcgtctgcgagggtgaggatactggaggttggcagtgtcagcatcgcaagagtgctctaccagaggaggaggaggaggaggaaggagctgggcataactggaccatctcgatccagcccgtggggaatccagaggggtaaagaaatacctgccagcagaagatccatttaatgaattctgaagacttggaatagttgaacctagggaaggatttgaggttccctgctgagaactcccattgactgggctcccattacctttcaaaataccagtacacttccaattgtccatataattagctttccacaatcttacacacccatcatctcctgaagatgctagcaccgttcctgttatattccaactcactcgccagacctgagaattatgattatcgaactgagccactatatggatttcaaactttgttggcccaccagaggaagtcagttctttcctcacagg

SEQ ID NO: 465602 - DNA, 1000 bp, Homo Sapiens; identical to SEQ ID NO: 157549

SEQ ID NO: 465603 - DNA, 847 bp, Homo Sapiens; identical to SEQ ID NO: 335962

SEQ ID NO: 465604 - DNA, 1000 bp, Homo Sapiens; identical to SEQ ID NO: 335963

SEQ ID NO: 465605 - DNA, 1000 bp, Homo Sapiens; identical to SEQ ID NO: 335964

SEQ ID NO: 465606 - DNA, 1000 bp, Homo Sapiens; identical to SEQ ID NO: 335965

SEQ ID NO: 465607 - DNA, 1000 bp, Homo Sapiens
  misc_feature (130)..(130): n is a, c, g, or t
tttgaagcaggtcttaagctttcccagttctttgccacttaatttcttacatatgtttaaaatatatattaaaaaaactaatgtaatttgaagaccaccactgcacctaaaagaaattccatgttttccncctattcagttgttctttgtagaaatggtctattattaagtccatttttacagttcaaaatatcactgatattaccacataaacctttgaatgtcctgactatttggccactgaaaagtcttgttcagaaagatgtaaaaagttatgaaattaacaattgcatagcaactcagttcacaaacaagtctggatgtgggaggcagagttatgttaagcctataaatgacataaggtaaaatgaagtaacgaaattccagcagtttctgaggaactataacaatgaacaagcatatgaaaaacattaaattccaaaaaattggctttgatttcaatgagtcagctatactccaaccagcaaatatataggctggaactaacaaatatttcagaattgcatatctttgaaaaactcttttccacacatagaaagtataatgtctattgtctgctagcaagtatttatgagcataagtgaatttccaaactaaaaacacagagactaaggtaaccaccaaaaacagaattccatgtttccaaactaaggaaagaaaagtcttaattttgctaggagacaggagatgaggaaaagaaaaaaagagagtaaatgaaaaaaagtagaatagttgaggaaaatgaagacaggcttcatgactactccgatcgccaataacaattccaccattaactactacaaaagcacaaaacagaaatcccagaaggatgtagggccaagtcaaacagaaaagcatactcaagtttttaaaggacatggaataagccaaaagaaactgaagaatttttctgaattctgcaaatggtcctttaataggtggaagtctgtcttccttcttttgtagctcagttttccaa

SEQ ID NO: 465608 - DNA, 1000 bp, Homo Sapiens; identical to SEQ ID NO: 335966

SEQ ID NO: 465609 - DNA, 1000 bp, Homo Sapiens
tttttttttttttttctgtttgcagattcatgtttaatagaacgcccttctgaaatgcatccaaaatagagaagctttctcccgaactgcaaaagccataaaaatgcaaaatgcttctttaggaaaaactgaatcaaaattacgccttaatgttccaagcaacacgaaacctactctgtgccccagggcaggtgccggcggcagccatggccccgaccagctcacatgaaacctagtctgtgccccagggcagtgcaggcggcagccgtggccccgaccaactcacaggaaacctactctgtgccccagggcaggtgccggtggcagccatggccccgaccagcacacaggaaacctactctgtgccccggggcaggtgcaggcggcagccatggccccgaccagctcacaggaaacctactctgtgccccggggcaggtgcaggcagcagccatggccccgaccagctcacaggaaacctagtctgtgccccagggcagtgcaggcggcagccgtggccccgaccagctcacaggaaacctactctgtgccccagggcaggtgccggtggcagccgtggccccgaccagctcacaggaaacctactctgtgccccagggcaggtgccggcggcagccgtggccccgaccagctcacaggaaacctactctgtgccccagggcaggtgccggcggcagccgtggccccgaccagctcacaggaaacctactctgtgccccagggcaggtgccggtggcagccgtggccccgaccagctcacaggaaacctactctgtgccccagggcaggtgccggcggcagccgtggccccgaccagctcacaggaaacctactctgtgccccagggcaggtgccgggccgtggccccgaccagctcacaggaaacctactctgtgccccagggcaggtgcaggcggcagccatggccccgaccagcccccaccagcctcagttgttctcgatctgctccaggtccagc

SEQ ID NO: 465610 - DNA, 1000 bp, Homo Sapiens; identical to SEQ ID NO: 335967

SEQ ID NO: 465611 - DNA, 1000 bp, Homo Sapiens
tttgtttaaacatagaattttaattaacatgtaaaaacagccccattgtaaaacaaaatgtctttagccatttcatttttttcttctattatttactatatcttctatggagtataagtagccatttttaagttctgtagcttctaagtggtatattgctctttttgtgaacaactattgatatattcactatgtaaggccctgctccaaggtacacagcacaaggcaattatttattaggcaaacagcatagtgcccagaacatagtaggacttcagcaagcaatttcatttcccttttctttcctatgcctcattgcaattgtcattcagtgaaatggggccctaataagaaaaacaagacgagataacatttacacattgtaatttcaaacattaacttttagaaagaaaaggcactaaaaagtgtattacaggtattagaattttttgtaaaattataaaataaataaaattttataaaaattacagcatcaataaaattttataaaattataaaactactttataattataatgcaataaaattattagactatatattaatagcctaatcatagattaatttttaaatgcacattcctttaactaactgtacttgacttttttttttttttgagacagagtctcaatctgttgcccaggctggagcatagtggcgagatctcagctcactgcaacctctgccctccgggttcaagcaattctgattcagcctcccgagtagctgggattacaggcatgcaccaccactttcaatggcaaaaacctcaattacttttgcaccaacctaataattttaataatatatataacatttaattacagtgtagaactatcaatgttttcgcagtgtaatttgctgtaatatctattaaatcccatagacttgcagtctataaacatgtatacactctaagtaaaatattaaatgaaattaaattagctactcaattttcctcctacacataatcttctgt

SEQ ID NO: 465612 - DNA, 1000 bp, Homo Sapiens; identical to SEQ ID NO: 335970

SEQ ID NO: 465613 - DNA, 1000 bp, Homo Sapiens; identical to SEQ ID NO: 335971

SEQ ID NO: 465614 - DNA, 1000 bp, Homo Sapiens
gcgtcatggaggtttgtttccagatgagagaaaccgacaatgttaaatgtccaccaggaaccacaaagtcccatcagacaaggaggtgctgccaaggcctgggggggccaccagctctgagcccttcctggggacccctggggctctgggctagcagatgtcagatagaggcttgggggactgggggacatgctagaccacctcactaagggggcttggactgaccctgcagaggcgaacgctagtgactcactgacttctccaggcccggactataaatagccacgggcccgggtaggggcagggagttggggcttttctaaaaacagtcctgcccaggcccaacagctggggcccctgccagtcacacggctcagcccgaattagaacacctccaccccttaccccccacagtgggcctgtccccaggtgtgggcagcacgggagccaccgagcttggggccatccatctgggccctgctgtctcgatgtgtgaccttgggcaagaacgagggtgcatgggtgtgtccacctgtgggttccactctttgggggccacacctcccagtgggaccatcgcacacagtggcccaggacacacagacacccacagccacctgcatacacgcgtgcagccacggagcctcgccatgcaaggcacccccagagctcctgttggttttggttcctttgctggctgtagcccactaaactgacttctcatggagcacagaggaaaaagaaaaaccaggctccaggaagggcagctcctcctgtcacagggtccccagtcccacctctccaggcaggaggggcgatgatctcacttgctgcagatgaccttgtaggtgaccccacccaatactccatagtccagttttactggcagttctgtggagggtggggagggggaggagtggagctatttaactgaaaaacaatagcatggatgggaatgaaaaatggtgcagctgctttggaaaacagttaggcagttact

SEQ ID NO: 465615 - DNA, 1000 bp, Homo Sapiens
gcagttcttggatgtgcagagagcaacacacacgtttaatcaccaagaagccccgtgggtctaataacagtagattgaagggtgcaggccagggtgagggcaggtgggtctaatgacagtagattgaactgccagggtgggggcaggtgaagctgatctgcagacagacatgcagggagggatcctgcgtcctctcccagagccctgccccgcggcccggcatgggagggcttccaccaccacggatgctccatgcccaacacatgtctgcatgaccatccctcactgccaggttgtcacacccatgtggaggccagtaacccacccgccctcagccctaggggtgagtcagtgaccccccagcatccagcagcccacctgacacggatgctcacacagccgccctgagcgtcgcccggcacacagcactctgacacggatgcccacacggccgccctgagcgttgcccggcacacagcactctgacacggatgcccacacggccgccctgagagtcgcccggcacacagcactctgacacggatgcccgcacggctgccctgactgtcgcccggcacacagcactctgacacggatgcccgcacggctgccctgagagtcgcccggcacacagaacgctgacacggatgcccacacggccgccctgagagtcgcccggcacacagcactctgacacggatgcccagacggccgccctgagcgtcgcccggcacacagcactctgacacagatgcccgcacagccgccctgagcatcgcccggcacacagcactctgacacggatgcccgcacggctgccctgactgtcgcccggcacacagcactctgacatggatgcctgcacggccgccctgagcgtcgcccggcacacagcactctgacatggatgcccgcacggccgccctgagcgtcgcccggcacacagcactctgacacggatgcccgcacggttgccctgagcgtcgcccggcacacagca

SEQ ID NO: 465616 - DNA, 1000 bp, Homo Sapiens; identical to SEQ ID NO: 335973

SEQ ID NO: 465617 - DNA, 1000 bp, Homo Sapiens
ttgagaaagacatcgtctttattgttcatggagaagggaagggagaccagtaaagggggagccctcctgaggatgcacccccacccctgcccaggaaggcaggtctgagaggctgcatcattgcccaccccaagaaaaagagggttcaaccaggggtccccaggtgtcccctctccagaggctcccatccccaaatcctgccttcccttctcggggctcccagggcctgtgctgagctctgggcaggaggccagctctgccactctgcctccaggcatcgccctggggtcaaggcctcggagatcaggctagtgggcttgagacagactccagatcctccctgaggcaggtcaagagggggccgaactctgggactggggtgccgagggcaggggctggcttggtgttgacactggaggcctctgggatggaaaatcctgtatctggcagaggtcaagcagggtgcggacgcccacgagacaccagagctcgcccagtagggagacaaggatgcccagcaggtccagccagcgacccacagtcagcagcagcacgaagaggccgcccatgcgcaccagcaccgtctgcacctggctctgcaggccggggtgctgccgctgctcctcctgcatgtagatgaccagcagcgtgtagcagatggtgagcggtgtccagaaccgcatggcctccgaggtggtcaggaagtcctggttgatgagggccacagctgccaggtcacccacggcaaaggctatggccagggcacggcccagcagctgggggaggccatgtgcatgggccagcaggcccaggcacaccccacagtagcgctggctgctgtgcagctcgtagaggcggcagacgtggcggtggaggcgccgggcacccaggcccagcagcgtggccagcccgaggctcagcagcaggttcagcgtgcggtgaggggcgccctcctgcaggaagctcaggccacaggtcagcccgcagcccagcgagtact

SEQ ID NO: 465618 - DNA, 1000 bp, Homo Sapiens
ttttttttttttttttttttttttttttttttgccttacattatggaaatttattcctcctgaatgtataaggcaggagactaattcaatatacattcactatgcagaattctacaagttctgggctatgtgtaaatgtgccccccttccctccattatcaggatgtttaaatgtgtttcctttttttcatttaaaactttgcttagatgttttacattgccatcacctcttcctgagaaaaaggtgtgtcccccaccccaacccctaggagccagcagactatctttctgaggggccacaagcacactcccacgtggagaacaagggcagtggatgaagggaacggggatttttcaaactaatgttttccctcaaacaggcctcccggcgccgttagacttgaagcaatgacatctattaaaatggggaccccagctgggggttaagaatgttgtttaagaatgatgacgatatcttgaaaagaaattcttggctggggatggggtagggggaaagggaaaaaaaataaattattttgactttcccattggcaatgcttgctacgcttaatctgattgcatctcagggacctgtagcaacatctccaattgtacagtgtaagccaaagtcaaatgtggggtatatgaagaaattcagagcatcagccagttctccagaaccagccccttgccactgtaaagtgaaaggctcctgtgaggagggcgctgggattgtgtaaggtcaattctcaacgtcttcctgaaggcagtgcccagggagaaagccgaatccagaggtccagatccatagagtggaggttctgaggagttggaaggagctcagcctcctctactgggcccctggcccccaactgcctcttcctgcggatccgtagtccttccagccggcgtccgcgatcagtcggtcggtcggcacctcggcgaagcttgtcggggtggccaggggtccgggcgtggaggtcagcgctgcggggaggcg

SEQ ID NO: 465619 - DNA, 1000 bp, Homo Sapiens; identical to SEQ ID NO: 335974

SEQ ID NO: 465620 - DNA, 694 bp, Homo Sapiens
ttcttttcttcagaatagttttattagtttgcatacagtttgtcaacactcaacttttttctctcctgacacacaaatccattcagctagagctttcttctccccatattttacagattgtgacatggtatggatctgcaggcatctctgaccttcgaagcttgaggttactgccactgcctgttgccatggcacctttaagattctgcacttcggacacaaatttcaaaagctccacttcaagttcgtttaaggtattgaatacacagtctttgtaaagagaagcattttgatttttctttagtggagtgcgaaatgggaagcctcgaaggccaggaggactctgctccttattcttctcactgtctctttgacactgcagtatcacaaacggcacaacagcaaacaaaagccagagccatttgctcccaagccagccttgggtgtgctctggtaggttctgccgaatccgaaagtgctctccacacggcaccttcccctggggttcgctagttttctgtctcagagaagagaacataaaggcatagctgcaggtgaggcacagaagcaggaccagggacgatttcagcgtccacatggtgagcagagatggggaagggagttgctcatgacgggtttgcttgccctcgcaactggaagactgggcacctggtgccaggcccttggtgatgtc

SEQ ID NO: 465621 - DNA, 1000 bp, Homo Sapiens; identical to SEQ ID NO: 157553

SEQ ID NO: 465622 - DNA, 1000 bp, Homo Sapiens; identical to SEQ ID NO: 335976

SEQ ID NO: 465623 - DNA, 1000 bp, Homo Sapiens; identical to SEQ ID NO: 335977

SEQ ID NO: 465624 - DNA, 1000 bp, Homo Sapiens
ttttcggtctgtgtcgcttgttgacgccggcagacagtgtaaagggagggcaaaggcatgggggaagcttcgagcgctccaggcggccgcggccgctcaggcttgggcggcagcggcggggctccccgggtccgcgggcgaggcacagccgtgggggtcgggatcggggttcgggtctggcggtctcggcgggcggagggcggcggtgcggaggcggcggcggcgcgcacggcaggcggtgagcccagagcccagcgccaggcaggaagccaggctgacgaggaaggaggccggcccgagcgtgtaaaccacggccaggtcccgcagggcgagcggctgcgcgcaatggctaaaggcggcgtcggaaaaggcagtcagggggctgagcgtcaggcgtcccggccacacgcagagcaccgtctcggcctctgacgcgggcagcgggtgccggcgcagccaggcgcagagcgggcgcagcgcgcacccgcagccccaagggttgccgcgcaggtgcagcgcgtctagagcgggcaggcggcccagcagccccggcgcgagtgccgccagctcgttgtcctgcaggctgagtgagcgcagcagcgggagcgcgcctagcgccgcgggctccaggcgcgccagccggttgccggccaatgagaggttgcgcagcgcgcgcagcggcgcgaaagtccctggtgccagtgcttccagctggttggcgctcaggtccagcagctgcagcgcgcccaggccccagaaggctcgcacatgcaccgagtgcagcccgttctcgcgcaggtccaggcgctgtagcgcgcccgctcccgcgaaggcacctggcggcagcgcacggacgcggttgtggtccagcagcagcgcgcgcaggcgcaggctcaggcccgggggcacggcgggcagcgagagtgccgagcagctggccaggcctcccggcacgcacgtgcacacctcggggcagtccggggcgcccagggaccccgag

SEQ ID NO: 465625 - DNA, 1000 bp, Homo Sapiens; identical to SEQ ID NO: 335978

SEQ ID NO: 465626 - DNA, 1000 bp, Homo Sapiens
aagtggagtgacccaaaccttcgttcctgagggatctggactgtttatagtactagctggattgggctattgtagtttctcattgatcttaatcacagggcatggtaatactaagagatgccctagtggatctcctgtatttaatgcatactcttccttacatcctttatggcatagtagactgatttcatcttgaaagtctgggtcaatcacctcagacaatactgtaactctcttcttagcctgttgacttaaaggtaggaggagcccaaagtgtccaggtagcaatcttaacttccagtttaatggaatcattgttgtgtttcttggtagccgcattcctccctctggaactaagacctctaggccagcagaacataatgttgcaggaacaggaagcaaaaactttgctagtggatcactaggggtgatggtgagaggtgccacttctccttctgcaccttgattcctagacccgtgaatcctggctatgggagaaagagtaccatatattggacactgattcatagtatgcactgccttctggagaactttgccccagcccggcaaagctttgtcacctagttgacattgtgattgtgacttcaaaaggccattccaccgttctatcaatccagctgcttcaggatgatggggaacatgataagaccagtgaattccataagcatgggtgcactgctgcactttttttagccgtaaagtgagtgccttggtcaggggcaatgctgtgtggaataccatgatggtggataagccattccgtgagtccacagatggtagtcttggcagaagcattgcatacaggttaggcaaacccacagccagagtaagtgtctgttccagtgaggacagacctctgccctttccatgatggaagaagtcccatataaccaacctgccaccaggtagctggctgatcaccccgaggaatggtgccatattgagggctcagtgttggtctctgctgctggcaaattgg

SEQ ID NO: 465627 - DNA, 1000 bp, Homo Sapiens; identical to SEQ ID NO: 335979

SEQ ID NO: 465628 - DNA, 1000 bp, Homo Sapiens; identical to SEQ ID NO: 335980

SEQ ID NO: 465629 - DNA, 1000 bp, Homo Sapiens
tcacgtctcaatgtttctttattgtgctaacactgctgcctcagagctcagacctcacacacagaacaattcgtccagacagacccccacccacccggcccccggggccctctgcttaggctggggacaccaggcctccggcctcagccgctctaggacactcagcctcctcctccctccctctcccccaagccttcggtcccgggggtgcggagaaggctcaggatcgccttcctccgccctcgcccgccccttcccacttttggggaggaggctctgcctccctacgcatttccttagggaaatgccttcacccccagccgcctggcagcctggggcgagcgaggtcgtccccagccccgacgtgtccccagctgcagacagagagccccgcgccctcctcctggctggggcgcagcccggcccggcgcgcgcgctcacaccaagaggccgttcttgcactgcaccggcccctcggcgcagtcagccggctccgcgctcttgaccttgacgtagaccggggaggggcccgcttcgcaggcggcggcggcggtgcagggcgccagggccacgtcctcggggccgccgcaggggggaggcgcgtacttgcggcgcagggagcggctgacgttctgcgtcgggtaccccaggaggtgggtgacgcggctgccgcgcccgctggccttgcacccgggcgccacggcgtcctctctgatctcactagccaagtcgccgcaggcccctccgccgaccccgccgccgttgccgtagccgaaggcaccgcgggcgccgccagccccggagcccccgcagcagcagcagacgagcccccagatgcctacggccaggcagcccagcgcgagcagagagcccaggacgatgccgatgatcacgcctatacgccgggagtctgagaccttcacctccaccacacaaacactgtagcccacgttgttggccactgtgcactgatacagcccatcatctgctctggagatat

SEQ ID NO: 465630 - DNA, 1000 bp, Homo Sapiens; identical to SEQ ID NO: 335983

SEQ ID NO: 465631 - DNA, 1000 bp, Homo Sapiens; identical to SEQ ID NO: 335984

SEQ ID NO: 465632 - DNA, 1000 bp, Homo Sapiens
gatttgacttattttttaattcacaaaaaatattttatgtctcaatttactagcttcacagtatatacagaatagtaatgattttttcattcagtaaaatggtagatgggttatttccagccccattctttattttatattaattcaaagcatccttttcaatagtttgaaatgttacatccaccttgtcaagtagatccagttgttatagctgccattatacagactcttctctgtaataattattttcatcataaatgaaagcatccatcttattggcatattcctttatcaacactgtggtgtgaaatatgttccagttgatgaatattggcaaaataggtcatcttgttggcagtggcagcccgttgggagtggctgctgtgaagacatgggctgaagttggggaggtgcagctagggctgggaacagggggagccctgcccccttctgaattggcagggtgggagccctgccctccgaggcactgctgcagctacccagccacagctgcggacgtgggcaccctgtgctcctggggacctctgagccccctcagcctcgcgggctcagaagtgcctactcccactgcctagcttctccctgtgcctggtgcccactctgatttcagagcaaagttgagggcaagcccgggtgctcttctgacctgcctgtgggtgcgcatgtttggggtgacgctgacatgccaaaccctggcccttggcccccttggactttatgcactgatcagcatgggagggaggctgaggcagggttgacggcagcttgtcgggcctgcaggcactcctcagcatgagcagcgtgggcactatggacaatatgatagcagcaggaggaagacagacttctgcatagaaaagggtgggtgcacagtgaagccccaccttcaagccagagatgacctaaagtatggggtctgggctgtcagttctggctggagtccatggcttggagtaagaacttatggtgctttttccag

SEQ ID NO: 465633 - DNA, 1000 bp, Homo Sapiens; identical to SEQ ID NO: 335985

SEQ ID NO: 465634 - DNA, 1000 bp, Homo Sapiens; identical to SEQ ID NO: 335986

SEQ ID NO: 465635 - DNA, 1000 bp, Homo Sapiens
gtgcaaaaccacaggatttattgtgcatgcatagttcagaatacaggaacgtgtatgggagtgagggccggtcccatcgagtggggcctgtaccctgcaagtgaggcccatataccctgaatggtgtcttgctcacaggtggtgcctgggcccccctatttgatactgagacccatatactgtgaatgaggccagtatcccgagtaagtcctggtcctacgctgcaaggccagtgccctttgatttaggcctatataatcctgaattccacctggcccctggaagggggaattgtaacccccagtgatgccggtaccctctggaaggaggcctctatcccctgaatgaggtcgggtatccttgagtgatttctggccctctgtggtttcggccttgttttttgctggttaatgaaagtggtgcttccaggccccaagtccttgtcatcgggacctttaagaaaagcgtctcaggccacagcgacgcagaccccagctcaaggctgcaccgttgccatggagacggttgggcgggggacaggggagggtgtgcggctccctctgcgcaggcgcacgcgcgagcagccgcgtcgcagcggaactgctgagattcaggcccagggtgcgcgctcagacgcggcgcgagcgccaggcaagctgcggctgctacctcccacgcctctccaggtgcactcggcgccgcccccctgcacctggctgcggtgccgagtcactcaggcctgtgtcagggagagagggagggagctgtcctggaaagcagacacgtaagccccccgcggatcctcagacagctctggagaggggtcccgggggaaggtcactgcgtccagccggccagcaggcagctagagcccccgagccccgagccccactccagccttgccacattcaccggaaccgggactctaagccctgcaagtggctttctagggttgcattgacaccgtgcgctgcagcccacccctatctcgggctccctg

SEQ ID NO: 465636 - DNA, 1000 bp, Homo Sapiens
aattttggaatttattacttccaagattatttttatgtgaaatacatttctgaattccaaacaaatggattacaaataaactttcaaaatgcaacttgtttctaagtggaattctgcctttaaactgtttgggttaatgagaaacagtaaaatagcaatgtaataatataccttaaaatgtttaataccttataggatttgctaccaaaattatttagattaaggatagttattcttttatttaacaatttagaaaaaagttaaagtttgcaaaaacattatataataatgaagttccaacagctactaatgacaataaaatctattcaaagttttacaaagcccttttaattgcataaattgctaatgtaatactattgatgatgatttgctgaaatgctggtatacaattaactccacagtcattaaattaatggtaatttgtcttatttgatattcaattatagaacaagagtattgatgttatttggcttccaacagcgcatttccagagtcagactatgcctttcttggtcctgaatcagagtttagtataggaaggctgatgattgagcaatctaattgagataatagaaagtcatgaactagatcctcttggtgataattatttcctaattttgtcctactattttctaaaaatgttgattgttcttgaacagaccactgctgacttataattctaatgtctatgctttgctttcttatatgatcaattagaacattactatttggataagaatttcttttataattttggaacttggatatttgcttcttgttactcaaatattgctgcatacataatattttatgaggcatttaaaatttcatttgataagtttaacaaattatccagtggcgttacattatttagttcatatatatatttaaaaggctttgagtaacatttgacaggtaaggcactggatgtgggtatgctcgttggttttcctgcagaaaacattctttcaaattttcc

SEQ ID NO: 465637 - DNA, 1000 bp, Homo Sapiens; identical to SEQ ID NO: 335987

SEQ ID NO: 465638 - DNA, 1000 bp, Homo Sapiens; identical to SEQ ID NO: 335988

SEQ ID NO: 465639 - DNA, 1000 bp, Homo Sapiens
catatttttatatgttgtttattgacattcgcccccacttgccagccaccatcttcatttattaagcatttgttattaagcgtttggtactgttccatttacctgcattacgtcaattaaccgcttatgcaagtacgtactcttgccattttataagcaggtcgctaagcctaaactcagtcaagtcaccaggcaggaaagcaacactataaggataggactttactcaaatagtgtagaccacccactgatacctggtgagatgtccttgccccatcccccagcacatgggaacaagagccaaggcagttcaacttcaggtcctgcacaagttttcctagtctcatctacaaagccccagagttcatgatcactgcatataagctatgagttcttcctctacttttgttgtgggtgaaacagcagcaaactgcaattaaaattcaaaaatctttgcaactagcaaaatctgatccattagtccagagctgtagatctctatgttgcaaaaacaatttaaagtctacattattcagcttccaaaataaaacgtgaacaccctttacagcaaccctgccccatatttgtctaccccacattttttttttttttttgagatagggtcttgctctgtgacccaggctggagtgcagtggtgccctctcagctcactgcaatctctgcctcccgggccccagtgatcttcccacttagctcgtgagtagctgggaccacaggcacatgccaccatgcctggctaatttttttaacttttgtggagatggggtttcaccatgttggccaggctggtctcaatctgggctcaagcaatccacccacctcagtctaccaatgtgttgggattacaggcattagccaccacaccaggcccccagcccacatttaactacctctcgtgacataaaacccgaactctcagggcaagccaatttatgtttaactctaccagaaggtttttttttttttaactcaaaagaag

SEQ ID NO: 465640 - DNA, 1000 bp, Homo Sapiens; identical to SEQ ID NO: 335989

SEQ ID NO: 465641 - DNA, 1000 bp, Homo Sapiens; identical to SEQ ID NO: 335990

SEQ ID NO: 465642 - DNA, 1000 bp, Homo Sapiens; identical to SEQ ID NO: 335991

SEQ ID NO: 465643 - DNA, 1000 bp, Homo Sapiens; identical to SEQ ID NO: 157554

SEQ ID NO: 465644 - DNA, 1000 bp, Homo Sapiens
acctaccaaaatatttatataatggtggaaatgttccaaaattccatattttgggatttatacacaaaagataaaaaaaattagaggccaagaggctgccggaagggaaaaacggggcctggaaaggccaatgtgaggaatgagctgggcctaaagaggccactggcaggcgggagctgggcctgccgaagcggccgaaaggcaggagctttggactggggaggccacagtgaggcgagagctagctgggcgtggagagtctgctgtgattccgaggccgggcccgtgcaggccttcgggaggcaggatgccgggcctgcaaaagctgactggagatcaagttctgggcctgaagaggccgccaaaagtcaaaagcagggcctgggaaggctgcctacagccacgagctgggctgggctgaaagaggccactgggaggcaggaggagctggacctggagaggctgactcgaggaagttttgcacctggagaggccgccgagaggacggagctgggcccggggaggccaaaatgcagctcttccaggcccacttccaggccgacttgaggacgacttgggcctgcagagtctgccaggaggctggagctggccctggagagcctgactcaagggcagtctgggcctgcagaggccgccagactggcctctagaggctgatgagaggcaggagctgaccccggaggggccctcgttgacgacgcgttgcgcctggagaggctgccgggaggccggagctgggcctggagagggcgacttcaggacgatttgggccagcagaggctgccgggaggcccaagctgggcatagaggaatccaccgactggaggccgttcggggcctggagacgctgtcagagggcaggagctgagcctggagaggccaccgtgaggcctgagctggggctggggagcttggcttcaggaagttgtgggccaaccagggccaccgggagctgggcgggagctgagtccaaagaggt

SEQ ID NO: 465645 - DNA, 1000 bp, Homo Sapiens; identical to SEQ ID NO: 335993

SEQ ID NO: 465646 - DNA, 1000 bp, Homo Sapiens; identical to SEQ ID NO: 335994

SEQ ID NO: 465647 - DNA, 1000 bp, Homo Sapiens
cacatgtcatcgctttaatactgtgtaatactttcttttaaaatacagtctcttctgaggtagacagaccacaactgcagagcatcgtcagacaggagataaatacgtccatgtacaacacgcagcaaaatgaggtagaaatggttacagcgggaggagaggatcccagccccagtctgggtagaggaaggggagaggccagctcggaagtcaccctccccactccctgcccctggattctttggtatgcctccccccaacattaccagagctggactggcccttcccctacctgccccagagcccatgaggtaggtgccactaggctgggggcagtctccttgtgcaaagctccccaagcctggggaacaggaggagcctagtagagaaagcggtggggactccacctcccagagctccctgcctcttgaagggaaggctgggatcccaccccaacttccctgacaccctccacccacccccaccccccaatacatacacacctgagagagaacccctcactccatgctccctccgagggtcttttgcagcctgcggctgtgacccggcagcccactgcttctgaggcaccaaagccctgtgggcggctggctccaaagagggggccagaaagcaacgggggtgggggggaacagagcagccttctggtcagcactcctaggccagcacaggccctgggtgccagggcccctgaaagatcccccccagacaccctcccagccagcggggaggcagtagactctaggaaatgcacgggcaggcaaggaactgcacaggaggctgaggtgggagagagaaaaagtggtggtgggggggcgtgtcccctgctttggactaagatcagagttgtgaaatgggctgggggtggtgggagcaaactgctaaagcctcatcaagggaaaattggtgggaaggagagaaatatggttcttggaagggttccaagcctagtggaaagttcaggcaggactgagactaa

SEQ ID NO: 465648 - DNA, 1000 bp, Homo Sapiens; identical to SEQ ID NO: 335995

SEQ ID NO: 465649 - DNA, 1000 bp, Homo Sapiens
gttttttattataaagagtagtattttattgaataagatttacatccagaaaaataagctttaatctacaacgaatgccagactctacagcacaaagcaattttctcagttttccacacacaaaggttcctactaagtgaaaaaagccacagaatctcatacacaaatgtactactctgtctcaaaacatctcacataatcatcactgtactaataccattagatcagctcttccgtcaggttaaagtatccctctaataactgatttttataatgttatccacatccacgcccaatcagtctgccattgttaatggtgtacagcattattgaatacaatggaattgatggagcccatatccagcgccaaatcgtgacttaagttggtttgatttatgatttttcaacgttatgatgggtctattggaatattagatgcgtttctgagttacactgggtttatgagtatgcgaccctatactccagaaacaagtgtataaagaaaaacaggtgtagctaattaaaatatacttagtgacctgggataaaccaatagatgcttacaactgatggagaaccatgaaagagagataccggtaaataattacaataacacaattttccagcacctgtcgaggattccccaaaaagacgcaggacgtaggatgcacctaaggcatatgaaagagagagggcagaaggaataagagagaaatgggaggaagggaggaaggaagggaggaagggaggaaggaaggaaggaaggaaggaaggaaggaaggaaggaaagacggaaggaaggagaaaacacccggtgttactgaaaccagaaaatgcggtttccccctgtgggtaaggctgcaatgtggatgaatcttgaaaatattgtgctaaaagtgttatgtcagtcacaaaagctcacgtattgtgcaattccgtttataggaaatgtccacaatatggaaatctatgcatatggggttgatcgctctatgcagtt

SEQ ID NO: 465650 - DNA, 1000 bp, Homo Sapiens; identical to SEQ ID NO: 335996

SEQ ID NO: 465651 - DNA, 1000 bp, Homo Sapiens; identical to SEQ ID NO: 335997

SEQ ID NO: 465652 - DNA, 1000 bp, Homo Sapiens
ttttttttttttttttttgtttgtttgttttggaaggatggagtctgactgtgttgcccaggctagtctcgaacctctgggctcaagggatcctccctcctcggcctcgccaggtgctggggattaaggcttgagcctccacacccggacctattaattattcttaattaaaacatttaaaggacacagcatttggggtcagcgcagcatttgcagtggctgctccagcttcggggccgcaggtcaccgcgggggcccggtgcctactggcacggccgccctgcgggtcagctcatggggattctctggagaaccctgagcccacctcctgcgccccgcccaaccttgggtccccaggcccagcctccgaggccccgctcccagcgctaccgccagagctccaggctgcgctcccccaggcaaaggcgccaccggcgtgtccagcgcagcctcctcctccaggcggcgcgtgtgagtcaatggaaatgaccgtggcgggcggagcagccacctaggacatcgcggaagcctcctgaggggacttccaccgcttgtcccaggagcttctacaacagctggcattgagagttcagttataatattttccgccagtttttcccagcccggcccccaagcgtctgattttaaagttcccgcctcaggctccggggcgcctaccctgcaagggcgccagttctccgacacctgctagggaatgaatccccatcccaggaggaaggcgtggcggggacggaagaaacaaccacacgatctgtgacagtgaccaagctttagaggccccgtgtgcctgccaggcgcctgagcccacaccgtccacgcttccctgccccggcgggaaccagctgttctccttgcaccggcgagggcgcggggtcacccccgccgggccgaccccaggcatgagctccagaaccccctcccaatcgccccgtcttgggagcgcagggagtctggctcttccctgccaataacgaaatca

SEQ ID NO: 465653 - DNA, 1000 bp, Homo Sapiens; identical to SEQ ID NO: 335998

SEQ ID NO: 465654 - DNA, 1000 bp, Homo Sapiens; identical to SEQ ID NO: 335999

SEQ ID NO: 465655 - DNA, 1000 bp, Homo Sapiens; identical to SEQ ID NO: 336000

SEQ ID NO: 465656 - DNA, 1000 bp, Homo Sapiens; identical to SEQ ID NO: 336001

SEQ ID NO: 465657 - DNA, 1000 bp, Homo Sapiens
ccacgaatgaaataatgtatttattgcagtctttctggttgagatatttcaaatatttggtggagcttttaatgagagagagagacactctcgagtgtggaagaaaaaatgaggggatgtgaagatgaggcgactttaggacagaaaaaaaaagagacaagccatgtaaacgttttcgggtaggcgtgaggcgatgtcagtcttgaacccccttatgtcaggtaaagagcgcagcctcttctagcacaaacaccgtttcccacatggaggaaatcacaggaatcagcaactctagagtgcgatgaagaagcttcactctgggagaacccccttcgtgaccacggtctctcccctcttcccaaggcctaacgagcgccttcgctggcaacggaggtgaggaggctccgctgactggctggtgcccgtgtccggggctgccacaaacgccacgacttggcttggcctctctcttagttattcgcagctcagcccgatgggcgtctccggggtggcgacgggaaagaaggtgggcttattgggtgcagctccacgggggctggcatctctgccgggctgtgtacaccggaccgagatgctcagtcgctctctaaagctgctcccgcggatgacggacacggagataaataggaacggtgtgtcgtgagaggtggtccacaagcacttgccctccttcgcccgtctttgaccccgctgaggagactgttctgcttctggctcttggagcaggccggctgacagcgtagtgaaggaagattcctgcgggagggcggccagtgtaaaacgattccctgaccgggaatcgaacccgggccgcagcggtgaaagcgccgaatcctagccactagaccaccagggacacacaggagggagctttctctcccttcttccgtcagaagccacagcttccctgagctctgggaggacttgggccttgtgagggtcgctctttgctcctggagtctctcacaaggccattccc

SEQ ID NO: 465658 - DNA, 1000 bp, Homo Sapiens
catttggcccaaaaggtttattttaaagatgaagagatgaagtcacttgttcaagactgcacagctggttatcagaggacttgagggcagaactcatgtcactcctcactcatagttccaggttcttagaaacaagcacttttcagaaagtgctcaggccctcaccccaaacctcactgctcctggataaccctgcacgtgtcgaagctgtagatgtctaagaaatcaagggcactggcttttctgcattctccagggagaaagttccaaggcactggggagccagggcagcggggttttcaaaggcctgcagcgggagccctgctcacagggatgccatccagatgtcctcatgtcccctctgcacatgaaagcctcacactgctcccgtcccctccagttccccctgcctcccacagcagcagaactgcacgaggcttcccccagccccggggcacacattcaaaacacctaggaacgccgctgggaactcccgcctgaaaggacaggccgccggctgcagggcgctgagatggatgcagggacctgcccttttcctccgtccgcgggttgcctccactggtcatttgctgtggcagggcagaagaaaacaacgaaatcgcagggcacacagaagtcaaactgacacataaccacactcagaggagaggacccaactgctaagcagcttgaatgggaaagtgagaaaagcatggggttttcacatagcaggtggagttcgatgcaaaccatccggagcgtcttgctaatcattagcgatggcacctttgctcggtttcaaggagtgcagtttcaggggcagtgttcccccttgagaaagaggcggtaaaaacaatatacatttgtttaagcttaggatgtgaaacacactgatgtcatgtctccttggctttccaggtgaaggatcgcggtgtcacctttaggatccctcgcctgaagtcaggactcacctgagcagaatgatggcttctcagtgaat

SEQ ID NO: 465659 - DNA, 1000 bp, Homo Sapiens; identical to SEQ ID NO: 336005

SEQ ID NO: 465660 - DNA, 1000 bp, Homo Sapiens
ctaggacattcccagttatatttattgacaactgatagagcttttgatattgataacttaaatgtaaacataattccatattaaatttggaggtattttaatgaattttgtatttgtccattttcacactgctataaagagctacttgagactgggtaatttataaagaaaaaaggctggggaggcctcaggaaacttacaatcatggtggaaggtaaaaggcaagcaagtaccttctttacaaggcagcagaagaggtggtggtggtggtggggatctgccaaacacttttaaaccatcagatcttgagaactcactcattatcatgagaacagcataggggaaaccgcccctatgatctaatcaccacccaccaggaccttccctcaacacatgaggattacaattagagatgacatttaggtggggacacagagccaaaccatatcatttccatctctggttcctcccaaatctcatgcctttctcacatttcagaatacaatcatgctttccaacagtcccccaaagtctaaactcattccagcgttaacccaaaagtataagtccaaagtctcgcctgagacaaggcaagtccctttccacctatgagcacataaaatcaaaagcaagtaagttacttccaagatacaataaaagtacaagaattaggtaagttctcccattacaaatgggagaaatagaccaataaaaggggccataggccccatgcaagtccaaaacccagtggggcagtcattaaatattaaagctctgaaatgatctcccttgactccatgtctcacatccaaggcatgatgatacaaggaaagggtggtctttcaaggagttgggcagctccactcctgtggccctgcagggtgcagcccctgcagctgctttcatgggctggccttgagtgcctgcatttccaggtgcacaatgcaagctgtcagtggatctgcatttcaagggtctggaggacagtggtcctcttttc

SEQ ID NO: 465661 - DNA, 1000 bp, Homo Sapiens; identical to SEQ ID NO: 336007

SEQ ID NO: 465662 - DNA, 1000 bp, Homo Sapiens; identical to SEQ ID NO: 336008

SEQ ID NO: 465663 - DNA, 1000 bp, Homo Sapiens
gtcaagaaagttgttatttatttttccctggagaaatgacattatgtgtgtgcgtaatgggaaggacccaggagacgatttatgggggagtgccaacgccgttgtgcaggcttccctctcatggcacaaggggttgggatctagtgacccagtggccttttctggggcatgagcactaggggagaaaggtaagacagtggcatcttcttgcaaccttctcggacaggttgaaccaccagggactctgcgcaggtgtcaccacactcccagacgtctgttgtcacctggcgcgaagcccgggtcttggggtagcaaacttccttaggttcacttcagcgacatctgtgccgtctgtccatggaagcttttgggtgcatttatgaagctgcgccctgtgcctggcgcctcagaactcagccctttaagttcctcccacccagggtcgggaacgggcctcaccatccggctgctcctgcagcagctctttctggcgagtgcaagcccacggattccccgcgagccgggtgcggatggggaatccgcgcagcagtcccctgcaagcaccctcccgccgtgccctccttccctgcgcagtgcatccctgggtgctcaggaagggagagcgcacggtcctgggccgccagcggtactcagggggaggcgacaggcttggcttcagccacaacgttgcgccacttgggcgctcccctctctgttgctaccgtccgtgctggtctcggtccccatctcgactcttcgtggtgcggagactgagcgcagttccctacgttttgcgtcccaacttctccggggcagaaaagacccctggtgtgtgttggggagaacggggagagcaggcctttggcctcttaagggtcttttggggtccccccacactgcgcctaggcgagggcgcctgtccccacgcgggaggagcgcccctagcgccggcgacatctctgcggacctggtggtcccagcgcgcgggcatccatccatt

SEQ ID NO: 465664 - DNA, 1000 bp, Homo Sapiens
cacaacataatcgagagtctctataatgattctttacagttttagtacacaacattaaaattcatgagacgtgtgaagaaacacgaaaatgagatccatacacaatttaaaaagcaggcagtagaagtgatcctaagatatttaagatgttgtaattcaggatgtttaaaggcagccattataaatctgttcatgggggtaaaggaaaatattctaatcatgaatgaagagctgtggaacctcagcaaagacatggaaattacgaaacaataagaagataaggaaatttaaaaaatacttttgagcttattcaaagattagaaacagaacacagagcaatagaaattgtccattctgaataaaagagtgaaaaatcttaaagaaaatgaagagtcttagagacctgtggagtgattgagtccaagttgaagaggggacaggaaaattaaatgaggtaccaagtaaatcaccaactaatagctgaaaacttccaaaatttgtcaaaaccccccaatttttatacccaacatgtcaacacacccctccaaaaaatacaaataaatccataccaaggccatattgtgatttagaagactagcagggcagagctttctattgacttgctgtgatttctaattttaactacttagaagaatgaaaaataggttctccttagagttttttttttttttttcttggagaaagtctgacttaggcacagatgactgacagttattaaaggccaatgactttccagccttctcttaaatttccagtgtcttacgttggaaattatttaaattcgtttcttccaaatcctgcagtaatactgatgctccagaaagatgtcccacggagattctgctcttgtgcgtccctcctgcacggagctgaggctgtgcctcctctagtttcattagcgtgtagtcgtggggtacttcgagttaatctggaaaactaaatgttaaaatggattcaggccgggcacagtggctcacgc

SEQ ID NO: 465665 - DNA, 1000 bp, Homo Sapiens
ggtagatatgaggcttcaccatgttgcccaggctggtctcaaactcctgggctcaagcgatcctcccccttcggcctctcaaagtgctgggattattggcttgagccaccatgcccggccaagaaccttgtctcttgtgatgcaccccagaacaaaacatcactgcaaaaacacaccaaggcatgagttttagtcctaagtcccatttatccaccatacactatgtgccaggcacaacgctaagtctttctatggacgagcatcccttaatctcagcagtaacaaccccaggcaatggggcctgttgacagatccatttgccactgaagacagtaaggctcagagagggtaagtggcttgtgccatgtcagccagctaaggaggggcagaaccaggatgcaaaccccagccgcctggctccagactcgcgttcccaaggtcccactacgtttggtcactgcagtgcattctggtatcctggtctttggcagagtccacgtaaaagaaggaggtagagggagtgagagggacttcacgcaataaagtttcctgatgttacactgccaccgtaattgtgtccccgaccagaacctctcccttctcatcctttccgtgatcggccctggaaaaccttccagagaactgtcctccttctcccgggatctcagagaaaattcactcagagttcagtgtccaggtgacccaagctctgaatgcagtaacgtgcacggggagatgaggatgtcaccatgagcaagcctcccagacagcatccgggagcaaccccaagactgggcaggggggctctgatgcagcccacggcgaggagggctgcccgtgctgcctaaatgtgttcagaatgaaggccgccctcccagctttaacccggggcaggccacggagcctcccgccgcccctaccccgcgtccccagcacccccgcgctcccggcacccccggacccccgcgcccgcgtcacttactcctctgccgtcgccacc

SEQ ID NO: 465666 - DNA, 1000 bp, Homo Sapiens
ctgtgacaggtgcctcaccactcctccctcaaaactcaccttccctcatgggctttgtgctcccaaagctccccttggggtgcacgtagcggctgaggcacaccctgagctcgaaccagggacaccagggtccccgggtcccagtgcagggactgatgggaagacactttcgtccgtggggaatcaggccgcgcttctctgcagcgaagtttttttttctctgccccaggtgcctcgccttccccttatgggctttctgcccaccttggggtaacactagtggcccgaggcgtaccctgggatcaaaccagggacgccagggacctcagtgccaagcgaacgggctaaggagaagacaatttcctccgtgagggacccaggcactgcttctcggcggcgcgtttctttactttctctgcctcaggtgcctcaccttccgctcatggaccatttgttcgctttctggtaaccgcaagcggtcccgaagctcaccctgggctcgaaccagggtcgtcactgtccactctgcccagggtacagcataatgggaaggcactttcatccatgggggacccaggccccgcttgtctgaggcgaggtctcctgttttttttctgcccctggtgcctcacctctattcccacaaacttcaaattcaactcatgggccttctgtccgagttggggtacccctagtggcccgacgcgcaccctgggcgccaacgacggatgccagggtccctggggaccagcgcaagggctgatgggaagacattttcgtcagtagatgacccagaaaccgcttggcgatgcatttttttctctgccccaggtgcctcaacttccccccatcagcctcctgtctctctgcacctgcgccggcgccgtgctcttctctgcgccgccaccgttgctgggggatgggtccctgagacttggcgaagtaggagtactggactcgtgcacaggccctgtctcgcaggttttcaggtgcgcttggc

SEQ ID NO: 465667 - DNA, 1000 bp, Homo Sapiens; identical to SEQ ID NO: 157555

SEQ ID NO: 465668 - DNA, 1000 bp, Homo Sapiens
ccaatgctttataaatttatttgcaagaaaataaattctacaaataaaaaatccaaaagcaaccttgaaaacaatttttgatgaatatgtgttagttaacatggttgataagaattcttataaatcacaatagtccaattattgagatgggtaaatgacacttcccataagaatatgaatcaccattaacaatgcattttggtcaaagttctttgtctttcaagaaaacttatgtggctgtgtttcaaagaaaataaaaatgaaaaacttagttcttccccaatatcagtttgtctctgaaatttcatgctgtatcaacaaaataactcacactggctgttgaatttttcttcctcctcagacattatcaggaattacacaaaacagcttgaaataatgaaaaagatattgtctatccacaaaacctaatatctagcttacttacaatctaagatttctctatttgttatttactataagacaaaggcatagtattgtctctaattaccacagctgtttgactgagatacaattatccgcatctacagactagaaaactgaagcttacagtacttaataacatccctaaagaccccagttacctagctacaaattccacaaaatttaccccaaaaatccgaaaattgttttgctacaaagtctacaaaatctactttaaaaatttaccaagtctttgcactatagcacattatctcttcctcaatcatgctgacctttctcaggccaaaattctctttcacctctcagaaagcttctaggaagggctgactttctcatgggcagatggtcaggacgttgccactctccccttctcccaagagctcaagacagaagaatggacacaaaagctccaaagagaagaaaccatcatgtgtatagatgaggacattattgtcaacatcaaaaaactggatttcttctaagtcagcatccaggaaaattcccacacggcgaaggcgagggcttgcaggaattctct

SEQ ID NO: 465669 - DNA, 1000 bp, Homo Sapiens
ctaggagtgcactagcaccgagtgcaaggagccgcccttgctttcggccgaggtaggggctgtgggctccagcagagaggcaacgggcgaggccgcggccgcggagcacacggtggatggcgccggaggctgctgcgaagccgcggggacagtgagccccggctgcagcgcggacacgggcggcagcgcaggcgtgggcttgatgggcaccggcatggcaggcaggctctggcttgccgagtggcacagggacttgaccgggaccccgaaggccccatactccgggcctacagggactccggctgcggctgcggcggccgcggcggcggccaccgaatccatgacgccaacgtgcggccacacggagctgacgacgttgccaagctggccgggcacggggtagcccaggtggtgcatgacggacgccaagggcagccctccagcctgcagcacgcccttgtagtcccggccaataatgttctcaatggcaaaggggtgcttgaagcctgacgtggacgccgcggccgcggcggcagcggcggcggccgagcccagcccgtagggtgggaactgagacaggcgtcccacgctgcccaccgcggctgccgcggccgccgccgccgccgccgccacggccgccgcctcctgcatcttgccggggtgagacggctgctgaggctgcgactgctggggcggttgctgcgggggctgtgacgggaggtgcggaggcggctgcggagcagtaggcggttgctgatggaaatagtgtaccatgtgcggcggcggcgggggcggcggcggcggcggctggggtgggtggtggtgatggtggtggtgtgcggcagcgtggtgatgatggtggtggtgggggtggtggtggtgatgggggtgaaggtgccctcccggaccggcgcccggcgcgctcttggtgcttcccgcgtgcaagtgagtatggtcggcgcgcagcaccttgaagcgcttgcgacgccgcaggaagctg

SEQ ID NO: 465670 - DNA, 1000 bp, Homo Sapiens; identical to SEQ ID NO: 336010

SEQ ID NO: 465671 - DNA, 1000 bp, Homo Sapiens; identical to SEQ ID NO: 336011

SEQ ID NO: 465672 - DNA, 1000 bp, Homo Sapiens; identical to SEQ ID NO: 336012

SEQ ID NO: 465673 - DNA, 1000 bp, Homo Sapiens; identical to SEQ ID NO: 157556

SEQ ID NO: 465674 - DNA, 1000 bp, Homo Sapiens; identical to SEQ ID NO: 336014

SEQ ID NO: 465675 - DNA, 1000 bp, Homo Sapiens
tttttttttttttttttttttcctggggtcagagttttaatcctgggaaaaagaatctggccgctgggccatgccctgggactagcccgctggtccctggtgtgtccgaatcagtgctccagtgcccgcctcttctccagcttcttctgtagctctgccgtcatgtctgccagcccggctgtggggaagagaggctgggctgaactgactggcagcttcctgcccaagccaccattaaagactttgggctctggcttgggtccaacgggtggctttggaagcttggcaggaggctttggcaacttctttggcttcaggatgactggccaactagaggaagccacatcttggttctcatagtcaacagctgggccatctccaatgggggtcacgtagttctcttcctggttcggtagtgggggcagtgggggcagcttgtcctggctagacgcaggtgacagcggcttggggccacctgtgcagggtgcaggacctgggcccggagcggagggcgccacccacacattctcgccattctccttatcggcttccacgtagcctagcaccttctcgtagtcctcgtctaacaggaatggcaccagcgcctttttggtatgcgacacgaaatagttgaccacggcgtccagggaggtgcaagagaacggctgttccacatcgatcacgtacttggggccctcccgcttcaccttgtaatgccggaccacgtgcgtcccgttgtgcatctgccgcgtggtgaccgacacgccgtcggcgccgtccccgctgggccgcagcagcaggttcccgcactcggggtagcgctccaggagcagttgtgcctccagccggctcaccttcaggaagcacgagggtgtctccagtgcacggcgcgcctcctctttggccaagacttcagacatcatgtataggtgcccaggaagcagggtcaagtcggtcgggacacggagctccaccaccgttaagatgaagcctttccaca

SEQ ID NO: 465676 - DNA, 1000 bp, Homo Sapiens; identical to SEQ ID NO: 336015

SEQ ID NO: 465677 - DNA, 1000 bp, Homo Sapiens; identical to SEQ ID NO: 157557

SEQ ID NO: 465678 - DNA, 1000 bp, Homo Sapiens; identical to SEQ ID NO: 157558

SEQ ID NO: 465679 - DNA, 636 bp, Homo Sapiens; identical to SEQ ID NO: 336018

SEQ ID NO: 465680 - DNA, 1000 bp, Homo Sapiens
tttttttttttttttaaaattaaatgtaaacaaacaatacatttaaaaagcaataattagaaaaatagtaggaataagattttaaaatacaatggaaaaaaacaaattttaaatttgccaaaaactctaagaattctacaatcgtaaaatagatttctcaaagtgaaaacagatacgaatgaaatatttaatgaaataccaatatttaaaatacaaggaaactgaaagtaataagcgacgcgaaacaagaaagaaacataagggaaaaagagaatttaaaaactgacaaccagcaatgaaagcacatcttaatgtatttttattttctaggtggagacgtttggtaactgagaatcttttcaaggaggagaatccaaaaagccttctgctgctatctaaggctgcttagctccacagatccgtgaacagcacgcccagagtacagagaacgcggcaaaaccaacgcgaagaatccactccaggcagtctgagaaacccgggaggtggcgccacggctggagggcaggaggatggcggcgttccaaaaggcacccgctgtcacagacctcggtgtcctgctgtctgtcccagggatggagaggactgctccagggaagctgctggagcctgagtctgtcgggttcctctgcctgccccacctcttctacgggtgcctcttgctgcttctgtgtccccggccaactgaactcagtgggcttcgctgtacttggttccaaggtgctctggactccaggagagagtccgttttgccagtagactccgggcagccgccagcaagggctggaaagcagtcccaaatcacagctgtccagtgagtactctcctagtactggatacaaaggaagaggccacggcccacgatcttctgaactcacaataggtggaggctggggctctggcgccacctctgcggaatcccaagcccgcttcacacagccaagaaaatgttgctccatccctcaagcctcagaccaacgtt

SEQ ID NO: 465681 - DNA, 1000 bp, Homo Sapiens; identical to SEQ ID NO: 336019

SEQ ID NO: 465682 - DNA, 1000 bp, Homo Sapiens; identical to SEQ ID NO: 157559

SEQ ID NO: 465683 - DNA, 986 bp, Homo Sapiens
ttttttgggcttgaccatgaaacatgtgctttattggggagaagcaaaagaataaacacacttgctctcaggataggaaccaccatctacatcacagacagcaaagcgagattaggcaatgatctggctgctcatcttccaacaacatatcggttttcagaactaagccttttctctgtcaacgctcaagccagacagaggttagggaagatgcagcctcccactacagctgaagggaagatgatggagtcctgggagtaagaagagccactggatcttgttgtttcatggtcctgatgaattctagtgatgttacttgctcttgggtggatacttctgctggcagggtgggtatggttgcacaggagggcatttatcctggcatggtggaggtgggcaatgctcaggtggacaaggaggaggcaggtaaggctcagggcacttcgggggtggacatggctctgggcactttggcgtggggcacacaggaggtggctggcagggctgcttgcactgctgctgctggtaagacatctctcctcagtctcagagaatcagagtcttcaaagatctctgatgatgtgttgttgccatggtaatcctgctcagtacgagaggaaccgcaggttcagacatttggtgtatgtgcttggctgaggagccaatggggcgaagctaccatctgtgggattatgactgaacgcctctaagtcagaatcccgcccaggcggaacgatacggcagcgccgcggagcctcggttggcctcggatagccggtcccccgcctgtccccgccggcgggccgcccccccctccacgcgccccgcgcgcgcgggagggcgcgtgccccgccgcgcgccgggaccggggtccggtgcggagtgcccttcgtcctgggaaacggggcgcggctggaaaggcggccgccccctcgcccgtcacgcaccgcacgttcgtggggaacctggcgctaaaccattcgtag

SEQ ID NO: 465684 - DNA, 904 bp, Homo Sapiens
tatgagaaaaattcaatataatttattaaatagattccgagggctcccccagggagcattgacaactcttagtacaataaatatcaataaattaacatagctgccacctcccaccctcacgagggtataataagtaagacttaagcctgcagaagaaaagcattccataaataccaagactaataacaataacctaatgtttttcaaggtaattcacaaattcacatctcagccctcccgggactagcccatatgaggggtccctgagattattcattggaaaaatgtacttaaggaatcacggcagagttcccacacttagctgtcggtcatctttttaaggctccttaagttcctgccaatccgaaaggaagagatggccttaagtggtggcctgttgggctccagaggtcaatgattttagtgcgaggtccatgcactctgaaaactgttgagaaatagtcaggatgaagcgtttacattcatgggtgtctgttggcacagaaatgtttgtttctggtgcatcttgaaatatgagtttgtcgaggtgctctatgatctcatcaataacagatttgttgtctagctgtctgattgtcttgagatatgcccggatggctgggctgtggatgttgtttggcggctgggcgtcagggctgagacacggcagcgtgtaattctgggacacgagcacgcccttctcttcctccacatctttcaaaagcatcttcgagagggactgtaattcctcgactattttctgtacatcatcacttggtcgtagtaaacggacgggcaacgtgtgggaggccagccagcctcccaggcagcagaacagaaagagcacagacgtcgaggggcctgagtgagaggccatggcgagagagagcaaggccagcttcag

SEQ ID NO: 465685 - DNA, 1000 bp, Homo Sapiens; identical to SEQ ID NO: 336021

SEQ ID NO: 465686 - DNA, 1000 bp, Homo Sapiens
gagactgagttttgcttttgttgcccaggctggagtgcaatggcgcgatcttggctcaccacaacctctgcctcccgggttcaagcgattctcctgcctcagcctcccgagtagctgggattacagacatgtgccaccacgccaggctaattttgtgttcttagtagaaacggggtttctccatgttagtcaggctggtctcgaactcctgacctcaggtgatctgcctgcctcggcctcccaaagtgctgggattacaggtgtgagccaacgcgcccggcccttggcctgatcattgtaaagcctgcttccactttcccatctcctttgactttgaccttttgtatccctgtttcacttattaggaccttttaaggacattgtgcccacctggatcacccaggagacgctccccaactcaaaatcattaactgaatcacacctgcaaagttgcaaagtccttttagctgtgtaaggcactgtattcacagatcctgggggcgaggacgtgggggtctagagacgcatatcttcgggggccatgatctgtctcctatattagggacatagcagaagtcccactgaccagatagaggagacttaatagagtgacgaagaaactgtaaaaagctaagtgggaactcaacatttttctgctcacagctctcaagggaaagaccaaagtcctccccggtggccttcaaggtattatatatcacccctctgacctcaactccccctcccctttgctcagtgggccccaaccacaccagccccttcctgctccctggacacctctaagccttttccggcctctgggtttgactttccctcctagacccatctgtccttggagtctcatctccgattccagctcaaatgtcatcttctctgagaggcccaccgcagtggccccagtgagagagtatcctctctccccgcctcccaccacatggctgctggtcactctcctataaggaatcatctgaaattatctgct

SEQ ID NO: 465687 - DNA, 1000 bp, Homo Sapiens; identical to SEQ ID NO: 336022

SEQ ID NO: 465688 - DNA, 1000 bp, Homo Sapiens; identical to SEQ ID NO: 157560

SEQ ID NO: 465689 - DNA, 1000 bp, Homo Sapiens
tttttttttttttgttgcatggatacattaatttattaattcaacagggatggactgtcatgtaggtggctttggtgactgggtggggacaaggggagatactgtataagctatagccagggcctgcccgtggcagcaggtggctggagggagaaggccacgtcacctccagcatgctgggtgctgattttaatggcctggcagtgaggtgcgtgcatggcagagcctgcagaagaggtaatgccgagagggcagctctgcccacctctaattattgcttgagtctctctggtagtgtcagctgcccgccccagggagctcagtctcctccatcacagtgtgcgctcggggtggggctgctgccactgccagtggggaagaccagaggaggttcccagggtctttgggtcttggagagcagaggcagccccaggcttggaccctgcttagctcctgtccttcctgtccccagggcagctgaagggtgccccagactcaagggtcccatccagaagcctccagggtgaccaaggagcaaactggctgaaggagggtccccagcaccccccagggaggaagcctcagatggtttggtgtctgctgacatggaagcccttgagaagatggtgccctagtggccggctaggcagatgggcagctcaggcccggaaggaggcctttaccacgcggcccttcagtggctgtggtggccggaagttgttcaccatgtggatcctctcatcgtcctccgaggtaaaaagcaggctccggaacttccccatctgcctttcagagatgcagatgggctcccggagcacaatccaggtgacactctcactgagtgggggagtcgtcagagagcccgggtaggtccagtagtgccggctggcaggcaggaggcacttggggttgaagcagctgaactgggctttggtgcccttgaaccggaccatgtagagcgcatctgtcagacgattcatgctggggtgctcgtctcctg

SEQ ID NO: 465690 - DNA, 1000 bp, Homo Sapiens; identical to SEQ ID NO: 336024

SEQ ID NO: 465691 - DNA, 1000 bp, Homo Sapiens; identical to SEQ ID NO: 336026

SEQ ID NO: 465692 - DNA, 1000 bp, Homo Sapiens; identical to SEQ ID NO: 336027

SEQ ID NO: 465693 - DNA, 1000 bp, Homo Sapiens
tcaaggaagaagccagaagaacagcttggttttcaacagcagcaccacccggtccttgacagccttgtcgttcttgtccgcctcagccttctgccacagcgtctccacaatagtgtagtcacgttgatctccaggttctctttggccatcacataacccatcatagagttgtcccaaagtgcctgggctttcacaatctgctccataatggtccacgaaagcagagctggccacctgttcgttgctctcaccagggatgtagtaggtggatttccgtgtctccttcatgcaagagacatattctaacagagatgtcatcccatctccagactgggagcagttaggggagtcctcggggattccaaacattagatttttagagaatgcctcatagaatttcttgtaactctctttgtcttcacagataaagttgagatcctctggtatcaactcatcacagctgtgcacgatgaacacatgaaggacgtagagtttgatggtgtctttattcttattgttctcaaagaggtcaaaaggagcccgataagggatgaacaacaacgccctgaattccaactgaccttctatagagaagtgcttgactgccaagtggtcttcccagtcattagtgtggctgttacagaattctccatactcctgggtgatgtaatcatggtttcttgtccaaatggtcttgatcttgtttagttcttcctgattaatgtatttctctttgatcttctcggttttctttttcttatccttaccactgtcatcctcctcatttgaacccacattttcaatcaaattgacaatcatggagatgtctgcaccagcctgaagagcctccataaatcctttagtctcagacttggcaatggtttccgaattatttatgaaatcaactttgtcatgcaaatgcctgtgtccaccaaagtcggggtgtattcctttgttccagttcccaacaagttcctcatctccatctgacaccacctca

SEQ ID NO: 465694 - DNA, 1000 bp, Homo Sapiens; identical to SEQ ID NO: 157562

SEQ ID NO: 465695 - DNA, 1000 bp, Homo Sapiens
ttttttttttttttttttccaaaaggtaaatctctgtgtattcatgcctaatcttccaaggttgtgtaaataatttttttctaccatcccccatcatttgcatacatttttgtcaagtccaaacataatttgaagtgaggtaggtagtttctctctacttgtgccgttgtccttggggtgatgtcggggcctgtgccctgaacgcacttgtctcctgtgcaggggcagtgccagggctggcatcagtggctggtggagcttctcagttggctattttctcaatctcgtccaaatcatctgtgtccaatctttctatcttcttattaaaatgctcctggattctgttcaggatgttcatgctgtgcttgctgtccaccatgttcactgccaggcccctcttgccaaagcggcccgtgcgcccgatccggtgcaggtaggtctcattgtcaggattcccgtccttgtccacgggaagatcaaagttgatgacgacagacacttgttcaacatcaatgccgcgggcacacacgttggtggtcaccaaaaccttctctttgccctctcggaagcgctcaatcactgcagccctctgttccaccatcatctccccactcagcagagccacctggtggccttcttttgagagctctgctgccagccaactagctgttttgcgagtatggcagaagatcatggcttgagcaatggtgatggccccgtagaggttacacaaggcctggaacttctcgtctctgctgctgcacaggacatagtactgcttgatggtgtccagggtctcttcctcacgcttcagtttgataacgtttgggtctgggaccactttctgggcaaacttccacacagagtcttcaaaggtggcggagaaaagcagcatctggcagttcctgggcagcatcctctggatgcggatgctctgatcttggtggccctgagtggctatcatgacatcagcctcatccagaacaaacaccttgatttt

SEQ ID NO: 465696 - DNA, 657 bp, Homo Sapiens
tttattcagggagtgaaaggaaagtgacaactgcacaggtggtggaagctcatgcccaggggacagacagacacagaaaacatcaacagaattctctaatggttcccagggagagagctgctctttcttctgaagctctgggagctggcacagcccaggacttcctttgctcagtctccacctcgacagtggcagtatggcagcctcaaaaagaaaaccttttgctatcagagatcatcacaggccgatcacaggctaagaggaaagaagctccctgtgtatccctggatggctttgatgagaagatgcaggtggagctgtggaacgaggtgagccaattatccttatcctttcatgctcctgatgaatcctgaagctgttacttgctcttgggtggacactttggctggcagggtggggaaggtgtcacaggaggacatttctgctggcactgctgaggtgggcaggactgtggacactttgatggtgggcagggctcagggcacttcgggggtggacatggctctgggcactttggcgcggggcacacaggaggtggctggcagggctgcttgcactgctgctgttgataagacatcctgctggagtctcagaatcaggttctccaaggcagatcggtgcttaggtaccaggagt

SEQ ID NO: 465697 - DNA, 1000 bp, Homo Sapiens; identical to SEQ ID NO: 157563

SEQ ID NO: 465698 - DNA, 1000 bp, Homo Sapiens; identical to SEQ ID NO: 160526

SEQ ID NO: 465699 - DNA, 1000 bp, Homo Sapiens; identical to SEQ ID NO: 336030

SEQ ID NO: 465700 - DNA, 1000 bp, Homo Sapiens; identical to SEQ ID NO: 336031

SEQ ID NO: 465701 - DNA, 1000 bp, Homo Sapiens
ttttttttttgaaagtgccctagtcaggtcagtgggcagttcattttctttattttttcacaagctttgaattcagaaataagagccacaacaagttggttgttaagtaaaaatgggagtgattacaaaggaaaactttgtacaaaactttaaaaatctgactgccccgtcaactgcctcagagggaccaggactcaggccacgcaggggcagccatcagccccccatcgtcagccccgaatggggatggggagacctctttctgagtgtgaacctggctcggcctgaagcctagagctggcttgaagaacacacacagaccagaagacagcacggtgagttacaagtgccacggagaccagggtttctgacacaggatgtggaggatgcttctctgcaacctagtgcaaggcttcccctgccattccgagaattcacggatctcacaggtggaggtggggcgagcttctttctagtgtggaccagaggtgggggcaatgagtaaacatcttcactgtaagggttttgggactgcccctcagggcttgaggtctcggcatcgtgtctcagtcagtccttggcgatgtcccctcagacgcactcacagacttgcatacgtaatttagtaacatgcatcaactatcctagaacatctacagggtgcaaaggaaccaccactcagagaatcatggagccagtggagttagaagtggaagggacagaacaagacaatgctaaaacctgtggttcactaggaagggggaatgaaaacaccatgctccgaggtggattcagcatgaacacaactgtggggcaaggaatttccaagcaaacacaccacactagtaccacttcttcctaaacagaaaagggaaagagcatccttcgacttccccctccctccatcagcaccaactaaaactgtgggtttcaaaaacactgacaggaaaagggatggacatgattcccagaatccttcaggctagctcctccgcgcatc

SEQ ID NO: 465702 - DNA, 975 bp, Homo Sapiens
tcagacatactcagaataagaagtgcacacatttaatagagcagctgtgttggtctgcgttcctggaggggtgtgggaggagactggcatccattcgctgctctggaaaggctgtgccaacagcaccaaaaggaccaaggaagtacccggtgccgtgggcggcacccaccaggcatgaggtccaccaactggaccagtctcctcgcccacccactggccacggccaccaaggggctggccaccaacaccgcacccacctgtggggcctccagcctcttggaggcgaggtggggctgtgtgggggactccccaaaaccctcccaccagaacatccaggagtgactcagtctggtgcgagtcaccatgttcaagtttgggaattcctgctatagatcggtcctcaacacactggagccaagaccacattgtaaacaatgggatccagtgtatttctttccttatttttccttgcttccactcctcctccctgtccactttttggtgatctgagacaataacaatgaagaactgcaaaccaggaatagggtccacactagacgccagatgcaggcaccttgatcttggactgtccagcctcgagaaccagggattcctgagtatctgagtgatggaagccggaacctgttcctggctttccttggctgtgcaccccatctctccagctataaaatgaggggtgatgctctgaagacatgaagtgtgagcagcaacctctgggtgattttccacattctctgcccactgtcttccgtaatcttcagggctgtgcccctcccggcagcagcagcacttccctctctgagcagcgttggcagctgagaggacactggtgggctgtgactgctgagccttcccctgaggttcgggcttggagggagccatttccatccagatttcaagttgacgtttggctctgacatccatcttactattcgagaaccctaagacctccat

SEQ ID NO: 465703 - DNA, 1000 bp, Homo Sapiens
cacaaaacaagacaatgttttaattgtaaaactaactcgaggcaggggtgggcgggctggggctgcgctgaccgggcaggaacctggttcttcaggcagtggttctgccagggccaccccgcaggacagggaccatctgtcccccaataagggcaggggctagagtgttataaaatgacaatataaatagacttctagaaaagaggaggctgtccaggtgcagtagtcatttgctgcaggggctggagagggtggggggccctgacctgtctccccatccagccacagaaagggggcgcagggctacgggaaaaggccactcttcggacattcatgatcgacccccacaatggctcagggggagagggggctgggtgtcaggcaaggcgccagacaccccttgcaggctggaggacggggtggctggacctttgcacacacacacatgcacactcacacgcgtgcacacactcatacatgttcacctcttagtgttctctccacccccagcgacccccactgcagacttccagtgatgggagggccgctgcccttcctggagacagaagaacatgggggagggcctgtcccagagggtgggggtcctgggagcctcgcttgctcccacgagtccctgtgtttttctaaaagtcacgagatcaaaactggagttcagtagtagggtctcatctacccccagcaaggagggtggtgccacgcggagcatctcccgggctgggaggagtgggaggcctggccccctactggcctcagtggggcgggggtgacccggggggctctttggttgaggggaagggcgctgggcctcatctggtgcggttctggcgcatgaggggcacgatgctggcaggcggccctgccttggccaggaatgggtgcttcagcagctcggctgccgtggcccgctgggcagggtctcgcaccagcaggcggtccaggaagcccttcagggatggcgacaccttgtgcaggttcttca

SEQ ID NO: 465704 - DNA, 1000 bp, Homo Sapiens; identical to SEQ ID NO: 336033
